United States Patent Application Publication US 2014/0325702 A1 - sequence listing, part 35

SEQ ID NO: 67130 - DNA, 740 bp, Heterodera glycines
aacatgttggcactgaaattcacattgatttgcatgggttcggtgcggaccaatggcaccgatctaagcggtgccgaagtggcggaaataatcaaaaaatgcatttttatttttaaaaataaatgaccattttcagcaacactccgtcgcttacactccgcagcagaaaaaccaattgatgtaagcagcagaagaatgatttcacacttatgagcatgccttggcacttttcaggtgggccgttgcggttggctcaatgctcggcactttccccttctcctggctgtacacccgtttcggcgcccgtttcgtgctgttcggtgccggattggcatctgccattgccactgcgctgattccaattgcgacatcgttcagtttcaacctgtttttggcacttcgctttgtgcaggcaaaaagaataaatttgggaaccgaatggaaagccatcccatttgggcggctaaaaatttctcgaaatttaatcgaattgatagctatgtccgactcacagtattaaggatacggtaccgaccaaatttccccctcccccaattattgtctgaatttctccgcaattcttcaatcactcttttcccacttttccagggcatttcctttgcagctgactttgccgccatgggcatgatctgttcccggtgggccagcctgaagcagaacgcgctgttcatttccgtgctgaggtgctactcgcccctgtccaccaccatcaccaaccc

SEQ ID NO: 67131 - DNA, 490 bp, Heterodera glycines
atgtccaaaaaaagaaaacagaagcaatttgcggaagaattgggcattggtgaaaagacattctaccgatggaaaaaggaatttggcattgaaatggacaaaagtaaattattttatttttaattcttttttaattatattatttaggtggaaatgcgtattcgaatgtagaaaaaatgagtaaaatgaatatttattacaaaatgaagaaagacaattcctccttaagtgacacagaaattgcgcggtcattgaaaatctctttacccaccctaagcaaatggaaaaaacaaaaattatcgtaaattttcataatttctttttagtcttaatgacctaatattgtttcatatttgtaattattagagccccgatttttatgtgctaaaaatcctgaaatatgtatttttccgataaattttttgttatatattgaaagctccagcagagaacttcgaattccaatgaccaattaagaattcgattgtaa

SEQ ID NO: 67132 - DNA, 770 bp, Heterodera glycines
atgggcgattcggcgttggcagacgaagacggcaaccttcacaaaggaggcaaagcatcggcgacaatgttggcatccgtgccattgttgtcaagtgacgacgaactgcgcaatgggccaacactttcggcgccgccgctccccgagggcaaagagaacggcggcggcggcggaatgtgcattttggacacgatgaagccgaagatacatatgatgaagcagcaacagaagcagcaccgaaagatgaacatcaacagcaacaacaacaacaactgttacaataatgcagtgaatggcactttgccacaattggcaaagggtggcatacgataccgtatgcacagcaggtcccagtcgccctcactgttcggttcatcaaaggtagtatggtagacagacagttgtcaatcgtgtgctaattcgtttcgtatgctaccatggaattcttaagcaaaatttctcttggtagagtagaaatttcaaaaaaatttaattcttgaccatagagaaaacttttgacaaacagcaatcatttgattcaaagtgctgctgttgaagagcggataaagaccaagagtcttgattaaggcttattgattgcgtaatcagatgggtgtggtagtgatccagttttttgaaaatattatatcaacaaaattcagcacgaaaatagtttcattttaaatcagaagaatgtgttttctccgttgtaaattctcactccatttttgccctttttcactgacttcccaaaattggcaccaaataaa

SEQ ID NO: 67133 - DNA, 1504 bp, Heterodera glycines
ttgtcgacggacgcattaatttattaactatcaccctccatttcccctttcgatgcgcaactcgtgtccatgcttggcaatgcgacgagggcggagaattgcgcggaatggaccgattggggaccatgtataagcaaagacagcatagaaaagcattcaaattatcaccaaccgtccccccccccccaaaaaaaaggcgtttggcttcgaggcgacgatccccgttggcagcgctcttactttgaccagttgttgccgggcagaagcgggtgccggaaccacatgtttttcaaactgttacgagaacgttggggacaggtgatggatgatgtgggcagtcgggaactcatttgggctgagctcccttggccaaatcgaaattttccgatgctaagatcccagtttaagcattgtcgaactacacaccccatgttcccattattacacgataaaattttttttgggaggccgtaacggataatatgacaaaacaaattagacctttaattgggtctctaattatctctgggtcagtgtcggcttattatgggaagagttaaaattaaacgaaaaatagaaaataaaatactttattcaaataaaagatttcacaattcttaatagttacttaaaaatttcaactaagaaagctcattccaaatgctttcgccaaattagctgaaaaaacatgcagtgattagactcataagtgtcgacctagcaggcccactgtatcgtttaggaaaaaaatgccaaaattttaaaggctgtctccaatgttatggattatttccgtcagctgaccacgagtacaaaacagtgcggcttttgcagttttcagcacagctgtggccggcgatgccatcgacggtcagtggcacgcgctttgttaatgcagtacatactacagtagaaatctctatttgaacaagctcccgatccgggctctttttttaaaaaaaagctgtgaaaggcacaacccacgggaaaatcctggtagaatctcgatcccgtccgggctctagaaaatactaagagaaatactgtaaggcgtaaaaggggttagccaatcaacgatcaggactgttggtaaagagtgttaggcactttgaaaaactcatccgcaacgatcagcaacttttattgctcccatttctttggataaaatatactgattttttgaacaattagttccaatccgatgaatccactgtttgttgccgaacggcactgtgacggtgttgatcaaagtgcctcgtgtgtatcgcgcacaaatggcgccgttgctgctgacgagtgccaactgtggcccaaccggcaaattgcattgccaaatgtcagcgattggatggcatccattctgagaacagtgccatttctcaactgcgtgccgcagacagcgtaagtgtgcatatatacagtatgctactgtaatgcccatataccacaattaacagttaagggcactttgaaatgccgaattcgctcaattaataccggacat

SEQ ID NO: 67134 - DNA, 1704 bp, Heterodera glycines; identical to SEQ ID NO: 38264
  unsure (1)..(1704): unsure at all n locations

SEQ ID NO: 67135 - DNA, 717 bp, Heterodera glycines
atggacgatgcgccaattgacccgcaccgaagggttatcagacgaaacgctgcacaccttctgcataagaaggaggcaaaatatgttttggaaaaacatggactgctaatgcaccttggcacacgtaagacaaccagatttattattgttaggaagaagctggttgggcggttaaaacgcggaaagcggggattgataagatccataaaagaaagggtggatgtgcctcggtagatcaatggtagagatgcccacgcaaatggtgcacgagtgggttcgattcccacccgaggcctaacatttacttatttcttattcaaataagatttatttatttttcaaattttgtttagctgtctgtgaatggcatcttgatttgatcaagaaagggatggctgaacaagctgaaagcagcagaaaaggtgaaagccattcaattaatgaagggatggccgaacaagctgaaagcagcagaaaagatgaaagccattcaattgacaatttattcaaactagaataaaaaacgctgaaacaaaacgaacaaagtttaaaaaaaacatgatgttgtagaattgaaaaagagctttcgaattttgcatttttagtccatatttcggccatttttggcaaattttctcaagaacaatgcaaaaaaagcgaaaaatacacccctaaaattcgattttttggaaatttttaaaaattacatccccaaaa

SEQ ID NO: 67136 - DNA, 574 bp, Heterodera glycines
atggtaacacgtattcccatttattttatgatgttaataattcttattcaccaaaattctggtaatagtcagtttatttcagggtttctttatgttcttttttctaagaaatgttatgatttgggggtagtgtcttattttcatctaaaagaggaaatttctgaatttggctaatttctaacaaaatccattaaaaattttaaaaattttccacgcacattcacccgagttttttggaaaactgtgccgcaaataatgttaaaaatctgatttaatggatccagaatgtctgatatttatggtttgtttatctcctccccaaaattgttaaaagcgataatgggagacgaaaaatataataattaaataacatttttgatgaataatttttaaaataactgatttgaagcaatttcgcaaaatgttcttattttttaccctaaaaaacaaaactcatagcaatttttctacgcttaattatataatttattttaaaaaatattaaattatggattatttaaatcgcactttttagcgcattgggacatttgaggataattttgggaaaaataaa

SEQ ID NO: 67137 - DNA, 432 bp, Heterodera glycines
atgacaaatttcggactggccatttttgtggtgtcaatgcttactatgccattttctgacgaaggtgaggatgatgtcggtgccatttgctgtttaagtcgttgtacatatgccaatatttgttcgccattgaaatttttgacgcgaattcttagcggattcattccaaccgttatgcatttgttcaatcggcatcgcttacataatgtataatctatatatatttatagaaatatagaattttatttctatttttatactttttttagattataagtcaaaaataaattaaatgtttactcaaaatgtttattttcacaaaagaattctcatggtaattaggtgctatttacaaaactgaatgaataattttgatgaatccactctcaatttttaaatttttatcttatatttaaattttatagtatatta

SEQ ID NO: 67138 - DNA, 447 bp, Heterodera glycines
tcacgcaacagcccggctgacccgacctttagagccaattcttttcccgaagttacgaatctaatttgccgacttcccttacctacattattctatcgactagaggctgttcaccttggagacctgctgcggatatcggtacgatcaggcaggagattcaaatagcttccctcgcattttcaagggccgtgtggagcgcacgagacaccacaggaaccgtggtgctttacgggcgcaacatccctatctcaggctgagccacttccaggcacgcacaccctaaaccagaaaagagaactctggctcggactccacacgacgtctgcgagttcatttgcgttaccgcgcaaaacagctcttgcgaaccgtcatttccctagcctggcgtgggaatgttaacccacttccctttcggcaaccggatggaccaactgcgcaagcacagaa

SEQ ID NO: 67139 - DNA, 412 bp, Heterodera glycines
atgacccaacaccttttgaaatgcgaaattgaaagcgaaacccatcccctgctaatccctatcgaacagtatgccaaaaaatcctttttttcctggggtccggacaatccgtcagtgaaggacaatccgtcagtaatggacagtccgtcagtggataatccgtcagtggacaattcgtcagcaaatttttttgagcaatgataaaaaatcttgctaaaatggttgttaaatttaataaatacaatttcttttatattcttaacatttctaattatttttaattcaattaattgaccatctcgagaaattatcatttaattcttttaaaaatgattaattcataatttttataataacccaaattattaattcatatttttagcgacttaaattaatttttacatgattacaa

SEQ ID NO: 67140 - DNA, 1331 bp, Heterodera glycines
atgcacttcgaagtgatcagagacctttgcgagaacattcataaaaccgatgagatggttcagcagaaatttgcaaaaattataaaaggtaaaaaaataaaattagaattttattggcattttaattgaaaaaataattttaaattggaaaaggaaaggggggggggaggcactctatttcttaaaatagatttgttaaaagtgccgcttttcaacaaaatgccgtcctttccccccgtccctttttggcattttaatttaagggctaactgagagcaaagaatgtcggcagaatttgaattcatttttgaaaaaggaacaaatcaaaaagattttcgaagtgattggaattccatttgaagaaaaagactttgaaaaccctgaacaaaaaatggaattttcatctgatcaatcggaagaaaaaggcaaagaaacgcagaaaaaagggaggaaaaatcgacgggataaaaatgggcaaaaaactcaaaataaaaatgaggaaaaatgggaaagtgaaaaagaaagtggcgaaaaatggacaaaaaatgaggaagaaaaaatgccaaaggaagaaaaagaaagccaaaaagtgccaaaggaagaaaaagaaagccaaaaagtgccaattggagaagaaaaaagtgaacccgtcccagaagaagaggaagaagaacttcctaacacaaaaggtgaatttaaaggcctttaaagtgttaattaattcatttgattaagaattttgtgatgaaaattttatttttggagtttataaaaaatattttatggaaacggaaaaaacggaggcggaaaaaacaatcatttgggtggacataatgacaataggcaatgaaatagaaggacaattaaaaggcattgaagaaatgaaaaagttaaattttataaattatttttattttatggacggaaaattattggaaaatttaaaagaaaaatggcaaaaaattccaaaaacaaaaattgaaaaaagaaattacgaaaaattaattttgttaagagaaaaaatgctcgatattttaaatgaaattttaacactttgcgaattgagagaaaaaaatggacaaaaaagtgaagcaaacgcagagaaaaatgaaaaagaatatttattgggcaaaatccatcgaaaaaatttaacaaatgccatcaaaatgggcgaatttgaagaaaaatggaacggcacggcaaaggacgaaaaattaatgaatttattcaaaaataattatttaattacctcaaaattaggcaaatttagaagcgatgcgcaaaaaatgacgaaacaaattgaaattggtagtgaaatattaaagaaaaaa

SEQ ID NO: 67141 - DNA, 1561 bp, Heterodera glycines
atgacgaaacaaattgaaattggtagtgaaatattaaagaaaaaataaaataataatttctaaatattaaaaatattattattaatttcagagcaaattttattcgatcgaatgatggccaaagaagcgggaaaagaattggccaattgcttaagcccatccttcgccaaagcgacgcagcaattaattagcgacgaattggaccaacaaaactcacaaaaggtaattagcgctaattagcaggttaataaatgaattttacggaagttagcttgagcaatttgtggaggaaagggcaattaatggccaaaggacggagggaaagtcacggaaaaagcgcgaaaaacgaatcaaagcggcgataaacaaagtgaaaggaatggtgggcgaatgggtgagaaaagggaaatgaaaaaagaatcggattaatatttttaatttaattaaattaattaatttaatttaaattaaataattaaaatttttaattttaattccatctttcagtcaaaccatcaggccaaacttttgatttcgggctcctttctgctcggactgaacacaaccgattcggacatcgatttgatttgcgttgtgccgggaaaagcgatcgaaaaagaacacttttttggagagccaaacgaaatttgtgttgagagggaatgtgaaaagggcggcagacaaaaggacactttggcacaatcattttattgccaattgtgtggggtaattaattattaattaaataattaattaattattatttttgtaaaacattcgaatttaaaatatttttcacaaatgcatcagaatggaaaagttggcgatcttctaaagatcaccaaaggtcaaatagcgatgatcaaattcactttcgatggcatcgattttgacatttcattggtggcaattcccaaaatggaaacattggcacagcgaataacggacagaacattaaagcattatgtaaacaaattttacaccgaaaattttgaacaccgacagatgcttcgcgttttatcgagtaattaaaaaatcaaaaaatattaattatgtgtaattaattattcaattaattaattagctataattgatttaggttatctctcaaacgttcacattgtcaaattatttgacgagagtcagaaaaagatatttattctaaacgacgatatttacgatgaaaaaataagacaaaatggcagaaattatgaaaatttgcgttttttgactttggcagtgaaattgtgggcaaaaggtattaaattaaattgtcctttttcaatttgcaaattatttttgactttttccagccaatttcatttactccaacaaatttggctttttgaatggcgtcattttgacaattatgacatcaaaaatcgtgcttctttacccgaattcgtcgttgcgctttttacttctcaagtttttcttaatttacgcggcgaggttaaaaagaaatgaaaaaagaaattaattaaaaattaattaatttaatttttgaaaattaaaaagagagagagaaagagagagccaatgggtaattaattaaccaaaa

SEQ ID NO: 67142 - DNA, 84 bp, Heterodera glycines
ttccgttcccgcgacttcaaccgcgaccgttggtggcgagattggcccactgattggccccggatggacacaattgtgccaaga

SEQ ID NO: 67143 - DNA, 321 bp, Heterodera glycines
atgataaattcggatgattggccaacaattttagcgacaaattcaatgaattttgttgaaaaagtgagagaattttccaatttacaaataatttattgcccttttcagtacaaaacttttgtcgcaattaattgtcttggtcaaaacggagctttcgtccgcaatttttgccaatttgtcgaaggtcgaattcgtcttcagatgacttatgacattggccacagaggggcgacgacgaattggcacatttacccggcactattccaagaaacatgccaaatcacacacaaattggagcaaattccagcaaaatttcggtag

SEQ ID NO: 67144 - DNA, 1255 bp, Heterodera glycines
atgatggacgagccaatcctcgcggtgatttcgctgacaatgtttatcggctcttatttggctggatttattccgttattcttttcgcttaatgaggtgctttttggtgaagaattagtatgaacaattcatttctagaggaaagttcggatagcgagcattttcggcgctgggcttctcgttggcactgctttttgcgttataatccctgagggcatttcttcacttgccgctgcatcctttgtccaaacgaatgaccgtgaaattgggaaaatgtctccggaaaaaacggaagacgcagcctcaaatttggtagtggacgaaaagaaaattaaaacggaagggttttttcattacaggaaaaagaaaggaaaacgaatgaaaaaatgcatcggagaaatatcaggcaaaattgggatgagaatgagcagagaaaaggggcaattggacaagggaaaacggcgagagaccggcggaagaaagacgcaaaggcagaaaaagtgccaacggcagacgaaccgcacaatgggggcgaagaggggggacaatggcacgaggaagggacacggcggaccgatttcgaaaggttgaacggaccgatcggcgtctctctgctggtcggctttctgtttatgcacgtcattgaccaactctccaaactgtcccacagccgtcagaagggaatgcccaccctcggccttgtcatccacgcttttggtgcgtttctaccaaaatgagtgttcttaaataggtgtccgcttttgttttttccaagtgcagccgatggaattgccatgggaagtgcgtcgagtgccggttctcaactcgaacttcaaatcctcgtctttgtggccataatgttgcacaaggtcagttagtctgtcctatccaatcaatctctacaaatgcggtgtttctttaggcgcccactgcttttgctctgattagcattttgctggccagcggaatggacaaagcgcgagtccgtcgccacttactcattttttcgctttcgtccccaattggtactgtactcactttcatctttctgcatacggtctgtgctgggggtaccaaaaaagaaagagataattaattggttctttcctttcagatacaatcgtcgtcttcggatgactctttgagcggcgtccacgaagagacgacgccctcccaattcaccggaattgttttgcttttctctgcaggaacatttctttacatcgcaactgtgcatgttctacccgaacttgtg

SEQ ID NO: 67145 - DNA, 1354 bp, Heterodera glycines
atgtacaataccgattccgaaagcccatccgactttgctgccagcacccgcagaatcgagcagtttctgttcgatgatgccacagccaagcacttccagccaattgtcattgaaaaagacttccaattcgtaggatgggtgggtgaaggggaagtagcaagaagtccaccgcatcggcacattcggaccgaaaagcgattggcacagcgactccaacgtcattttgagttggacctccaaacatttggccgtgtccatggaatgtctctgttgcctcagttcatttctctctgcttcctcgaagagagagaacattctcgacattccgggacgttgttcagcgaacagttcatggagtgcataaagacgcacgcctaaaacatccgaatattggcaaaaggcacaaaaattgttgtttcatttcacattaatgcacatgcccaaagggtgcgccaaggcgaggccatgtccattgaagcagggaggggggggggggggggcttttaatggattttttccgaatattcaaattattgagaaatgataatacttagtttaccttcttttattcttcaacattactacctcgggacccattccccaaatagaaaccgttcccaaagtgtctaccttcaatctgatgaaaacaaggaaaatgcgtcctgtcgatttcgtcgcgtctgtacacatctccaacaaccaagaaattgtctagcccttgcttcaaaagtctaaattggtgtgccgaagtgtgcgcacgtaaacaatagtcgcggttgacataataagtgtcggaggcacgtcgactcggatggtcggaagggattagcagagagtcgaaattgtcaaaaatgctcaccaaccgaggctcatcctcacaaacggtgaaaagtggagaacttccacgaggctttctcaaaaacaatggtaataatggccaaccccaattaatcccaccggtaattagtgtcaaaaaaggcgatgattcgccgcttcaaaagttccaaaggatttccattctcacggagcagccgacggctcaacaaagatttgaccccttcggaaacattaaacaggtcgagatccggcgaaatgctgagaccatcgagttcaaaaggcacggaaggaagccccttgccagtgggagaatgaatggaagcaaattgtgaatcgggaacacccgcagaaaaagcacttaaaaatgagaatgaaaatagagcatttcctaaaaatacagacgcatgccagccaaagcattcacaaagctagtcttgcaaaaaaaaagttcaactcacttgaaatggatgcagcaacacactctaactcttggccacaataaattagaaaatttaga

SEQ ID NO: 67146 - DNA, 308 bp, Heterodera glycines
atgcgagtcatttctcaaaatcacaaaatgatcagaaggaaattctggaaaacagtagtgagttggagaagcagaaaaaggtaaacgaagggggaagatttatattaatttttgtggaattttaaatatatttatttatttatgcctcctataaatttaaaataaattttttaaattaaattaagatgaatattttcaggtgcttttaaacttccgacaaaattattgggatgctgaagcatgtcacgaggacctcgaaatttctggtgacaattctttgactgtttaccgaaagagaactaatttgg

SEQ ID NO: 67147 - DNA, 812 bp, Heterodera glycines
atgaaattaatcactttgctcttatttataaatgttcttcaattcagcgttggcacagacaatcaaaaagggccacggattatttatctgcaagagccgactgttcaccaaatttctcctagtcaattccgcaattttgttatagaaaataccacagatcccgaatggaaaggtgaaaatgttttttttaatttatattttattttaatttgaaattttagcaacaaaaaatgcaaatgaagcatcatcatcttccataaacatcccaattaacattgatagtgacagcgatgatgatgattatgatggtttggacagaagagatgcattaaggacaggaggcccattgcttttggactttttcaccggaaaggcatatcagcaaaacttaagcaggcaaaatcttggagaatattcaaaaagcaatttacttgacttgtcaaatcaaccaaataattcgaatcaaatgattttaccggctgtgagaaatcagccaagcaattctgatcagaccaagcaacggagtataaacgatgattccaatatgcttatgcgagtaaatccagcgaataatttgccagaagtgatagcttcagtaaccaattctcagcagcttactgaccagaataatcatccgttgacggaaaatccaactgatcagtctgtaagatcaaatcaaaacaatcagcatgaaattcaagaaatattacatttaccaatgaaaaatcaacaaaacaataaaagagcagcagcaccaaattcacgacaagaatatggatttgatctggagaaagtgccaaaagcaaaaaagg

SEQ ID NO: 67148 - DNA, 634 bp, Heterodera glycines
  unsure (1)..(634): unsure at all n locations
tgctcaaaaaggagacggacaattcgctgtcggggcgncagggcgtcaaggnttgttgggactctatccacgtgctcgaagtcaatgagaagacgaaggtacgagggatgggacgaaagcattggatatgtgtcactaactataagtttctctctctccgtccccctttccctccctaaaacagataaaaccgtaggaatttaaccattttgaaaagttggtaattcatcatatttttacgaaattaaggcggcgaaattcgccaagtacaaattgaccagcacggtaatgctttggctgcagacccaaaacccgacaaccaccggaaccattgacctcggcggttctctgacccggcagagcgagcaagactgtgcagtgaatgagcagaacccgcacttggcaaacatcggcaaaatgatcgaagttggccacaattgcagcgactctcctcaaaagggtgtttaaacaggaccaagagagcaaaatgagggcgacactgaacgaagtgtattttggaaaagctcgtcagatcgtcggcgacttgcgctcggtggagagcaccgcggaactgaagagcagaggcgaattgggtgggcgaattttgattattcgaattaatcacgggcattgt

SEQ ID NO: 67149 - DNA, 822 bp, Heterodera glycines
atgaagccatttatgtctaaaaagagcacgcttgtgctgatcatcgttgtgctgctgctgatcatcggggttgcgctcgccatcgcgctgctggtcactgcttctgctgaaaaagaaaccagcaagagcccgcttgatgtgctggacccgacaccgttcggcacagtgcggtgtaaaggatgcacgtccacaacatcgacggcatcctcaacatcaaccacaccggcaccgacgacgacgacaacggcaaagccaaacgaagaacaccgatcggaggcgattccggattcgacgtcgctgttcaagctggctctggccctcgctgcagccattttctatgcactgctgagtcgccaaccatccaaagactattggctgcagccgacggcaaaagaggtgtgttttaaattttaaatgaattgattattgctgtaaatgtaaacattttttgacaaattctgttagcaaatctcactcaaaattttttccggcggcgcctatcggcaccgcggggacccgccctctcccaatgtttcaaaaaagttttttgaaaaaacattgccataaaaacagcgatttaaaagcaaaaaatttaaaatacagaattttgggactcagaaaattccaagaatcccccttgaaatgaaaatttttaaaaatttcctcgaattcgacttccaaaacgaaaatacaaaattttatgggtacatagtttttgcctttttcatatattgtcatttacagacactcatccgatttggagtgcaatcgacgacatttccgattccccattgtgttgaaaaggataaattctaccaatga

SEQ ID NO: 67150 - DNA, 934 bp, Heterodera glycines
atgacaaaaaacagtgctccaactcccgttccaccgatgggtcaacaacaattgcaaaattacaccgatcctaaggtgaaaatagctaattcttcatattactatgtacaaaaggagagtggcctgttttcactcatattttttctatgtaaattaaaaaatgaagaacttttagttttttaatttcttacaattatagaattttctaataaaaaaagtttgatttttgtttaaaatgaatttctttcaaaaaaatttatttaacttaaaaatacgaattttttttgtttttatttttttaatttaaaactaaaaaaaatttcggggaaactgatatggggaaggtgtgttttatttgttgcttataaaattaggcttatttaatggtcatgcatatgacagcaaagtctatgtattttaaaccaaatgattttcagcagaagcagccaaggaaacgcagcagtcccggctcattgtccacttcaagctcttcgtcaatcatcgcaatcacctcaacttctcctaccgctgttcctgattcagtttcaccacctttccgtcctctggaggtatgttatcttggccattttcaaaacagtacgtcaagtggtatgaccggcactaataaaattgtcaaattccaacgttttcacatttttatgttcaaaggttttttaaataacaaacgaaagtcaaatttgttggttgcattgtataaaccttgtcgcttttttgtccatttatatcgcatttcctttccacttttttgagttattttgcaaatttattgtcagagagggccaacacttcaaaaaaatcatttgtaagaaattccgaaattttttttttaagacaactgggcctactaacagcaaagccactaaattgcataatgctgaagaaatgctttgcaaggctgacaatgagcagaggc

SEQ ID NO: 67151 - DNA, 553 bp, Heterodera glycines
atgccaggaaacctgttgcttcagtttgggtgttttgcctttgtccgtcaactccattggtttgctgttctcgtcgggagttgtgctggttcgatttatgcccgccatgcgcgcttttgtccgctgctcgcggtcgcgctgaaggcgacgacgttcagcacttaattttacataaacagtaacatgttaagttcaagttttgttaaattaattattgtcataaacctagtttgtagctcttcagcaactgtaggccaaattaattttatttttcccataaatgtctaaaagctgagaattaaatcatttttaagatttgtgaacataaaaatatgcatgcagacaaaaaatgtaatttgttaaggatgtatatgaaaaccacgctatgtgaagcgtaaagaaaagcttcaaaaaaagtttcaaatatcaaaattatttgtagtttcaattatcttggcgtactgttattagttccaaagaatttttaattctgtataagcaacactaatttgtaaggctttcattctagacattttattgtgatttttgtgaa

SEQ ID NO: 67152 - DNA, 883 bp, Heterodera glycines
atgaaggtgagaaacaattttaaatgatattgaaaattatttaattgtctataataaatcaggtgacggtccccaagattttcgatttgggttttaagggggcgggggggggtgggtattacaatggaaaaaatagatcggtctgctgtttagttttattgcatttggcatggttttttggaattccaaaaattagttatcaaactctttcccaaaataaaatttttttttctttatttttaatttatgatactcctaatgcctattataattaattttttaatttcagtccacctatgacaaagtgttagctttattggaagagaaagaaggcggaaatgaggagcggaaacagcgggcggaagagttgcgcaagcgcacaaccgaattgttggcaaagattaagcggagtcgggaagagaaaatttgtgagctattttttattaatttattttttgctttttaattttttagccctgattgaacgtgctgattcattagacgtggaactgaacaattttcacacctcaattgaggaactcagtgatcagattgatcaggtgaccagcgaaattgatcgacgcgttgagttccatgccacatgcgatgcctaattaagaattcccatcattttgtttccacaattttgcctttttaatttataattttaaaaaaacgaaaattaatgtttaattgtttgattcttcattctttcttaaaattgttgcttgtaaatgggtgaaatatgtcaagcaaaaagctatgtattgccagaccttgtatgcaatttttgtttgttttgtatttcgtatgtacttgtggtcgttaaatccaatgtattccaatcccttacttcaaactaatttttgattgactgaataaa

SEQ ID NO: 67153 - DNA, 1331 bp, Heterodera glycines
gcgtgcgacaaacaatcgggccaatgcgagtgccgtgaacgtggcatcactggacgccaatgcaaccaatgccaaccaggattttggtaggatcagcttgcttcccacacacgagaaaattaaaaaaaaactgaattttgtatttaaagttttttttcgatttgtcaataactttttttatttatctaatttttattagaaaaaaatcactatgaaaaatttttttcattttttataaaaaaaaatttaaggtaggaaaacgatgcgggggtggaaaaaaaagcaatttattgaatatttgtccaggaattttccggagtgtcgcacctgccaatgcaatgggcacgcgtccatttgtgatcaacgaacaggcgcatgcattgactgtcgcaaccttaccgatggcacacattgcgaacggtcggtctctctcttccgtcccgaatcaaaccattcccccccccccccccaaaaatacgctaatcaaattaattaattttaaattcaagttgcgtggacggttactacggcgaccctcggcttggcatcaacttgccttgcaagccatgcccctgtccgggtgggccgggctcgggcttccaacatgctgactcatgctatttgacgccaccgccgagtccgacagtcacatgcaattgccggttggcgtttgacaaactaactaattttcaaatggatttctctcgctctgtgtactgtactgtattgatcaattttgtaggtctggctatgctggcgagcgttgtgatcagtgtgccgtcaattattggggaaatccgcgcgaaatcgggtaaaattattggatttgattctttatcacattcctcagcatattataattcaatttgaacatgtttagcggctcctgtgaaaaatgtgactgcaatgggaacatcgatttgaatgtctgtgattttgcgatgctttggaaacgaaaaataatttatttatttgattctttcctgaaaggtgccggagagttgtgatgcgacgactggggactgcttgaaatgcttgtacaacacagacggagaccaatgtcagcattgtgtggacggattttttggcgatgcgcaagcacgcacatgcacacggtggggagggggtcggggcgggagtaatttggcgaaatgtttttaacggacatttttcaaatctctcttacagttgcgtttgcaataatttgggcaccaattcgagtgctggctcttgcgatcgtgtgtctggccaatgcccatgctttgccaatgtggtcgggccccagtgtgaccagtgcgcaccgctccactacgatttggccagcggcaaag

SEQ ID NO: 67154 - DNA, 805 bp, Heterodera glycines
atggttgcattgattggcgacaatgtgccgttttttacccggaagcgacatgttctggtgaaggaaagtgccattgtccggccggcatgcatccccagcatggcacgtgcgtcgagggcgaaattattggtgaaaaattaaaataaaaaatatatatattttttttattaattttaaacaaaaaatatttgaaaaaattaaggttaaattaaaaaaattattttttatttcaagaatttttttcaagaggaaaaaatcaaaatattttaacaattatttgattgatgacaaataataaaaatttaataattaaataaattaaagtatttttaatgaataataaatatttaaaaaaattattttatatgaaataaattattgaaaacaatcttaaaaacttatttattggtatcacatttttataagtaacacacatatttatttatatttacttgtattagtttaatttaattctaaaattaaaaaatatatttcaaaaatttcatttattataaacattgcaaattagatttttacaatttataacaataaaaaaaggtgtccaacatgaccaacccccacaattgtcgggccgcgtgccgttgctgccaccaagccaaattgaccccggaggcgacaccccgcccattgttgttggcattgccccaggcaaaaaaaaatcaaatttttatttttaattaccttttttattaaatttttagatggcgtttgcagctcagacagttcatgcgccggataccctcttgcattgtaaatattatttttgtacattttaggaaataaa

SEQ ID NO: 67155 - DNA, 1124 bp, Heterodera glycines; identical to SEQ ID NO: 38294

SEQ ID NO: 67156 - DNA, 56 bp, Heterodera glycines; identical to SEQ ID NO: 52733

SEQ ID NO: 67157 - DNA, 893 bp, Heterodera glycines
  unsure (1)..(893): unsure at all n locations
atggcattccaacagatgggccatgcactcaatgatgccgatatcaaagccatttataaacgtgttgacaaaaatcaggacggcaaaatcaacttcaagggcatgttcttgaagaaaaaatcaaatcaaattatttcagaacttaagtatcttgcttaatgagagagttttttaatttgatctaattttattaggtcttttatattaatttaattaattaatttcaatttgatttattattttgttcctaggatttattttgagtttttgcgcgttgtttggtagttttggctttatgtcaacacctctaaaatatttttttatattttttgggtaattttacgtactgaacaggaagctctaacaaaaattccgtaatattaaaaatttcattaattgcatttcgcattttgccgattcaatcttgggaccataaccacggaagaaagtttcttcacctagatcacttaaaatgcatgtgttagcttaaagaaagttcagaatcatgttcagtaattaaaattagcctagaaaattaaaaaatatttcagtggtaatggcaaaagccaaagacacccattcaataattaatttttaatttgccaattaatttatttttaaatttttggcatttttttaaaattaattttctataatcaaaacaacacatttcattttaagaattttgtgagatgatgacccgaggaagcactagcaacagtagcaacagcaattcatgatgataaatgaatgacggaagaaggaatacaccataaattgtccaattaacttaagccaattaatggttgcttaatttttccggaaaacacttanattggcctaaatgataaagattaattaatcggaattaaaatcaaacaaaaactcaaaga

SEQ ID NO: 67158 - DNA, 722 bp, Heterodera glycines
agctattcccgaaggattcggtctccccataaatctggttgcatcggttcggggggactgccccgaaaacaaaaaaatcgattttttcaagtgtccgtttggggtactcaaacatttatggggagcaaaaatccaacgcagaattaaagtacagactatagggaagctattcccgaaggattcggtctccccataaatctgggcgcatcggttcggggggactgccccgaaaacaaaaaaatcgattttttcaagtgtccgtttggggtactcaaacatttatggggagcaaaaatccaacgcagaattaaagtacagactatagggaagctattcccgaaggattcggtctccccataaatctgggcgcatcggttcagggggactgccccgaaaacccaaaaaaaaattttttggataaaaattatttaaatgaactgactagataatatttaaaataggttatttctcttcctttcagtatccctgcaaagtttggtgcgcttctgatcagtttctgaaaaaaaagttaagcctaaactttttggcctgtttaaaaaggaattaaaaatttttaaaaattttattcatctccctttttgatagaaaaagcatcagagtgcctaaactaacatgtaaataaaatttggtgcgtttcagaaccctttctgaaaaaatatttaaaaattaattttgcaaaaaataaataaaaacgaaagact

SEQ ID NO: 67159 - DNA, 534 bp, Heterodera glycines
ctgtttctggccatcacttctctgttcctcaactccatctgctggtggttctttgagccctcgtctgaccactttcatggccactgtaaggcactaaagttcctaattaataagcaacaccctaattactagtggctagcgcgagagccttgattctcacttgagaaatttctcggatttttgcttctcgttctcagtctatgttttcagtttcggaacatgagaaatttttacaccgttaaggatgaccatagggggaggagtcgctggcgaagggggaaaagttgaaaaaattttattcacaaaattaattaaaaatcgcaaaaaaatatagaaaaaaataatttttttttgactgagcggcgcaaatgtcgcagcgaaaagtcgtaacacgactactaactgcctcccctaattacccactcttgatccgtcctttgatcagttgcgcctcgactggtccgcttcagtgatgtccggcattttgatcgctgtttttaatgccgcttacatgacatcggatcccatttgcgg

SEQ ID NO: 67160 - DNA, 972 bp, Heterodera glycines
atgcctcctcctggcatgatgcgtccaccgcatggctctttcatgcttcctcctccgccccccggcgcctctgttggcgatgagccgccaaacaaacgcccgcgcgaagaaacgctggaaccggaagaacgttggcttcaaaaggtgagcgccggtctccaccgatatttgctaaaacgaggaaaaaatatatctttaattgcttacaggtccacggtcaaatcgctgtgcaaatcgctacgccgcaaaatgatgaatggaacctgaaggggaacacagtacaaattcagttggacatcagttcatcggtcagtcataagttaggatgatcaagcaatgcgttattagcagggctttttgcaagtattattttacgggttttaatttttcaaattttttatacgtgcttttaaaaactttttccacttttttaaaaattaaagctagttttttaacaaattaatgactattttggggcttgcacataaatcgatttgtattcaggtcactgcgttaaaatcgttaatccaagagcagatcggagttcctgcaaccaaacaaaaattagtctacgaggtgaacacaaatttaattcccattttaagtcatttgcattaattggctaacgttttgttttcccatttcaacagggcattttcatgaaggacagtcagagtttggcctactacaattttatgccgaatgcttcagtgcaacttcagttgaaagaacgcggaggacgaaaaaaatgaaatgtttttttgggaagtgatcacagaatgatgaatgaattggattactttattggcacatttatttgtttgaactttaaatttattggtaattagtaaaaatatggtacagatcacagaatattataaccaatccagaaaatatgatattatagccactctgaaaaataggccttttactacggtataattaagaaaacataaattcaaaaaaaataaa

SEQ ID NO: 67161 - DNA, 368 bp, Heterodera glycines
atgcgtgccgcgttagctttttacgaccgcaccgttcgccaccgcttcgccgatggttcgtcgggaggcgaagcacagcgcgaggaattgaaactttgtctcaatgtgctggtttttcctaaaattgttttagctgcgtgttcatttaaaaattccattgtttttatatattttattttgcagcaattttatcgtctctgttcatcaaattttaattttacgacagttttcagtcattggtcagcactttggagagcgctgacgcggagagagaggcgaaatgggaacggctgaagcaatttttgagggtgtgcggaacggccgcaatttttgccgttttggcatttctgttcactttgtattggccg

SEQ ID NO: 67162 - DNA, 83 bp, Heterodera glycines
atggcacagtttgtgctgaagttgcaaattcgagagcgcgtcgacgacacggaagcagtgtttatggacattgaagaagcagg

SEQ ID NO: 67163 - DNA, 942 bp, Heterodera glycines
atgggttatgcttataggttccggaacatttacagtaatttgatggttcataattttccatattacatcatattcagtacaatctctccggttagcaatgagcttttgttcgaagtgttctatgaggaagaggccaagctcgactcacaatcagcaaactgcgtaagggaacggaaattttgcgggacagccattcaaagtttggccgaacttcgccaagcagttcagcaacaacggcggaccattgaacttcaactacagggacgtccatatatggaagaaaaacaacagcaacaacgaaatcggaaaccatcacaacaacaactacagcagcaacaacatcagcaggaaatgtatggtgttctggtgatcaaggtaagaaaaattcttgcaattttgtcaattatagaactcagaaaattcggaattagcacttggaaagtgtctaaacctaaaaacatgacccacaatggcgttaatcaggttaattgtaatggcaatgcctccaaatacaatcgttttggtaaatcagaaatccgctttcaaaaatgaaaataggaatccactaacattctttattaaggccagcaagaaaaatggcacaaagtgatggaaaacataaatttataggcttcgctcagcaactgtcatggcaccaaccgagccttggtaaaacaacattcaacagaatttgtgggcacgttggaaaatggtcatcattatcatcagccaacgcagcccaccaaatcatgttcaccatttgcatatcctggtgacaatcaacagcatcatcccccgccattgtcaccatcaattaaaaagtactcaacgaccggttccgaatcatcatcaacaattaaacggtcattaacacgacaaaaacaacactatatatacaatgtgacagacgacgaaggccattcgccatcatatgatcgacag

SEQ ID NO: 67164 - DNA, 853 bp, Heterodera glycines
gaattgatagaaaataagagatacctcacttcaaaatcgtataccgaagactatgttgagaaacggcaaaatactaactcaatggcactcaaacgaaattttaatgaaaaaatgccaaatgggagaggcggacgaatgaaagacaaaatgccaatggaaatgaattccccaaggccaaggcgtaggaatggcactggtagtcatcgtggtgaaacgagtcaaaatttgggtgaaaaattccgacatgaaagccgagcagaccaaacaaatggtggacaaaatgccaaaatggaaagaagcgcaagtcaaaaccgccagagacaggttagaacagtggttggatatcgtacacttgacaaaacattttcaagtttttggtactgtccctccccatccattttggcattccgtttatccttattttgaaaaattgggtttttaacactttttttcagcgtactgaaatgggcaggcaaaagtcacttaggaaaaaagatgaaatggataaactatggcaagagttgcaagacgatgaaggtacggtaaaaccgccaaatccaaaaaaaaagtcacgaattaagaaaggagcaaaagaccaccatcactaaatgagaaacaattcgacaaactatgggaagattttaatgataaagataaggaagaagcacttgctgtggaaaagaatgcaaaaagtgggaaaaagcatcgaaaatcggcggagaaaaagcgacaaaatgccgaggccagccgaagttccaacgaaggcaaaatgggggccatgaaagtgaacggagaaagtgccaagaaaggaaaaagcggcggagcgaaaacgaaacaaagtcattcatcctga

SEQ ID NO: 67165 - DNA, 3745 bp, Heterodera glycines
ctatacaagtgcaaagaatgcacagatgcatttgctcgtcctttgtacctggcaagccattctcgcaatcatgggtacaatgggagatacaaatggtaaaaatattttgattcttattatctttttttatttgtataaatattcagccaacattgcaattatggctgtgacttgaaggacacatttgacaaacaccggtaataaattttccttatttcgctcagttcattctaaaatcactttttactgtgtatagcaatttgatttcagtggtaaattccatattcataaaaattccaaattaataaaggaaaaataaaaaataattcattagctgttgagatgatccaaactaatgacaatgggcattaaaatattagttgaaaaatctcataaaattaacgtatttttgcaagattctcatttgatcgattatttctgatcagttaggaggtcaagattaaaaatagctgaaaatttaggaatagcaaatccaattgctcttcatgataaaaagggtttaaagtgatctgaacagttaaaatttttggctgtttcctttaaaaacaaattctttatttgtttagtgcctgtcatgtcaatgtgacgccaatcagaattgactttgacgacgaggtgtttgctggctcgccggatccagacgaggtgggtgaaaaacgaaaagggaaaaatagcaaacgaaaaaataaacaaaattttatcctttttgtaaatgttcttatttttgaatattttcacaaaataaaacgattttcagtaatgaaaacattgtcgttcgtctttttaagcaaaaccttatcggttgtttggaattatcaccggctcccataaacatatgaccatgactatatgtgcataaacgaataattttttaatggacaaaaaacataaaaatttaataaaattgaattcggaattaatttgtataaaaaatatccgacactaaaattttcaaacggtaccgacaaaaaacttgggtcatgatgccgtataaaaatatattgtcttgactcaaattaatccgaaaaaattgaaatttttttgattttttaattaattttttttaggtttttgaaactttgatcacttttttctgatcagtttgttggtgagggccaaaaaaaggtcgagaatttatgatagaatacctccacaaaataaaagtggtttaaaagtgatttgaatatttactgtcagaaatgtttccttgttagaaataaattgattaaatgtttgctcaaaaaagttttgcaaataagtccaaaaaataaaattttaattttatcaatttttaaaaaggctcaatcatttaagcgatatgccccccccccccctccctccttgggatagttggcggtcttatcttggagtcaaaatttaagaattagagtcttttttatgctttacaacaaaaaaaatgcaatttttagtaaaaaaacaaaaaaatattttacactttttcagcccaaagcagccgagccgcccaccgaagtgcctcaagaacgatgggtggacccattgccagaaaagttgcaatttcagcagcaggagaataaatttgccgagctcaaatgcaaatactcgcgcgccaatgccaaaggtgattattaaaattaaatttgaaaaattgatcatttttcattatttaaacgactgataaaatcatttacttttttcaatttcaataaaacacgaaaaaaataaatgataaaattaaggatatcttcaaatctatttttaggataataaaaaatatattaatttttaaaaaaataaagtttaaaaatttcttaaatttaatgccaaaatatttcttttcagtgcgctggtataagggccgcaaggagctgttctcggacggtctcaagtacaaaattctgatcgacaagcagtccatcacgctgatcatcaacaacccggacccggacgacagcggcaagtacaaatgcgaagcgaacggagttccgaccaattcatttgtcactgtggagggtatgttttggacggggcggacaaaaaaaagcagttaaacattttccacggacatttttggtttttaatttaatttttaaaatttacttttttatcaaattaatactttcattttatttaaaatatatattttttaaaattgtgtatatttataatataaaatttataaaaatgttttaattttttaaaataattatttcatattaaagaaaataaattattgctttttttcattagataattttcacataattttatatagaatatgttttattaaaagaatgcattttgtttcagactcaccagaccaacaaccattgtcctccaccgcccgtcgcagcgagtcgcgcagaccaaaaagtgccagaaaggaagccgctgcattgaccctcttggacgccatgcagtggttggtttaacaaacaaaaaacgaaaaagaaagtttaattcattcattttattttttagttgcagcagccatttgacgccgccacgtcccaaaaacatggtgagcaaattcgggttttttaaaattatttattgggaattttgagaaaataaattttttatttttaacctgaacccaaaaccaatttttaaaagtgatgcaaaatttttgaatttttataaaatatttatacaaacattttttttgtttttttctcaataattcctcttctgttggtcttgttcctgacaaaagcatccacaggcaaaaaattttttctaaatgataattttttttctttgtaaaaattttggtttaaaattgtccccttattcgaaaaaaaactttaaatatttaatgcataaaaaatcatgaacaggagcggaccgcgtccagtagcggaaggcgacgcgttggcagcaccgcggcggaccggtcggcaaaggcggcagcagcggcttgcgctgcgggcgaagaggcaacagacgaggtggaagtggccgacagtgaggaggagcagcagctgctcgacatgacgacggttgaggtgggaataattttgaggcgggagggggtggggccaaattttgcttcttgccactttttttctctgtgtttttttttaaatttttttttggggatgggtggtgagatccaatggtgccaataggcagacgcgccgtggaaattttgctaaagtgaatgcaatttgctaattgattttatttaaaatttatttagtttttataattaaaatttttgtattttttttatttaaaaaatttattaaataagatttaattaatcaactttaattgatttaatattaataaaacatgcataattatcattaattaacgaatttatgataacaaatattattatttttatccgttttatttataaaatccaaagcttttttagactcaaattttttgtgtttaattttttattacaaaaaacccagaaattaaaatttttgctctttgttgaaataatgaattaatattttccaatttttaggtgcgctgtgcggacgaacggctgctggccaaggcgtcattgaatgtgccagtgcggcccggcccgccgaagccactgtacaccaccgacaaatcaatcatgctccaatggacacgaccgttgcgggacagaggcacgccgatcactgactacgagctggagatacgcgagcgtggcaccaagctgtgggggaaggccaccaccaacgcggagctgtgggagaaagacgcatttggcaatgtaccggacacacgaatcaag

SEQ ID NO: 67166 - DNA, 657 bp, Heterodera glycines
atgtctttaatgatagttttttatgtaaaaaagtaaatcctgagtctataaaaaattatttacactaattacgtcaaatttttttttgacgttcatacggtacaattgatctaccgtattgctagttccctttttgatatttaaatttttttttgtttatttgttttatgcttatgcaaaaatccattcaaatcccgtcccaaaataggccatcacatgtgcgaagccaggctcgggcacgctcacatgcattcttttccgcccgatcaaagtatgcgtaaaatgattaatgtttaaatcctacggatttttggcattctggtccaccaaaaatttattttcaaaaaatgatttttttttaaagaaaattggagggatttgaatggataaagcatgtctttaaaccgaatgttttttgttttagggcgcctcttcaacgccaagaccattcatcggttgaaatgtggttggacaagtttgaacggactcagggtgacctgttgatcatgaagtcggacgaattccgggacaaaacgttgaaggagatctctgatgtgagatttttaaagaacattattagctgatttataatttgatttattgggacattttggggtaaaaaatgtgccaattcttaatttttctatgaaaaataaa

SEQ ID NO: 67167 - DNA, 769 bp, Heterodera glycines
atgaccatgcttttccttttcctgatcactctgagccccttcctgctgatcagccagtggctccttcttgccaaacgtatgcagaatcactgctaacatcgcgacaatccatgatttgccttcgccggtggacacttgcaacatcaaaccgcgcatttccggacaaaatatcttcacaaacatccgcagaaagatggccaacaattgggtgttacgcggcttatgacctgttggaataatggaaaattcaaaattgcacaattttttttgttgatttttttgcctcattcactgccttaccaaggaataccagcaaaaataattaattgtcattattagtttggttggcacttctttattggggcggcccctttgtgttcttcccgctctcttaatttagttaataagctcttccccttggctttccattcaaaattctgtcggatatgaatccagactatccttccttctcccgttatgagttgaggaatttcacaatgttactttacattgtccttacggaataaaggcttttattccatcttttactatttatgctaaatttccatttgataatattgtagtaattttcatttcaaaatatgccattttgttaaaaacgttctcgattttttagggaattaggacaaacattggggcagtgccatgcccatgagagggttttggggcttgaaaatgactctcatacgtttaagaacattaggaagggtagaatgaggaatggaaaaaagatatttgactaaataaa

SEQ ID NO: 67168 - DNA, 103 bp, Heterodera glycines
  unsure (1)..(103): unsure at all n locations
tgtccgtttggggtactcaaacnattatgggagcaaaaatccaacgcagattaaagtacaggctatagggaagctactcccgaaggattcggtctccccataa

SEQ ID NO: 67169 - DNA, 430 bp, Heterodera glycines
atgtcggacaatgggaaagaagcgaaaaaagagatggcaaaagcaatgtaaaattaaattaaaatgccaattttcaatttttaattttgttttcccttttttcagttgccaacctaatcaaatggattttgattttacctaattgctttaattttgctgcaaatttttgtgtgcctttgtggaatatctgtttcctgtaaaaactttcaaccccaacaaaatccacgaatttctttaaatttaattttactgtttttccatttgtatgcttttgcattttgcaaaattttttcgcgattataaaagccattcatcctctcccacatttcctttcatttactcacttttcctttccttttattgccaacatcttttatgacattttatgcaaaaacattcattttttatgtgaatttttgaagaaaataaa

SEQ ID NO: 67170 - DNA, 1727 bp, Heterodera glycines
gagaattggctttcgaaaaagcaattgcatctgacccctattgcagaagtgtggccgagacattaaatttggaagattttggttagttcatgacatactttttgaatttattttaaagacttggtgtaaatttcattgaaaagtatttgctagcgatcgaaagtgactactcggggccccatttggacggggaaatcagcgttgagttcatggaggaaatgatcgccacgttcaaagatcagcggaagttacacacgcaatacgcgtacaaagtattcataattgactgacagggtgatgaagaatgatcactattttttttacagattttgcttgccatcaggaaatatctcattgaattgccctctttggttgacatttcggtgcctgacaaacagaaatttaccatttgcggtgacgtaagtcgtttcttaacatttgacaatgatccaagtacaaaattaaggttcatggtcaattctacgatttatgtaatatttttgaactcaatgggtttccatctgaaagcaatccttacctgttcaacggtgacttcgtagacaggtcttttcattttgttgttcccctcataattttgttcgtgttatttcaggggctccttttccgttgagaccattttcacgttgttcggcttcaaattgctgtttcccaatcactttttcatgtcccggggtaaccatgaaagcgatgtgatgaacaaaatgtacgggtttgagggcgaagtgaagagcaaatacactgcaaaggtctgtttcttctttcttggataccaaatttaaatatcattatttttttatcttatttaaatgacagaatttccaaagatttttttttcagatggctgagcttttcactgaaattttcaactttcttcctttgtgtcatgtcattaattcgaaaatttttgtgggtttttccctttgtatttacattcgtaataaatggcttctcaggtttgccatggcggtctgtttaaagaagacggcgtaacgttggagaaggtgccatttaattctcttatcggaacaacctttgcatttattttatttttaagatcagaaagaccaatcgaaaccgacagcccccggaggatggaataatgtgcgatttgctatggtaaatgctttgtttccgactttttacgctgtcattttttcaggtcggacccgcaagaattgtccggctattcgccctccaaacgcggcgtcggcattcagttcggacctgacgtaacagaacggtttttgaaagacaatgatttgctttatgttgtcaggtaaaagtgttttaaaaatttataattctttcatttgttatgccttttaggagtcacgaggttaagccggaaggatacgaaagccatcacgagggaaagtgctggacaatattcagcgcaccgaattagtgagtttccgttttaggttagggagaaggaaatgacaaattacaaagaaagcatttttatttttaaattaattattgtaattaattgcactttcaaaagttgtgacaccattggcaacaaaggtgcctttatcacattcactggcgaccaattgtacccgcccaaagtgcactccttcgaagccgtgccccacccgactgtccgagcaatgcaatagtaagttaaatggggcggtaattgtgggaaaagccttggcctctctctcccttccttcagtgcctcgtccatgttcagcttcctc

SEQ ID NO: 67171 - DNA, 3291 bp, Heterodera glycines
  unsure (1)..(3291): unsure at all n locations
atggccgaggagtgtgttgcctcgcaacagttttcaaaggctcttcaagtaaaagtttattcaaacactattttttatttattatttctccttagattctccatcgtttatgcattgaggacacaagtgtgttattttatccatttttacgtgaagcattggtttcatttgccaatgccgctttttgttcgctaagtctcaacgaatggacgtgggcattggtgtggttacattcagttcgcattctatattttaaatgcctctgttcagctccaacttctccacccgcaattggccaataaatccgtaactttgcgtgttttttctgtcggcgaaaatgaccaaagcatttggatggaaaatcttcggcgttttctattaggtgatctgaactttctaccgtttcccttaacgagttctgcaaacgatcatcgctcaattttctccatagaacaggtaatattgggagcagctcttccgcccccccccccccgattttcaaaaataccaaatttttcgagaaaatttcttactgattttttttcttgaaagatttcttttagtacctaatttttttaaattttacggggaaatcgatgcagcgtggtgcacccggtaagattaagttagtttatcgcagaattaaatttttcactgcatgaactttcacctttcttagctgaattcattccaaagtcaatggcgccaattggttgcccaatcgtcttcacctctgcagttccaattggaaatgtccaacctgaactactcgcccattaagttcaacgctcgttttctcgttataaattcgtctgctaacaataagcgacaaacaaatgaaaaatttgcttttgacgaagaaatagccgacgggtttcaaattgcaactgccgatgactctcttctgatagaagttagaaaacacaaaatttgtttaatcattttcgattaggttgtgctgtataatatttccaatgttccattgcgctttgaatattgttcattgactctggatgaaattttaaattcatccggtgccaaaaagtcgaaaacactgtccgaatggtctacggcgggaaattcgtcaaaaaattctacgttggtattggttcccaaaagaccaagccgcgttttctttatctacaaaactacatttgcaacatctcttaaacaattgatgcaattgccagcctcaaaggcaccgactagcagatgccaaagtccgttgatggatgaacagaatgccaaggaaattttaataacggtaggcatttattcaaatttgaaaaaccaattgtataattcatcgtggtaaataggagtttgggtggggtgaagtcaatttcgcattgtatacacggaaaaaataaaaagtttcgtctgaaatttttttgattttaccgtcttctgttctcgtaaaccccaattcgattgttagtctatgccgtgtatgcatattatttaaaggtccgacacttttcattgcgtacatcgtccggatcactcagctgggacatcgatcaccgatcgacgagtaatagacatcaccaaaattcaattgaggagatggacaagaacaactatgcagtgaagtaaacaatgttaacaatcagctaacaaaaattaatatgacaaatcatttttatggtgcgaccacaacggtgcaatgtgttactgacctgtccaattttggctgatagcaccgaattggaattatttgttgacgaatgcgttcaattgactttaaccctttgtaatgcggagcgcaacggaacactgctgaagaacatttggtgagcctggtacactttttccgatggcgcttaacttcacctaagataaattgatttcgttaaattttatgagaattgatcatttttttatcaaattgaaaaaaactattttcaaattgaactagtaattactctttacacttctataaagggtaatctgccacaaagtctgccgtgaggatgaagagttcgccaaccagcagcagaattcgcacacactaaactcattggcagcaacaaaatcaccaatccctggcgtcattcgacggacttttgttcttccgtcttgtaaaggccataagcaacagcagcaggtgtccataggcgacgaaaaggacggaaagacaacgacacttttggtgccaatgtntagccaggcaaattatgcataaatcgccacaataacttgtttcatcacacaaaataacttttaggagctcgcttcattgcttgcgcctgaacaatcggtaggttttgccacttcatcttattgttaacttttaaatttcttcagactgacttctccattcggcttcaatccaaatctaacaattgcatttcccttcgcgttcaagtttgggctaaaactggtcccataaaattaccttcttttccaggtttgttgtacccttccttcaaaatcagaaaatgaaggtcaaccgttggaagagcctgccgaattggtgcagcactttcccatccgttgcgttgatcctttcgaaccgaaaatcgcaattttttgtgaaaatgcgagaaatcgaatttcatcggttacgtttggtctttgcattttagggaggaaaggcacaatgtttggtctttgggcaaaagtttcgggtgcaattacaactcaaatgcaacggaagagtggcagtgcataatgtacattggaaattggtcagtcaatttgaatttggagtaaaggattaatgcgttaaatatttattgagaatgacgcatttgaacatttcgacgctattcctttggattctttgataaagcaacacttcgaaaaactcaaaatttcatctgttgactcaagcgaattcctcaacacgcattctgtttgggtgaaagtaacaaatggcgacggccaatcgccaatgagagagacgggacaaagcaatggaggggacgacgagcaccagacacagctcggagacgtggtggtggagtggagcaggttagggggaagagaccgcaccggatttcttaactaatttcgaacatctttagcactctttcctttgaacatgttcgttccgtgttggcattgcccacaatgccacccattttggtcattccgatgacactaaatgtggaattggccaacgagaacgacggggaagagactaatgaagcgattagtggatgttgtttcagaattctgaaaccattccgcatcagatattacttgaggaacacttctgggggaccattggctgtgcatttaaatttcgagcagtctgctggcacttctatagatggaattttggaa

SEQ ID NO: 67172 - DNA, 4543 bp, Heterodera glycines
  unsure (1)..(4543): unsure at all n locations
cttaaggaggaacattncaaggttntgatgctcttgacagctctaaagtcgccgaaagatgcaacttgagacaaagaattttgtcaagctcggcgccgaaggagataacgtcaaatatgatgaaattgtgcaagattgtgtcaatttcatgacgacaatcagcgaagtaaagctgattgaatcatctgcggccaaccgaagcataaatgcagtcaagccaaagtggcacaaaaccgaaaagggaggaaggccaaacaacaagcaaggccaatcatcatccgctccggcacaacaatgttggcgatgtggttggacaaatcacagccactgggagtgtaagcataagtcagcaaagtgccaaaaatgttcccaaaatggacatttggaaggccaatgcgacaaggtgcaggaatggagacggagaaacaaattgccaattccaaaaaggaaaattggaaatttacgaattggaacggccatgaaagtgaactccgcttcgcttttcaaaaccgacgtggcggcagatggcaaagacatcaaattcgtactcgacagcggggctgaaataattgtgatcgatgaactatcacatgaagtcatcggcagcccccgactccgcaaatgcaccgaaagtggatgcatgttcgatggaacacaagtcaaattcgtcggaaagggagtcgcaaatttcaaattccgcaatacaagggcgtagccaggaccttcgtttcggggggggggcaactcaaaaagtcggttcttaggggtgtattttttcgtttttgtaaacctctatttttagtggtgtattttcgtgttttttttaaattgaattgattgcattattttgtgtttcctttgcataaacgcgttatttaaattaaaataaaattattccggcgatgtttcaaaaaaattttttcaaaagaaagagcgcagatgtggggggggggggttgggcgggggctgagacggaatggagcattggatgtgcgaaaaactgaattgtttggccaattttctctccacacattatctgctcgcctgtaccttcaccaatcggctggaacaattttttctgcattgacttgggtcattgaacgccgaaataaacctaataaaattgttttttctaatttccgcctttgttagatgaaacgtaaaaatcctggtcgccaagacattagaaattttttcaatttgccttcgacgagcgtctcgcgtccactctcgacagcagaaaatatattcgagaacaatgctgaaagcgaaaacaacgattttgtcggatatttatcagaaaattcagaggatgaggaaatctcaaaaaagaagcattggaacggccgattcgtttgccaaaaaatttcgacgacaagcactttctccacgagacattggtctgactaatccttttcattttcaaatttaactcgcacgcctatgcatagactattcaaccggtctgaacaatgcccttcaagaccaccaacacccactgccgctacctgaggatattttcgcaaccttaaatggaggaaaatatttttcgcaaattgacctcagggatgcatatctccaaatcgaattggatgatgaatcgagaaaaatctgctcgatttcaacacaccgtggcaattatgaagttaagagacttccttttggcgtgaaatcagcgccagccatattccaatcggtaatggaccaaatcttggcagaatttgaattcgccacagcttacttggatgatgtgatcatcgtaagcaaaagcgtcaaagagcacgctgatcacttgaaaaatgttttggaaaaattccaagagtggggattccggatcaaattggaaaagtgttcgtttttccgagaagagatcaaatatctcggacaaatcatcgacagaaacggacggagaccggacccggagaaaatctcagcaattagtgaaatgcccgcacccacagatgtgccatcgctgcgttcatacctcggaatggtgaaccactaccagcaattcgtcaaaaacatgcgttttgtacgaaaaccgctagacgatctgctgaagcaggacagcgaatggaagtggagtgagaaatgcaaacaggcattcgacaaaattaaggaaattttgtcatccgatcttctgctgacgcattacgatccaacaaaagaaatcgtggttgcagcagatgcatccgaactcgggattggagcggtaatctcccacaaatttcccgacggaacaataaaggcaattgcacatgcttcatcagctctaacaccggctgagaaaaactattctcaaatcgagaaagaaggattggcactgattttcgccgtgcaaaaattccataaaatgatctatggacgaaaattcacgttgcaaaccgaccataagccacttcttgccattttcggaagcaaaaagggagtgcgccagtgcagtgccaaccgacttctccgatggtcgctgatcatcctcgcatacgatttcagcattgagtacatcagcaccaatgattttggtcaagccgatgtgctttcaaggctgatcgcaaagggaaaaagcgacgaagatcgactgattgcatctctccgatcagattcgaaaattgactacattttgatcggatcaattgaagcagtgccaattaaatttaaggaaattgtcgcagctgctgaagccgacaaaaccattcaaaaagtcaagaaatttttgacgaatggttggccaaggaacgtcggagacgaaagtgccgaaataaagctttttcatcggatcaaagaacagctttgcatcacgagaaattgcctgatgtacgccgaccgagttgtcatccccgaaaaacttcggcagaaaactcttcattcattccacaagggacacccgggaatcaaaagaatgaagcagttggcgagaaattatgcctattggccaaatatggacgccgacatccaacagatggtagaaaactgccaaccgtgccaaatggaagcaaaggcaccagttaaaagcaaccttcaaccgtggccaaaaccatcacttccatggcaaagagtccacatcgactatgccggaccatttttcggcaaggaatatttaatcatcgtcgatgccttttcgaaatacccggaggtattcgaaatggccacaaaatcgacagcggcaacaatagaaaagcttcgatatttgttcagccgacacggcatcccggaaattttggtgtccgacaatggcacccaatttacgagcaacgaatttgctaaatttatggccgtcaacggtgtcaatcacctgttttcagcgccgtataatccaatgtcaaacggccaggccgaacgtttcgtggacacgttcaaaagaacatttcgaaaattgaaaggggagggagccccaagcaaagaaatcattgaaactttcttggtaagctatcggacaaccccgaatgactcgttgccaaacagcaaaacacctgctgaaatgttcctggggagaaaaccccgcacaactttggatttgttgcggccgccaccttcacaaccgatcgacagagatgttgaaatggcgagacgcttcaataagcgatttggaaccaaattaagggaatttccgatcggaaacaaagtgtttgcccgccaccgaatttcccaaaattggcaacagggccaagtttcaaagcgaactggtgtgatttacgacgtggcattcgccgatggaagatcagggcgctaccacgccaaccagcttcgtccccgaaagacgtccgactccgatgatcagatctcggtgatgttcgaaaccttcgacatcccaagaccgattgctgttgaggatcagagggaaatcccagtggaaatgccattggaggacccgcatggcgaacaggaaaatttggaaggtcaaattgaccatggacagcaacaacggtaccctcagcgaaatcgccgtccgccgcagcgcttctcaccgtaacctcggaaccgcgcttaaggggggaggtgttcggggcactgccgccgaagtttgaatgatatgacataatgccaatcgatttctgttccatttcatgttccttccctcgcccataaatatgctcccattctcctctaagattgtcttcccttcattcattttgcatttatatttgttccccaaattattgtgactttcttttccttctccaataaataaatatttaattggacttaaacaaatccctcggaccgaacagttgagaattgagaatgaatgttatggaaaggcattgatcgattgatcagtgattgattgggtgggatcacctcttccaaagtgcgttctttgaagaaatcggcacgggcgggcagcaacggagtcaacggatcgccgttcaattccttcagtgagccgcgctgaacaccgccaattggctgaaaaggacaagtgagaaccaaatcaaattggcattggcattggcataccatccaaacggcggaagggaaagtgtgccctggggggaagggatagaaagtattaaggagtgaatgaatgaattcggctcattct

SEQ ID NO: 67173 - DNA, 542 bp, Heterodera glycines
atggatggtccaattgctttcactgacaattaccccaataatgaacaaaccgttattgagccaaatgataaattgaaatttcattgccccgagtgccattacgaaatgtgtcgcaaatacaatgcaaaatgggtggaagagcacaaaattttgacatgcgaacagtttgccaaacaacaaaatgagcaaattcaacgaaatctcaagtaatgtaaaaaataaataaaaatagcatttttaggttctggttgtgccgataggcgccgccgggaaaatttttggtatttttaatgaattttattacaacgtatcgccctttttagacttttctcggagacctctaaattcaggacaatctgaaaattcatgacattttttgatttttcagataggtaccctcaaattcaggacaaatctgaaaaatcagtagactttgtagccctgcagaaaaagcaaaaaaaattcctttaatctcccaacaatttaatataaatattaaagagcatttaatggtttattgcttttttgggaaaaagaataaa

SEQ ID NO: 67174 - DNA, 911 bp, Heterodera glycines
aatggctatttttaatttgtttattctagggaagaccttggtcatcgaacaatcctggggcagtccgaagattaccattgacggtgtcactgttgcaaaggccattgacttcaaggacaaattccaaaacatgggcgccaaacttgttcaggtttttgttttgaatgcattgatttatagataaattggattgacagatttttcatgttattcggtgtaacaaatcattcatcgtttttaactcaggacgtggcaaacaagacaaatgaggaagctggtgacggaacgacttgtgccactgtgttggcacgtgccatcgcaaaggaaggcttcgagaacatctccaaaggttttgactctaagactatcattagaatcggaagaagaaaaaatagaaaccgattggtttctcgttcccgtttttcattgcaaaagtgttagtcgagtcaaatatggcccataaaagccactcaacacgtgtccataaacttcgttgctaaggtgctaatccggtggaggtgcgcaagggactgatgaacgcagtggacgaattggtcaaggaactgaaggcaatgagcaaaacagtgacaactcccgaagaaatcgctcaagtggccactattgcagcgaacggagacaaaaccatcggaaaactgatctcggatgcgatgaagaaggtcattgaaatagcacattgtctgatttaacaattttttgcttaggtcggaaacaagggtgtcatcacggtgaaggacggcaagacgttgttggacgagttggagttgattgaagggatgaagttcgaccggggttacatttcgccatacttcatcaactcggccaagggtgccaaagtggagtttgagaagtgcttgattctgttcagtgagaagaaaatcagccaaatccag

SEQ ID NO: 67175 - DNA, 1223 bp, Heterodera glycines
  unsure (1)..(1223): unsure at all n locations
gactcattataccaacaagttgctgatcaaaaatataaaggcctaacattccccggctttggagaaatatttaaacgaacacgctttttcttgatcaattcacaacctgacttggattttaatcaatttgacatagtcaacgatgttgaaaaagtcaaatttattggtggattcaatttgaaaccaattcctaacgcagaggttaatttttataattttaaaagtagtttttggcacaaaaaaatttaggcttaaaagtgaaaattaatattcttttaaaaatattttaatttatcttttcattttttgaaaaaaaaatatttaaaaaaatatttttataactattattttaaactgttccactaaaataaaacaataataaaatttttaataattttataattaaaatgataaatttttttcaatttaagttcaaatatccatacaatttggactcaaaaaaaggcgttgttttggtcagttttggcactgttgtcaacacaacaatggtacaatcttcgactataattgaagcaattgccgagacgatcaaaaaatttcccaattttctttttatttggaaattaagtcaagggcacccgaacaaaacatttgtaggattaaaaaatgtgattacagaactttgggttgatcagaagaacatattngggtaaaatattaagaaaaattaaacaaatttatttatataaatttatattgttttacatatctcttaaaaatttaaattctctaaattcatttttattaaactttaaaaagcttttatttaagaacttaaaaaaaactttatttaaaattcctattatattaatagaattgttttttatttaaatttattaattatttcaaaatttttaattagtttggaaatataacaaaatgatattgaaggaagtatttaaaactttttttaaaatattttcgaaatattaagattagttgaaaatatttgtggattttacaaaataatctataatttctttatggcaaatcaaaaaacttgaaccatgttacagaacattacactaaaaagattttgtatatattaaatggggcataaaaatgctttactcttttaaacaattttaattaattttagcaaatccaaaaacggtggcatttgtgtcttattgtgggatgaacagtgtgttggagggcatttacaatggtgtgccgatggtttgtgtgccattctttggtga

SEQ ID NO: 67176 - DNA, 1033 bp, Heterodera glycines
atgaaagaatcagttgggcaaatgatcatgaaagagatgaaaaatgagggagagaagtgcgaagaggaaacaaatacggacctcggtccgtctgtcatggatgttgttgagagtgaccagaggagccaaggagttaattatgtgttggaagtggaccaagatggaattgaagtgtttacggagaaaaaccccttaggcaagagacaccgaaatctgagtgaagacgaaaacggtaaagatattgaaaatgagggggatgacgaaggaagtggacggaaaatggttatttgtcaaataacggacaaaatggtcattgcaattcggtttggcggaaagatgaagggtccggatattatcggaattcctgagtcgttcgagctgggtgcacagctcagacttggtgacatcgtgtttgtcacaagttacgccccaatcgagcgcttttccgtttggctctctaatgcatttaggattaatgccgacgccgaggccatgacagtctcatctgttcttcaaaattctttggaaaagtgcatagggattgtcatgagcatggtgaaagaacagaaggatgtgccaaaggcggtggacgtggccttccccgagagtcaagttctccagcgactgtatcaacatcagctggacagcacaattgatttggccaaaattaagcctggagtacttataaatgtcacgttcgtgcgcatccatcgcccttccgacattgccattggtcctaagggcatttacatcacaccagccgattttgagggggtttctgaaagagaattggtcgttcaccaaccatgcattggcacggggattagtggtttggttattggttatgagttccccttttcgacaagcactgatttgaagctatgtgaacatggaattgcggcagctgtgtccggagcactgctaaaagcaaaagcagagatggaggagttcaccattcatacggcgttgttcgtcttggaaagcggaaaagacaatattgtggtgacttttgaacattttgtacaggaaaaac

SEQ ID NO: 67177 - DNA, 336 bp, Heterodera glycines
atgggtgaggcaaagtttctgatcggatttgcatcgctgtgctcaattggtgccatcattgcaacagttgtgatgatgcaaacattaaacatacaaataaatgaggtgaaaatgcgtgtgtttgacggagttcaggtaaattatttcaattatttttaaaataaatttaataaaattcattttattttaaggcttttcgtttgaacactgacacggcatggactgaactgatggaggtgcaaatcagtgttacgccaccatccagagcacgcgaaaatcccacaaagaacgacatctttttgcggcaaaagcgacaggactataacgcaatgccgg

SEQ ID NO: 67178 - DNA, 1282 bp, Heterodera glycines
atggatgagccccgtgtaataggaagaacggatgatgaagaggaggtgatgatcattcgagacgaagatttgcaaggacgaatggaccaatttcatgagaaaactggcgaaagtgacgaatctgatgaagaaaagccgaccggaacaatggcaccagtgcccgctcctcgacggtcgcttctcggcccaatcccaccaattacaacgacaggaggaaaacagctcaaaaaagttggaagaatgagtttaatggcacttttttgcaattaattggcccattggctttagcttccggcaccaccgccccctctgccaacggccgaagaatggtcaacgacgagaaaagcagtcgaatttgcggagccattgcactcgtcaattccgcgttagctaatttgtaaggccctgaaattggattaaactaaaatttcagccagcgaagtgtcctcaagctttgcagatgacatcacttttggcagtgaacggtcatcaattacatcagaagccaacggtgggtcgacagcttcaaatggaacaccaccaaatgcgaacgaccgacaaaagatggagggcgagggggaggaaaagcagcggaaagtgccaaggaaaaaaaggccgacaaaagcgccaattgaaatcgcaccggtgccaccaacgccggcgataagggtcagcagatcagacggagggcgaactgatcacaaattgacattaatcattcaaaactccaaccaatgggaaatagcacgcgtactaatccaaaactgaatcaatttactgaatattagtgatcggaccctgggtggaattattgaggtcgcattgtttgttagctatttgattattcggctgtttcagattcgccctgctgttcccgagtccgattggaacagtgaaagcggcctggagggatcgtcggttgatttagtgcagccaaaaagtgccaatgttcgaattcgaattgggaggctccaatttttggaccattcagcgtctctgcacttttcgcattttgaggagggcggaagagtttttgtcgaatggaactttttggacttttcgcgggaacaatgcgtgacgcgaaacgacgcggaaatgccgcaattgctcacagaatcctttgacttagaccatcagagcggtaatggcacggcaaattggcaattattcaaaataattagaaaaaacgatttcaactcgaaaaacctaaatcaaattcagactacgaattgaatcagaatcaaattgcacttttaactcaatggacgcagctgaacattcg

SEQ ID NO: 67179 - DNA, 646 bp, Heterodera glycines
atgtcgccgaaggcgcgtgtgctcgcctccgttcgtttgccgctttttcctttggcacgaaatcacaaaattcgcggcacttttcctcttttagacagagtagaaaaaaggacaaaaaagtatttgtttttaaatatatcaaaattaggcagacgaatctgtcatttccgaggcgtccatcgatgtgtcgatttattggaaattcgcttatgcttttgatggattcgaaaatttaaaagtcgaagaaaaagtaagtcaaaagaattcatttaaattgaatttattttaaggttccgttgagaacattcgctcaattaactgaacaaaatgggccaaaggaaaacggacaaaggaaaacgcagcgaattgcgggggaaaatgccaaaaaagaggaggcaattaataaaataatgaaataaattaaaaaagtgatgatcagtctaatcagtaacccattaattaaacgtcattccgccgcagggagaagagaagaaaaagcccgaagaaatggcacaaaaaagggaaattagcaaagagcaaaaggcattggaaaggattggcataaagcaaagggaaaccgacaaaacaaaagggtaattaatactaaaatgataattatatgccggaattgccgaattaaaataaa

SEQ ID NO: 67180 - DNA, 1580 bp, Heterodera glycines
atgccaacaaaaattaaaagattaaatggacggatgagcggaagaaattcgcaaaggaacacagtgccaaatgggccgaaaaaggatgaattggacgaattgcacagggccaatcagttgatggcacaaaaggcactaactgatgatattggtactcttctatttttggggccttttttgactttgacaattttaaataataaaaacatgttcccggatgtttccagggtaactctgaccatgaaaatggcacccatttcgaacaattcgaactccgtaacagtattaaacttatttttttatatcccgtatttacgagacaaaccgattcaaatattattctttgccatgggtttgatttcatttcgtttatgtatttaaacttggttttacatgtaaaaatagttttgaaaaattagaattttctgctaatatttaaaatgatgtcataaagtgatcagagagtatgaaaaccgccgggaatgttttgtgactttaaaaatgtcaaaataaactatgcctcaaaacagaaaagtgccgataattacatgctaattttaggcaaattgaataattctaaatttagttaaaagtgttgaagcatcaacttctcaactacacaaaagtcaactcatcaacgagtttaacgggtcgttatcggcccgaaacgcgccaacagcagcaaaaagtggtcattgaaaattaagaccataatttgcaatttctcatttttgttttctaatctcagcagaatcgccccagccaaagaccccaaagtgccttcgttggctccgtcgcgaaccaaacaaaatgcataattagtgaccaagaaaaaaggcctcagcaaatgatgtcgtcgcaattaggacgacaaattaataacagaaaaaggccaattagtcagccggagattgaagaaaagtaacggaaatggaaaagataattattatgaaaattaaaaattgaagggacgaatttgaagaaagcgagcaccaatttgaagttgtgagcagagaaatgacgcaaagagcagacaatgagcaaaacaaacacttgcgattgttggaggagagaaaagagtaaattcgaataaaataaatttaaatatttaaattaatttaaataattaaaattaatttgaataattaaaattaatttaaagaagtgaaataaaggaaaaactgcgggaaatgcaaaggcaaaacagaaaagtgacggacgacaacgaggagttgcacttggccctcgagaaaagtgaaaaggcacgtgaataaggcaattagagaatgttcagatggttaattggtttaatgttaattaagtgcaattgtttaatttcagcgtttgtccgcgcttcgcactgagttcgaccgcgtggcgcgggagctgtcacaagcgcagcgcgaactccgctcgcagtccgactcgctgaacagcgagcgggaggacgcgcaacgacgagcggacggaagcgcacggagtgccgaaatcgtggaccgcgagttggccatcgcgcgggaggagtgccgggcgctacgaaatgcgcacgagcgactggtggaaaagtgagcaaaaataaa

SEQ ID NO: 67181 - DNA, 500 bp, Heterodera glycines; identical to SEQ ID NO: 38332

SEQ ID NO: 67182 - DNA, 166 bp, Heterodera glycines
atgggcgcgccaacgattcgtcaacccagccaaaatgtgacgattcgtcaactcagccaaataagaatttcgagggatgcgaactcgtattcggcaagtagtttataaaaaaataaatatttattacgcatgcagtaatttattttaatttttagtctttatgtaa

SEQ ID NO: 67183 - DNA, 225 bp, Heterodera glycines
atgagccgagaattttcgctccttcaacctgaacttttcgactctagagaggaatacgaacttttcatggcaattcgcggtggccagaggactgccgatttgggacggcgtatccaacgaatgcgcgacgggcttccaccaccgtcgctgtttgaaaaagaccgagatttatggacggtgctggatgaagaagaaattatgtataaggaacgaatgacacttgag

SEQ ID NO: 67184 - DNA, 334 bp, Heterodera glycines
atgtcagggcaaatggaaatggtattcagctgttcccattacccggacatgttacagcgggacgaattggcacttaaaactgggctcgacgaagatcgaattcttgtaactcccacaaaattaatttagaaaattaaaattaatcggatataaattttacaaaatgctttttctttcagatttggttccaaaacagaagggcaaaatggtaacaattttttgcaaaagaaatatttttataaaataagtttttaggagaagagaaatgaaaagcgaagaaattaaaaatggggcaaaaaatggagaaaatatcacaaaatgaagcgaaaataaa

SEQ ID NO: 67185 - DNA, 637 bp, Heterodera glycines
atgtattaccatatatacattattttctatatatttagacgtttgggcactttttcgtacataattcgcaattttggggtgattttgtaagaaaattattctacaaaatttcacaattttttagttttcttaacagttttaaagttttaaaatttaaccaaattttatttattaaaagatttacttctacaccataatttttaaaatattgattttttttacgtgtgtatgaaatatttgattcttcatttaaaaaatctaaaagaaaatataaatttatagtgtgtatgaaatatttgattcttcatttaaaaaatctaaaagaaaatataaatttatagagatcggtattttgaaaaaagcctggacctggacctggattccattttggacctggacctggacaaaaatccaggaaaatccaggtccaggaaaaatccaggctcctcgagacctggatccaggcctggacctggattttttgaaatttgttttaaaaggcaaacaaatgcttgaaaaaatcaattatttgctagaagcatctaaaaatatctaattaatagtaataatgtgtttttaaatttatttaatctgtttttgaaaacttgaaaaaacatcggtcacttgaaaaaataaa

SEQ ID NO: 67186 - DNA, 369 bp, Heterodera glycines
atggcaaaaccgatggaactgcgccagctgcagcaccacacaacgccaatggcagaggaccaggaggaattggacatgacgagcacaaacccaatgccaaccacaacgatgacaaagacaacgacgatagagatggaagaggtggaggatgaagagggagggggagaggcacaggaagaggaagaggaggtgaaagagcagggcgagcgagagggcgacggggaggaagggacggaaaacatcacgcctgggacggagacagagacagagagagagacagagacggatggagagagggagagagaggacggcaagggaaaaggggacacgggcggagcagcagccgaacaatccgcagaatgggccgag

SEQ ID NO: 67187 - DNA, 1449 bp, Heterodera glycines
atgtacggagagtgtatccgggcggcacttcgttgtagagtttgtgcacatgcacgaaaaccacgatcaaatgagcctcccctgaacatagtcgagacaaaagagcctttggaattggtctgtatcgatattttatcgattggacccgcagcatcttcaaatcggtacattttggtggcagtagatcatttctcgaaatacctcgtggcctgcgcgatcccaaacaaaaatgccgaaacgattgcgaaaaatgttgtaaaaaacttcatctgtgttttgggaacgccaaaaaagcttcatagcgacaaagggacggagtttgttaacgaaacattggaggaaatttcaaaaacactcaaaattgagagaacgacaacctcaggatatgatcctcaggcaaatggtgtaacagagcgcgttaatcagacgatactaggaatgctacgaaagtcgacttattcagcctgggaatgggacgaaagactgccttttgtagtgtttgcctataattcgacaccatcagaagtcacgggtatttccccacatcatttaatgttcggaaaaccagccaactttccgttggaacacgaattaaaattcgccgtaaatccgctctacacaatagaccaaaatacgtatattcaactttttcgtgagtccctaatgcaattagtggacgaagcgcgaaaaaattcccaaataagccgtgcaaaaatgaaagaacacttcgacgcacaagcaaaagtcacggagaacaaattccaaatcggcgacagggttatggtcatttttcccgggtcccacattcgatcaccacataaaaagattttgtggaaccattttggcccatttcgtattacggaattgaataaatcgacggcgaccgtaatcccgtccgataatccatacggtaatccaatgacagtccctcttgaacgattagtgcgcgtaccaaaggaattgccaaacatttgtacaatgccgaaagggaaaaacccctataagaatgttttaaatggactgataagtgtggccggattgatttgccaagaaaacttaaaatttgacggggaagaaaaattgaactctaaaccggacggaataattgggcaattgaggtcaattgcatttttaggcggtgaggaggagcaaatggaaactgaacagatggacgacaaagaggcgaagacgaacgagagcgaaaacgaggaaaatgtggaggaaaagacggacgacaatgaggttgacgcgaaccggagcgaaaaagaagcgaatctggaagaagaagaccaaatttcggtcaggaagaagaggagccgaaaacgctttcttggacattggcatgtgcaggagacgggcacaaatgctgttccgatgtggtcgtggccgacttggatgccgtccttgaccgatcaggcattgggctcacgaagatcgagaatccgctaa

SEQ ID NO: 67188 - DNA, 795 bp, Heterodera glycines
  unsure (1)..(795): unsure at all n locations
atgagcgaaattgcgtctggtgttttacgccagcaactggatttgattgccacgcgcactggggaaaataaatggctgacgcgtgagcaaacctctggcgtgcagcaacaaatccgccaggctttgtcggcgttgccgttgccggttaaccgactggaagaattcgataactgccgtgaggcgtggcgtaaatgtcaggcctggttgaaagatattgaaagcgctcggttgcagcataaccaggcgtataccgaagccatgcttaccgagtatgcggattttttccgccaggtcgagtcttcaccgctgaatccggcgcaggcccgggcagtcgttaatggcgagcattctctgttagtgctggcaggtgcaggaagcggaaaaacgtcggtgctggtggcccgtgcaggctggttgctggcgcgtggtgaagcgtcccctgagcaaattttattgctggcgtttggtcgcaaagccgctgaagagatggacgagcggattcgcgaacggctacataccgaagacattaccgcacgcacgtttcatgcgctggcgctgcatattattcagcagggcagcaaaaaagttccgatagtcagcaaactggaaaatgataccgctgcccgtcatgaactctttattgctgagtggcgcaagcaatgcagcgaaaagaaagcgcaggcgaagggctggcggcaatggctgacggaagaaattgcagtggtcagtgccagaaggtacttctgggatgatgaaaaattacagcgtcgccttgcctctcgcctcgatgcctgn

SEQ ID NO: 67189 - DNA, 824 bp, Heterodera glycines
atgtggacggtgagttgtgtttggcattgctgattttaatttgaacttcaattataccagtgtctgatatatccccttttttagattaacaacttttctttttgtcgcgaggaaatgggcgaagttttgaagagttcgacgttcaggtttttcccttttaaaacgtttttttaattaaaatttttaatagaatattttttgggttcgtgttcattcttaaacctttgggctgcatattatttgaaaatttgattggcaaaaatgatttaaattttcgatttttgggttgagtcggttcactcattgcccgtgggacttgaattttggattttgtcacatttccgccttcttacgccgtaaaatttgtccattggttcagtgccggcccgaacgacaagctgaagtggtgcctgcgcatcaatccgaaaggcctcgacgaagaatccaaggactacttgtccctgtatttgctgctcgtccaatgcaacaagacggaggtgcgcgccaaattcaagttttctattctgaacgccaaacgtgaggagaccaaagcgatgggtgagtgacgggcggagggaattgggacggcacagaaattgccatatttttaaaaaatttaatttccaactaaaaataagttaaattgggcatttattacgcgataaaaaggaccctaaatcagcgacggtcccattgcccccctaagataccccacactcgaaattttaaggaaaaatagtattttatagtttttatgttgaatttgcgatttccttgtcggtgtaccccctccaagacttcagtcacccaaattttcaaataaa

SEQ ID NO: 67190 - DNA, 538 bp, Heterodera glycines
atgcccaggccaatgtccagcggaatcactgaggaggaggacgacgaggaggaggaggacgtgctgctggtgccagaagctgaagaagcggccgccatgcccaggccgctcagcggcgacatggaccggtactgctggtgggaggagccgaccgcactgttccctccggcaccgttcccaccgccgctgctgctgcttgtactgctcccgccgccgttgttgctgctctgctgggccatgctgccggtcggacagttggcaatgtaaccgggaccatccgtaacctttacaagggggaaagataggcgatgcacacaaaacacacgaatgaactggcgagatttcgaggtccatcgggaaccgaccccatccccacgggtgcatttgacccaagaaatatgtcgagttaatttggccaactcgtcaagttttgcaaagtaatttggtgttcggtgtggtgaaaacccaactcgtactgcaccgaatcgtgttgttttccgacaaaaaatcgtcataacttttgtcaaaatcgaccaaa

SEQ ID NO: 67191 - DNA, 279 bp, Heterodera glycines
atgttaaatggaatagtgagaaaaaccatccgtaaaaaaccgatacggacccggcctctattcaatcagatttattaattttgttgttttttcagtcgagttcgacacgcgtttctcatgaaattgttttggatgacgatggcgtcgactgtccatccgttgttagagacgaattgccggcgaaaaagcagaagagaatttgaatgaatagaaatgaagaccttttatttcttttcgggtattcgttttgtttatcgttgctcttttttacggtgctca

SEQ ID NO: 67192 - DNA, 487 bp, Heterodera glycines
atggcttccactcatgaaaaacggacagattctcggcttgtttttgtgccattcgtcaccttcgccgaccctcttttttggaatgagattaaccgactgaaagtggaccattggaaattggacgagtcacttaagccaatttatgccacaacaacttttcgtaagttttatttacctaaatactattcattgcaattttatttgcattttttagtaaaataatcaaatttatttaattttgtacataaaatggtttttcttaagagggtgcccagccttctgatgggctcctctccttcgaccaattttccatcgctgccgaaagtggccaaactttgccgcttcaatctgtccaaccgtttgtctctccattccatggcacttttcttttgctaaacacaaaaaaagcattttccgatggttttgatcgaaagaaatttttggaacagtcagctgattcggtaatttattgaattttcataatata

SEQ ID NO: 67193 - DNA, 1082 bp, Heterodera glycines
  unsure (1)..(1082): unsure at all n locations
atgcccgtttcccccgtcttaaatcagcagaagggagcgccaaatgcaaacgaaatcgcgggacgtggcaacgcaaaaggagagaattccgtcagaggtggagccgagcaacattcattttgacaaaaactttatttcctctttttcagtgaaccgttcagtgcaatcaaacggagacgaaggaatggaaatggttggaatggccggtgagaatgggcgaaacattgaaaccgttgaaaaacgattgacaattttcattttcagagattcgctacgaacagaagcaacaggtcgccggcgggggtctctgctgctgctgcataccgtgttgctttttcaacgaatcgtcgcacgaggaaccgccgaaaatcttcaaattcttcatgacaaaaaagaagactccacaacagcctccagcagaagtcgtgcaaccgcaaaactccgttccatcgccaaagacatcgacaaaccaacagcctccagcagaagtcgtgcaaccgcaaaactccgttccatcgccaaagacatcgacaaaacaacagcctccagcagaagtcgtgcaaccgcaaaactccgttccatcgccaaagacatcgacaaaacaacagcctccagcagaagtcgtgcaaccgcaaaactccgttccatcgccaaagacatcgacaaaacaacagcctccagcagaagtcgtgcaaccgcaaaactccgttccatcgccaaagacatcgacaaaccaacagcctccagcagaagtcgtgcaaccgcaaaactccgttccatcgccaaagacatcgacaaaacaacagcctccagcagaagtcgtgcaaccgcaaaactccgttccatcgccaaagacatcgacaaaacaacagcctccagcagaagtcgtgcaaccgcaaaactccgttccatcgccaaagacatcgacaaaccaacagcctccagcagaagtcgtgcaaccgcaaaactccgttccatcgccaaagacatcgacaaaacagctgcctccggtctccgtgcatcagctccgctccgttcatcgccaaaggcccttcctgtcgaaactacacactncacgcgac

SEQ ID NO: 67194 - DNA, 716 bp, Heterodera glycines
atggatttaattcttgccaccgattggataaacaacgcttatcccgaaatggatttacaggacgccaacaaagagaacaaagagccaacgaaaaagcaagaggaggaggcggaggatccaagctggatcagcctgattgacgaggagatgaagcgcgagccgctcgctccaattggtgaggagacgccagcaacaagttgcttttgttttaaacgtatatttaaatttaaatttaggcactccaaaaaaatgtgcatgtgccgaacgccgtcgccccgttccgctcgtggaccatctctgcaagcggttcaaatgcagtgcccatgaactgcatgtgcttttcaaaagcttagagaaacgccgggacattgtggagcatttgcgctccgtccaactgcgcactgcccacctgcgcccgtccgtgcgcaattttccagtgcgttgtaatgacctgtccatcctggacacccactcggcccccgcgtaccgaggctacctcggcataacggtatttttatttgttttgtttgtccgtaacaaaaaaattaaaggtccggatgcactactacataaagcatggcatccgcttgcgccaccccaacttgccgtgcgtcgttgaatttggaggcggagatcacaaaacttttttccctcttgaaattttgtccattgttttgtagatgtgttcaatttccaattgtactgttgtttttaaa

SEQ ID NO: 67195 - DNA, 1386 bp, Heterodera glycines
atgccgaactcaacaaggccctgcagctcggctatgtggtcactgacctttttgaggtagtcactctttaaaatttttttgcacaaaataccaattaggtttgggactacgacgagtgggacggcacactgttcagctcgtacgtcaacacatttgtcggtctcaaagtgcaggcgacgggctggcctgaaggatgtgtcacggacgagcagcgtcaggcatttgtggaggactttgagcgcaccgagggcatccagctggaccctgccaaaatggaattcaaccccggcctgcgcctcatcgccaaaactttggcaaactcactttggtcattaataataaaatttatttatttttaaacgaaaaatttacaggggaaagctcgcgcagcgggtgggccgaaccgaaattcgctacacgcggacgccggctgaattccacgagctgcttgaagacccgtcgctggacaagttggattttgtccacgtgtccgagcacatggaccgctgtgtcgtgcggaagcgccccgagtttgccaaggccccgctgaccaactgtcttccggtcgcttccttcgtcacttcatatgcccgcctgcatctgtacgactacattgagcaggtgttggcgattgacggagctgagctgctctactgcggtatgctgttttttcacaaaacatttggtgtacacgcttatgctttagacacggactccatctactacgtaaacaagatgggtggtccgtgtgttgctgagggcgaggcactgggccagatgaagcgagagcacactgatcgcagaatcgtcgagttcgttgcgggtggtccaaagaactacggcatccggcatactgcgcgggacggtacggatgagcgtgccaacctgaagatccgcagcttccgcctgtcgtacgcggcccaacagttgctcaactttgaggcgatgaaagagctcacgctggccacgtacaacattgacggaccaatgtgagttttgcaatttatcattaagtttgtaaataataaaatcttagcgacgacgtgctggacaatgacgacctctacgtgttcggaggcggtgagcatcgcgccattcgggtcaacttcccacatattgaccgcaacgcttacgccgacctttacacacacgaggcacacaaagactacaggcccttctacgcaaaggggcgtgtccgccccggaatgcagacgcgtccctttggctatgtggaggatgatggaccaccgaacgatggacaacggacggagcgacgaaagagaaattttgttgatcatgaccccgcccaaccagggcattccgggtggttttgatgttgtctttttattttttgttcatttcattcaaataattgtaaataataaa

SEQ ID NO: 67196 - DNA, 803 bp, Heterodera glycines
atggcatcggcatttctgtttggttggtggtggcgcgggaacgtcgcccgactcgatgatgtccacccgacgtccgttgtggtatcaatagaccttcacccgctcggaacggtgttggacctggcagcacaaattatcataattaatctaatggtgctaggtcatttcttaaattacggcactaatgggcgtttcttaaaccggccaaggggtaggaaaacaaaaaagtaacaatatgttagtcatgaaattcaaaaaatttgcttcagaatttttggtgaggttttttttaaatcaataattttttttgaaaataatatttatttgaaattctaaaaaacatttagctaataatggttttgaaaaaatttaaaaagcattaaaaattaagtctcccatagttagtggttgttggtgtaccgtaccttgcaggacagtatgacagaggtagcgtcaaagtcgaattggtcggacagttccacctttggcggccctttcagcaacagcatgtggtgcaatgattttggcgggaagccgtacacttcagcgacacacttaaactagccaaatttgacaattttcaattttttaaacagcaaaaataaattaattttcaataattcttttgcgaaattttatatttaataaataatatgttatgaaatgcatgtctttatttccagccaaaaaatcaccatgtattcgccttctttccagtccaacacatcagtgattgttaagctaaaaatcattaaaaaaatattcaaaaaaaaaatttaatttaattttgtagttaaaataaa

SEQ ID NO: 67197 - DNA, 756 bp, Heterodera glycines
atgggagcaggtgagtcagtccattcgtagcaaactgattgggaactgggaacaaattggcaaaattgtcctgtcaataatgataatcattgtttttacagactttttgatccggtttggattaatgattagagatgaatacgttggcagaggaacatgacttttggtggaaacaaaacgcagaaaattgtgaaatctccagcacgcctcaacatgatggatctgaatgcatctgtagaatttggtaacgaaattgagctcagtcccgttaagctcattgaacccgcccaaacccaggcatacaaaattgcaggaaaacgaaagagaccggtaaaaaggactcgcttcagttttcgggcgccaaaagtactcattgtgcttttagtaatttttcttcccaatgcttttgcaaatcctgatgtgaataaccaaatttcaattcaattcactcctccttcaatcgtttatctgcttattattccgtttctgatttttgtcactattacggtactgctctggtcaaaacggaattcagaccttccaatgctcccaaatctgaatgcgatttcgccgcatcacgccgtcgtacagacattgattaattccacacccgtccgctgcttaatggacactggcgccagtttgactgtcgcaccacgatcagttgcagatgaactcaattgtcggacattttcatccgatttggaggcaatgagtgcctcaggacatgtcattcgcctcaaagaatatgctcag

SEQ ID NO: 67198 - DNA, 243 bp, Heterodera glycines
atgatagaactaatgaagcagttgaagaagcatttacaaattgatgaagaaatcggagaaaacaaagaaaaagaaaaggtggaggaaatgggggaaaagaaaggcaaaaaggaaaaagaaaaaggaaagaaaagggaaaaggaggacaaacaagaaaaaggagagggaaagaaaaggaaaatggagggaaaggaagacaaaaaagaagagggaaaggaaaaggagggcaaaaaaggaaaatga

SEQ ID NO: 67199 - DNA, 141 bp, Heterodera glycines
atgcctttacttgggaagaaaattgagaaaaatgacgcggacccaaggcgacatttggtgggtggcgccgctgcgaaagcgaatgttaacagtgacaacggaaaccattgtggacagagcgacaagaatctgaagaaaacg

SEQ ID NO: 67200 - DNA, 991 bp, Heterodera glycines
aattttaaatggaggccaaaaagattgacccggaaattacgaccgatgacgttaataaattcctagaaaagcagagaacatacacgattcacaagcccatcaggaaaaaattcccgagactaaagacggtaccgagcggcttccataccgattggcagtgcgatttgtgcatatttgaccagttgaaaaagcataacgacggttacaaatatctgttggtatgcatcgacgtgctgagtcgaatgatcttcagtgcaccggccaagtcaaagaagagtgaggacatgattgaggtttttgatcgggtgttcgaaaagtcgaaaattatcccgatgaaaatatatagcgacagcggactcgagtttcaggctggaaaaatgaaaaaatattttgaggaaaaatttattatcaaaaatgtgatgtatagtcctgaccttcacgccggagtcgttgaaagggcaaatcggacaataaaggagcgcttgtacagatattttacaaagatggacactctacgatgggtcgatgtaatagacaaaataataataaacattaacaacagtgtgaataggacattgggggccaagccagtatccgtaacttttgaaaatgcccgggcgctctgggaaaaattatataaggcgaagaaatttaaaatttcgaaaaagaaaaaatttaaaattggcgatatcgttcgaattatcaaggaaaaaggaaaatttgcaaaggggtatctcccaaactttaccgaagaattatttaaaatcgttattgttaattcaacgacacccgattcatacaggatcgaagatttggaaggaaatttaataaaaggcatattttataaccaggaattagtgaaaacagatggatgatttttacattgtactaccgtcgaacacaccggggcaggagaacactacgtcaaaattcacagtacgcctccccgagactttggaattgggcacaaattggtcagtagctctctcat

SEQ ID NO: 67201 - DNA, 62 bp, Heterodera glycines
atgatcaacaaccacgtcaatggggcgaatgacgtcgacatggaaaggaccgaaaacgaaag

SEQ ID NO: 67202 - DNA, 2237 bp, Heterodera glycines
atggaatttgtcggcactttttcggacggacagtcgcccgaattggtgcactctttggacaaattgatggagcgaatttgcgctgcccaacaaatgaattggtttcggcactttatttccaggtggattttccccaattcttccattgctttaatttttttcattcagaggccccgtcgaccaaacttccatcaaaatttctgcattggacggtgccgaacgctacgagctgtttgtggtcgatgaccaacagttgaaaacaatgtgcagttatggcgcgtttatagtgccattaggcaggttggcattccgtcccaattttgggagccacaaaattttgtgaattaaatatccaaacagtctattggcggagcgaacggctcattgaaattccgttgttttaattccatttaatttttattttagggaaaatgattggcttttcgcaactcaaaatggccgcacagttctcagaaagaattgcgaacttcatcgactcgtcgtcgtacggtaacacaatttttagataattttttgcatttttttactctttcgtcagcctttttcgtggtcagagatacggcacggttgaggacattcagagggaattgaacgtgttcattttggactttatgcccaaggcgtgtgccggccaaaaagtaagcgacgatttgtcacggaagcaatggcaaattaaaatttaaatcagcagaatcgcctaccaacggttttccatggctttgtctcccgcttcagatcaatttgctgtcgcttggctctgccgatgtcactgatcaaattgggcacggcttttcaaaaatcagtggcaaatggtccgttgaacaggtcgaagtcgaggggggcgccacgcggcggcgtttggtgttcctggacagtgccaatttgatccaatccgaggtggaggtggtgcgaagtgagtgccgtagcaaaaaggggggatttgctgagaaaaattacttatattgtgactgacacttttgcattatttttaagagtcaaaaaatggcaaccgttggcacattgtgtggtccgatttgtcatgccaacaccacaaaatgatgctctctgcgtttgcacttttgccgtcgttgtcctctgccggtttggcggatgcgttggaggcgccgcttcgcattgcactgctcggccttggcggtattggaaaaataggcttttgcaaaaataacttaaaaatgccattatcaggtggaattttggccaagtttatgcacgacaagttcaagcaggtgtgtgttttagtttgtctttttgtttcgctgtgttattttctgtatattaattgggcattattttcattaaactttttttggccaaattataaattttaaatctccccccccctcctaaaaaatagtctttccttttcagtcccaaattgttgcggtcgaaattgaccccgaggtgttggcaattgcacgaaaacttttcgactttccgacagaatccgaccgattggaagtggtcatttgcgatgcgatggattttttgcgcgaaaattctgcgcaaggtgagttttttttgctccacaaaatggaaaatttctgctctttttacatactcttcggcaatttaaaaggccaattaaataattatgccccattttgtacagattgtccaaaatttgatgtgcttttggtcgatttgtccggcggcagtgtcggaaagggcggcctttactgtccaccggcccaatttgtcacggaggacacgctgaagcaaatgcgcagttgtcttgtcgaaaaaggcacataattaactaattacctaacgcccttcgtctgctctttcccaatgcattaaattccccctcaggcggcgttctttcgcttaatttggtcactcgagacgaagaagcatctcaaagtgtgaagagagtgctttccaccattttcccatgcgtttattcaataaaagtttgttttgcttttttaaatccattaattttgctcaaattttagggggacgaagacatcaacgaagtgttgctctgttgtggcacggccaacgaggaaattgtgccggacatttccgcgttgggacttaaaggggagaagccggtgaagaggaagaaagtgcagaaaaggagcagcaatcaaatgccaaaaacgaaaagcgacagcgcaaaacggtcggaagagccgtggatgaaagaatgtgcggaatatttggcgaacaaaaagcaatttgtcacataa

SEQ ID NO: 67203 - DNA, 805 bp, Heterodera glycines
atgggatttagtcggaataaaattcaagaatggaagaaggaacttggtaaacaaaatattttgattatactaatttaattaacttttgggggttttccggaaatcctgaaaataggcacatcaatcacaaaaaccccgaaataggcattataagcatcgtagccttcccaacccaaacgaaaaactcgtttttcgtgcttatctgagcgtattaagtgcgcagaaatttttggcatttgcctaaaaacgaatcccttaaaaaagggaaaaagcaatgcgataaaaaagaaaattaaaattcaaattaaaggcttcaatttgatcttaatttaataaattctcttttaattgtttaattaacaacaacaaaaaaatcttcaatttttctttttcagttggcacaaagaatttttccaaccaacaaaggcatgaaattattgagaaatttgaaaaagtgaaagatgaatttgctaagaaattcaatttaaagccgagctacgaaattgaaagaaaaattgtgggaaaaattggtgttggattaagcacagtttaccaatggatgagaaaatttggcttaatcggaagtaattttttaattcataaataacaataaaataataaagttaatcggttttatcctttagtaaggcacaaaacctacacggatgccgaacgatcggaattgtttgaaaagattgacaaaaggaaaaaacgaaacccatgggaaagcgagcgaaaaattgccaaagaattgggagtgtcaagagtaagcataatgcgatggagaaagaagtctcaaaattag

SEQ ID NO: 67204 - DNA, 840 bp, Heterodera glycines
atgttgtctgatctgcttttaacccacttcgacccctcgcttccaataatcatcgcagctgatgcttcaaaagatcgaattagagcgaccataagtcacattttcccagacaaaacggagaaggtcattgagcacgcgtcaagtgttctttctgaagaacagcggaactacagccaagtcgaaaaagaagctttggctcttgtcttcgctgtccaaaaatttcaccgaatgatttttggaagaaagttcacacttctgaccgatcacaagccgttgatttccatttttgggtccaagaaagggatcccaatttatgccgccagtcgactccaaagatgggcacttattttgtcaaattacgaatttgacattcgctacatcaataccactgcgtttggtcaagtcgacatgctttcacgacttatcgcgaattatccgcgacccgaagaagatattttgatagcgaaaatttgcaccgaaacagaatgtttcatcggcacaattttgcaggcacgaattgatcaacttcccgtcactgcaaccgaaatagcagaaatgactcaaaaagatgaaattctacaaaaagtggcaaaattctccaaggaaggatggtcacaaaagtgtaatgaccccgacctcgcaccattctttccaaaacggaacgaaattttgcaaatcgagaattgtctgctttatcaaaaccgagtcatcattccaacagtgttacgagacagaacgttgaaagcgcttcacatggcacacccaggaatagtgcgcatgaaagctctcgcacgccaacacgtatactggcctggaatggactcagctatcgagaaattg

SEQ ID NO: 67205 - DNA, 609 bp, Heterodera glycines
atggttgggagtttaaaagtcgagactcttgtgggatcgaagttggaaattgaattaacgatattgatgaattattcgagtatgaatatttttaaaaaccgagatttaggcgatcgaagttggaaattcgaaaagaatatttgtaaaagtcgagatttaggggataaagttgaaaatatgaatatatttcataacggttagtaaaattgcctatttaatgaaatgtggtggtacggtggcccgtttaattgtttatcattctctgagtacggtatttaattttttggtggatatttggctaattaaaaatgatgtcaattaaaaaggtaaataaagatcatagtttaaaactttgtggcggtctctgagtcataagacgaattttgtcctttacaaaattagtaaatttaaaatataataactttataaaagtataaatttggagagcaaacggaggtaaaagaaaggggacgagaaaatttgtgtgatgatttgtcactaattattacacacattttatcagtgaaaccatcgaagaaccaaccatcccaatccatcatcatttgttaacactcgcagcaaattattgaaatgggaacagtcaataaa

SEQ ID NO: 67206 - DNA, 327 bp, Heterodera glycines
atgaaaatacagccaaatcatatggccgactttaaatcagattgtatcgaacgaggacacttttgggctgagacacccgttgtgaatgtaagaaagtgttatataggcacaaaattgcagaaaaatgacttaaattggtttagaataatcttttaacactttaaaaatgatattttttgtatttttaggggtgcattaaaaaaaagttttttattttctcgcaagaaaaatatgtaagaaaaagtccaaaatatgtaccaatatatgtataaaaatatgtacatatgtaatatatagaaaaatcccgaaatatgtaaaaatatgtaa

SEQ ID NO: 67207 - DNA, 388 bp, Heterodera glycines; identical to SEQ ID NO: 51536

SEQ ID NO: 67208 - DNA, 222 bp, Heterodera glycines
atgacggaagaccaaattgagcagagagagtcctttctgtgcaatttggaggacgccaatttgaggacgaaggcgcagtccgagctgttgttgtccgacatgcaagcattcaaagtaagccatgtttttgtctaagtttttggttctgtttaaggccgcaaatccgggctgtgaattggtggattttttgagatggcattcgccaagaggatctgacggaag

SEQ ID NO: 67209 - DNA, 698 bp, Heterodera glycines
atattttttgaatttccttgccaagagcaattttccgaccacccgacggggagtattgagcaccatcgcctctttgtttgatcccctgggattgtgcagcccttgtctcgtcaaggcaaaaatgttttttcagtcactctgggattcagccaaggggtgggatgagtcaatcggaccaaaattagagaaggattgggttgccattatttctgagtgggactgccccccagtaacgtttgctcggtataccccgtgtggccaggcaagccttcagctccatgtattttctgatgctggtcccaattcatttgcctccgcagtctacctgcgctcagagcttaacggctccgttcgggtctcgctacttttcgctaagtcgcgactgagacccaaaaagttcaaaaacgatgggttcaccataccccggctggaattactgggacttattacggcaattcgtgccaaaaattttgtcgtttctaatttggatttttcgttcgaaaacatttatttttgggcggattctcagataatcttatcctggttggccagcacggcctctcagcccattttcatcgccaatcgattggctgaaataagaaaggaaaggggcgccttttttaagttcgtgaggtctacggataaccctgccgacttgggaacccgggggctctcccagaaagggaatggccaaacga

SEQ ID NO: 67210 - DNA, 2140 bp, Heterodera glycines
atggcatgggttgcggacggaatcgaagaggaggatgagcccaccaaaagctacgaacacgccgaacaggtggccaccgattggaagagagggcattgatcgatcgatcgctcgatcacctaatcaagcaatttattaaccattcattctttgtgctattctcacccagggcacttcgagatcgtgcagtcaagaggggatcgactcggcacagaaaaggctctccacaattgctgaatcgagcagcagtgcgccggaagaagcgagcagcgaattcgcgtcgggaaatgacataatggtgtgattagctgatcgccaattcggaatcgatgcgcaagtgcctttgacttatctctgatcactttactttttgaccaataaacgaaaattcggagagacttaatgattggtggtcgtcatcctccgaaatatgctgaacaagaaatggtaagccatcgaatccgttaattagcgaatgtctcctccctctcggcgtcaccacccatcccgcttcgtctgctttatcgtcccgtttctttctcacaagtcaataaaaagtgatcagtcctttccttctgatcgaaaatccgccccaggcattttcatcttccaattatgttcccgcgccccctcagttgtcctcctaatcacttctcctcacttagtcctcctaatcacttctttttaattagtcttccgaatcacttcttaattagtctcctaattattatcctcaattattcttcaaaatcacttttctccatcactgtgcctcccttcccaatgctatcactttgcttgtctcctttccttctcctttccctccgcctccttctcatcactcgccgattcgtctcttctcatccgctccgttctctttccgaatttcccgtccctccaactgacgacaattggcaagaaacgaccaaatctccttttgaggagttgcgggagcattttggcaaaataagtggaggaaaatttttgaatctggaggaaaagttggcaaatgccaaagaatatgtgcaccgaatggaatttggggacagaacattcacccacgacgtaagtgaaatttcaaggggaagaaatgccaaattggtgttgcacagaatgaggcggacaaaaggaggcccatttcgatcagtccgtcacagccaaacgtaagtgccgtaatggcaccggtgctttttgaaggtcagtgattgtgcaaagggaagtgccattccctgcccccttcaggcgacattatcctaaacgaacgacaaattgacgccatcctaaggcgccttaaaaaactgcaaaacaaaaatcgcagaaagccatcgcctcaacggacaatgtgccaacacagttcatcctcaaagcgtagcataaatgctgacccggacaccttttggcatcaaatgccaatcaaattccatctgcacgattcgctcggtgtttgcttctttctgttgttttctctaattttcccattttcatcttcagatttgacggccattcaacaaattgcgagtgccattgccttttgggagaacaacacttgcgtcacttttgaacatttggaccgggagccatcggcggcggaagaaaaggaagaggattttgtggacttttttaagggccatgggtcggtcggatttaattttgccactgatggcggattttctctccgactctttcagttgctattcgatgatcggccgttccggggggcggcagggagtgtccattggcagcggatgcgaaagggtgccattggcagtgccaacatttattttccgagagagcattcccaatttcagcttggcattgtggagcatgaaattggccacgtgtggggtgagttgcagtgttaagcaccaaaaaatccaccttatttgtccccccttttaggcctttggcacgaacagtcgcgcccccgacgcgtggaaatatatcaaagtggaaaaggtcgagcacagaagcacaccaattaacactaattagtcacccagcactgattaatacatgttttcaggaatttgttctgccttcctatttgtctgactttcaactccgcgacgatgacgaaattatgacgctcggactgccttatgattacggctcagtgatgtgggtgaatgcgattatctaa

SEQ ID NO: 67211 - DNA, 84 bp, Heterodera glycines
atgtctctcctcccttctgatcattcaattgtcaccgtttctgatcagtcaccgatttctgtgtctgatcactcattggtttcc

SEQ ID NO: 67212 - DNA, 320 bp, Heterodera glycines
agaagtgtccttcgtgccaacttccgagtcgttctcggttccgccgcgttggctttgcttggctccgtccttttggtgttcggcagttgtgtaatgcttttccccaacgacatgggttctgtctgctcctcttttttcttgctcatttcgcttttctccactttagatgtccacggatggattttcctcgtcgtcggagtgctcttcgccattcccggcttttaccacgtttggtacatcggctgcactctctgcggacggcccggctacagtttcgagaatttgccaactttcacaaagcccaactttccctactaaca

SEQ ID NO: 67213 - DNA, 495 bp, Heterodera glycines
acattcctcaattttcactaaatacaaattctcatatttgcttagtcatctgttaatttgtgtaatttacggtgcatttacactgaattatgtgctcgcatttgcattcgaaaatgcgggaaagtatggcgcaattaaatcaaaaattaaaattaattaataattttaaatttattcagtccaaccaccggtgttgtggccgaaactttgctgggccccgttggttataaattcttcgccggcacattcattatttcattgggtagcacttgctgttatgtgtccatttttgtgatcatcagatgcaaaaatgccggtaaatcttggcattcatttctttggcattttaaaattcaaaatattttttacagtaacccaacagacgaacacacgagttttacggtcattgatcatcattttgtccattaacattggcggatatctgaccaatttggccatatatcagttgctgtatgcatttggttcaattttggg

SEQ ID NO: 67214 - DNA, 199 bp, Heterodera glycines
aaccgttgtaatttcggcaacttaaaagcattggcaaagaaagaagaaacaaacaatggcaaattgatgtacaaaaaataaattttcgaaaggaggcggattaaaattcaagaaaatgggatggagaaaaagaaagtgcaattaacagatgaataaattcattcagtgattgaattaattgataaaagataatttaata

SEQ ID NO: 67215 - DNA, 742 bp, Heterodera glycines
atgaaaatgccaaatgtctcacaattattttgtgttttaattgttttttcaacatttattgaaaagtcaattggtgcccccaaaaaaggaactgcttctccactagaaaaagcagagcaaaaagacgacgaaccaaaattgggaaaagaagacaaaaaattggtgaacaacaaaaaagaattgctaaaaaaagaggtgaattttaaaaatatattttaattgaaattgaaatttaattttaatatttttgattgaaaaattgcaaatgcaaatggaccaacagttgaacacaattttggaagaaaaaattcctacttttatacttgaagtgaatgaaattgcccaaatgattgacaatgaacaaaagccattggaacgcaaatttattcaacaattgatagacaaaatgcgaccattgtacggtaagtgaaggaaaaagtactgtaattttaaataaaaataaaatattaaaaaagtagttgatgcgaagaaggaccatcttcacttgtggtccaaagtgcgcattttaaagcatgacaaacagataaaagatgacgtgcccaccatggaagtgttggtaagaaagttttatgcagccaatttaaaaatacccaaacatagttaatcatttatcacaaatttttttagttcaaataattaaaaatctaaaaaattgaaaaagaaatcgattcgttttttggcaaagaaattaagtttttaattttctcatgatttattaaca

SEQ ID NO: 67216 - DNA, 215 bp, Heterodera glycines
atggtttataccaacaaaagatgaataaatgtgttgccccaaacaacaattaactctgttggctgagaaccaatattcaaaagatagtttttcatcgtaaatttttcctgctgtttttttcagttttcactaatgttttgcagataaaacaaaaattcattacagtaaattgccttttgatatccggtcaactttcggaaatgaaaaacccgtaa

SEQ ID NO: 67217 - DNA, 443 bp, Heterodera glycines
atggaacagcccaatcaggaaataaagacaaagcgaaacaaggagaagctggaacatgagggttcactttatgttcttcacaaactcagtgacgatggacttcggaagtattggcgatgcgagtttttcggagctaacgacaaatgcaaaggtaaatgcataaaataaaataaaaactatttttcaaattcagggcgccttcacactgacattaatggtaatgtcctcaaaataattggaagccacacatgcgacatgagcgccgcacatgtggagtgtcagcgacgtataacccagctcaagcggcgtgcagttgagacgtgcggagcgccggctacaatccgtgcgcaggtattgcggaacactacaacccccgtgttggctgcttttccgaccaaagctgcgactaaaaaggtcaacgtttgcaaatttttatgccaaag

SEQ ID NO: 67218 - DNA, 2275 bp, Heterodera glycines
atgggcgcgaagttgttggccccactttccacggggatgaagtgtgttgacttggcaattgtcaaattattatttgtaataatttggttccgatagttttaccaagatcgtcttgaccgttggtacccgtccattcgatttcgcaaaaatgacgaagtgatcacgcccattcgccacaaggaattgggagattggaagaagttgagcattgaggagaagaagcttatctaccgctactccttccgtcaaactttggtcacatttcgtcgtacattttctttggcattagcattatttcgattcgatagattattattattttttctgtttaggccgagtttgaggcattgacgccttatggctatctcacagtcactttgttcttttctatgcttgggcttactattctgtacgcttcgtttgttaggacttacggtattcagttataggtactttgactcttatttatattttttgaacagtgacaaaattcaatgaccgattgcctgacactttcgatgatgaatataaagtttgttttgaagttttaagtaattttcaaagcaaacaaaagtattttaggaaagtcaggccgagcgccgtgtggtactggaaagggtaagaaaattgcgatgccatttgagaattattcgcaaaaaaatttagggcaatccttatggaccggcctactactacgattacgagaaaaatcgttggaaggactgaagtggacggaaaagtcctactcgaaattcgttggagtgttttttaattttaggggatttttaatggacatttcaaatttgcacattttttcgtaaatttcttattcagtttttacgattgataaagttgggtttcagtttttaattgttgttaattttttgtaattaaaaaaatgttttttattcgtataaaatactgccatttgctctttttttaataattctttttagctttccaagttaagccccttaacttttatttgtcatcgtcaccagtccaattaaaatctcgtccttatgcctgcttcgcactcgaacaaagaaggggctcacaatcagtcatccgaaggcgcacggcgccatttgcaacttccgtcgcctccacccgatgattttcaggtcatttggaaagcaaacatttgaattcattgatcagtcaaagagttcgatttgttcacaggttagtcgtcgggttgtgcttttgtcatcggacgaagaggacgaagacagcgacgaatctccgtcaaaggtggacaactcatatttagtctaagtgtgccacttttttttataacaaatagccttttttagccgtccagttcagcagcagcaccaagggagaaccgtggcagggcaattttattgtccgaggaggaggaagagccgcagggggaggagacggaatggttggggaagaagagtgccgccagtgctggcccatcaaatacggaaaggaaacgcgaaaaaaaggtgaccgaccgtaaggcgggagtaattttgaaattaaaaacaaataaattaaagaagcccgaagcccatgggatgctgaagtcgttgaagctgaaggcgaagaagttgagggagaagcagaagaaacggcggagaaaggatcggatgcgaagtgacgaagaggagggcgaggcgatggactcggacgggtccaacgacggagacgtcgatatgcgcgcagacagttacgacagtgaggacagcgatgttagtgcacacattgtgttggggaaacattttcaaagcatatagcaatgattacgccatttttcaaacaggcgaacgaacaaatttccgcccgtcaattgaaattgatgcgcgaattggagcagaaatgtgtggaatttctgaatgagtctgatgtgacagaactgaacgcttgcgagaaattcaacgacaaattcgttgcttttgtgctcgccaatcgcccattcgaaaacttcagagatttggtgatttgtagcaatttggaattcaaatcataattaaatttttggtttaatcactttagaaatccaagcttaccgtcgcaccgggaagaaaggctggcgcgggagcatttgttcgtttgttggacaactatttggaatggttggagaacagaggcattttggataaagtgttggacgactgtcgcaagcacagcaaagtgatcgaaaaggcgctgaacgaaagcgaaggaagtgcgccggtggagagaccagccggactgaacccgaagtgaacgacggattcgaatggatttaacccattttttacaa

SEQ ID NO: 67219 - DNA, 447 bp, Heterodera glycines
atgctttccaaagagtcgctccaaggctcaattgggttcagtgaacaaagtgtggatgaggacagatcaaacattttgaacacaacaattgcaggtaaagctgcatttatgatacattttaaaatattttatattaaatttaaatttcaggaggcttcaaattggtcggaatgaatgtgcagcgtttttacgcttatggagagtttttcacagtcaatgagagtgtgtaagtaaaaaaacatgccaaattgcgaattaattatacactaatccttattataatttacaaaagtttcttttttagggctgcacttttctcgagcatcgccaacaccgttctgcgttatgaaatatgcctacagcgagaagtcggcggagtttacgccgccacagtgtccattcccatcttttgcatcacagcgtaaaaaacaaacaaacgaaagctaa

SEQ ID NO: 67220 - DNA, 128 bp, Heterodera glycines
caggagaagtccccggatcagagcgcctacatgtgagaagatgcaacaacgaccggcggatggatggacgaaacctgaagagcgagcgacctgtcagaagatgcaaagctaaagaagatgtcccataa

SEQ ID NO: 67221 - DNA, 531 bp, Heterodera glycines
cattcttaaaaaccagcagtatcagcagtcccttttgggccattcccccccccccacaaatcagcacagtcaattcatcaattctttcgttccttcgttcatttccattctttgctgctctctttttctatcatttctcaatgctgcgcatgctcaacttttcgtttgcacagtattaaatcgaatgaaagaataatgaatttttcctttttatattctcccgccgatcaaatgggcccggaaattgtcactcgcgcacaacacaacaacaattgagtggtgtgtattgtgtttggtgaatgagcaatggcttaagaaagcacacattgtctgtgcaagatgagaaaggatgggagacggcgaaactttttattctcctcaataaaatggcataatttatttaccaacgaaaaagtaataataataagaaaatttcccatagggacggacaatcgtcattttctcacattcttgattttacattttgattcccattgtgctgagctgatgaaaagagaatcgaattgcttt

SEQ ID NO: 67222 - DNA, 246 bp, Heterodera glycines
aacgttcatttgacgtttcaatggatcaattcaaaaatggataggcattttgtcatccctttgaattcaaccttagacgatagctgtggatttgagctgttaagaagcggtacaaccagtattagggccacatttgattcaccaattccaaagggaggagtggaaatgattgttctcggagaatttgaccaaatgattatgattgattataatcgacacattgtctccgactcaaagcttgggtaa

SEQ ID NO: 67223 - DNA, 341 bp, Heterodera glycines
atgggcattatgacaatcgccaccttgtgtttggcgttgttcggtttgggtgtggccattgctgcgtttttcaccaatgtgcacattctgcaagttattttcgccgcaattggcacaattctgatcatgatttggtttgccattcacattcaggtaattttataagatggaaaaattgaagcgatgaatagccaaccatttatttatttattttttagttggtcatgggcggtcgtacctacgaaatttcctcggaagaatacgtttatgcgtcgattattctgtttctggacgtcattcagattttgtggttcctcctcagcctttttggtgaaaaatga

SEQ ID NO: 67224 - DNA, 1138 bp, Heterodera glycines
gtccaaatgttgcaccatatctgggcctcaataaccaatccaaaccacaggagaccgaagaaccacggaaaataattattcctaggaaaagacttaaagagcaaactcctgatcctgaatcagataatgatacacttgaggagttaagtccggaaccccaaacaacatccacactcaaaacacccgttccgatcaaaactattatacacccgacccttttaaacggtctttttaggtacgtgaaggaaaacaaagatttatttaaaattacggcggccggaaaggtacagtcgaacatgaatttgccgattgaaaacagtaattatagagatgttttgttgtatctcgcagggaagaaagatgaaacgccgcgcggtgcaaaatttctcaaagatcggttactgaaggatccaacagtaaaagacatggttgataaatcaaaggtcatgtggggacgtggaaggaaaaaggcaataaaatctataaaaacacccggcatagtgcgagtgaagaaacccttcaaaccactaatatgggcaagactgtagagaaaattttatcgaaaatttattttaatttaaaatctccggcaagttttgctggaattcaaaaaattttaaatgcggccaaaaagattgacccgaaaattacgaccgatgacgttaataaattcctagaaaagcagaaaacatacacgattcacaagcccatcaggaaaagattcccgagactaaagacgataccaagtggcttccataccgattggcagtgcgatttgtgcatatttgaccagttgaaaaagcataacgacggttataaatatttattggtctgcatcgacgtgctgagtcgaatgatcttcagtgcaccggccaagtcaaagaagagtgaggacatgatcgaggcttttgatcgggtgttcgaaaagtctaaaattatcccgatgaaaatgtatagtgacagtgggcttgaattccaagcaggaaaaatgaaaaaatattttgaggaaaaattcatcatcaaaaatgtaatgtatagtcctgatctgcacgccggagtcgttgaaagggcaaatcggacaataaaggagcgcttgtacagatattttacaaagaaagacactcttcgaggggtcgac

SEQ ID NO: 67225 - DNA, 1215 bp, Heterodera glycines
atgaccaattttgtcaaggtttttgctaaaataagtacaaaagaggtaaaagctatgaagtttcctaaaagatttttaataacatttcttctaggttaaccttttttcttctttatccatttaatttctcatcacgcctctttcaaaaaatttctggttggggacggaatggcgataattcttagcagatttcgtcaaaaaatacaagggattagccctgaaaaattcccaaaaaatcttgcaaatcccgtattttccaaaaataccgggattgcggaccgcaaaagttccgcgcgggattacgactggcgccggtctctaatagtgaatatttttaaaaatcaatttgtttagtgcgccgatgccattatacaatttgccaaattggtattgggcaatgaaaagatggaaccaatttgcattttgtctgaacaatttgacaggaatttaattgttggcgaattaaattgtgaaatgtacgaaaggcaaaaatgcacggattcatcactgtattgcatcatttgcaaggttaaattagttgaaatttggaaaatttgagactgtaaaaaggcgtttgataaattaactggccaaaacacttggattttcggcaaattttcagaaaaaaacttccattaccagggccagatctcactctaagatatcgatgagctcgtttctgaatgtcgtcgctattctgcaaaaaactcaaaattgttagggacagagacgctttgactatgactggcaaataaaacacacaaaaatttatttgtaacaatatgatgacaaatttacggaataattcagaaattctgtcgatcctttgttatatctaggaaatcattaaatatgacttttctcgagcaataagaattaataaattaattattgtgtttattccataattagtaattaaatatttgtaagcattccgctgtgaaatcactgacaaatgcaaattcgtcggcacttccaaagttgaaattcttttttatggacgtgtcaatcgaaatgaaatttatttttgtaccaaattacaaattgtcaattccaaaagaacagaacaacttgagaaattatgaaaaattcgccaattattttgctgaaaacattgagaaattggcatttaatgacaatttcgatgataaaatcaataagtatgaaatagacctactggaagactttttagaaaaaccgacttttcgcagttaa

SEQ ID NO: 67226 - DNA, 934 bp, Heterodera glycines
atgcacattttgattatgttttggactttggagctctatgtgggccattttgtcggccaccgaattgcggtgccgcttgatttggatgccattatgtaccaaatttgtgccatggcggttgctgttgcttataatttgttagcattaaataggatcatcgcaataatggccccaattttctattgccatctctttaccatacggtgtgggttgcctaattagtgcctttgtcccttaaataccaaagcaatttgttaatagctttacgagactgtgccttgccatgtgctggttttgtggcattgtcttttcagtggtcgtcaattggaagccgaatttgcgtatttattcatgcatttacacattagtctccatatatcctccagctataataaaggtataaaaaacaatttatataattatttatttatttggaatacatttttatgacgcctattaaggagaacaatttgcattttaaattaattgatgcagtcaacttaataaatctcacaacgacttcatacattccaaccgcattatacgcaatttgttttatttggctaattgtcaaaaaagtgctgaaaggtattggaaatcgaaagacagaaaaagtttcgaattatgaatttgaaaaggaatattcgaaaccaggaaatggttttactataatctctcgatcaaaaaaacctgggtttgaatccaggttaatctctagaaatatcagtttggaggcaaaaaaaagataaattggctaagaatgaacaagttttttatttgaccttatccgtcaaatttgacagtgtttggccgtacaactgctactgtatctgtaaatggtcatcaacatgatacacctcatcaacaaaatcagcaagaaaacgatcagcttcgggtggtaccaccatcattttctccgtcattggacaattaa

SEQ ID NO: 67227 - DNA, 1114 bp, Heterodera glycines
atgcagtccgcttttttgcgagttttgccgtggccggcagaacaagcaaatgcggcaacaatccaagcaaatgtaagccaagataaaagccggcttggaaatgttgggcagtcgaagaattcggatgggcacattttgccgcaatttgtgtcaggagaatttcgttggaataattcatttaattataaataataattgctttaattctgctaattttaacaattagttatttgagtgataattagggctccaatttttagattttttacttattttttgtcctgagttccctatggcctgaaacgcacgaaaaacatgttttttcggttgttgttaagctagttttctagtattagcaactattttctagttttttatttttaacgccaaaaaacctaaaaattttattttcaactactttggcgtttgcccaaaattattaacaaaatgcaataaaaacgaaaatacactccctaagaaaacggcccaaaaaatttcagaaaaatacaccctaagaatagcccgaaaatttcaaaaatgcacaccaaagaaacgaagaatttctcaaaaattcatgtccaaaattttttatttattttcttgacaagaatttttgtttttaaaaattatttatctcaatacgggtttggcttaattttttgctttttggataaatttttacgattttacaccagtaaatttgaaagttattagcaactattttccattttttgcacctatttggagttttttagaacctaaaaactaactattttgacagtttttaaaaataatgtttttaaattttgaaaaacgaagtttcctgagccttaaagtatgacaaaaaatcgataatttctccagataactctctcgagcacttcaaatggcgacgaacaattgtttggtgtattttaagaacaaatgaatgtgcaacatgccttaggctcaccaattagtagtaataagggaatttaattattttttttgagagtcagcttacaatgagcccgaaataagtgagtccagaggcaactacttccttatcttaatgaaaattgcccaagaaaaacgcaaaattaatacaaaattaattaaataattatttttttaa

SEQ ID NO: 67228 - DNA, 80 bp, Heterodera glycines; identical to SEQ ID NO: 51817

SEQ ID NO: 67229 - DNA, 80 bp, Heterodera glycines; identical to SEQ ID NO: 51817

SEQ ID NO: 67230 - DNA, 678 bp, Heterodera glycines
atgtcctttttcactttgctgagtttggttctgtttgcgtggattttcgttcttttctccgacttttatttgcgctatttgaattcacaacggtaaaaaatgtgattttttatgttactttttccatttttaaatttcgcttttagttatctcaattttttggaaaggcatcgaatttctgtcacacctttccaagtaatttttatctttttaatttaaattttagtaaaaaaaagaatcaaattcattgtatgattgattaattttaggttcgtttctatctgtccaatttcgaatctcatcctcgtccaactcttgctctgctcaaggccgttgaccgatgcattctcggccttcgcagatcacgatttttggtccgaattggcaactcaattatttttttaccgtttttatatggttgtgggattttttaaattttcattcgttttctgcactttatttttgttttcctaaggccctttggttcggtgccggtgccgttgttgcgcttttcttttttctgctcacacccatttacctcctccgcctgctgcttgacgagttcactttcggcgtctttttccgtttttcttcgccttccgcccattttcggcactttcacactcaccagaaactgaccacatccgtaaatttttattcacatcagtgcgaaataaa

SEQ ID NO: 67231 - DNA, 45 bp, Heterodera glycines
atgaccacgtgcatcgtcgcggggctttgttctgtcggacgggca

SEQ ID NO: 67232 - DNA, 401 bp, Heterodera glycines
atgtcttcagcaaatgaggagaaccaacactgtaagcagattaaataaatttttaaaaagtttaatattttaaaaattaatttttatttttttaatttttaagatggcaaaaatgtgtcaatgcttcaacagaatggcagtgtgaaattcaagaggagagcagaaaagccgaagatggcctcaacttttccagaaatggtaattattgtataatcattttattcactttaattgtttgtccaatttaactgcaggtcaaagcatggccatactcaacctttttgatcatcctcaatgaattctgtcaccactttgcaaatttatcgagtaaattaattttacttactaatttaagcactgtgattaattttaaaaaaaaaaataagaatttagtgaataaa

SEQ ID NO: 67233 - DNA, 713 bp, Heterodera glycines
  unsure (1)..(713): unsure at all n locations
cattctgatcaatgaaccgttgggcactgaccgtcccgaaattgtgcactgctgtgacgaactgttggctcgtcatccgccgtgcaactcgtcccatctgttccaatttctcatcgacaaaattgcggacaaaatgcgcgaaaatgcggttgcaaatgagcaacaattgacggaaatggcacaaaaaagtggcgaagttggaattttattaataaattattattttgttatttttcgtgccataagggcgttaatcgcaaaaaaaaaaaaaatttttttttaaattaattttaaatacacataaaatctactcattttggagtggagaattgagtagatagtagagatattcattcattgaaataccaacaatacgaatgcatataaaaacaatttctagaacatggatttttgcggacctatcaaaaatttttgaattcaaaaaattcctcccctaaaaatatccgattttcacttacatccctagttttttttcaaattaaaccggaattaagtttggctccccgttttcctgctgcttatcattttttttttgttcatgtattaccattgttttagtatttggatgtgttggaggggattgacccgattcggcacaatttctggaagtacaggcgggcacagctgcaaacattgnccgactcggtgaagggggacagcactaacagtnccaatgaagagcaggatgcggg

SEQ ID NO: 67234 - DNA, 101 bp, Heterodera glycines
aaaattccctcaaaaataaaaggtctattgcgcaccgccctccctatcatgctcgagagcatttgtatgtgtataaaatttatcaaaaaaagagatagaca

SEQ ID NO: 67235 - DNA, 304 bp, Heterodera glycines
aaaattccctcaaaaataaaaggtctattgcgcaccgccctccctatcatgctcgagagcatttgtatgtgtataaaatttatcaaaaaaagagatagccatttttctgggataacctctaaatataaaaatcctctgtgaaataaaatggcgattgtgcacagccctccgtctcaaacgcaagcgcttttgtgaggtataaaatttctcaaaaaaagagatagacatttttctgggatagagtataaatttaaaaattccctcaaaaataaaaggtctattgcgcaccgccctccctatcatg

SEQ ID NO: 67236 - DNA, 746 bp, Heterodera glycines
attcaaaaaagcaattattaaaagataaattgttttcccgacacagttaaactgcgggactgcttttgctacaacaaaaatgacaaactgatcacgccagaaatggttgcagaagtgttgtgtgaaggtaattcaatttataaaaattatttgccttttttaaattgcattgttttctaggtaattcaaaattttctttatttgctatttaagaaaattttaaaaaataggggggggagtattttttaaggagtaggaaaccttcctcaccgattttaaatatcattggcttttggtttctttaaaagctccagaaactttttgccttaatctttacaatatttgaatttgtggcttttaaaaattacgatttttatatttttggaattcccctgtagatttggatttgcctctcaacacttttttgcccgctattgcccagaacatccagcaacaaattgaggcccattctgaaccaatgccggacgatgtgcaggccaccgaccaacgcgcattgctcaagctgaacatccatgttggcaaccaatctctggtaatttacacaccgacggtattttcaattctgtccattgaaatgacttttcccatcccccacaggtggaccaattcgagtgggacatgagcaacccgaacaacagtcctgaacagtttgcacagaagctatgcgcagagttgggcttgggcggcgaatttgtcggtgccattgcctactcaataagaggtgg

SEQ ID NO: 67237 - DNA, 282 bp, Heterodera glycines
  unsure (1)..(282): unsure at all n locations
tatagccatgcgaccgcaaattcaccattaaaatcaaggacggttatgtgtcaagtggcaaaaacccgtccnaaattgtacgacattgggcgcattgaactcgagggcggattttcgggcgaatcacgcgattgcctgaactgaaagcatcaaattcatgctttaacatcggataaaaaaggctctggcccaacgatttttaaaatttgaaaacattcttttggttattaatataattttatatgttgttttacaattaaaagcaatgatgggctgaaaaat

SEQ ID NO: 67238 - DNA, 948 bp, Heterodera glycines
atgaaactgatcggatggggtgaagaaaccacgggaaatggcgaactgatcaagttttggctgggcgtcaattcgtggggcaataggtaaaaatgtgttgttaggtttatctggccctaaattagaaaaaaaatttactggcttaggaagggggggggcatctaagttttcaagtcaagtttcattttagaaaaatatttcatttcacagcataccttttttcaacaaaaagataatccgtcagtaaattgttttatcaaaatttctataaaaattgtttactatatttttaacagtcaatataaattagtttcaacgagttataatgccgtaaaaacctgtataattttttcagtattttaaaatttttaccgatggtttgtgtccattactaatggattttccatgatggatttttattgtcctgacgccggttacaggcttgaaatttcatagcaatttcatcatctatccatttaaatcttttagctgggaactgaacggacttttcaaattgcgccgtgggacagatgaatgccgcattgaatcttatgatattgaaatatatgaacgagcggggaagcctttgagggaaaaactatggggcgggccggctttgaaccggcgtctctggctttccggaccagtgttctaccagctgaactaccgaccctgccctctccagctccccactttgctcgatcatataggatcaatgttgcctcaattgatccattaatcttcctctcggggaagcttcttcttctctatctcaactttgttccaaagcaacaaactttttaattgattattcggtcgatagtcttaaatgttctctatgtatcagtctgcaaaatataaaaaaattagtttagtttcagaaaaggtatgagcaaaattgtcttttgaacatttttggtcataataacttatttatgagttaataaa

SEQ ID NO: 67239 - DNA, 4175 bp, Heterodera glycines
atgctttttccattaatttttctaatttcattcccaacaataacagacgcaaagcaattggtaagaattagagtcgctcaagtttctgagttgggaaatcctcgggtttttctgtatcggttgggattctcgcatttcgtcttgattaaatggcattttttaaccccctaaaaattgtgttaagaaaaaaagtaaaactaatttattgagttagaattaatgttttttgatatttgaacataataagatttattttgagtgatagaattagggcgcgcttgtcccttttcaggccaaaaagcgccaggatttgagtgccaaatcctaagcagtaaaaaattataaaaattattctattttttcaacccatttcaaaccttttatatcgattcagaccgtttttaatatgaccgatatttatcctcttttttttgtaatttgataaaattccaaaaattaaaattttcgtattttaaaatgaattttataattttttatctgttctgtctggaaaataaatgttttaaaaaaattcgctatttttaacagtttgacgatgacaatgtgctgcttgcatttgtgagaggacagtcaaattttgagcaatttttggtggaggaagagctcaatgatttggaaataaaatatccgccaccgcagacaatgaaggaatatttgatgcttcaatatgagagccaacttggcattgtgtgtttgatgcgacggcattggcactgtgccaaaattgggagcgaatttgcagacaatgagcagagaaaatgccaaaaattccgcaattatttggacattttgtacgaatatttgttcactgaatttatggggctgccagcagtgaaaccgcagttttattttgccgaaatcttcacattctgcacattgtccaatgtgatgcttagtcttagctggcttttcaaattctttttcgattcgaaattcagcaaaatgaaagggcacaaattggacagatattttttggaatattacgaacccaaattggccaatgaggacaaattggactacaaagttgaattggacaacccaaacgaaacatttgaggatatcattgtacaaacggcacttgagacgggaaatgaaagtcttcgcaaattaatgaggcatatatttggcaaaaatttggagaaaatatttagaaaaatggagcaaacaacaatggaatcactaatcggacaacaaattacagttgggacacaattctcagaatggaatttgtggccaaatgatggggaaaatttgaacaaaattttgttttatttgtacgaaataggaatccgcagagaaagaatgaaggtaacagtgaaacattattcgaaaaacaaataataaaataaagcattttaaattcaattttataatttctaaaatttttggagccataacatttttaaagttaaattttatagtcggttaaattatgtcattcagatcgaaaaaagccttttcatccaatttttgactccacccaaattttatcaatattgtcaagaaacacaaaggggtgaacaaaccacaaaagaattagaaaaacgttttgagtattttttagtcgatttgtatttaatgagacagaattggcaatgtgccaaaatggtcgaagaaattatgggggatgaagagatggtgaaggaatgcgagaagatccagaaatatttgcacattctttatgagtatctgttcatggtatatgcgaaaagtaatgattgatttataatgggtagggctcgaaattatatggactaaaaaaatggacataaaataaggactaaaaatgcccgaaatatggaccaaaaagctcaaaaatggccaaatatggaccaaaatatggactaaaaactgccaaaatattcaatatttggttaacaaaatatggactaaatacgcaaaaatggcgaaatatggatttatttccgaaaacccacaaaatatggatttatatggactaaaaaccttcacctaatcaaaaaattttaacgcagaaatgctatttttaagccccttccttcatagcatatgcgcagaaaaaatatgttaatccatacaatttcgagccttaataatggggtttttcaaatttcataattttagtgccaaatttcggtattttaagaaatttctttccaaaattcaactccttaatctatttttttacagaatctggtttttaaatttaattatcatttttaattgcagatgaagaaccgctcttggctcaacaaattcccataattgagccaaaatttcaacgccaaaatgatcaagtgtcacaaacttttatcatgaatgaactgtttgattattcaagaattttttttgattcagaatacagaaagagtgacgaatataaagcttatatgagtgccaataagttgccatggttgactctgttaaatgagagcaaactgggcaattacacagcaaattttggcaattcaactgaaacacttcgcaacaaatttgatcaaaaattgaaaagcattcttaaaaagtggagggaccatgaaaagggtaacaaattggaaggttacaacccatttttaaaaaagccattttatgacataatttcaagggtaagtatcaccaattataattaaactaggcatgacgagagattgtaaactcaaagcccacaaaatttagatcagctgttgatctctgacgacgagagcttggtctctcgcgcctagacttcaataaattgaataatattcgaaaaaattgtctactaaaagttttggcggtaatttaaaagtggaaattttgaattttattaaaaccaaaaaggggcctttttaatttgtaatatttttttttgttgtaaaatattgtctaatcataaactcatccatgttggagtccctgatcacgaatctacatctattttgaccaattcctaagccttttcacaaaaactggcgccaaaacttttatatgtataggaattatgagttcatttgaaaatataaggctttttcacattttctgagggtttttgagcttttaatgccaaataatggttttcaaatttcgaaatggctttaaacatttcccacaaatgcaattttagactgaagacaaagcatttaatgcatttgtgaagggtttgtccaattttgaacatttttgcttgcaatatgctgatgaattggcgaacatttgcaatggaatggcagcagaggcaaatgctgagcagagaaaaatacatttgcaggaaaaatatgcggcttatcttggcattttgtctttgatgatggacaattggcactgtgccaaaattgggaatgaatttgcggagaacgaacggagagaatgccaaaaataccgaaattatttggacattttttatgaatatttgttgcacgtattccgtgaaggtatacggtgttttttaaatagtactgtaaaaggtgaaaaggataagaaagtatcgagaaaatagtgttctaattaaggatataccaaagtagttttgtttaattcccaagagaacaatttgctatgaaaattttctaaatttttatacaaaaaaataaatttactttttttagatgaagaccccgtgattgctataaattctcagattataattcgaagaattgaacttttcgggactttaattgaggtcataaaagtgctgaacatggtgaccaaattctattttgacacgaaatttagcaaaagcaaagaatacaaatttgaaaatgttttcgaaaattcgtcaatttcaattggaaaacttgagcaaatatttaaaggcgcgtttaatgaggcaggagaagcagcaattaaggggaaaagccaatcggacaaaaaagagcaatttgacaaaacgctaaaggaaatgctgaaagtggcacaacaaatagcaacgagagaaagaggaaagctaaaagtgatggaggataaaatggaagagcattcagcagaagagaacagcgaggcagaaaaggagttgatcagtgccaaaagtgccgcattcgacgacaaatttggcacactttttgactcgccattttgcggcacgacaattcacaactgatgggtgaccaaaccaatatgatgtgtcaagcgatataccgaattagacttttagaatattgttcatgattattatagtgatgaggaattgtttaaataaa

SEQ ID NO: 67240 - DNA, 740 bp, Heterodera glycines
atggatgagtcgaaacgggaaaatttttcccctcaaaatgatgatgacgtcatcacaattggagacaacaacaacactcaaacactgcttgacctgcaaccggggccctcaaaaaggggacgcaagcctcgcttggacaaaatccatgaggaaattgcttccgcaatgaagaaagcaaaagccatggaagctgaaggtttggctttttctgcaaatttctttgaattagccaaattttagtagatgaatcgcccaaaaaacaaccgaccaatgtgtttgagtacccgaccatattttggaaattggcccgcccaaaggttttggctaatattaatttgaaaaaatagtaaaatttcttaagtacggagtgttcacgttcatctgcaaagagtgtcgtgatgacaatttccggcaggggaacagccgattcaaactcatcaatcagaatggcgagcagcaacgccttgagttcacccaatcgttttgccaagactgtgcaaagctgaactttgactgcaccgatctgatcatgaagcacataaagaaggatgaaccggcaacgacgacgacgacgatggcaaagagtttccgctggatcaaagatgggggaaagtgaaccgagatgccacaccacgatataagaacgatctcattttgaagaatttatacttgttgatcaaatgacaaactctttctttgtaattttgccgagcaacacgcctggctttgttggaaataaa

SEQ ID NO: 67241 - DNA, 1187 bp, Heterodera glycines
atggacaagaaaataaacaaaatatacaccgacccggccaatccgggcgggtatgcgggtgcgagtgccctgtacgcggcggtgaagaagaagcacccaaagttgaagcgtaccgagtttgaagactttttgcagaggaacaccacctacacgctgttcaagccaaagagggagaagttccgacgcctacgcactgtgcctgcgggtttcatgaccggtaagttgtactggggcttatttcgcacaattcagggttcagatgttcaggctgacttggccgatttccaagccctttcgcgcaagaacagcggctaccgttacttgctgttggctgtggatgtgttgtcgaggcgaatgttcggcgcgcccgtaaagagtaagcgcccagtggacatgaaaaaggcgtttgaggagctatttgagcaaatgccaagggtgccggacacactgtacaccgatcgcgggctggagtttgtggcaaaaccgttgaaggagttttacacggagaagggcattcaaaagtttgagaccagttcaaagaaaaaggccgccgtggcggagcgtgccatccgcaccctaaagactcggctgtacaaatatttttccgccaacaacacatcggtgtgggtggatgtgctgccaaagtttttgagtgccatcaacaactcggtgtgccgcgcgaccggacttagacccaacgaaatcagcgacaccaatgcgagggaggtgtggaagagggtgtacggcgaagggctcgcacaattggacaagacaccaaagatcagagccggggaaacggtcagaattcccaagcctaagcacattttcgaaaagggtactgtaatacacacattttccgatcaatttattttaatttttaaggctatatccccaattactctgatcacgtgtacaccgtggatgaggcccgctcaaccaacccccagcactatttgctcaaagactattatggcacaaagttgaagagaaaattttatttgcccgaattaacaaaagtacaagtggatgaaaacacaatgtatcgaattgaaaagaaatacaaagaacgagtgagagatggtaaaagagaaatgttggtgaaattcattggatttccggaaaaatattgggtcacaaatgaagaaataaatgaataaaaatattacaaatttaatgaaaattaaaaa

SEQ ID NO: 67242 - DNA, 752 bp, Heterodera glycines
atggaccacctctgctgcgcgaatccatctgctggaatcgttgaaaaaggtgtatggccctgctcctggtgtagagcgctacgacacccgcattctctacatggtaaaactctggaaataaaatgaaaataggaaataattttttataattaggacactgacagcatcttctacgactacctgacgcggctgggggacccgcttccgggtggtgagcagctcggggaactcgctgacgagtacccgaatcacacgattatggagtttatttgtggtaagattgattaaacattaaacaaaataaatggaatgtttgtttagccggacccaaggcgtacggattgtggctgcacaacaacgcaacgggggaggacgagtacaagctgaaggtgcgcggcatcaccctggactcggatgcctgcgagcgcataactttcgagaagatgaaggacatggtgcagaacaagctgggacagccggacaacaacgtccgccttaactacccaacgaagaactttcggatcaccaagaagggagagattttcaccgtccccttggtcaagcagttcaacccgaccgtgaataagggggtggtcagggatcacggcttgaaggtggtgccctttgggtacagcgacgaagagtggtgtaagtggaactgccctggcgcttgtacctgtctgttcaacccagacctcaatgtgaacatgttcacagaagaggagctgaacgaccccgacattatgccataa

SEQ ID NO: 67243 - DNA, 652 bp, Heterodera glycines
atggtcaatggaatacaaagaggaaattttgaccaagaattaacaactaaatttgataatgaaagctcttttggcattttgttttgtactgccaattttgcatttgaaatgaacgacaattttggaaaatttctgagcaatttttgccatgaatttaaaactggaaaaaatctggaagaagcaattgaaactgtgaagaattctttgataatactaacaagaagcatcacaattgagcaaattatcattaaggaaaatatatttcaaaaaattgccaaaaacgaattttttggtgccaaaaatgcggaaaatattgcaaaattttttgaacatgccaattcttcgtttcgcctaagcttatcggcacagttggtaagaataaaaatttaaacgcaagtttttaatttattaaaaaaaattctatctttttttagtttgtaatattttaaaaatgttttagcatcattttaacaatttaatgagtgcatccgaaaatgtgccatcgacaaagaaacgaattcgtcgtatgatacgccgaggttttagcagagcaatggaccaatttcaaaatagcctggacaactcacgatatcgccttcgaaatgatcggaaaaaatgtgctttctttttggcacttagtgtcgttgtgctg

SEQ ID NO: 67244 - DNA, 514 bp, Heterodera glycines
atgacaaaagatgggcataaatttttcaaaattgagggtgtaatttctccaaatttcttcaaattcgctaaatgtaaggtaaacaaaaagcgaaaatttcgcttttttgcttatttttgacataaaattacaaatttaaaattaaattcaatattctcgagaaaattttgcaaaaaatgatctttcgggaatttttccgatctttgggggttaaaaaggccaatttagctgatagggccgttctaatagatgtttttggaaaaatgccgaaatatggacaaaataccaaaatatggacataaatggcgaaatatggaaatatatggatatagaaatccactctagaagcttcaaaccaagctaaaaacatgtttttcatacatcccaggcgcctcccagagtctaggaaaaaatatggatttccatataattctatgccctatttatgatcacgagataaaactgagatttatattttttaaattataattatttttactttttgtgaattaaa

SEQ ID NO: 67245 - DNA, 700 bp, Heterodera glycines; identical to SEQ ID NO: 38431

SEQ ID NO: 67246 - DNA, 1397 bp, Heterodera glycines
atgggactgttcgccttcgcatgccaacgggacaattcggggtaccaaggagtgacaacgtacgacaacaccaactacaacagtcagtacggtgggtatggcatcggcaactacggtaatggcaacaatcagttgcaacagcaacaacaacagcagcagtatccgcagcaacagcagcagggaatgtcagtgccaagaaaaataatttaaaccatttttggctcgtttcagctacacaacggggtatcccgcttttggccaacaaagtgccaacaacggcttcggccaggccggctacaatggcttaatgggacaacaacaaatggcacagaatggacagtacggcgcgagtggaacgggcgcgacaatgaacaccgccacaggcacacgctacgtggacatgtgcatggactggtggaacgtacgacgggccgatggcgaggcgtaaccgcagccccctccctcccaaaaaaaaaaaagattttagggatttcttgtcccatacataccgggattgggcttcggttaacccctggcaggtagcagggaaaaggcacccattggcctcgtttcagaatcagcccgtgtgggagaaggcggtcgtttgccttatgctaattgccttggcatccgccgctttgtccttggtttgggacttgctcactttctgcgcctgcttctgtcccggctccatcatgaagccgttgccgggcttggcaagcaccgcttttgtcgctcttctgatcgctgtcatcgtttattacgtcaacaaccaatcgtccatcggttggcttattttttcatttgcgtttttcttccccaagtcaatttcacacgatttttcttccttttttgtcgcaccattaaaaaaggacaaacttattttttcgagtaaaaaagggtcgacataataggaaagtgccgtcatttatgggaaaaatgaaaatggcatcccaaaagaatggaaaatcggtcctttaaattgccaatgttttgactttttgcttttcatttatttgttctttcccaaaaagacattatgcgcgcgacgtcgcaactgcagcaattggacaaccaaagcaacgtcagctacagtttttacttggcggtgggcgccaccgtagcctcactgataaatatcgtagtcggcactttgactctgtttttggcggacaaatgtttatgagaaggaaacagacatacaaaagaaacaaacaaacaaacaattgttgccatgtttccccattaaaatttcattccgtgtgatcagttatatttttaaatttatttaccgattgaaattttaaaaaattttaatttttcgaaaagggggcgaagtaccgtcggtagttttttatccatattttaagattagccattgaatatattccgtggaa

SEQ ID NO: 67247 - DNA, 162 bp, Heterodera glycines
ggagcaaaaagaagaaaagagaaaagggacggggaaaatggtaaaagggggaaaaagtaagaggggaaaatgacgagcaaatcccagcaaaagcaggggagcagtgaggacgaagagccaaacgaatgggacaaactcagcggagcatcggcgaatgggggg

SEQ ID NO: 67248 - DNA, 677 bp, Heterodera glycines
atgaacactgactttcccactgcttctaccattttcgcacttcttgccactctcattgtcatgctcattatgccagacaaatgtcgtggtaaaattggatcaaaaaaaaagaaaataacttttcttaatccatgacgtccacaaaaatggggtgtttgttttccgacaaaaaaaatttgtttttttttgtcttatttaatgatttaatacattagtcagcaactaagtgttttctttattaacctacaaaatttttttctgttaactttattaaaattacttaaaaaaggcgctgattttggaatttacgattttttcttgttgtagcatttgattgcgttcatggagactaccgtcctattcagctggatgatcaaatgaaaagagagaaattgagcgatggtgcgctaagtatcaggggatataagccatgtgacttgtctaattgcttcaacaccaagtgcatttcgtcaccaggtcatcaaattaattatcaatattgttcttgcctttttcatttggtctcgaaaaaagtgtccttttttttttgttgaactgcgaatttaagagaataattgaccattttggtgggaaattcagccaatttaaacagttccaaagcattaaaaatttagggggccacaaaccatttttggacaaaatttgaaaataataaa

SEQ ID NO: 67249 - DNA, 690 bp, Heterodera glycines
atggaaaaggctagcgaagatagcaatagtcaaaataatgaaattgctgatcaaagtcgtgagaatcgaattagtgcacgaagtcgagacaaacagaaaagagagccgaaagaaaacgcggaaggagatgacaatgtcaggggacaaaggaacaacgaagaccaacggacaaagcagcgacaggtttggcataattttttaaacattctttgtgtcaagacacaatttttaatctaagggcccaacaagacaatggacaaggcaaaggccgcaacaccaacaaaaccatttggacaccaccgatgattcgtccgcgaacatttcctcccgaagaggcgaaggcagtggacgaaacacaccgactaatgttcagcagcagcacagaggacggggctttgctgaggtctctttgttttcaaaaaatattggcctacgttgactataaatttttgggtatttggttgattcgcttaattcgaatatgcgtaaatattcgacacaaatgtctgggaccgatgactcatttatcattttaattctgtgcttaattaatctctctcttagcatcggggcggaccgcgtcaaaattatggtcagtggagcacacgacaaatgagtgaaggtggacaaatgggaggaacgtacaaacgaattgctaaggtttctcaacatagagtttttatgggttaa

SEQ ID NO: 67250 - DNA, 950 bp, Heterodera glycines
atgtcttttaaacgcgtgaactccttccaacccgccgtgccaatggccaaaaaatgggatttccgatcaatcgggtaagacatttttaataaattaaataaaaaaataatttcttaaacaattataaatacaattataagataataaataccctttaagaattatttcaaaaaatttttttgttcagaaataattttgctgaagaaatggaaaattataaattgatggattaccaatcgacaacttgcgaaaaatttggatttacgaaaaatattacggaatttcgtgtcaacccggatgtggagcgccccgatgaagcgatgaaggattcaatcgacaacatgataaaggtggctttaaaaactacggaagaaaaaatgaagcgaaaagtgcggatgtttggagtggcaattacgggtgctgggcttgcttccccggtttgggtgccgtatcgggcgtacccgcaaaacaatgcggatgttatcatgcaggagattaataagttggggcagagcggggacggagatgaaaataagaaaatgcttttattatctgagccagttactatgaaaattacttgcgtgaccatgcccagtggagaggggccgaggaatgtccacaaatttgactttggattcaaggaacaccagcggatagggtaagatttttccaattaataaaaataaaataaaaaatagaaaaaatcaaataaaaatttaaaaaataaataaacaaagaaatttaaaataattatttctagaaaatttaatgaagcaaaaaaaaaaaatttttttttcaagaaaaaaattggaaaacagctacaatgaaccggacaaataaatcatgataataagacaatactagttgattgagacaattttcgaggtacagattaattcttaacttatttatattttgcaaatttaatttattaatatttttacagatag

SEQ ID NO: 67251 - DNA, 388 bp, Heterodera glycines
caaaagttttttacaaccacatattgccatctaatttcttgcagattgaaagccatccattgcctgccggttctcgtcacagcaaagcactaatagggtgtttgattcacttcaaaaaataattccttacccacaagttttttacaaccacttattgccaatttaatttcttgcagattgaaagccatccattgcctgccggttctcggcacagcaaagcactaatagggtgtttgactcacttcaaaaaataattcattacccaaaagttttttacaaccacttattgccaatctaatttcttgcagatttaaagctatccattgcctgccggttctcggcacagcaaagcactaatagggtgtttgactcacttcaaaaaataatt

SEQ ID NO: 67252 - DNA, 642 bp, Heterodera glycines
ttaatttgcgtttttgtccttttcgccattaatttgctcaattacatggaccgttttaccattgcgggtaaattttacttcaaataaataaataaaaataaataatttaaaaaagtaaataattaataatttttaggagttttaaatgacgtccaaaaattttatcacattgatgataaaagtgcgggttttctgcagacagtttttatcattttcttcatgacaattgccccaatttgcggctttttgggggatcggtaaatgcacaaattaatttattgtcccatacattggcaaatgcccattttgttgtcccatttaagtttcaatcggaagcgcattttgctcgtcggtctctccgtttgggtcggcgccgttttcgcttcttcgtttatcagtgaaaatgtaaaacaacaaaatatattaatttgaaaataaacagttaattatttttaagcatttttgggcttttttgctcctccgtggcgtcgtcggaattggcgaggcttcttacgcagtgattgcacccacaataatcgccgatttattcgtcggtcaaatgcgcagccgaattttgatgttcttttactttggcatccccgtgggaaaggtaaaggcaataaacaatccaatcattaatta

SEQ ID NO: 67253 - DNA, 1213 bp, Heterodera glycines
atggagcagtgcactgttgaacacattcgttatcagctgcgaacaggacgtgcccgggaacaggacaaagtcaactatggtggtagtggtggcggtggcacgcataggaatgatcaaagtgccgccgtatggatgagagaccgacggtgcaatcggtcggtttgggggactaatttagaaaaatattacagacattttttaaatcaaaaatgtttttttataaactcacataagacattttttatttgttttgtaatgcaacaaatgagatttcgtaattttttggtcaagattctcgttcagtatgaaactaaataaatcaaatcaaaaatattaaaatattttaccatttgaatatacaaaaattaaaaacaatttaaatttacatatttttaaattctataataaatttaggaatctaactgcatcaaaaaaagagctaaacttaatcatatacaaaaaataattttaaggaatttctcgtttgatttaaactttgaactgaatgacgataccctcaggcgctaacagaaaattatgaagaatattgtgcccatttttaataacaacaataaaattgaaaaaacccattaaaaattggtattgtttgtttgttcagcaccattggactgcttccatttgctcgttcgcatttgtttctgttgctgatcgacggcatttgtcatgaatcggcggcagagaagaaggaatcggcaaaaacgcagcagcagcgaaacggagccgaggacaaacatggcacttcaacagcagcaccgtctttgctattcccaaaatttatgtcgcaaaaacagggtaattaataattaattaattacatgtgtgaaaaaaaaccgttgcattaatgatatcgctattcaatgctcatcggtgtaatagtttttagtattcatgttgtgttttcagtgccgaattgtgaattgacacgttcttcgatggatttggagcggacattgcgtcccgatttggattatacactttcacatccaaaggcgggttttcattggtgctgctcgaaagtgttgaatcgtaaaaaagagattattcgaatcaattttgggtttctagagaatatcgtagggttcaatttttaaatcgacaaataggcattatttaattattattttttaaatataattttcaaatttccaggaattcaatccgatctgggaagggtattcggcacaacaactga

SEQ ID NO: 67254 - DNA, 2700 bp, Heterodera glycines
atgccgcacaaatcatggtggaaatcatttggcgaagtgttttttgggcgaccgtcccaaattgggcgtgccggcgaagaaaacgcaatggcatcggcagcggatgacattgacgacaagcagctttaccgggccccatcgatgactgagatgatgcgggtgggaattgcttaaccaacggcggggagggaagaagcatggcatgaaatttggattggatgatttgagttaatggttctaccgtatttttaaaccaattcaaaaatttcaaattctctttcggaagcaataggcaacactgaaactcttcgatttcaatcaaaaattacattcccacttttttatactcatttttaaactcccattttggacttttggcatcccactgataattgataattgtcatgtcgccgtattctgaccaataatttactgcaatttccacactaagaaaaaagcataattattctctttaattattatcttgagaatgctaaaaccccacctttaattgctatcaacattaaataaatgggtttttttttacagttttgttgccgctttggctgttctctgcgcgatttgttgccatattgtgacccatttggcgagtgggacagctgaagaaagacggaacagaaaaagcagagggatgaagaaaagaagaatggaaaaaaaacaaaaaaaagaatgttagaataataaagttatttattcaaataaaaatatataaaaaaagaaaaagtgaaagaaaaggcgaataaatgagaaacaaagggaaagaaatggtgtcagcaataaagttaattatgtaattacttggtaattaatttactattccaccaaaggaaagaatcaacttgcttgtggacatagacataataaaatagtgctcaatcaaatgaaaaacggtcgaatacaagttttatataacttaatccaagaattggtatattttattttaatttatttattaattttgctctatttaatttatttaataatctatttgcctaaatgtctctgcgcggcgcggtttcactttgcatgagtgttgtgtaattattctgtgtatttgcgcgttcctgtttcaactttgtacggaatgatcttctttttatagagcagacatggcttatgccttttaataatttcccaattatataattacttccgaaaattacattttgagagtgtataaaatggcaataaaaattagttaaattaaaatgaaagagaataatttctttttgttttttaccatttttggtgccattttcaccgtcgcgtcattagccataattggcattctttttcaagtaaatttaattaatcaatttagtaaattaaaaaaaaagtgttaaggaactcagtttacttcaagaacaaattgagaatggaatttgggaattcaatgcgtatgctaatgaaagttggaccaaaatgcagcaaattaaggcaaccaaaaaaaacccataaaataatcttcgtaataattaattagatatttaaggagaatattcggcttacaattccgcgctttgtccgtggtcgtcgctggacaaattgctgcggtcaaaattcgatgaattattaccagggaagcggtcaacaacaacagcaaatgggcaacaacaacaacaacaacaacaacaacaacaacaacaacaacaacaacaacaacaacaacaacaacaacaacaacaacaacaacaacaacaacaacaacaggttgatttgctagaggaattgaacattaaaattaattgtttaaataaaagtgataaactcttttaaatagattattataacaaaaatatattgtattatatttgaattacattgaaattttaacaaattactactaattaaaaaacaatatgcgataaaaatttttgtttttaaaattggtaaaattctcgattaaaaaataatattcaattaaacatttaataataaagaataatcttttcatatttttttcagatattcttctccaaatttcaatcaccatttggctgggggaatccctcctcccccaccgcattttgcacccattcgctgcccaatgggcccgcccggtccgccggggcatcgcggcctcgccggtgagcccggcctcccaggcgagccgggacggcctggcatttccggaagcgaactattcaactattttcatgcgcattccacccattgtgcgccctgtccagccgggccgcccggcactgcgggctcgagaggaccgtccgggccgcaagggccggacggactggcgggaccgcccggaacactcggcatcgaagcctatgtaatgagggagcgaatgtggcatgccataaccaatataaattgttagcctggtccgtttgggcctccgggcgaccccggccaaccgggcccacttggccatgtcggactgcccgggctgccgggacagtcgtgcgagtcgggcggcattggacacgtaacgcgggaacattatttatcttaatagatttttcaaatttagccaggtcctcgtgggaatcctggccatgtcggaccggcagggccgcaaggacccaccggagagccggccacggaagggcggcccggcctgcctgggccagtcggaccgatgggcgagtccgggacgccgggcaatcgtggccaacccggcattccgggcccacccggactgaacggaaaggacggcgaata

SEQ ID NO: 67255 - DNA, 1094 bp, Heterodera glycines
  unsure (1)..(1094): unsure at all n locations
atgcgcaaaattcgcgaaattgaaaatgagaaggaggaacgcatgaacgaggcacgggacccgaagcattggaaaatgagccacaacgacttcaagcgggtcatcggcgaatcgcgttggttttttggtgaaatataatttggcactaattcaaattgtcaaaatggaaagtcatggcaaatttatttaaaaaaaagagtgaatccaaccaaaagcgcttaggaaaatccttggaaattctgcataaacagcgcattaaaatgaaaagaagcctttaattggcgttgaaattttaattttaaaaattttttaaacataaagtcaaaaaagtaagccccctccccttaagaaacgacttaacaaatttcagaaaacccagccacccctgtaaaaattgccttttttgttggtagtttttcagtcctaaaaaataaaacccgtttaaaaagtttgtctgccatttcaaatcatagtttttcaaaattttatctatttatgcactcgaaaatagattccattggctaattgccaataaaattccaattaaaaaaacaaaacaataactttttcccccgtctacagtatcgcttattgttcaaacgctacaaaatgatcttattgtgccggcgtgggctcatttcggttcgatcatcaaagaaatttacacggaggttttgaaaataaatttttgtgactaaaaacaaattaattattttagtgcattccaattactgacggaaatgtggccaattatattccacaattagccagaatgtcaccaaattattggggagtgtcaatttgcacggttgatggccaggtaaaaagaataattaaaaaataaatgcaaattttattttattttttcaatttttagcgcatttcattcggcgacagcaaagtgccattttgtgttcaaagtgtttcgaaggcattaaattacagtataggtacaataaaattatttacattaattanataatttattttccaatttttgttttcatttttaaagataatttaattattttaatttgttattgtttttgaatgataattaaaattagcattttaatttagataaaaataataaa

SEQ ID NO: 67256 - DNA, 668 bp, Heterodera glycines
atggtccacgcggttgacgaggacgggcaaaaagtgagtggactgtccaagagggccatggccatggagcaacagacgagctaattaggtgataattaattaattgattgtaaaaatggacaattttacacaattgtttttgtgatcgtgggctgaaacttttgcgcatatgcttaaaaatgattcaagtctgttagttttttttaattttaaatgtcaaaaataacattaaacaggtgggatgataggggagcagttcgttttcccaccacatatcctttcgtataaaaataatactttttattatgtataaaattttttaaaatccgtttttttttaaaaagcaaaatattctgaattaacagtttgaaaagtaatttttttcaaaaagaagcaaagtgtatgtagttgtccaaattgatgaataaaatcatttgatagccctgtgtattttttagagtgccacgggaccgggacctggtagcggacaactgagtacaactgagtaccaaggtcccggttttgaccgggaccgggactagtcccggttttcccagcaaaaaattcccgggttttcaacccgaaaaggtcccggtcccggttaagccaaaaattcccgatctcgctcaactctagtttaaaattcattcattttacaaacatgatga

SEQ ID NO: 67257 - DNA, 65 bp, Heterodera glycines; identical to SEQ ID NO: 56492

SEQ ID NO: 67258 - DNA, 59 bp, Heterodera glycines; identical to SEQ ID NO: 52421

SEQ ID NO: 67259 - DNA, 877 bp, Heterodera glycines
atgtcccccctccgtttcttcgtcgccctttttctgatcactttggcaattttggccgggacccacggcactgttgagaactcagtggatggtgggccaaacatggcatcgccgattatccgtgaacgccgtaagttttattttattttattttaattgttgaatttaattaaaggttggggccatggcggcggaggccattggggctgaagaaaatggtgggagagataatggaaaatggagaacggaagaagcgataaacgatgaaaacaagaaaaaataatttgtggtagaagaaaaaatgctgaactcttaggtcgaataaagtttcaatgaatttcttattttttactcaaaatcgtcaaaaatttgggctttgcaaaaaacgcaattttaaaattaaatagcaaaaaatgttcttagatacgacctaaaaagctttggtcctttttaagtcggctttttaagtcgctgatttctaataaatccggaaaaattcgaaaattataaaaatatctatccccttattatcaatcattatgatcatcatttttagacaaaagttgttgaatcaaaaggaaattagttcgttaatgagtgtttcaatcattctgatcattactgacagatgcttaaaaggaaatgattcattgaaaataatgagacactctgtgagcaggatcccaattttaataagcagatggatgatcaccagcagaagtaatgtaatgagtcttgagcggtgctatgacgttagtcaaaaaccatcaaatgctgaactcttagttcgaataaagattcactctaattatccaattcaaattgattagtttatttattaaaataattgaattaaattttgtcacaaaagggaata

SEQ ID NO: 67260 - DNA, 647 bp, Heterodera glycines
atggcggcggaggccattggggctgaagaaaatggtgggagagataatggaaaatggagaacggaagaagcgataaacgatgaaaaacaagaaaaaataatttgtggtagaagaaaaaatgctgaactcttaggtcgaataaagtttcaatgaatttcttattttttactcaaaatcgtcaaaaatttgggctttgcaaaaaacgcaattttaaaattaaatagcaaaaaatgttcttagatacgacctaaaaagctttggtcctttttaagtcgctgatttctaataaatccggaaaaattcgaaaattataaaaatatctatccccttattatcaatcattatgatcatcatttttagacaaaagttgttgaatcaaaaggaaattagttcgttaatgagtgtttcaatcattctgatcattactgacagatgcttaaaaggaaatgattcattgaaaataatgagacactctgtgagcaggatcccaattttaataagcagatggatgatcaccagcagaagtaatgtaatgagtcttgagcggtgctatgacgttagtcaaaaaccatcaaatgctgaactcttagttcgaataaagattcactctaattatccaattcaaattgattagtttatttattaaa

SEQ ID NO: 67261 - DNA, 977 bp, Heterodera glycines; identical to SEQ ID NO: 38452
  unsure (1)..(977): unsure at all n locations

SEQ ID NO: 67262 - DNA, 104 bp, Heterodera glycines
gtcaaattggccaccgcttccgacgatgcgaccgcgcgcgtttgggacttcgcgcggtgtgcggagagcgcgtcatgcggggccacggagcagacgtccgatcg

SEQ ID NO: 67263 - DNA, 505 bp, Heterodera glycines
caaaagttttttacaaccacttattgccaatctaatttcttgcagatttaaagccatccattgcctgccggttctcggcacagcaaagcactaatagggtgtttgactcacttcaaaaaataattccttacccaaaagttttttacaaccacttattgccaatctaatttcttgcagattgaaagccatccattgcctgccggttctcggcacagcaaatcactaatagggtgtttgactcacttcaaaaaataattcattacccaaaagttttttacaaccacttattgccaatctaatttcttgcagatttaaagccatccattgcctgccggttctcggcacagcaaagcactaatagggtgtttgactcacttcaaaaaataattccatacccaaaagttttttacaaccacatattgccaatctaatttcttgcagattgaaagccatccattgcctgccggttctcggcacagcaaagcactaatagggtgtttgaccc

SEQ ID NO: 67264 - DNA, 2737 bp, Heterodera glycines
atggaatttttcttgggggatttcgaatcggatgaagatgaagttgatgaaatttcgcaagttcttttacgggaacaaatttcacaaatgcaaacggaggatttctttcttcctgcgcacataaaattcacaactgatgctttcgaagaggagaacaacgattttctgtcggctgctgattttcctgatgactaccattactttgacaatttttcggatgagcaggaggaaatcaaacttatggaatcgccaatgttggtggaaatccccgacgaaatggacactccctcacattcatttggtccgttaagttgacaaaaagcagtaatattgaaggtgcttttttgagattattccatcaaattgagtggcaatgaaattgaaattttggatcgaattccggttatatccaaacccgggcagacaaagtctgttccggcatcgcatcgtcctgttgctgaggtattcgtaaggcaatcacagttcagcatttaagaggactttttagaaaattcagaacgaaaatttgctaccgggcgcacatcagcaaaaacaacggcaacaaattgagaaaacgcaacgaccatctctggcgatagattcggctgatataaaaaggcgaagacgcccgacaatgaacgcggatgactttgtttacactccgctgaaaaaagtgcgactgacagtcagaaagatggaggaaaacgttgtggtaaagagagaggaggaaactttggtcgcgaaaaaaaagaagaaaccaaaggaaaggagcgaaaaaccgaaggaagtgaaggaaaagcaaagggaaaggagcgaaaaaccaaaggaaatgagagaaaagccaaaggaaatgaaggaaaaagaattccaaggggttgaaatgaccaaaaaaacagcggaaacagtggtagcaaaaaaggaaacaaagccaaaagaactgaacgaaatgcaactgcaaaggctcaatctgatcaaaaagatcaaagagaagaaagcggtggcaaaagagaagagggagagggagcggaacgaaaaacaaatgcaaagactcgaatttattcgacgaatgaccgaactgcgccatttgaatccgttggcttccccatcgcgtgggcctttcctctacgaaggcgactatttctaccgcgaaattttagtcgggtaattatcgctccgctgacacttatctgaatgcgttttcagtcgatcagattcaaatgccaacaatggtgaagcggaggtcgattgtgtcagtgttagtgcccccggaggttttgatgaattattcgtcacaaacccagccgaaaatagtgccatttcgataagcaaaatgatttgtggaagaaagaaggctttgaacaacaaggaagaggatggagggacttattcagaagaaaggtgggcgtattaaactggtttttcgtgaggggtgagaaattaaatttttaaatgtttcagtttcaaaaaccttggtgttgaagcccgcgaatttcttggcagtttcctcaaattcatcgatgaccagcgtctcgttgacttggcaacccaaggagtcactggtggtgcgtcaatgtttcacagtttgacgatgaaaaacgccaactgtctgcgagagtctttacggctttattgtaaagtaagtttttgcatatcaggggagaggatgtgtccatgatgggatggagagggagggtgctttggttcatcagagatgaaagtgcacattttattttgttaaatttcagtccggccaagcgcttcttgtgcaagttcatttttggctgttaaagcatttgagtcaaactcgactgacttcgtacttaaatctgttacgcttccttaaaaacgcggtttgtttagttttaaaaagcaaagacaaaactacaaattaaagggcagcaatctcagcgattacattgcctcttctccaaccgctgaagccgaactcgaaaaggcgaacaaaaccatttcggaattcattgcgcaaaaactgtacgaacctccgttgagttcgtcttccaaatttatcgaagttaattctcggattcgttcaaacaaaaatctgtttcaaaaaataaacctgtaattaagtgcgatccgatcaaaaacgtgagtttggtgctcgtctatccgcaaatcaatgccaagatgagtcaacatacaatccgtgcccacgagaccctatttaggtcactgctctttcgtcgctttccctttgcaaaagctaatcgtccgatgggtcaaatgctttcaggaatctcttgccgcttgctgtttgctgtgtcgagaaggttgagcttaacttgaacgtcgaccggcccatcagtgtggaggagtgcgcttggatgtgcattcggatgattcggcagagggtcaaagaaatagcgaaaaggcggcaaaacgatcacatttttcttgcgggatggggcacaacctgttggctcaaccacaaagtgatgcttttgatgctattgacgacaattttttctaactttcaggccgtgagcaaagtttccaacgtttccggcattttggactttgcctttcccacagagagtccttgcggctccaggggggttggtcatttcatttgaatcttccaccgatgcaaatgatttgtttcagtcagtcgacgaccaaatttgtttgacttacccatcaactctttttgttgttggcgaagatgcacacaatgttcgaatgcaggccttacgtcaacttcgtaaaaatatgattg

SEQ ID NO: 67265 - DNA, 468 bp, Heterodera glycines
atgacactgcttttctgtctggcactttgtcctccaatcagcgaattgagtggggcactcaacaaatcggttatgaaaaaggtgttcgtactgctctgtccttctctcgtggtaaaagcaatgcctccgtcaccgatgctttctgtgccaaggaaaattcgttgagtactcgtacttttgctgctccgtcttgcctcactcccttccgctcaaaatacgcattcgattatgtcaatactccttcagggtcccgcattccccgactcattcgagtcgaacctaaaaaatgacatttattcgtccattctcattgacaaaaataacgattgtgcattattctcctgttgatctcacttactcattgtcagttgtaaggaaaagtcactttgatatcggatacatatgtttatgtctcttacaattagcgttgttttcatcacattatgaattaaaaattcctataataaa

SEQ ID NO: 67266 - DNA, 518 bp, Heterodera glycines
atgtattttctccaacttgattcatttccaattataaaaatagtgttagtcagctttttggagaagcatttttcgactcaagtgcaggtgatggatcaactttattgtttgtgggcgcaaaaacaatttttatttcaaatccggatttgtggccttccaaataattaagtaagagcaagagaaaaataaagctaataaaaaatattttcattttttatgtcaatatatgacaagaatgattttaacactgaaggggacgatattttataaattgaaaatttttattaatatggcaaataatattgacagcattgattatcgtttctgatgtaataataatatttcatgtttaaaataatttttattatctgcttaaatattattccattgaattataattaatctaattattcattatcattgatacttttttaggatcgacctagcacccattctcatcctctgaggatcaaaacattttgcctaagggataaaaagagatcactgcaatagttgaa

SEQ ID NO: 67267 - DNA, 62 bp, Heterodera glycines
ttatatatatgttatataggttttgagtttcgtttcaaaaaacaaaatctcccggccgaagg

SEQ ID NO: 67268 - DNA, 1411 bp, Heterodera glycines
atgaatgcagaatacgttgagacatgtaattaattaattatatgtattaaataaatattttaaatttgtattaattaatttaaattgcaaaattataataattaatgtttcaatttgaagtgataatttgtccatttgtttggctgttcattgcgaattcagcagtgtgcttgctcctattatttgttaatggatggccgaaaagtaaacatttatcaacaaacaaaaaaatttttttttaattatttcgattagattttttgtttttgattatttttgggcttcatctaaaatctttcagctatttatttggaaaatttttttttaattttcgattatgcataaatttatactttccatttgtttaattcagttgaaaaatttgggacaaccaacaattggggcaacattttttgtcaattggacagtgcgatggcaattttgattggatttggctgggcatttgcgccgttatggcttctgcggaatcaagtaaattttaaaaaaatagaattgataaggaataccatcaaaataaaagtgattatttgttattttttttttattaatcattgaaaattaactgacaattttaagtgcttatacaattggacccatcacatcaattttgtggccaaattattggggtcaattttttgagttcgtacattatcagcaactatgcagtaagaatacaatataaataaaaaaatattttaataattttaaatatttttaagtttaattatggttgtcgagaagggttcaaattggcagcagaaacacgagcattgatgattgtgtgcatcaatttggcacaattttggtcccaatttatttaccatgctcactggtccaataaagtaaataaattacatagaaattattaataattttaggccctcgattttcattatgatgaaattactcgatgaaaaattttttaattttcaacgatggtttatcaaactccgaaaatgattttgttttactaaaaaatttgcgaaaactcaaaattttccatttaaaatttcgtggatcccacaaattggactaaaacgttatttgcaattctaattacaatcgctttttaattttctaaatggttttttttatttgtgtttttcaatagcatttttgagacttttttcaaaaaatgaacctaataaaaaaacataaaataatttgcctaaataaatttagcatatggccgggatttctgtgttcatcacttgggccagcatttcgatcatttatcgtatttatttgttgtttgccgatgaaaatgagaatgtgccaaacatggaaatgcctgctgctcgggttgcccaaaatggcaccactgtattgaccaatggaaatgcgacacattattacaagaaacggacataatcattgtcaatccattaaa

SEQ ID NO: 67269 - DNA, 630 bp, Heterodera glycines
atgtcacgtgctgatgaaataaaagaaaatgcagagagattcgccgtcttcgtcttgtgggtacgcagcgtggtggatgttggcactgcggggatgaccatcttgttaaatgctgtccgaaacttgtgggtccggacggcacaaaacgtatgaagtgtcaccgctgtcgtacgtggagtcatgacgctagagagtgtactaattgccatccgtacactttcattggtttgtgttaagaaaaatacgtttttaatttattttcttagagggttcgaaagcatgctggaattgcggcaagcaaggacacctagaaactagctgtcgctacccgccgtttcggtttaatagaatattaaaccaaatcatattgtttgtttagttatgtccctgtgggttcgtatccaaaatgggagggccaggacggctggcaaactttctggtaataagacaattgctcgaaacaattcagtttgtttatgtacaacccgaagaatctaaacgcatacattcattcatgcccagggcatcggttttcaatttcaaaccgtaaaaatagttatttgaatatttatttattcataatatatttaagtggatccgcaacccagtcatggacaatgggctaataaa

SEQ ID NO: 67270 - DNA, 708 bp, Heterodera glycines
atgagaagaggtacaaaagtgattagaagaggtacaaaagtgattagaagaggtacaatggtgattagaagaggtacaaaagtgattaaaagtggtacaacagtgattagaagaggtacaatggtgattagaagaggtacaacaatgattagaagaggtacaacaatgattagaagaggcacaacagtgattagaagaggcacaacagtgattagaagaggtacaaatttgataaaagaggtacaaaagtgattaaaaaggtacaacagatacatgaaattctatcaattaaaaaataattaatttaaacttataaaatttatttatcaaaaaaaattaattaaatataattttttatttattaactcaacaaaatattttaaattaattaaaatcattgaaaataacgtaaaaatgcacaaaaaaataatgttacaccgtccggattcgaacctgccccccccccctcaaaatgatgcctcagaatccccaatcacacagggattctgaggtcttgacgatgtcaaaagtaaaatctgatcacgtattcgtgatcagcggcccaaataacccctaaggacatatttttggaagatttttgtgagaaaaatttttccactcaaaaatcctgtccaccccctttggacccgaatcacaaaatcacttttatttttatatcttattttaaaaatttgataaaaatgtaaa

SEQ ID NO: 67271 - DNA, 951 bp, Heterodera glycines
atgccggatgttatttgcagctgcagttttggccagatgaatgtcgaatttgggaacaaaaatttgcgtcccgagccaaagaaagtgatccccaccagcaccagcaccacagcaacaacgaatacggtagcgtcaaagccaaagactatggtaaaaggttattaataatacatggaaaaattatatattaaaaaatgttattctaatgaatagaggatgttttttaaattttacatgtggttttattgtttcgatgaacatagcgttacaccattaagaggggttataatttaaatggatatatgaaatcccaaaagatgggctcaaaaaaattgcagtaaaattttttaatataaataataaaataaggttttaataaaaataaacgtatttgttattctttatgagtttattaaaaaatttcccttttaggaataaattttaaaatataaatatgattttcttagtttttcttttttgattttctttttgatttttgttgtgggtttattaaaaagagataaaattataagttttattgaatcctttcaaaaatttggggctgaatttcatttttcataataaatttctaacaaaaaattgttcagacttcttcaatccatcccagtattactgctgaagttgtcaaaattggaagcacattgcagtgttttgcctggcaaatttgcaatctgttggttttttttattcaattttcttggcaaaatgtttgggcaaaatttgaatttgctttctaaaggaatgcgaaatgggaggcgaaagtttcgcgacgctttaaactcggcaaaaaatgtgacgaagtgaacgaaaaatgggaccatttgaacgaagaaagcagcaacaccgaatacgtgaacaatgtaaacaacacaaatggtcagctgtttttggcggaattcatcggagcggccattaaatcggagaaataaa

SEQ ID NO: 67272 - DNA, 603 bp, Heterodera glycines
atttactattaacaataatctcaaaaaatcaaaaatagtgggcctttttaaatggagttttttaaaatccaaaaattaaaggaaaattaaatgactttataacgtaaaaatattcaaatagaaagttataaatgctaaaatctttataagaaataatttataaatggatatatataaaagtgatcagaattgggttggatttccccaatttcagtcaaaatcccgataattgataaattaaaagcatcatttaatcttgatgaaaatgaatttatttctccgatttaatggccgctccgatgaattccgccaaaaacagctgaccatttgtgttgtttacattgttcacgtattcggtgttgctgctttcttcgttcaaatggtcccatttttcgttcacttcgtcacattttttgccgagtttaaagcgtcgcgaaactttcgcctcccatttcgcattcctttagaaagcaaattcaaattttgcccaaacattttgccaagaaaattgaataaaaaaaaccaacagattgcaaatttgccaggcaaaacactgcaatgtgcttccaattttgacaacttcagcagtaatactgggatgga

SEQ ID NO: 67273 - DNA, 1208 bp, Heterodera glycines
atgaaggcaaatacagtgttcgtttttttcttctttttattcgggcttttgcagttttgtttcggtaatttttaattgctataattaattaaattttgatgtgttttcaataaaaaggattgttctgcaaacaaggaagagcagaaagtttgccaaaccaggaatacactattgtgaaaaatggaaaatgcttacctgataaggagctgtgttttgcggccacctgctcagcatgtacaatgacaaaatttaattattattaaaattaaatttattgcatttttcctttgctgtgatattctataaatcaatcacttttggcaataattggttaattaattatttttttcatttttatctcgctctcgggatcataagcacatttctgaggtacccaactgttcgagaccaaaaatttcccgagactcgagacagagactgaaaacccgagacccaaaataccgagcccgaataatcttttttcaacatttcgttgtagatacatttaaaatacagtttttattttggaaattttttccattttacaggggatcagccgggaaatgtgttcctttattggggctgtgctcaatcggtttggagcgatgaatgtatcctaagggcaaacgtaatgcaaacggtcgttgggtctgccaatgtttcatgtgaatgctttcgtggtgagacgggagtcgactggtcaaattcgaaaattgctcttcctcctcaaagcggaaaaagtgaaattattaatattattacttatataattatttcattcaattcataatttacttttacaaaattccaaaatattcaaaattaatattttcgagttatttattttgacaatttttgggtcgagaaaatatattttttaaatatttttggcggattagctacaatttgaaagctctaagcttatggctaaatgtcatacaaaaagagtagtgatatgataattagatacgtaaaacgtgtgataagaaagtatatttttatttaaattaattcataaatcaggactgaaatgcgttggaggatcgctcgatgagaaaagaaatggaaaaacatctgttcagtactgttttgatggttatgaattttgctataaggcggtctgtgtgaaagttaagttttgcgtgtatgtaattaagcggctaatgatcttttgtatcaggaatcaatttttccgaggccccaaataa

SEQ ID NO: 67274 - DNA, 343 bp, Heterodera glycines
atgctcgacccgacacttaattatgtgctgctcgtccaaggatattacgcctcgaaaaactcgtggggttttccgaagggaaaggtgggaaagtgtttcacaaaatatctaattccaattgacatttccttttcagattaatgaggacgaagtgcctttgaattgtgcgttgcgcgaggccttcgaagaagttggctttgacgccaccgaacacataaaaaaccccgagaaatgccgcccactgcagcacttttttggcgaaacattggtccgtctttttcttgccacggatgtgccgatggatttcccttttaaaccgcacttgcgaaaggaaatcaggtga

SEQ ID NO: 67275 - DNA, 259 bp, Heterodera glycines
atgtgccaactcgtcaaaattgatggcaccgaaaatggtgtcacgatactccacaaatggttccaccgatgtcacattgttgcaccggtcccgatccgcacaaatgcatgtgttcacggatgggccaacctttgggcaaaatttaataattcaattaagtaattaatagttaaacatagttgaatgtataaaaatttaattgtttttagtgtttcttaaataattacataattaatttaaaaaatcattgttaaataaa

SEQ ID NO: 67276 - DNA, 312 bp, Heterodera glycines
atggattacgaaaacgtggcccctacagtattcagccccctagagtatggttgtgtcggcttgagcgaagaaacagcccttgaacgattcggtgaagacaacatcgaagttttccccggatatttcaagccccctgagttctttattccccagaaaagtattgccaattgttacttaaaggtagtcgcccatagagagggtaatcaaaaagttgtaggattgcccttccttgggccaaacgctggggagattattcaaggatttgccccagcaatcaaattaaatttacccgtaaaggatttaatggaaact

SEQ ID NO: 67277 - DNA, 823 bp, Heterodera glycines
atgccacggcatggccagcaaatgaacgggcaacaaaacgaagcgcacttagtggccacggaacaattggccgacctcgcaaagaaaagtgcgtattttcagggggagtgactcttttaagggcattgtcttagatttataacaattaggcatttcatagcggaggcttctgtttatctgatgaatccatgccataaatatgcaaggagtgtttctattctcttccccatagtgtaaaagaagtctaattgtaagcttgttaactttttaaaaatttcacgcggtgccttttccaactgccggtccattttcaacaattttgcaaattatctcgaaaaaaaatatcaaacgaaggcgtaatgttttacgaaatacggataccctttctttgccacccaaacatttactcttcttttcagcgctcatcctttttcgggatgccaacgaatcgttcagcgaccaaaatgccgtctccgattggctccgccgttccttcgatttgcctgctaattcgatttgcgaactctcctccccctcattggtcactaactcccaagtctttttcattgttttcgacgaaattgggacagccgaaaggattttggaaatgagcaaatccgaggagagggctcagaaaagtgagacaaagcgcaacgcaaaaaggggcatggaaaaaacgcaaaaaaaaaataaaataaaaaataaccgaaaatttctaaatgaattttcaacaattccattctttcagttttttaattttaaaatgttacttaaaagaatacttaaaaaattatttttgaactttaaattcggttaattaaaa

SEQ ID NO: 67278 - DNA, 724 bp, Heterodera glycines
atgtcagtagggttagtttatgacgctgatcacgaatacgtgatgccatagcgtaggattcctacactcgcctttcctacatctaggctaatggagttatcatactcgagctcaaagtatataaaagggagtggaaaatcgcttcctcggatcatttgtgaaaatctagcgtaggaatcctgcgctggctaatgacctagcgtaggattcctacgctagcctttcctacactaggctaatgtagttatcctgctcgagctcaaagtctataaaagggagtggaaaatcgcttcctcagatcatttttgagaaacctacagaaggattcctacgcagaataatgacctagagtagtattcatacgataaccacagggattgtggcgatccaagcaatccacagcacgatagggcatcgtggtatgaccatgactgtagcttctcgcattttatttttgatctcgtaacatccctctgctggtggcaatattgcgacgaaatcaacccatcaattagaccattgtaaaaaaagtatcaaattcagacatctttctgatacaacccctattgtcgaaataaaataataatccgaatatcagtccctttttaagtttagtaattaatataatcatttattttgtttcagtccgtcaacattctatccaatccgttcacagtgcgcagctgcgacaattgaattcattggcatgccaagaactgtttga

SEQ ID NO: 67279 - DNA, 483 bp, Heterodera glycines
attttttgcctatcaaatatttgcaataaatgcccatctatttaaaaaatattctattctattaaaatgttctgtattttgctatatattaagaatagccgtacatctaaaggagtcagtaattgaacaaatttctcaaatttcaagaaaggttcaggcagtcgccgtaaaaattgtctatataaaaacaatggcgttacgcatttctgcactaggtcctttttcaaaattgatgtgcttttattgaaaaacatgtttaacgggccacaaattaatagacaaattcaggcacattcttaaaaaattctgcttttaattagttcatttaatagattatgcttttgctttgtttttttaaattctacgcctgcgattatctgataggacaatgatatcaataaattttcttctgaagaagcgaagagttagcccaaacgttttccttcctttctatttaatgatctatcatttcagatataacag

SEQ ID NO: 67280 - DNA, 176 bp, Heterodera glycines
  unsure (1)..(176): unsure at all n locations
gtccaggcctggatccaggtcccgatgancctggatttttcctggacctggattttcctggatttttgtccaggaaatcaaggtccaggtccaacatggaatccaggtccaggtccaggtccaggcttttttcaaaatgtcgatctctagtttaaacagctgtgagaattggcaaa

SEQ ID NO: 67281 - DNA, 237 bp, Heterodera glycines
atgatagcctccgagttggccgatcagattccgtcaaagatctccgatgagatggaggtcacgctcccgcacacgcgggcatccttcaaaattcaggcatttaaaattttggaaatttttcatgaaatttcacgccctccaggacatcatccccaaagggcatttgtccgactttcaaattgcgcccaaggacatgcagctgatccgtgccaatgagctggccaatgccatgatgga

SEQ ID NO: 67282 - DNA, 605 bp, Heterodera glycines
atggtttctgcaaaagttgtaaatattcactgtaacaaatcggtaatgctttcggagataaattctatcgggtttgacatggattacaccctggcgggtgaaacatttaaaaccagttttttccgaggaaaatcaaaaattaattttccacttattcaggctatttatcaccaaacacggaagaactcatcttcaaattatgcattgactatctgctgaaacataaagggttttggattgaagcaatatttttgtgtaatttttttttaggtatccgcaaaaaattgattctttggtgtacaatagcaagtttgctattcgcggcctttggtacgacaaaaaaagagcgaatggtgttgaaggtgcaaaacagtggcaacattctcagagcaacgcatggcggaaaattcttgacttggttttttgtttatttgagaatgaatttgtgcaaccaaaacttcttttaggaaaaaaattgctcaattgtatcccagaaacattgtcaaattgaaccgagaagtgaaagtgatgaacactttctacgacttgcccgaaaccgatctgttgtcccaacttgttcatctcttcgacaaagactttggagt

SEQ ID NO: 67283 - DNA, 3638 bp, Heterodera glycines
gacgttcaagctgccatgaaacatgtgcactgtggtgatggagcaatgaaggctcaaattttgctcaatccgaaccaatacgtggaaaaggagactcgaattggcactttgttggaacgaattcgacgttcagggaaaaagtgttttttgctgaccaacagtgcgtacgcgtatacgaaggttcgttgagggataggatcaatttctgcattttctgtcgggtacgccccattcacctcccaatattttaatccacgagaaaaccaaaaaataaaaaaaagacaaaaattttctaataataaatgaaaatttttggccaaattcgtattacgacaattttctgtacataaactttcggaattggaaaaggaaactgggcgacagcacggtttttttaattaaaacttcttttatagtgtctgaatgtaataaatttgaaacgatttaactaactctgatttgttctttactagcttgcaaaattaaacaattggttctaaacagttaagcgaataaaacacttaaaacctgatttttttgtattacaaatctcatagtgctagcgaatgatgataaattgtttcatttggacaaattgaaaggagttttacacaaaaaaccgggttgtcgctcagttggccatcgctcagttgttcacccacagtgtggaaccgatcctgttcaaaatattatgttgacttatccaacccaatttaagggaattatgcgatttttactgggcaatgactggtcatcgttcttcgaccttgtgattgttgacgcggaaaaacctttgtggtttactggtgatgctgacttcaggacggtagtacgaaaacaatggttccatggtttataaccatctcattttttaggttaacacgcaaacgggcgaaactgaaacggtcccggacaatatttattcaggaggttcgttttgcaatgaatggtctccacttcctgggctgaaaattgccaaaaatagaaattgggtgaaattatttgattactatcaacgcacacaagttaagcgacaaaatcgcgtttcatttgaactgaaattttgaattctgttcaatgtctccaaaatgcacaagaaaccgatttttataacctttaaaatttaaaagaatttctaaaaggtggagtaccatcggtatatttacaaaatttccaacaattctttgtataatcaatgaattgcaaccataataggggcttggaaaattttaaaaattaacttcttttccatattccaacaggttcctgcggaggattacgcggtttgctttttgatgctcagtcggaaaatacgaagaatgttctctacattggggaccacatttacggcgatattttgcgttcgaaggtctggggaggggaagaggagggagtggtgtactccatttcttccacgccgttttccatttcctaccccccagtcagtcgtttaccccgaaaaaattcttaatttttctaaaaaattgtaatttttacaagaaaaattcaaaaaaaggcattgaacattatttaatgataatttttattgaaaaaattgtaattcagattataccttgtaaaatagtgaaatttttcaaaaaatttttttaactatttttttaaaatttttgttctttagaaaacaaaagggtggcatacatttttggtggttccggagctcaaccacgaaggggctgtgtggactcgaaacaaaaaactgctcttggaaaagaaacgattggagaacgccttggagaatttgtacaggtttggaattgggagcatttccccgccactctctgaaattaataaattatgcaatggcatagtttttctttttgatttttactttctagaattgggcaggcttgaagttcaaaaaaataaataaaaataaacaatttttgtagagggttcagttcctcctgggtcattacttttcgaattttttaacattgtaacgaaattttcaaaaatttgaatttttaataagaaaatttcgcggataaaaatttgacaatttttcagcgtttttttaaattttatgaaagataaagggaggggggggcgttaggcaggcacggtccaagaatttcggcttatgcggggtaccccccccccccctcggacgacgatctttttttgatttatcaattactattttttcaaaaacaaatttgggtatggaggggtcttgagagtggttgtgacaggacctgctcagatcccggagtggaggggaaactaggacgacttatcaattttttttgttcatgatgtatatttgcatctctgtcagaaacgccgaagaagatgtggtgccgcccggtgttcaggctctgtgtgatcaaatacaggcaagtgctgttggtgttttattgtaaaaatgtttcaccagtggcaccctttcgataccgcctgaatttaatatataaccttttaaaaagttgattttcctttttgattgaattttaacatttttttgcaggatgtttcgaaagcaatggaccaggcctatggcaattacggctcacttttccgaaccggcacgcgtaaaacctttttttcataccaggtgtgtgttattgtggcatttacattttttgttgctctttgtgcaaataatatttattttgcgaaaatttctcattttcgcagggcgacttaaaagaaatttgaaaatacaatatattttaaattccaattcatttgcagcttgaaaattatgccgacttgtatggaagttcgtgctttcatcttctcgactaccacccctcatatcatttccgcgccaaattcaaattgatgccgcacgagtcgccggtggaccaaagcgaagcggacaatcagcagggccaagtggaggatcagcatggccaagcggcggacggtcagtcaacactctcgaaaaatcatataaaaaaaattgtctcaaccgcaaagcttttgtactttattcccagcctcggaagaccctacctagcccctcctttcgtcaaaattttttttgacccagcgaaatttttttttgaaattttgcggccgaattatgcttgctaaccagggaagggcgcgaactgtaagtcgagaaatgcagttgtgttatataccattggatagggaatggtcgacttatattgtagatttcttaatttatacctccatatgaagaaatcaaaagttatgtggccacagaaatgaaacattttagtgcctgaggcatttccggttttattgattttttattaattccccatccttgtacttgatttaacctaggacctccaaaattcaaatttgaccagcttagccacgaattttgctcattttcttcacttgtgcaccagtggtggggggatgatcctccgctttctccttggttatttttgcggaaaacaatattagggttttcatgtgcgctggtctcgaaatttcgttcaatttatagctccgccgaaactccctaaaatttgtattttttcacaaaataatggagtcccattctacacgagttcctgaatttttttgaaatttcttaaaccattttttttctttcaggtcctccatttgaagtgccgaatgttagtcccaatcagagtagtagtgaggacgaggaggagcagaatacggataattga

SEQ ID NO: 67284 - DNA, 595 bp, Heterodera glycines
atgccatccgccgcggtcgccgatgcgctccacggcatttgcccagccgaccctcgccggcacgggccactcgcgactgttcgaaagtgtcagtgccctgaagtacagcgtcagcttcacctttgtacgaagcgaatggcattttgccaaaaacacacagaaattgtgggtgttgtaatgcaattttagcaaatcaaagagctttgcgacatacttccccatccgttggctgtccaaatttactcggcattggcatcgaacacgctgaacattgatgcgcgcaattaacaacaattcaatttaaaaatcaagagcgtacaggggggggggggctaagcgggctaaagccaccccccaaaaagaaaaatacatccctaaaaattgaattttgaattgagcccccccccttggctacgccctgattaaaatatttaaaaataaaaaatttttctagcaaaagttggccaccgttgagagtgtaatggccgaattgccatttggcgttttggaccgtttgtttttcgtcggagtgccaattgtggacgcagaagtcagagagcgatttcgaagactatggtaattggaaaattataaa

SEQ ID NO: 67285 - DNA, 352 bp, Heterodera glycines
atgcggccacgttccaaatccctttcaaatataaattttgaaattactcaaacaccaatctgccgtttttatctacgctttatggatgcgttatatggtagaaggcgtttatcaactcctcatagaaattttttcccaacaaaaatgaacataggtctttctcagcacttttttcattttaaaatatattttttaaattttagaagcaaaacatgatcggatttttttgaagcgaaaaaagaacaatcattgggtgaagattcgacgggtatatccagtattcatcttggcgttaatataatttaaataatttagtcgtcacgtctgctggataaaagaaataatattgata

SEQ ID NO: 67286 - DNA, 166 bp, Heterodera glycines
atggcccgttttgtcaaccattcttgccagccaaactgttgcgctctgctgacaaccaccacaacttcaacagatgatgccaattctgatcagaaggaagtgccgtccgtgttggtctatgcgctgcggcgcatttttgcgggcgaagaattgacaatggactacg

SEQ ID NO: 67287 - DNA, 141 bp, Heterodera glycines
atggccaaattggccacaacggagcagctcaacgagcagttcggactgtgtgacgaggaaaaagatgaagtcgggcaaaggttcgctgtggcaattcgccggacgaaaatcattcggcacggaaggcaaaaagtccaaacg

SEQ ID NO: 67288 - DNA, 777 bp, Heterodera glycines
  unsure (1)..(777): unsure at all n locations
atggacaagaaaataaacaaaatatacaccgacccggccaatccgggcgggtatgcgggggcgagtgctctgtacgcggcggtgaaggagaagcacccgaagttgaagcgtgccgagtttgaggactttttgcaaaggaacaccacctacacgctgttcaagccaaagagagacaagttccgacgcctacgcactgtgcctacgggtttcatgaccggtacgttgtaccggggcttattgcgcacaattcagggttcagatgttcaggcggacttggcagatttccaggcactttcgcgcaagaacagcggctaccgttacttgctgttggcggtggatgttctatcgaggcgaatgttcggcgcgcccgtaaagagtaagcgccctgtggacatgaaaagggcgtttgaagagctatttgagcaaatgccaagggtgccagacacaatgtacaccgatcgagggctggagtttgtggcaaaaccgttgaaggagttttacgcggagaagggcattcaaaagtttgagaccagttcaaagaagaaggccgccttgggcggagcgggccatccgcaccctaaagactcggctgtacaaatatttttccgccacacacttcggtttgggtttgaatgtgctggncaagtttttgagtgcatcaacaactcggtgtgccgcgcgaccggccttagacccaacgaaatcattgacgcaatgcgcaaggaagggtgtggnaaggaggggntgtacggcgaaggactcgcacaattgggacaa

SEQ ID NO: 67289 - DNA, 576 bp, Heterodera glycines
atgggcaatgtcgtcagtaaagtgggcaattttatggtcaaggcagcatttgttgctgtcgacggatttttggctgttggcgaagcgtttggccaaggaatgcgcgcacttttgtccccggaagagcacgccaatcctccgatcactcaagtgcttttggttcgacgccgtggcgatctcatcccgtgctttcgcaatgtgttgaaaagcaaagtaaaaattttttttgaaattttaatccattttttggatgccattcgccattttgtatcactttttctttttttttctttttaaatttaagaatgaaactgctcttggaagcatacatgatgaactgagcgacctcggcttggaccacatttcgtacgcatttgttaagggcgtcgagtgagtgaaaaaggaaaaggcggaaataatttaaataaatttaattttaattatttagtctaaaattgggcttttttttacgttcagagtggacatggtctgcaacaaatgtgccgccaaagtggagcaactcgacgacttgtgttattgtgtggatgccaaagagagatgccatcaccgcaaatg

SEQ ID NO: 67290 - DNA, 458 bp, Heterodera glycines
tttgccaaaagtgatgacgaggaggaggaggagggggcggacaatccgacggatgacatccgaaagatgcgagaagaggaaagaccccaagtggtggtgttggacccgagaacggatctgtcggcggaagaactgcagaaagagattgagaagggaaacgaggaggaagacagtgagagaagggggaggggtttaattagaggggtgggtgctaattgaggatttatcgttggattcgaaaaatttcgaaaattacaatattttcagagcgcaaaataatggaaggaaaaattatgtttcggaagcccgagaaaaggaagacggaaaatggaagtgggaaagaaggaagcaaagaggaggaggagaaggagaaacgagccaaaagagaagagaaaccgggacagcagcagaaggagcagaacagacgacttctttcgtttggggaggaagacgaatga

SEQ ID NO: 67291 - DNA, 186 bp, Heterodera glycines
atggcttcgtccgattctgaagcttcttcgttcgcattccctcagaattcgaagtgcggcgccacggcgagcggacagaaaacaacggccaatgcttcgtcctctctggcgatgcgagtgcagcggaaagtgttgtccaaattgtccaagcggggaatggtgcgacttttgggcgacaatcgtttg

SEQ ID NO: 67292 - DNA, 195 bp, Heterodera glycines
atgctcgccgttgtcgctgtaagtttcggagccaccgttacggtaaggaaacgatattaatgtattttaattattttaagaattttttttttttgaaaggtgacttcaatcattataacaatttgtctacagcgaagtcgaattcgaaaattaatggccgagaaaaatggaaaaatgacaatttacggagaataa

SEQ ID NO: 67293 - DNA, 947 bp, Heterodera glycines
atggcatttttgccatttgccacggccaatttggctccgttctcccccatcattcagcttaacccccgcggcgtctcctactccttcactttggtcatctccttccatcccgtctttttgactggcattgaccgtgccttcaacattcgctgctttttcacagaagcagtccgtgcaattgatgcttcaatggacgttaggtgagggaaagcatttgccaattgcgttgcttttcccctgtttctattccgtttgtccctcctttagccccctttcaacttcggtggtggagcgtcagttcgcccttccccagtgcaattaccatttacgacacggcatcgacggaccctttctgaagtacgcgtcaattggcgagccggtgacgcatgtttggcagtgcgacccggtggccggatggttgtacggagtgctcattcactcgtgctttgtggacgacggacgtggcaatcgcttcgatttggtggatgacaaagggtctgtgacagcagtgggaggaaagcgcacttctgctggggagggggagttgaaaatcgttgggaccccgtggtttggcttgtctcaagaattcgggactgactcggccgattctctcttgggagggtctccgtcggtccgtccatgttctcgtcccgttgtccttgttcagctgcgtcaccgaccaatctttgctggccgacattcagtacgacgaaaaggcatttgccgcccattcgcatgcccacgtggtactcttccgtcccttttcattccgtccctcgtccatttccgctccgtcccttcagttccgttacgccgatcgtgtccaactgttcttcacctgcaccgttcagttgtgcttccgcgaagacggcggttgcgaaggaatctctccgcctcagtgcgacagacacaacacttccccagcccaaaggtcgtccgatggataa

SEQ ID NO: 67294 - DNA, 108 bp, Heterodera glycines
tcgtacgtttcagacctctcacagtccaggaaaaaaatatggatttccatgtaaatgatagccctaattattacacaaatgccttttttaattgctcacccaatgcaa

SEQ ID NO: 67295 - DNA, 345 bp, Heterodera glycines
  unsure (1)..(345): unsure at all n locations
atggttgacaagccctatgagttcgtggatcggaactccttgcctggggaccagtgtgcttgcattcgaaaaaacacgagacataagcgcccgaaggcctttggcctgaggaagtgtcctaaccgggaaatccggagtgctcgtgtgagtgcctgtgcactggccctcggagctgtgtccagcggcgagatggttcttcccaagtccgggaagctcggatgcctggccagcgctgtgtcattaccacttgctctgtctccttcgctgcccatgcgcacgcttgcgctgaaacgggangttgtttctgctgaaactatccgtctttacaagacggctgtaatatag

SEQ ID NO: 67296 - DNA, 1004 bp, Heterodera glycines
atggcaaaaacagcagaattctatgatgataatgataacagcaaatctagcaaaggcaatgcccaattgaagagtgatcatcccacgcaacaagcaaatgggacaatggcagcaacaaagggcacggagtcaaaaggtgccgatgagaaaggtgggcaaatacggcactgatcaaatactggcacgggaaaataagtctcagcttgtcatattttatatgtttatagtacctaactcaaaaaggtcatgtggtgaattagctacgaagatttaagtctgatcagctctcttttattgagctatggatttattcaaaagcatcccgcccctctccttcctgaaacccgaaaaaaatttttttgaaattttcaaattttttatattctttaaaattcaattttcccccacggagccagtcggcactgccccggcttttcttttcgtctaaaaatatcataaaaaatttcgtatcgtcgacaagcaaaaaaggtcatcaacagggcgcggcgaaagtggctctcttgccgaaacgttgagagtctggctcggccatctgatcaatttaatcatttttattattttttccaaatctgttaatttatgttttgatatatttaagcagtgaattattttttatttttttttgttccaaattcctattttatttctccatcccatcgccctctttagctccgcttcatcccaactcatccgacgactctaatgcctccccttccgttggtgggtcgtccatttccgactttgtcgcgcagcttccgcccgcccctccgcttctcgtgcacattgcggtcccttttttgctaattgccgctacgtttgtcggtctgttcaactgcgctgtcgcgttcggcctgtactttgttttccgagctgttgcttcggactttggacgaagtgcattgtatacattacccagggatttcaagtgggtgctattgctgggcaaagagtcgagaatgaagcaaattagttcccggggataa

SEQ ID NO: 67297 - DNA, 992 bp, Heterodera glycines
atgcgcgtacgcgttggcatgcgcgttgaattgggcaaatgtcagcgatcgaccgctctccacctcgaccacgcactgtttgttcgggtgacggcgcactgtgcgcaaaaagtgggcatggattggtgcaccgctgcggaatgcgcgccacaacagccatttgagttggaagaacagaaaggtgcccctgttggagagaaaaagtggtcagtttgacacagcaagggttgccaataacagaaaaaattaatttgaaaatgaaaagtgaaaacactctgaggatggatgatcaaaagcaaatgcaaaacgtaagcagggaatgaaaaaaattaaattgacaatatatcaatgttcttataatttcgtttaaaaattgcaaaattatcgcctattggcagacgggtcgaaaaagtttcattaaatttaaaaaatgtacaaattgataatatttgctgagcgaaaggccactttaaagctttccgatcagtaaacctcgatcatgtcaagcacaagaaatgattcaatcattcaatttacagctatcaaattttgccataaagaattgaccaactcgcctccctggacccgtattttgtgttgatctaattttcttggaaaggtcaaagactacttgaaagtgattaataattatccccgggaactaatttgcttcattctcgactctttgcccagcaatagcacccacttgaaatccctgggtaatgtatacaatgcacttcgtccaaagtccgaagcaacagctcggaaaacaaagtacaggccgaacgcgacagcgcagttgaacagaccgacaaacgtagcggcaattagcaaaaaagggaccgcaatgtgcacgagaagcggaggggcgggcggaagctgcgcgacaaagtcggaaatggacgacccaccaacggaaggggaggcattagagtcgtcggatgagttgggatgaagcggagctaaagagggcgatgggatggagaaataaa

SEQ ID NO: 67298 - DNA, 1981 bp, Heterodera glycines
gcattctttgctacatttacaccagcggaacaaccgggtaaattttttccttctttttttttgtaaaatctgtaaattttgatttctttttaagtgcaccaaaggcggcaattatacggcactatcgctattatttgatgtccattggctgtggcaatgcctttggcattgttccgtcggatagagtaagtaccctttgagttttaattaaatttaattattttgcttacagctttatttgacactgccaatgtaccatacggcgggcggcattcttggcacatcacaagttgtcttcaaaggttagctaatgctaattgattttgattatatggaatttatttattcatttaattatgctatggatgcataagtataaataaatctttattatcctttaaggttgtacggcatgtattcgtacaaaattttctgcaagcaatttctggaagggtaatttgttctactctttttgttaaacgaaaatataaaataaaaaccgaattgttttaaaattaaacgataaaataaaatgaaaaatcgaattctttttataataaatttatataataattattatttatattttttctcttaaataaatttctttactccccccccccctcagattgtattcgctttgaatgcacagtgagccaatacattggcgaaatttgtcgatatttgttggctcaaccgccgtctccaatcgatcggaaacatcccatccgggtgagttataaaatttattaataaaaatgaaatttcattaaaaaaataatgattgtaacgaaaaattattatttttttttgttttgacacaaaatctcataagaatttcattcgtcaattaataaaacctttttgtcattttggcttctcaccggcaatggccttcgtccacaaatttggcgtgcttttgtgcaacgttttggcattgcaaaaattggcgaattttatggtatttataaacaatctatttgtttcatttgtggttcggttggttgtctctttgtttcttttaaaatgatttttgcaagttcaattccttttgatgcaacggcaatgaagtaaaaataaccctattttgtgaattgctaatcaatgtgcagtaaatcgattagtctttctgagccgaagcaattttttatttttaatctaaaaaattttcttgcaattttttccaggaattgcttttactttaaataaaaaattatttttgccaaataaatgtttcattaaaaacaaaaatatttcatcagagtaaattaataattttttctaaaggcagcaccgaaggcaattccaaccttttgaatcttgacaatcggccgggctcgtgcggcttcatccccatttacaactcattgcacggcttcttcccgctgctcttgctcaaggtggacccgaagacgggccaactgatgcgcgacaagcgcggcttctgcatcaaatccgtgccgggcgaaaccggcgaattggtgccaatattattattaaacattttcatttatacatacataaatttctgatataatctgcgcttcattaagataaatcccccatgcatccttatgcagttagaaaaaaaaattttctgcgctttttgaaaaatttcatactatgaaatttaaaaatattttttcagtgggaaatgatgcgaggagaaatgattcgggtacgggggggggggggggacggggacggggacgggaacctagtgtaccctcttttttaaaattgtatgattgattttcccaacacaaaaaaaaacaaaattaatatttaattaagttgttgagggagtaaaagttttttttgttttttatataattaactctttaacaattcgcctcaggtcggtgccatccgcaacgacccattgctccgttttgaaggctatgtgaacgagggcgacacgcagaagaaactaattaggaattgtcaatctgctggtgaccaagtgttctccaccggcgat

SEQ ID NO: 67299 - DNA, 891 bp, Heterodera glycines
atgcgtgcagttcggccaaggcaaagtttgacagcatttggagaatgttcgtcgactgcgaacaggcggtgaggacggcgctgagtttggacgaagcgaacattcagcgcagaaaagcggtgcattttgttacattggaaatggcattttcgaacttgacattatgtttaggaacaagaaaaactcagtttggaccgcttcagtgacagcacaattgacgaaaagctaagtgatccgaacggaataattttggagccgatgaaggaattgttgaagacagaaaaggactacattgaagacatgaggtgggaagggactctgaatttgcattttcgaataatttaaggcgatgcgttgacatttatttgtacgcctaccgtacgtccggctcaatgtgtccaatgacaatccgaggcaaagagcgcgagatttttgggaacattgaagaactttatcagtttcatagcaggtgatccgaattaaaactatccaaaaaaccacaaaagtgccgcaagttaatatgaaagtaattgttttagtgttttcctcaacgaactgatggcttatgcgttgaatccggaggatgtcggctattgtttcattgaatggatggaaaaactgaaggaattgtacgcggattactgcttgaacaaggaggagaacaattacctcatttgtcttcctgaaaccatcaaaattttcaatgtaaaaataaatttgcattagtcaaaattgaaaacttcttcccattttaggaaatacgcgaacagaatgggctcgacgtatcgcatgaccttcagtcactcgtcatcaaacccgtccaacgagtgaccaaatatcacattctgttaaaggaactgttgaagcactgctccaaaagtgcgaaagaaa

SEQ ID NO: 67300 - DNA, 327 bp, Heterodera glycines
atgaaaaagccgttggaatctccagcagtggcggcgtcgtcggacaacaaaacgattgggcaacaaattgcgcaaaatgttaaagttgctgacaacgctaataagcaaatgatgttggatggggaaaaacccgaagaaagtgaagaaaaattaaaggaaaatttaattgacaaagacaaagaacatggagcaaatgaagcggaaattgagttggcacgaaaagcatttgaaaattggatgaaatcgatgacggagacgacgaaaaatatgaaaacggatgaaggatttggcaaaatgaaagtatatttgcagtggctgttccgttga

SEQ ID NO: 67301 - DNA, 1241 bp, Heterodera glycines
ctgaaaattgctgtaattcattgctttccaccaacagaattgtggaagtgtccggcgacaacacgcccgagccacacgaactaaacagggcatccattctgatcacaacacccgagaaatgggacgggatcacgcgctgtgcggacacacggcactacgtcaaacaggtggaactgttggtcatcgacgaaattcatttgcttggcgttgaacgcggtgctgtgcttgaggcaatcatcaccaggtgagtgggcaggcaatcctcggatattgttatcatgtaaaatttcaaattttttgaatttttattgttaaagaatcaagtcgatggcacgccgtcgtgagcttgccaagttgccggttcgcgttgtttgcctgtccaccgcgttggcaaatgctggcgatgtggctgaatggattggcgttcgggatcatgggctcttcaatttcaggcccagtgtcaggccggtgcctgtccaggtgcacattcaaggctttcctggccaacactattgtccacggatggcactgatgaacaagcccgcttatcaggcaagtgccatagcgactgatggcaagttgtgggtgccatggtcattgatggcaccgtgtggttgccatggtcattggtggcttagtgtggatgccaggtcattcccccatccatcactttttcagtacatcaaacaattctcgtccacaaaacctgcactgatctttgttgcctcacgacgacaaacgcgcctgacagcgatggcactgctcggcttgttgcagcgtgaaggggaacaaagccatcagcaatggttgggcatgaatcagacagagttggagcgcacgttggcctctgtgcgggatgacaacctgcgactgacgctgacctacggtgttggcatccatcatgccggactgcacgtggtcagtcgatgaaataatgtaatgtcatgtcactggcattttctacctctcgaaactctcgatttggttcatcgagtctgaaagatgaaaacattgagtcccatattttcaaatctccaccaatctgtgttattgttttgttgtacaactacaggctgagcgtgcactggtcgaacgactgtttgttgaacgcaaaattcaagtgttggtcgcaaccgcaacgcttgcctggggcatcaatgtgccggcccatttggtcattgtgaagggcaccgaatactatgatggcaaaacgcacaaatacatcgatttcccagtgacag

SEQ ID NO: 67302 - DNA, 392 bp, Heterodera glycines
atgtgtgaggaaattcggctacgattcccaaaattgaatggcattgtcagctgtgcgtcagtgcttccaagtcgtaggacaaaaagccatgacggtcttgaacttacaattcaggtggttcaattaatttaaatatgtgtcaaaatatatatttaaattaaaaaaatttattattttttaaaattaatttccctcttccaattaggtgaatcatttggcgcatgttttgttgtggaccgatcttttgccactgctcgagcaaaattcgccgtcacgcttgttgactgttggctcaatgctacataatttgtacacatataaatgccattttaaatcaaattataaaaaattgccaaaaattttaagctgctcaattgactggaacgatttga

SEQ ID NO: 67303 - DNA, 1044 bp, Heterodera glycines
  unsure (1)..(1044): unsure at all n locations
atgcgattgttcaaggacaaggacgaagatgaacagggcgaccgcctgatttgtatcagcctggcncaggtggggagttcaagcagtaccaggagggacaacccctaancccccatttgacattttgccgctttttttagcgcttcactgatgaatcgcattacattatgggagcgtcggacgctagtcaactgcccatggatgtgccgctgatctccatcaaccattgtctcgcggatttcatcaaaccggaagacattgaaggctcacgctgtgcacagtgcagcaacgcaacgccaccgccgtctgcgccaccaacgcttgtcaagcagctgatgttcacgcgattgcccgacattttggtgattcattaatcattgattaattgatcatcgattgattgctccccttttttgccccttcacagatcatttgtttcaagcgcttcatctatgaaccatttgagcgccgatacatcaaacagcacgtgcccgtttcgttcccgttggacaacttcagcctgagcaaatacttttcgcccgatgtgccggctgcgctggtggcccaacttcctctctattcctgcattgcaattgtggtgagttgagagtgattttgatcagcggcaatttgaatgacatcattaatcattcttcccctctttcttttccttagactcatcacggccacttgaactctggccattactgctcgtttgtgcgtgacggcttcactgacaattgggttttctgcaacgacgacagaactctcgtaagaaaacaatttcgaatcaattaatgccagcttttcatccattctttttagcccactgaaagctgcgatgtggacacgcgaaatgcctacattgtgttctaccaacgcgcaaattcagtcgctgcccaatgagatgaaatgagaggataaccattgttgtatatatatgtgtataattgttgtcgtatatgtatgtatgtgtatattatcgtatgtgtatattcatttgtatgtacaatatgttcattggtattaatgatgtgttgatga

SEQ ID NO: 67304 - DNA, 74 bp, Heterodera glycines
gggtctcaggttcgattcccagtgcatgctattgatgtatttcgatgattttaatgaataaataaaaggaatag

SEQ ID NO: 67305 - DNA, 3320 bp, Heterodera glycines
acgtcaaaatcgtggctgtgcacacagtcaaagtgacaagccattgcttgaatgtcggactgaatcgcggtcattggtggaagcttcaagtgaagataaatgacaatgattgtgagatgaatggggacaccggagcccaagcaacaatcatcacaatccaaacatggattaaattgggaagaccaaaattggaactgtcggacattgaaatgcataattgtaatgaggaaccatttcccaccgaaggaatgtttcaatgtgtcgtcagttgctttgacaagccgccaaaaaggctaactgcatatgttagcagtgctgtcaattacaatctctttggattgccatggattatggcttttgatctgatcccaagggaagtcatgtttcctaaggttcagcaaaaagagatgtgcgagccaatcagcatccatgccacattggcaccaatgcgaaaggcaaacattaaggatgaagcatcactgattgaggctttgaaaacggatttttcggaagtttttgaaccaggacttggccaatgttcgaaaatcaaggcacatctgatcctgaaacaggatgccaagccaattttctgcaaagcacggccaatcccacacggtgcaactgaagccgtaaacgctgaattggaccgacttttggaaatcggtgccattaagccaattgatttcagccattgggctgcaccaattctcgccgtgaaaaagaagaatggcaaaacaagggtttgcatcgacttttcgacagggttaaacaatgccctcgaattgaaccgacaccctttgccgagaccggatgatatttatgccgcactgaatggagcgtcatatttctcaaatttggacttgagggatgcctatttgcaaatggagttggacgaggagtccaaggacctttgtgttatcaatacgcatcgcggcctattccaatgccaacgtttacctttcggagtaaagtcggcaccgtccattttccaacatcttatggaccaaatatgtgctggaatacccggcgtgtttgcctatctcgacgatgggctcatcgcttctaagacgttggaaggacatatttcggcactttaccagcttttcacgaaaattaaggaatttggcctgcgtattcagttagaaaagtgcaaattcttccaaaaagaattgctttttcttggtcatattgtgtcatcaaaaggcattcgtcccgatccggcacgttctgaagcgatcagcaaaatgcccgcgccacacgataaaacatcacttcgatcgtttttgggagcgctgaattattatgggcgattcgtgaaagaaatgcgtgaaatacgcacaccgcttgatcagctcctaagaaaggacgaaaattggaattggagcgaagagcaacagaaggcttttgaaaaggcgaagaagatcatgacatctgatctgctgttgactcattataatccggctcttccaatcatcgtggcagcagacgcgtccaaaaacggaattggcgcaacgattggccacatttttccggataagtccgagaaagtgatcgaacacgcatcatgtgttttgtcagattcccagcagaattacagccagatcgaaaaagaagcattggcttttgtgttcgcagtgcagaaattccaccgaatgttattcggcaggaaattcaccttatttactgatcacaagcctttgcttgccattttcggttccaaaaagggaattccgatttattccgccagccgattacaacggtgggcgttgatcatggcaaattatgatttcgacatcaaatacacgaatacagcatcatttggacaagcagatgtcctctcaaggctaatagccaattatccaaagcctgaggaagatgtgttgattgccaacatttgcgtcgaaacagactgttatattaacaccattttacagtcgcaaaccgatcatcttccagtcacggcacaagaaattgcggaatcaacaaccaaagatgagacactccagaaaattgttaattttgttatttctggttggccaacgaagtgcagggaacccgaaattgcaccatttcatccgaaaagaaatgaaattttggaaattgggggctgccttctctacaaaagtcgtgttatcgttccaagccaactgcgtggccgaattttaaaggcattgcattttgcacatccgggaattgtgcgaatgaaggccttggcacgccagtatgtatattggccaggaatcgattcggaaattgagagagttgtacggcaatgtgatgaatgccaaggtgcacagaaatgtccgattaaggcaccattggccccatggacagtcaccgacaaagcatttcaacgcgtacacatcgactttgctggaccctgccaagatggatatgtttattttattctggtggacgccttttccaaatggccggaagtctatcaaatgtcttcaattacggccaagtccacagttttcacacttcgttccataatccatcgccttggcattcctgaggaaatagtgtcagataatggcacacaattcaagtctgctgaatttgccgctttttgtaaagaattcggcatcaagcacaccttttcaccgccatttcacccgcagtcaaatggccaagtcgaacgatttgttgacacctttaaaagagcaatgaaaaagtgttcaaaagacgataaaaattggaccgaaaaggtgctgctcgcttacaggacaacgccaaacaatgccattgatggctattctcccgatcaattattcttcggacggaaactccgaacgaaattggcattggtccttccgaaaggacaccgaaacgattcggagaacatcgacaaaattcagctcgacaaaagaagaaaggactattcgaataaaatggcaaaacaattcgatgaacggcatggtgccaaagaaaaagtctttttccccgccgaaccagtcctccttttgaactacaggaaccaaaaaacttattggctccatggtacaattgtagagcgagtcaggaattcgcctacataccgagtccatgtaccagttcttggtcgaattgtccaccgacattcgaaccaacttcgtcgaaattgtgttttcgaagagaattcgaaacacaatcctggtcccgatcagcagccaattccaccagtcaacggacaagctcaaaatttggcgcatcaaattgctgatccggtcgatcaacggactgatcaacaagccgcaaatgacccgccgacaatggctcttcgacgatcgcagcgtaagccgaagccggtgattcgcttctcgccttccggccgctga

SEQ ID NO: 67306 - DNA, 551 bp, Heterodera glycines
atggccgacaacaattggttgtcgtcttcgttgtcgttgaacctttttgaaagtgcgtcgaaatcgaacggagacgcgtcgaggcggtcgaacgcgcgtttgggacgcggaagagacgaaacgccggccgacgactggggggcacttaattaaagcaattaattaattagttaattaattatagcgaaatgtgtacttttgtgggtgctggagaagactctgtatcatataaaaggttggatacgcactgacactgatgagaaaagagaggaggaggcaaagggaaagggcattttggacaaatgccattgggagacaattaaaagggagcaattaacaactgctaattaatcaacgatgatccaactgacaaaaatatatatatatatatatatttaagcaattttaaggaattcgaaaacttaagaccaaaaaaagtgagtcggcgcaaagggaaaaaaatttggcaaatcattgaaagagtcggaaatgggcaatctgtgaaaacgatggaaaggagtgaattttgaaaaggaatttaaaaagaaaaa

SEQ ID NO: 67307 - DNA, 1375 bp, Heterodera glycines
cggttggcctttctcttttcccttttgttgtcattcgtttccgccactcagttcctccgctccaaaacacgtgcactttttcattttttgccatttaaattccgattccctgaagggattgaccaatgcaatgccgacaaaagcagcgtcggctgcggcccggcggggaaatgcgtgccgtttccgcacggtgcgcggtgccaatgcgcaagcggacggatgggcacagagtgccaaagtgagtgtcgcctacattcaattctggcacattcttgacctgagaagggcgatccattgggacgggcaattatcattataaagcgaatggcaccagcggggggcggatccttttaattagtttcgagagttgccggattactttttgcttatgatcccatgattatctgattctgaatccctttcagggccttgccaggttcgcttctttcgtctttaccctccggcgtcgtccctctcactctcttccccccccttaaccccttaaaaaggacatttataattcgtgcgaccgatggcttcaggagggccgctgcgtttggacgcgtcccttctccgctttcttcttggacaattgtccgttcacttgcggaatctgtcagagagcagcgggacaaaaaagtcaaattttgattcaaatttggctaaacgatttgccaaggccttccggttccgctcccgccaatgttggagccgttggcctggtttgtcggacggtggcagacccaaacaattggacggcactcggaccgattcccggcaccgctgtcgcgcgggccgtacattgaggtaagaatggcacaaacagtgaagcaatgcggtgcaccctaagactccaccgcccaaattccgccgagacataactccgccagagcaaaaaattttcattagaaatcttgaaaatttttttcttagagaattcgaagaaaaaaatactttcaaaaaaatttccagcggttttttttaaatttttgaaaaaacttagtaatttatattaaattttgaaaaaatcgcttgaaatttttttgaacattttttcttcgattttctaagaaaaatttttctaagagatttttctaaattgaaaattttttaaaattttttttttggcggagtttcggcggcggagttttgtcctgctccggaagcaatgcagatcaaattggctcgctctgctcagattttggacgtccaattggccgaagtgccttctttcgaccgaccaccgctgaacatcaggtcgagtcgaactgctccaactcatccgatcaatttttgtggttgaagtgtgacggcacgcactttggacggatgggaagagcacaacgaagtgggctttctgacggtgaaaccggcg

SEQ ID NO: 67308 - DNA, 285 bp, Heterodera glycines
gctttggtcaccaaattctgtcattttcagtattggcaagacgaatttctccagtgggacccggacacttacgacggcgccaccgaaattttcttgggtttgtttttgtcgagagtgactctcggcctttgactaattgccttttttgaccttagggccaatttttccttttcagcctcaactgacatttggatccccgaattttcgttgtattattctgtaaattttaacgacgcggtcaaatagcagtcgaacaatgatgtccgagtcaattacaccggtgag

SEQ ID NO: 67309 - DNA, 98 bp, Heterodera glycines
atgggcccaggagccaagcaaaagagtgcagcgttggctgaaaaggacgggaaattggccaagggaaagggcggcgaaggagcgatcagtgatcagtg

SEQ ID NO: 67310 - DNA, 2669 bp, Heterodera glycines
  unsure (1)..(2669): unsure at all n locations
atttcccgtccttttcagccaacgctgcactcttttgcttggctcctgggcccattcaaatgactctatcaaatactcactgttttccaagaatctgtccttgatagacttctacgacaaccaagaatggcaacttgacctggtccgtccaacgcaatttggcattttgtctcttttaaatttggacattggccaagccattttaattgggccattgcttttttatttatttttcctttggcactctctcccctccttttgcttaaggctcaaagtcacatcacttcggatggctttctgtacgactatttagaccccccgctgttctgggaaatggtcgtcattgacttggtggtgggacggcaaagcttttactatgtgagttaatagcagtgccacgacatggctaattagttaattaattgtttgattaattaattaattggtttgttgttttaccacttaaggtgttcaacttggtcattcccagtgccatcataagtcagttttgtttttttgcttgccagcaccgtaccccaacccccatcaaatatacggtattggccccttttcagcgcttgtcgccgtcatcggtttccacacgccgagcacaagtggaaaaatgaggttgagagggcaaaagccgacctttaacggtcctttttgttaagagacgccaaattccgacttggcataatgacactgatgaggcgagtgaatgccacggcacccaattcaaacgaattgtcaaatgtttagcatgtccatgattttgttggccatcgtcgaagacatgcccaagttcagcatctccagcagtcgcaaggggcgtggctcattttccggcattcccctgatcggtcagtcgttttgattactcgtccatctgattctacaatcttttctctcacttttcctctgtcttcccatcaatctgtatctctcatacgctgttttctctcttcattctcctgtctgatcactcattttcctgttcaccgactgtattttccctaccgatcgttcctgaagatcagtcacctttgttgtcttcccctttctccgatatctcgcatttctatcccctcctcctccctctgagcactcattctgttctgctgatcagagtcctctattgcctccgctgatcagactctttccctcccccttttttgtacaggcctttactactttatgctgttggccatcgtcggcatgtccaccgtcacaacgtgtgacttttttctccccgccctctttctctgatcattcatttcccttttcagttcggtatgttcccaattcggtcgttccgtggtcatttcccctgtcagatgttcgtctacgtggaacggaatgtgcgcattcaccaccacgtgcccttttatttgcgttggatgattgcaattgagcggcgcaaacggaggataaggcgggcgataattggacaattaagccaggggattaatggaaattagagcaaattaatggcaaataccattgacattgcttaccgtttacatcgctttagcatggggtacagcttccgcttctccaaagccaaacggaccagagaaacacagcgccaacagaagcacaacggaggggaggacggagcaggcgaaatggtcagtaagtgggcttctcaaattcagtgcttctcctctttcctttcattggacaaaaactttccttttttttgccattctttttctcttttcccctcttttttggctatgcttttccccccttttctccccatttccctgcttttcctgcccattttccacttaggacactttgctgacttcgacccccgcgacaacggcgtgcggtcggcgtgccagccgaatgggcagcgcattgtgcggccatttgaacggatttgcgggcatcggaggctctgacagcaatttgttgcgctgcgtttcgccaacgccgtccgagcggcagcgaaacgccgaagccgaaaaaacgacggcgacgacaacgaaagtggtggcgaaaagtttgttgaggctaatgccacgaaggagtggggacggacggaaacggacgagcggaagtgcaaaaagcacgcgggagcaaaaggaggtcgaagaggtcggcgcagaggggggggggggtaattaagtaattaagggctaattgaaagggcaatgccctaattaggtaatgcataataatcatcgaaaaggcaaaaacgaaaccccaaaaatagaaactttctccgcctaatagcagcactattgtgccagtattttgtgtgccaaatattagcagaataaataaaaatttgaaaattgtcaatcaattggaaattgctttcccaatatctgctggatttgggttgtcatttggggtgcaccccaaaatctcgccgcctaaagttaaaagaagcattccgctaaaaaatcgctttgttcgcttcctagtccttttcgattgagtcaatggcaactcgtaaaacgcaactcgtttcaataaaaatttaaaaaaataaagcctaagcctaggcccaagtaagcctatgattaggcctaagcctaaagcttcatcctaagcttatgtacgaattgcctttttacgagttgccgggttatggattttttgggagagattttgggcggcagagattttgtcccatccncctgccattcgtcattcgt

SEQ ID NO: 67311 - DNA, 202 bp, Heterodera glycines
gagagtgtcctccgtcgggacggttgcattgtggtgaaagacaacgtggccaaagggactgaaaaagaatttgacgaagtcgacaattcatgggccaggcctcgggaaatgctgcacaaattgttcgaacgagccgactgtcgaattgtgctggagagaaaacagccgaacattccgaaagctctttacgaggcatgggaaa

SEQ ID NO: 67312 - DNA, 583 bp, Heterodera glycines
atgacgcaacccgccgcggttcagccaaatctgcagcaattaatcgacgtaattgctcagcaacagacgcaaatcaaccagctgataaatgttcaaagaaacaatcagccaaatccagcaatcatccaaacaataccgtcaatgccggacgtcgcaattttcgaacattgcgacgaaaagcatcgcatcaccgaatggctggagcgtttcacttttgccattgactcgtgcgcaccgaacgcggccgatgacataaaagtaaaggcactgatgaacaaactgtcggaaaccgcgttcagcgagtacagcaaatttgttctcccggccaaggtgacggatttcgactttgatgaaacaatttcgaaattggagaagctgtttgccaaaccacaatcaatatttgtggaccgatttgcatgtctgatggccaccaaagacgatggcgaagaatttcaacaatttgttaacaggcacaaacgacttttgaaagattttcagtatgacaaattgaatgaggaacaattcaaagggctaatgctcctaactgcgctgaagtcttcaaaggacgcagttcttcggcaac

SEQ ID NO: 67313 - DNA, 680 bp, Heterodera glycines
atgtcatcatctccgtccactgctgtattcattttcgcttacacacttttttccgttgaactgatcacttgtgtcgccgttttggccatcacttttctgaatttggctgtcattgtgccaactaaacttttgcatttgaacctgaaaagcattctgatcgtccaaagtattgccgttatgctttatgtgttaccgcgtgtagtaatgcttttccaaaaattcacatccgacgacccatttgcacctgccaacgttgtactacaggtacaagcacagggatggcataaattccgaacaaaatttaaaaaatataatagaatcaaaatttaccgatagtcggaaataatttttaatggatttaaaaaatcgcaaaaagttttttttttataaaatgaatttctaaaattatagaatataatgacttttgacgctttgttccgccgtctgcttggtcatgctttgatcattgaacgatttatcgccacacttcgcacaaattcatatgaaaagttttcaaaagtgttttttactctgacttggttttgcattacggtattcgttggtttttaaaaaaatttaattctttaatttaatttatttattttttacagttcgccatcgcttttgtgaacactaataacacaatgaatcagtcagtggactatttaccgaaattctaa

SEQ ID NO: 67314 - DNA, 253 bp, Heterodera glycines
atggcaaatcccgcggacatggcactgctgttccaacagctaacagacactctcaaaaacattgcaaatcaaaatgcaaatcccaataaacaaaactccgatttattcgctacaattaattcacaattgtccgaattcatctacaacccggaggcggatttggtttttgagatttggcatgagcgctatgggccattcctcgagacagatggacagtcattgccagatgaaatgaagacacgtctgttggtcg

SEQ ID NO: 67315 - DNA, 557 bp, Heterodera glycines
atgtcggcggcgcaagtgtcattttggctggtcggcgcaagtgtctgcggcgcaaccgcggcgcaagtgtcggtggcgcaaatggcagcggcgcaaatgtcggcggcgcaagtgtcattttggctggtcggcgcaagtgtctgcggcgcaactgtcgcggcgcaagtgtcggtggcgcaaatggcagcggcgcaaatgtcggcggcgcaagtgtcattttggctgggcggcgcaagtgtctgcggcgcaactgtcgcggcgcaaatgtctgcggcgcaaatgtcggccaatccgaaaaattgattttttaatgctttccaatttccttctcctaaatcagattaacttaatattttaatgattaaatattttaatatgttattagaaatgttaaaatgtttattaaaaatttttttagttaaaaaatgtaaatgctattattaaatctcttttttacttttgaattattatcagggcttctttttttatgtaagaaaattcgctaaatatgtataaaaatgataaaatatatatgaaatatgtacaaaaatatgtaa

SEQ ID NO: 67316 - DNA, 2339 bp, Heterodera glycines
ttgtcttccaaaacgaaaagtgaattcgaaggcgaatgtgaagaacattctctgcttcaaattggatggaattggtgagaaacaataaaacaaagtcaattagagagtccttattttaataacttttcaggtggaggaaagaaatgccattttcctcccttcgcccggcattcccggcgcacccatcgaatggcacgcgtaattcgaacgttcgaaaatttttactaaatggggggcaaaacataggtcgacaagcgaagaaaacgcttcatctgctgttggcttcgaaaggcattgtccgctcatttttctgcagggtaattaaaaggaaataattaatattgagtaatgagtaattaggtgaagaatcggacgaaaattgcaaccaaaatgtgatcgcaggactggcaaatgttctgccaatggaacggattgatgattgccaattggaaatgcctttattggagaagcgaatcgaagaggtggcgaggagcgggagggatgggcactgatcaatgatcatcgatcgattgatcaattgtgattggaaagtctatcgattttgactggaccgaatatctctctaaaattgagattctttagaatttcttggagtgcagctgtccatgggacaggtaagaatattaaacccatttgaccgaataagaggttcactctctcttatttcctctttttcgtctctccctttctctctctctccttcccctcccctcctccttcctccttatccctgcccctttttttcctctgtccctttctctctctccctccttctccttccccttcccctcccctcctccttcctccttatctctgcccctttttttcctctctccctttctctctttctcttcccctctctctctctctcttatctcctctttttcctttctctctctcttatttcctctttttcctctctctctctctctctctctttctcttcccctctctcctcttttctcattctctctcttcagttctttgctcgactgtccggcactgaacagaaactcacggccaactgaatgcgtttttctgattttaaaggtgttttttctgaaaatgttttttcttttttattatattttttagtttttattttccatttctcaccctttccacgctgaaattgtccttcgcaaacgcatttgcttgtgcattggcgaaacaaactcaaatttcgcagttggttcctcaatttggccatgggccaaaaaacaggtaaaaacaaatgttttcgatttattttaatggaaaatgatgactttaggaaatattaacaggcacgggtctttttgtggatatcgtcgcgtgcattcccaaagtacaaaaacaaatttaaaactatcaaatttctcccaattttcagtgttccgttggctttgagcgtcgcgaagagttggccaaattggctgttcaggttaatgccattgatgttatacgaattgatcaaatattcgcattcttagcatgccaccaacagcagtgatcagatggaagacggcgatttgtctttggtttcgttcggttcgtcggctttgcccggggcgctggccgattattcgccacgggacgaagccaaaagcaattacctaagcgaatacgtctccaaaacgatcagtgcggtggaatggctgatcaaagtgagtcgcccaatgatcgtccaattaatgccaattctttgcccattttattctcaaattttcatttttcagctcgaccgactcaggtgggaaaagctgtgcaaagtgccaaaattggtcggatttgcgatttgtttaggcaggaggaggcgatcagaagggcgatggccaaactaagcgcggaaagggcaccaaaggcggaaattgagggatgccgggcatcggacgggcgaatgacacgaacgatttcgctgccgacatcggtgggtgtgcaatgtttgttggttgtgccattgttggcatgccaaatgcattggccctttaaccctcgacaacattcagtttctgccacccctccatttgtccaacttcaatctgatctcttctaagcaaatttcgcctgaccatgttcagcaaggcgatggccaaaaatcaatcggtgccattcgccccttggcttacggcatttcgccaacagcaaaaccaatcgccacccctggcgatggccccctcacaaatggtcaaaagcagtcaaagtcatacggatgggttctgccagttgctccaccatcagtcacgtcccccgtgcgcttcgtccagcagttcggcttcatcttcgggctacgcgtccatgggtttgtgagaaagaatgccaatgcgaaaacattctga

SEQ ID NO: 67317 - DNA, 388 bp, Heterodera glycines; identical to SEQ ID NO: 51536

SEQ ID NO: 67318 - DNA, 457 bp, Heterodera glycines
atgtccaatgaggcggaaaaggagttcacatcgacgggcaacccgaaggcaccagcgcttcacgtggtacttgactggatccaccgatcatggcaggagatttccaaagaagtgatcatcaaatcatttgagggtcagttgaaaaggaaaaaagaaaaatgcctgaatttttagtctgtggattgacaacgccattggacggaacaggagacgaaaaaattgcttgcttcaagccgaacggagcaattggaccgatcgggatcaaatttttgcgcgaatttagagcaactgaaacagtgaaagatggacgaaatgatcaagaggaagccggcctttctgaagatgacggtgatgtagagctggatggagttggagatgacgatgaatttttgatttgttagcattttactgtttctttcgttgttattttaaaaaaattgctgtaataattttttaa

SEQ ID NO: 67319 - DNA, 71 bp, Heterodera glycines
ccccgtctcctttaaaggccctgtctccaattatgtccccctttctgacgaggttgaaaaataatcccccc

SEQ ID NO: 67320 - DNA, 533 bp, Heterodera glycines
atgtcgtactcggagagtgccacacagaaaatgattgccagaaaagtctataaaaaggtgagtagtgaaacagcggaaaatttacgtcgtaaattttttcccatttaaaatttttccaattgaattaattgtgtccaaaaaaagtttctacaggaaaaaccggaaaccgtcggccagctaaataaatcgaattaaagtactagtttttttagatttagaaaagactaaaaaaaccttttcaaatgcattccaattatttaaaatcaattgtttcgccgcttccgttgcatcttcaatttccctcatcatttccccttttcagtgaccttctaccacgaggggttaaggccattcaccattcttcccttccttctcaatatctaaaatggcagttttattgcagtttacaaaggctgtatatgttcacgtaaacaaaaatgtcgacaattttcaaattcataactgttctcagaaatattggtatcattcgacattccgaatttctagctcaatagacttagaattttaataaa

SEQ ID NO: 67321 - DNA, 642 bp, Heterodera glycines
gttccaataatgattatccttggggggcaagttcggtcatcacaaatttacaatgcgcaggaattttgcaggtttattcatttaagaattattataaattaatttatgttaaggatttggcggttacgtaagcacagaagaaaaaaagcaatttagcagtaaacgagagaatgagctgttactgcaaatcccaaagaatggcgtcactgttccgtaccgagtcgtagacaatccaacacgattgaaggacgaggaatgggaccgagtggtcgcagtgtttgtgcaggtgggcgtatggtcatttcaggggatttgcaaaactgctttagggtccggcctggcaatttaaaaattggaaatggaatggcaatccggttgagatatttgccaacattggtgcgtttcacttgcaattcgaagaacgtacgagggatactgagtgcgattcgggtcgggattagttcaactgtttattaattggggaagaatcgtgagcagataacaaccaaggtagcttaatttttgatagtgaaaactagtcttttagtgtttcatgtgtagtgatcggaaggttcgcaaaggcatcagggatggtcggaggtgaaggaattttgggcaatgctagacgggcgcatttagaag

SEQ ID NO: 67322 - DNA, 321 bp, Heterodera glycines
gatgatgagtcatcgatattgcctttttaccgtctccaacattcaaaatcattgccagtggaccggacaccgacaccaacaaatgaagtggcttagaaaaaattttaaaatatttgaagaaatttttaataatttaaattgaaaatttttaacaataaaatgaggtggcttagtaaaacttaattaaaaaattaaaatgaaaatacaaatttaataaataataattgaaattgaaaattttagcaagaagaaaatgtaacgagcaatataaagatagccaaaaaaattaatgtcacagctgacgggaactgtttgtttcgt

SEQ ID NO: 67323 - DNA, 682 bp, Heterodera glycines
atgacgcagaatgcttcagctggaattgcttcggaattggttttgaatagaaatgcttcaagatttatttcggtagcgcagcgaacactcctttctctttactaacgtctcttttcatctgtttcagtcactgctcaaaattccaaccgttaaaatccgcgacacaaaatcagtcgagcacaaagttgctgaaatttcaaggacaggttacgacaaactcattgtgagtcttacaattagtcagcttttctttgtaacgagctaaatttaggtaatctcagattttgactacactttgagtcgctatcacagaaatggcgaacattgcaagacaacgcatggaatatttagtggagtttgcgttaacgaaaagaatttggagttttatgagaaggcgcatgttttggaaacaaagtaaataaaaatgaaaattttatatttcttataaaattatgtttttttaaattaaggtataaacccattgagttctgtccaacaatgccaatgtgcgacaaaatgtttgtttatctgcctttttcattctgttaaaattttttgtttacttgtttcaaatgcggaattttcatttagtcctttcatggaattgtggtggaaggaatctcatcgactgattgttcaggttcttgcttttataattttttttttgttgtaatatgtagta

SEQ ID NO: 67324 - DNA, 1096 bp, Heterodera glycines
atggccaatgtgcaccttatctccaatatgatgcaatttgatgaaaacgaagtgtgcatcggctttagagaaccgctcatccacactttcaacaagaaccaaactgtgatcaaacaggaggcgcccttcttccacaaattggcggaccgtaacgcagtgctgctattgggagacagtttgggaggtgggtgaacgaatagatgagcaggtcaacgctgggtaatagtgccgatgggaccccccccccccacctttttcgaaaaatgacttttttgattacggattgtattagggattttaagggtcggagaatccaatacaatctttgtaccagagccgcaaataggaatgaatttatagattcgtttattgtacaaaaaatcaatggatatttgtttaataggctgaatctctgataaaattcccttttactagtaaatgtttttcctttttaaattcaagatgttcgaatggatgttggtgttgaaaatgagtcggtggtactcaaaatcggatttgtaagtgctcattcaccgccacaacttttcatcccttttcttcgattagctcaactttgattccgacaatttgctcgaacggtatttggacgactatgacattgtgcttgttgatgaccaaactatggacgttccattattcattttggaacacatcaaacataaatcagcccattgaatttatcaacaaaacaatagccattttgttgttttcacagtctttggttttgactattagcacggattatttgccaaaatttctgtctatagtgaatgtttcttctgtttatcctttttattgtaaaatataaaatacattttatgtccttttgtctctttgcattttgtgttatttccatttgctaatttactcttaaaaatttttatcaaatttttatcgctcgcttttaatcattttgtgtagtaattatttgtaggcctttgcgatgaaagtcatcaacgagtttggctatcgtcaagatgcccgaacacccagccaaatccgcaacattgactatcaaatgggagtttactcacatgcagacggctccgcttacattgagcagggcgagacgaag

SEQ ID NO: 67325 - DNA, 528 bp, Heterodera glycines
atgtccgctattcaactttctcagctgttgaaagcgactagcaaccgcaaaattgagcaccccgtgttgatcaaccacatttgcaccgcactgaaagagtaaaaattcatttaaaacattcaaagaaaatcccccactaagtcaagaacgaatctcgtaatattaatatgttcaatgtgcccaattgaatcattttgggattgctactagtacaatataaaatgtgattgtgagagactttggatattgtctcaatgtctttcaaaaatgccctcctaaaatccgttcctccattcagccgtcctttgcctccgtctctccgccacatttgtcaaattgctttttacttgtccaaacattcgttcctcgataagccgcttctcaacagaatcaaagaggattttttggtttatgtccgaaatgaaatcatctcgaaaacatctttttcacacattgtgatcgccttcggtcttcccttttttctttctttttttattttcaaatttcagctttttttcgtctgactga

SEQ ID NO: 67326 - DNA, 591 bp, Heterodera glycines
tccttctcgttggtccgtgacattaaacgtggtgagcaaaagcatcacccattgttggaacgctttgaactgatgcttcgcttggtggttccgctcaattcccacagcactccccaggaatggtcagttccgccgatttttatttaaattgaactctatcaaaatttaggcataaaactggcgcttttctggaaggccgttgctttgtggacacggcacaacgccaactcatccctttgagagatgtcaacggaaatgcaaatgtccgtgaagttgcagtgattcttcttatggacagacacttcacccaacgcattggtccctccgagaagggccccgaccgaccgaccggcatcaatcagatgtgggaacatggcggactaagtcgggactggtgactctgtcccgttttcttccaggaacattcgtcatttaaaattggctgggatccatccgattgtattcaccgaacggcacttccgcaaactcggcgacgatgaacgatctcaaataaaatttattcgagagaagatcctttccttatcggaggaatttcacaccaacgaatggacggaagagaataacagttaa

SEQ ID NO: 67327 - DNA, 804 bp, Heterodera glycines
  unsure (1)..(804): unsure at all n locations
atgtcaatttacaattttttcttgttgttttcgtcattgcttgttgttgttctgcagcaatgttcagcagcaaatgccacggacaaaaacaatgaagacaatgtcaccaaaggtgattaaaaaatattaattagtcagccaattgtgtgtctcattactacaataagaaatgggcaaaatatgttaggcatcgggtgggaatcgaaccccactgtcccggtttatctcatttgggcccaccatgtttttggctataatttttttctctgccaaccaaatccagccaatcttgcttggtatcattcgatagccctaaatgttatagcctcaaaagtttcggaaagcttgaacaaagatatggcaaaaatgttcgaacactgagttctttttttgaaaaaattcatctggtcatatctcccaaattttttaatttatggcaatatgctgatttttttgtgtgtatgactttttattcctttgaaccgtttgccccaaaaattccgctaaaattttctaaatttaaattttattgctttattttcatctgtaataaattcttcaaaatgatgatttttatatcctaaatgctaattttttgaaaatttaattttagcaatttcttccgacaaaattgtgccaaaatctgatgccattgtccactcggggcctgttgttgaaagtgcgtttgctgtcgataatttgtcggagccggtgaagaaatggacaaactggcgaaatgggaagaaattggaagtgaatgaggccatggaagtgccattggtgatcaacccnggatgggcgaat

SEQ ID NO: 67328 - DNA, 649 bp, Heterodera glycines
atgaggaccttttatgacaatttggaaggcgaagcgaagaaaggcgcaacgaagaaaatagtggaggaatgctacggatgggtggacgaagtggcgacggaggacgagcgaaacgcactgaagcaaatgcaccaccaaagccatgacgaatgcaaggccaaagtcagggaactgatgggacggctaagtgaggagagaagcgaacaagtggagaatcggatgggtttctgcgaacacgtctattacgggaagatggacggggaaggcgacggaggagcaggaacagctggagacgaacaccaccaccaccatcatcaccacaccaaaagacgggcaagcgatgggaaaagcggacaatgcccaaacaaaatagggaaaaagcggataaaggaaaaagcgaacaaacaaaaatatcggaaaagcggactaaagggaaaaagcggacaaaatgcccccacccccaatatagcacaataaacagcagtgaaaatggcagtttaaggctcacaggcaacgcagagaccaccaccaccaccaccatggcgaacatggacttgaggattatttcaaaacgcatttggcatggttaacggatgagcaaaaagcggaaataagcaggatgaaggagtcagggaaaagccgacaggaa

SEQ ID NO: 67329 - DNA, 54 bp, Heterodera glycines
atggcggtacgaaaacgtcctggcccgcaacattcactatgggtaccgaaacgg

SEQ ID NO: 67330 - DNA, 806 bp, Heterodera glycines
atgggtacgcaagtgatgctgtccgcaatctggacgtcacccagggactgtgcaacggcacacggctgcaggtcatgcgcacttcggagaacaaaatcttctgccgaatcctcaccggaccacgagcgggtgcgcagaacatcatcgccatcccccgcatccaattcgagtatggccgcgcccgtcatcaccgtgggctacgattccgccgtctgcagttccccgtccgactttgctttgccatgacgatcaacaaggtgaaataacagaaattatatgcgagtacatacatatgctacaaaattttaaggcacaaggacagatgctgcagcggatggcgctcgtgctcaacggcagacaatgcttctcccatggccaagtgtacgtcgccatgtccagggtgacgcagatggacagtatcagagtgtacgcgccgttctgccaaagtgggtacgggacgcacatcgagaacgtggtttaccacgagctgctggacatggacaatgccgcacaaatgccgcaactgacgaggactccgacctttgggcgaccggacgtggacagtgacccggacgtgacaataccggacgtggacaacgaccggaactttacaatacctgacgtggtccccagagaaccggacatggaaatggacacaaacgtggctgaaccggacgtggcgatggaaaatgaagttgaagcgggtgcgatggaagaagtctcacctgatacttcatttgatgattttttggattgattttgttatttattttgctgctttatttgattaaacttttttaaattga

SEQ ID NO: 67331 - DNA, 785 bp, Heterodera glycines
atgggccatatttttgggagaaagttcgaatgttttgaaaaaggcttaatctctctctctcctcctgggctttatctgactgacaaatctgtaaaaatccgcttgttcgtcgagagtgtaccaccgccagtcactgccagtctcgaagtccccattccccactttttttttgcttgtcgagaagcacaaatgatcaatttgctttatagatcacttttcagtatagccaaatgattgacaacagcaatgtttagcccccaaacatttgctttttctttaaatttttagtctttggtttacagtaaattagttgaagtaccgtttaaaaccatagaaaatcttcaaaactctttcaaatgtgaaaattatctagttaaaatccataatttaacaaaattttcatttaaaatttactgactcgtgaaataacaattcgatcaggggtctcagaaagtgatttaatcaaggatatttgttccacccactaaacttggattttatggaacgaatttactgactgttatttatttggacttaaaattctcaaaaatagtttcaaatttttgagaatttattaaagattcaatttttgaaaaaggctaaataaccatgaattctattcaaatccgatacttaatgattaaaattcatgggtgattttaaaatttaatggattttcaagcaaattaattttttttaatttccgacaaatttattatttttttacttcaattttttttgtatttaatcattcaaattcacagtcaatacacatatgaaataaa

SEQ ID NO: 67332 - DNA, 550 bp, Heterodera glycines
atgaagcacaattaccatgatggcacttccaatgcgtacgcgtcatcccctgtgccgacaattagcacatgttcagcaccaccaccaccaccaccaccggcggtgccaatgtcgtacatgaacccgaaacagcataaacattatcaatgttatcagcagcaacaggaaccacttatgggtacaaaaaaaaataaatatttaaaattaaaaatgcactaaaatttttgtgcccaaattgtttcttgcttttcaagacaggctcaaacataagaaatgcccttgttttcaaggatgcccttgaaaaacgtagcattttttggccaaagctcgacacagattttggaaattaaaaaatgatttactgtattaaattaaagatggctacggttatgccgtcccagtggtgccaatgccaaacaatgatcataacaatatgaggagcttttgtgccgcattatgtcgttgccatttgaaaaatgtgagcatgttctgcattgcattcgtggaattttgcatttctggtcagttccagaaagcattcattcattga

SEQ ID NO: 67333 - DNA, 214 bp, Heterodera glycines
atggcacatttttttgaaattatgggttgggagaagtctaagacatcggtatttggtgtacaggcagttaagatgctagagtaagtaagacgcaaatttccaaggacgcccttgacatggatcaaggatgcagaattaagtacatatttggcgacgattaaaaaaaaattaagaaaaaataaacaaaaaaattttcagtgttaaaattttttga

SEQ ID NO: 67334 - DNA, 811 bp, Heterodera glycines; identical to SEQ ID NO: 38552

SEQ ID NO: 67335 - DNA, 549 bp, Heterodera glycines
attatgctctttcatcgtgtctttggcgctgcttttaaccattgcccagcaaaaggtctcttcaactcgtgtgcacattttcaccattacgctacccgtcgccgaattcctcgcccaaaatcattcgcggatttgtgatggttcaagacacctcaaacaaaaaaaggaaatttctttttgtcggtcgaatgtccaataaatagcttttcgtctgtcttcacaatgacttttcaaataaaaggggggggggaggggctaaaaattgactttgcccttctccccgtcccttaaacattcattcgtacgcctccgctttcgacatgatattccttccatccccttcagttccactcctttttgttttgcttgtgttaatttttgtttgttgtttggccactttttctttccatttcctttttttttacttttgtcgctgtccaatgagtggcaaataaatgcccttaaattattatttcttcatgggttctcacctctgtgtaccgtgtaccaatcattttgtttgtgtattttattaactcatcatctgtt

SEQ ID NO: 67336 - DNA, 293 bp, Heterodera glycines
atgagtgatctgactcatgacggtgtagagcgtttaccgctgcacacattcactgaaaacgcctatctgaactattccatgtacgtcatcatggatcgggcgttgccgtacattggcgacggtttgaagccggtacaacgccgcatcatctacgccatgtctgagctggggctgaacaacagcgccaaattcaagaaatccgcccgtaaaaggggcgacgtgctgggtaaataccacccgcacggcgtaggagggtgttatgaagcccatggtgctgatggcgcagccgttct

SEQ ID NO: 67337 - DNA, 674 bp, Heterodera glycines
caccatggaacaacacaacatcaacgacaacggcggaagggacaaaagaaccaaatggaaaagaggagggactttctgctgaaaaggcaaaaacgaatcggtaacagttttaattagagttaagccccgagcccctcagcccccgacgatttagctcacctcgacccgacgatttagctcacctcgacccgacgatttagctcaccccgacccgacgatttagctcaccccgacccgacgatttagctcacctcgacccgacccccgacgatttagctcaccccgacccgacccccgacgatttagctcaccccgacccgacgatttagctcaccccgacccgaccccagacatgtgccccccgaaagtccccggccctcgacattttgccccccgaggggtcggggcttaaccctagttttaatgagcggcgggtcacatttttggaaaatagttttgaaattcttttgtgtcctttcagtgccgaaaatgcaactgaaaatgtgccaaatgtctcctcgactttcgcggttccctcgcggcattccgtccccgatttgccacctgcgtgcgctgaccacccgccgggactgatcggtcccattccggtgtggatggacgggccgggattcgagacggtgggaaatgatgagagacgttactcaaacaattaa

SEQ ID NO: 67338 - DNA, 551 bp, Heterodera glycines
atgaccgcctctttgcaacaaattcgagcccaacccggctggacggtttggacttttaacttacaaattctcattgttttcattagggttgcgaccccgacatcggggttggaaaattaggggttcggggtgaaaattccccgactaaatttgttggggttggctggagaaatttaaaaatgtcgggggctttcataaaaagtcggaaataggaaaaagaaaaagttcctgaacacaaaagtcataaaaactcaaaatcgggggcattggaaacgaaaatcataaaatgtttatttataaaaggagtaattatggctaaatgctgcaattttcaggcggacaaatgcaaagagcaaattgaggtggccaagagcgagaatcggacattccaacgccaaacgctgcaggcgcatctggtccatttgctgaacaaagagcacaaattcaacgaggccatccaattgggtacggacggacgtacgaaaaaccgaaatggatgcaaaatcatttttttggggattaaacaatttttcatcgaaattcccatttaa

SEQ ID NO: 67339 - DNA, 67 bp, Heterodera glycines
atcatgacgggcaaaacggcacaaaaatatgccaaacggagacggaggcaatgcacgccatcgcaga

SEQ ID NO: 67340 - DNA, 686 bp, Heterodera glycines
atgattgcttttctgttggacgataaaaatttctcgataatttgcgaggagctaaaattgcgcaaaatcgacacgacaaatctatgggatgtgctgttcgacatgatcattttggacgcgttcgaaggtaaatttgccgaattgggattgtttttcatggaacatttcaagagcggcgatcttttggaaaaatcgctaggaaaattttccaaaatttttttgaatatttataaaaaatttctgggtttttcattgaaaattttctaattgataattcgttcctgctctaattcatttatttctgtctgtgcctttttagacgtgcaaaaaccgccgtccgcaatcgccgcactgctcagaaacgggttcatctccacgtcaatgaaacagtcgacgctgaacagtttgatttggtcgatgatcaaaacgaagcgacagcgactgcaagtgaccgaaatttgaaaccaaaagttgacacacttttgcaaaatgaatttctcatcacaggtcaaaaacggattcatcgcccatttctatgacatttcccaagtgatcaccggctcactgaccatgggactgatcggcggaagtgacaaagagttccaggaactctgtgtgtactttaaggtcacttattagtaaaaagacattttcaacgacttacccaaatttatttggattaataa

SEQ ID NO: 67341 - DNA, 387 bp, Heterodera glycines
atgccgtggctaccgtttttgctgatcctgctgcccgccaacatcatgaccatggtgatgtatgcctttcgtgcggaacgcaaacacatttccgaaagcgaaacccactttcggaacgcgatggaatattccgctatcggtatggcgttagtgggcaccgagggacaatggctgcaaaccaacaaagcgctctgccagtttctcgggtacagtcaggaagagctgcgcggactcacctttcagcaactgacctggccggaggatctcaataaagatctccaacaggtggaaaagctgataagcggtgaaataaacacctattcaatggaaaaacgctactacaaccgcaatggcgatgttgtctgggcgttgcttgccgtctcactg

SEQ ID NO: 67342 - DNA, 384 bp, Heterodera glycines
atgagcgggaagcgcttgttcacaaacgtgctcaaatcggccgtcgggacagtaaatgaccgtccctgtattccacccgagggattaaatcgcgaaatgctcaaaagaagaccgactccagcgccagtgccgcagtttacgacacgcagcgcggagaggagccccgtgaggaagacatacgcgccgtttcggaaagggatgccactggaacgcgcggaggaagctatctacaaaatccgcaagtcactgctccaggccgcggacgcgctttcagagctcgccgacgaactgttcccgcacggagaagcgcgagagaaagatgaaggaaaggaggacgaagaggcgcagtggggaggaccgggcccctctcattcttttatgtag

SEQ ID NO: 67343 - DNA, 67 bp, Heterodera glycines
gagcattgaactcaaccaaatgcgagtggacgctgtgccggacttggcaaggttcacccaattacag

SEQ ID NO: 67344 - DNA, 66 bp, Heterodera glycines
tgtccgtttggggactcaacattatggggagcaaaaatccacgcagaattaaagtacagggtatag

SEQ ID NO: 67345 - DNA, 884 bp, Heterodera glycines
attcagtgggcctttctgttggcgagaagagcgcgggatcaagggatgatcgaaagtgacataatttacgtggatttactggaggaaagagaagcggcaaaagcgaatcaattgaattgttttcagaaaatacgccaatatcgggtgaatgtgctgacgctgacactgtacgattgggtgcccattccattggttggtgggcctttggcaaaatgccaatgatcaattgtatttgctcttttgttggcattgatcactgggttacgggtaaaaggccaagtgaccaattgtcgttgctcttttgtcccattggttggcgagttgtggtaaaatatattaagtatctaaatgatgtgtacgtgatgaactgtcttgttctcgttagcattgctaattgccttcgtctgatcattttgtccatttgtccccccctccccctcctctaaaaaggtgtacacccaagtggtcaatttggccgtccgtctttactttgtcatcgctctttttgccagacaatttctcaaagatttcggtggacggaatttgggagaccatcacttggtaattgaatattattttgtttcactttttgcttaatttcacagaaagtcgatataattgtgccgctgatgaccattttgcaattctttttttatatgggatggataaaagtggccgaagttttgctgaatccaatgggcacgcaaatcagctgaatgttcggaaggcaaagaaataattgtttaggtgaggacgatgacgacttcgagacgaattggatcatcgaccggaatttgcaatgcgggctaatgatagtggacgaatgctacgggagagagccaccaatggagagggaccaatttgggagcgaagcaatgcgccgg

SEQ ID NO: 67346 - DNA, 1119 bp, Heterodera glycines
atgctaattgcatttatgaaaaggaatcatgaaaccataattattgaatattcaatggaaaaatatgaggcatacctttgcattgtgtgttttatgcgaagaattggcaatgcaacaaaataagagagaaatttgaaaaatatgacaaagattgccgaaatattttggactttttgttctaatatttgagtcgagaagacgcaattctcacagttaagccaaacctcttatttaaacaatattatgcaattactgaaattggaatcgaagagctaaaaatttatgccataaaaaaatttcgtttaaattttaaaggaaataaaatttcataattttctgatgaattaattccgctccaagtagttatttttattgaaaatttaaaatcttcaccaattatttttttgcattaataaaaattatcaaatctgcataaaaatattaatcaaaatcttttttattgattttattatgaatgaaaattgatgaattatttgaaagaaaattcagcaaatttatataagaaaataataaagaaaaaattataatattcttaagaaaatggaattttataaattaaattttatgttattattcataatcaattcattaaacaaaactttatcagttaataatttttgtgaaaagaatggaaaacttctgcccatttttgctgaaatatttggccaaggatgggaaactgagcaaaatgcaaactgtcacccaaatgatcaaaatgatttaaatttggcacattcaaatcgcaatgttcagattgacaaatacaatgatcagcaaaaacttgaaattattcataaatttcatgcaataaaagaaggaattattaaaagacggaaattagagagaaaagttcggaataaaattgaacaaaaaatagccgaaaaattgggaatttgtcgaccgaaaatttataaatggaacaaagaatttgaatttgtttatgaaaataaattttataaacagaaaaagcaagaatttattgaacgaattgatgatttttggaagaatgtccaaaaatggaaaacagaaacaatttgcggaagagttgggcattgctggatatacattaataaaatggaaaagggaatttggcattga

SEQ ID NO: 67347 - DNA, 635 bp, Heterodera glycines
  unsure (1)..(635): unsure at all n locations
atggcattcagtttggcaaaatgcgcatcaattctttgctgtgcagttttgctcgctgttatcatttgtttttccaacaaaaatttgtacaacatttgtataaatgcgatgattttaccgtataaacacagtaatttttcatgcaaaaatattaaaattaaataaaaaattattattatattatttatgaatgaatttttgtaacatgtttttcatttactattttaggactaaagcacagtttggcgatgtgcccaataaaataggagtcgaaagatcgccataatacgaatggtaggccggttttcgggatcgggttatggggatggtatgttggcatttggggtccgactaaaaagtcgagggtttcggggtgccaacacttatccaatgcttataaaattgcctctgtttctatattttccaactaacaaataagtttttttggctttgatttatttaattcttagttttttgtttaatatatttattttatagtcaattatttctgtgttcatttacttgtttaacatttctngtccgaacacagctctgagcaaatatttccaattctgaggaaattttggccaattaattgctcaagcaatttataagtgaattagaggtcatttgca

SEQ ID NO: 67348 - DNA, 930 bp, Heterodera glycines
atggcattcattttggcaaaatgcgcatcaattctttgctgtgcagttttgctcgctgttatcatttgtttttccaacaaaaatttgtacaacatttgtataaatgcgatgattttaccgtataaacacagtaatttttcatgcaaaaatattaaaattaaataaaaaattattatattatttatgaatgaatttttgtaacatgtttttcatttactattttaggactaaagcacagtttggcgatgtgcccaataaaataggagtcgaaagatcgccataatacgaatggtaggccggttttcgggatcgggttatggggatggtatgttgtcattcggggtccgactaaaaagtcgagggtttcggggtgccaacacttatccaatgcttataaaattgcctctgtttctatattttccaactaacaaataagtttttttggctttgatttatttaattcttagttttttgtttatatatttgttttatagtcaattatttctgtgttcatttacttgtttaacacttctgttccgaacacagctctgagcaaaatatttccaattctgaggaaatttttggccaattaattgctcaaagcaattataaagtgaaattaggaggtcatttgcatcagaagacggagtaatttctagcggattttctgttgtgaaaaaattttgcaaatttttttcaattccgtccaattttccttctaattttgagtcaatttccagcaaaatttcctgtaaatctttgatcaattcattgttcggcgtgtcaatttttgatcaaatttaatttcgtaaatttctaaattgtgaatttatacatttaaaaattattttgtattaatacctttatttgcaccatcaacagatttgaaacaattaaccgaagtaacacttttaagaaaatgaaaaagaa

SEQ ID NO: 67349 - DNA, 772 bp, Heterodera glycines
atggacgggattttaacgggagcgggatttttacggattcccgtacgggactcccgtcccggaaaattttgaactcccgccgatcccgttcccggaaattttttttaccggtctcaatttttcggtttatgttttttcgaaaatgaatttttgattttttggggccgggacttcggaattgtgacaagttttcgcaggatttctaaaccccaccttaattttaaccacaaaatttcagcgtgaattggtccgcggtcatttcacgcaggaaagaactgctcggattgaacaatactttggatgtggatttgtgttttatcagctaccccaagttgtaagtctgtgctattctaataacttaaaatggaattcctatcattaacaacactaaacttttttcagcaatgggacgccgccattgttacattttacggtcctctgtacaattgggacgaattaatgctgcatctttacgacgttttgacctcggcaagtttaaacaaattttaaaatcaaattttttttatatttcctcaaacttcagattgagcaggagaccgaaccaccgaacataacctctcccacgccgaactcttccccaaattccaatggacagaagacgccggaaaatgccgaatctccttcgggtgccgtcgcttctcccaatgctgccgacccatcttccaatgccaccaactcctcgagtgtcaccggctctccaaatgccggcgaatcttgttccaatgccgcgaactcggtaatacttttttga

SEQ ID NO: 67350 - DNA, 390 bp, Heterodera glycines
atgagcgacaaaaagaagcagaagaaatcatccaagaagcgtgacaagagcggcgaccgcaagaagtccagcaaagagcagccgagaacggatgcagaagtccagcagccgagaacggatgcagaagtccagcagccgagaacggaggcccctgaagtggtgaatggagcgacgccgagcacaggagttctcacggtctacgaagagccgccgagcacggcaggacagacgacggtctacgaagagccgccgagcacggcaggacagacgacggtctacgaagagccgccgagcacggcaggacagacgacggtctacgaagagccgccgagcacggcaggcggagatgcttcgaaaacgacgaagccaacgactggaagccagaactga

SEQ ID NO: 67351 - DNA, 56 bp, Heterodera glycines; identical to SEQ ID NO: 61815

SEQ ID NO: 67352 - DNA, 444 bp, Heterodera glycines
atgttgtccgaatttagcacactgatcacggcatttttggcacaattgtccactgaggagaaggacaaatgggcaccaaatgccctccggcaaacagttgaagcgttatcaaatgggaaaaatcagcaccaacttttgctggtgccaagcgattttgtggcatttttgctcaacaaaatcataacgagctttaccaacaaaaatggtggaactgtcgaaaaattttcaggaaattcggggaagaaaatttcggaaaattttgcccctccaccaacaagctcaagcagtagtcgccatgttcgccgccgctttcgccgtgatatgtcaccatctctgtggcttgccttggcatgtgcaatgactggttttgtgcacaactcaatgttgtataccatgatggcatacatactaattgttcaccatatccttttttatgatcactag

SEQ ID NO: 67353 - DNA, 764 bp, Heterodera glycines
ctactgattcgaactacgggaccctcaagaacttggacgccgacatcttcacgaagaacgcgccagcaaaaccggcagcggcaccaaaggcgggacaggcgccacatggaggaggcggaccggcacagacaccaagtgaaaaaatggcgaaattttaaaattttaattctttttcatccccttttcagcgactgattcgaactacgtgaccctcaagaacttggacgccgacatcttcacgaagaacgcgccagcaaaaccggcagctggaggagccgcgtcgcagaagtcagccgccggaggagccatgtcgcagaagtcagcggcaccggctggaggaacatcggcactgggcaccgcatcgcagaagaccgcagcggcaccggctggaggaacatcggcactgggcaccgcatcgcaaaatttgacatatgattttcctctggattacctgaacatgagttcgcagtggggaggcggacggctggtaaagccggcagcggcaccaaaggcgggacaggcaccacatggaggaggcggaccggcacagacaccaagtgaaaaaatgccgaaattttaaaattttaattcttcatcccctttcagctactgattcgaactacgggaccctcaagaacttggacgccgacatcttcacgaagaacgcgccagcaaaaccggcagcggcaccaaaggcgggacaggcgccacatggaggaggcggaccggcacagacaccaagtgaaaaaatggcgaaattttaa

SEQ ID NO: 67354 - DNA, 192 bp, Heterodera glycines
caaaaaggtggagaagcaaagggacagcgcgagagatccgtactgaagaagagaaagggaaaaacggacgagcagagaaagaagggacgaaagtgcggagaacagagaaccaattttgcccatttgggtgaagaagaaagtgtaaatcgtagtaacaaagcgaagaatggaaggaatgaattaatctgctga

SEQ ID NO: 67355 - DNA, 2176 bp, Heterodera glycines
atggttttgcgtgtgatgtacgtgatcgaactgttggagacggaggagggcggcattgagctggtcgacccctcctggtgtaagcgattggcacaaataatggcggggctttcagtcgctgcgctcgccggcgacgacgagcggacgctgtcactgtcgcaggcaccgccgtgcgacgaaacgccgcggcacgggagacgaacgacgcccggcaccggcagtaccacgccgggcaaaacatagccaaacaattcaaaacatttcaaaattaaattgcttttaaatttgaacagcaataatttgccaggtcccgaagagggcccaccgcgcaagaaggtcaaatcgccgccggtcatctcccccaccggctcttccacgagtctttacagtggcggaagttcgtccatcgaatggacaacgaccggcacatcgttggaaatgcaggggacgagggtaaaaggaaggggagaaaagcataggaaaagcaatggcgaaaatgcaaaacaatttatataaaaaaatcctaaaaatttaataatttttaaaaataatattttggataaatgattagttttattttaataatatgttttagtaaattgatttgatttatcttttcatttgatttaattaatgaatttccattcttttatcctttaggtgacgcgcactcagtacggcttccgcactttgcaggagtcttccgccaaaatgtgccttaaagtgaccggctatcccttgcccgacatctcatggtaattaaaaataaattaatataaatatataattaaataagaaattaatgggcacaggtacaaagatgacgtacagctgaagaacgacgagcggcacactttttactcggacgaagaaggctttttcgcgctgaccatcgacccggtgcaggtgtgcagcaggggccaatcacaattacgaacgacaaacgacaaatttggcatttgtctccgaatttgtcattacgacaaaaattatgtcgtttatcgtcactttttttaaggattaatcaacatttctcaggaaaatgcaaaaaaaaaaaatggcaaaatggcaaaagagcctttctaggggtttttgggtatgtagattccgaatttaacagttattttgctctaattctaatcatgaacttaaattcaaaaaacccgaataaatggatgaaaaatcatagataaaaaaaatagaaatgaaaatctgagatcggattcatgatcagcgaactaatttaccactagaaacatgtttttaatattaaataaaaatttttgggtcaaaataatttggtgcatttttgggacacttctcagacgacaaatttgaggggcggtgttgagcgccccccaaatatttggcgtttgtcgttggtttcaatcataattacgaacgacaaacgacaaattttttaattgtgattggagataacgacaaacgacgtatattacgacagatttggcgtttatcgtttatcttttgtcgttcgtaattgtgattggcccgaggggaagagaaaggcacaaattaaacaggaaagaaatgccaaaattggatggcatttcgactgagttggacatcgcttaaatttcgattttcagactgaggacaccggacggtactcatgtgtggccacaaatgagtacggccaagcaagcacttccgctttctttcgagtgctcaaaggtgagcaacggcattttgagcaacgaatgtggagaaaaaatagcggcaattttaattataattgtaaaatttttaagttgaaaaggaatctgccggtccgtcctttgtcaaatcgttggcggaacggcgcaactgcaaagagggcgaagtgatcagcttcgagtgtgaggtgaacgagcaaaaagagaatataaattaataaaataaaatcaatgtgtcattttgacaaagcaatgactcataaaaaatcaataaataataacaaatcgattattgaataattgattgatcaacaatattaattgatcaggtggatggctggcccgagcccgagttggtttggctggtggacgaccagccgttgcgtccatcgcacgacttccgcatccaatacgacgggcaaatcgccaaactggaaattcgcgacgcacaaccggacgacagcggcacgtacacggtgaatatcgactttatcaattag

SEQ ID NO: 67356 - DNA, 969 bp, Heterodera glycines
atgttggctaacaaccgatcagcactgcttaatttgttgatcggtgtgttaattggatttgtgttgtcattagcgcttttcccatccactgattttccaagtgtcaaattgcctacatattccagaccagtggtgttgattaaggtggataaagaatatttttattataaataaaattttaaaaaacacaaaataatttataaaaaatagaaatttatatttgtatctaatagagatatgttttcttgtttctacctaatttttgggctattaacttttttttatttacatagaaaaaaacatttaaaaaataggaaattatagcaatgaacaaaaaaaaaattaatgataggaatatgaaagctatgcaaaacatattttgcaagtaaaattaagttattcatttgaaatgaatgaattattactttttcataatttcatttacattttctaaaatcggatttaatttattaattcaattaaaataaaatttaccaagaatattatttaatttattatttttctaaaggaagaccaacaaaaacagcgcaatgctaatgtgcagcaacagcaacgagatgagcttttaaataatcatgatcatgttgatgagcatagaaatgagcatcgtcgtcgatttgatccgcacacggaggaggaggtcgatgataatgatgatgagcatggagcggcacctggcataccgttgtttttccacacaaacggttcccatgttaatgaaggtaattagaaagttaattatatttttatttgaacaatttaattattaagtttttaaaaatattttaatttaagctaaaatttatttattttttcttaaacaattaatttaatttgttaaaatggtacatttttaaattaaaatttctatttttataattaaaactctgtatgccgcaggataaatttcgatttgctaattctgtcactttgaaaaagcataataaa

SEQ ID NO: 67357 - DNA, 353 bp, Heterodera glycines
atggttcgattagtctttcgcccctatacccaagtcagacgatcgatttgcacgtcagaatcgcttcggacttccaccagagtttcctctggcttcatcctgctcaggaatagttcaccatctttcgggtctcagcgcatactctctgtctccgccccatcgcatgcgatcgagacgggactatcttgctccccaacaccgcagtgtccagggatcacacatcagctccgtaagaagccttcactttcattgcgcctttgggttttgaacacccaatgacttgcgcatacgctaaactcctaggtccgtgtttcaagacgggtcgaacagatgaccggctatacaccgagaag

SEQ ID NO: 67358 - DNA, 697 bp, Heterodera glycines
atgaacccgaaaaggagccaaatggggacgaatcaaagcgtaaaatattaatgaacattaaacacataagtagagcaagcagtatggagatgaaaaccttcttgatttaaatgcagtaattcctgaacgaactttattaaaaatgggcatattgtaaaagaaaaagtaaattattagagacaggaaaattccaaatttgcgcatttcgctgcgaaaaattggagctcaaaaatttttgcaagacgtaactcccggagattaatcctgcaaaatcccgcgcgggatcccgtcccgcgccgctctcctctataaatgatgacaattcaaaaaagctacgaacggactccaaaattgtgaacctttgatttcatttgttcaaaaaagcaaagccaataataaaaaataataattaaaatccttaattgtcccgtactatcttgccaaaaaacccttttctttgtaggaactctcgtacttttggacggttgcatcaaaacagaaactgctcaaaattgtacagcaaatgtgcaaattgcatatgaacgtatcggcagctcgtttttctacggtaattgcgacgctgaaaagaaaacggtatttgagagcaggtgagcaatcagacgaaacatttaccataattgacttgttatttgctaattcacaaatgagaaagcttccctttttgttcagcacataa

SEQ ID NO: 67359 - DNA, 631 bp, Heterodera glycines
atggtcggtaaatgtcggtccacaattttctgctaaccaaattaaaagcatataagaacagggagggcttccatcgaaaaatatcagaacatcaagtccaacaaatcaattttggggtcgaaaatcatgatttccatatttggccatattttggcgttatgtccatatttttgcatttttccataaaaactctattagaacggcccccagcagttaaagtagcttttttgaccggaaaaatttccgaaagaatcatttgcaaattgaatccgcgacttttcgttatgttttgaaaaattatgtcaaaatccattgtttatcctctggggatggaaagggacacgccgacacatttttttttactcattttttctaacccaactcccaatcacttctgatgtgtaaaagtcccaaaaatccaaacaattaaaatatattcaaacaaaaaagcaacaaataaatgtgaggtatgcaattttcagatcaatttccattcataatgatcgatttatctttcatttcccaataatcgttcattttttcttccgctgtccaccaggcccgggattcattttcagacgaccaccttttgccttcattttgtccgtctttggtggagagaatcgcctaa

SEQ ID NO: 67360 - DNA, 1013 bp, Heterodera glycines
tcctcttccggacaacaactttggcgaagtgtccggcttcaccccggaacaatatcagcgggtcaacggctactccaatctgttctggggatggggtgacgaagatgttgacatgttcaacaggtaaattcgcaaagaatgacaaaagctttttatcacttttaatttttgcaactttataattccaaagtcaaaaaaccacatgggcttaaaaattagtcaaatttagcctttatgtttaattggtagcttaattatctttaaatataagtaagacatatttataatttattggctatttaaaataataataataattcgaactcgaaatcttgaaaaagccagggtcaggacccggatttccgagacggatacccggacagatttcggattaaatgcgggttctgttgcgttatattttcgttatatgttatttaattgaagaattctgagtgttggctacccggacgagcgtaaaagagagctgagtgcgcctgagttgggcttctacacaagccttgaactggccaaaggtgtcaacgacacaacaaacacaatcggaaagtcagtgatttggttaattgatattcataattgacgcaattatttttagcgaagagtgccggcaacgtttgctcgactcggcggtgaagcgaatgccgttggacggcctgaacacaatcaaaggcacatacaaagtggtgtccgtccaggagaacaaactgttcacaaacattgcggtaatgaataataagcgtgaccggtaaatgcgcttagaataagaagaagaggctttatttttgctttatcccttagttttttacaaaatcaaaactgttttgcattattaaaccatggactttcctcacagatcgaccttctgatggaggaatcgcgaaaacgggcagacgacccgtgcaaagatttgccagaccgcgcgaaaattgtggaaaaaacgttgtgcacaacgccaatgtgcattagcagacggagacgaaacgccaaaaaataaa

SEQ ID NO: 67361 - DNA, 787 bp, Heterodera glycines
atgagatgtctccgaatgatttatttccttcgatttatttatttgtatttattttattttattatcttacaacaaatgaattcccattttcagaatgtttgttgaccattttgtcattattttggcacttttaatttgtccattttctgtcgctgaacctcttccgttatgccctgaagttccgcccacattaatcgggcgccaattgcccgacaaaaagatgcaaatgctggccgacactgaacgtgaacatcccgaaatggccaaaggcggggagtggaagccgcgcacatgcattgcacagcaaaaagtggccatcatgataccgtacaggtacagtacgacatacagcacgatgaaatgttcgttaaacgctacaaatggaaaaagacgaaaaaattagcaaaccggtacaaaacctttcttttttgcggatttttcggatataagtcagcgccaaaaccatcccaaaacaaaaaataattaaaaaacaaaaaagctaccgtatttcttctaatagagccccagagggggtcttttctaagcctcccagaggagtggtttaattgagggaggaggctataatagaagaaacacggtataatatttaaaaaattaaaattatgtgatactttcaggaatcgagccgagcatttgcgaggtctgctggccaatctgatcccgttcttacagcgtcagcaagctcatttccgtatttttgtggtggaacaggcgtttcccgttggaaagcgggtggacaagttcaacaaagctaaactgattaacg

SEQ ID NO: 67362 - DNA, 802 bp, Heterodera glycines
atgaccctgacagtgaaactgccagccgcttttctgtccgttttgggtccttcttttctttatctcatctttctttccacaaaattttgcgaattggctatttctgggctagtcaccctagtagtaacctagaaactgtcatgcgtgaaactaacattcaatgcatacgatcatagatttttataacttttatagagatctttgccaagtgtgggcagaaagacagcaagcagaagagcggctgagtggtcaaggccttgttgtggaaatcgatgaaagcaaattttttagagcaaaatataacagggggagaatgataaatagagcctacgattgggtttttggtctattagaaaggggcactaacaaagttagattcttcaacgtacagcgtagagatgccgacactctcctgcctataatagctgataacattgaagctaactcaattataataagtgacggatgggctgcttatggagggataaataacatgcaacagcaatacgaccatcgttgggtaaatcatcggatgtacttcgttgatcccaatgacccaagagtgcacactcaaggcattgaggcgacatggagagcactcaaaaatggattgcgacgcttgcacggaactaactctgacatgtttgttaccaacctatctttatcagtatatgttccgtcggttccatggaaatgaaaaaattttccaaaatattctggaagaaattcgataccaatatccactataattgtggctttacattgtgtatttcaattttaggctgacagtttgaaaaataaa

SEQ ID NO: 67363 - DNA, 299 bp, Heterodera glycines
atggccaaatcggcaggttagaaattttctaatcacaaaaaacaattcataatttaatgtttttaggtatgccaactgctgatcagaggaatcgccgtgtgttccgatcacttttttggatcatcgccgtgaatattggtggtattgtattcatacaatatgtaccgcactgatcagcccactgatcaaatcaccgatcaccacttggtttttcctatttgcttagaatggcacaaaataatgagaaaaaatacttatatgtaaaaaaaatcgggtactgaagtgtccacttcttttaa

SEQ ID NO: 67364 - DNA, 228 bp, Heterodera glycines; identical to SEQ ID NO: 66258

SEQ ID NO: 67365 - DNA, 258 bp, Heterodera glycines
gaacccattgtgcctgtgcccgaatttgttgtggatctctgcgattttgaggatttatatttggcggaatttgaggaccaacatcttgcattgatccgtctgagtgaaacaaattggcgtttgatcagccgtacaactgctactgctgatcaaaatgatgatccgaatagagatgaacatcaccaaaatagcggagaaggaccagcagaaaatggaagcgaaaaaacgctgatcgaaatcgggcgattttttagctaa

SEQ ID NO: 67366 - DNA, 464 bp, Heterodera glycines
  unsure (1)..(464): unsure at all n locations
ggaagtcgtcgttcaattggcccattctctgagtgcttttcaaaatgagaccgaccaaattttcaaaaaagctgcgctttggatggaaaaacgcacgcggagaatgaaacaattggacaagcgaatggaaatattggaaaggaaaatggaggcggtggaaaaggtgcaaaatttgggcatttttacaaattattacagtttaaccaaacaaaattattattgatcggatttgatttgttaatgcgtgcttttactcttctcagcttcccgaggtgcctctgctgaattgtgcctccaatttccccgagtttggcacccccggcggaattgtcgagccaatctttggccattccgcgccttttaatcgcagaagcggcgtccattttatggaacagaaatggaaaaaggagttcaattcgaatttgctgaatgaagccaatgnttcgacgccaaggattttttgg

SEQ ID NO: 67367 - DNA, 589 bp, Heterodera glycines
atgcccggtgagtgccggacgacagacaaacacaattttggtggcatgggggcatttctcttctcccagaaatggcatttcaaactttgaataccaaaatatgttgaattggaaaaggatagcacaataaaaatgaatgtattttttaaaattttaatgaaaaatctgagttttctaaattttaacaaaaaagtaaaaaaaaattctgtgaactctttttggaaaattaaaaaaaatattttcattggatttttatttatttatttttcgttttttcgccatgattttttacccttcaggcgcaccagtgactgttgcaagtgtgaacattgacacggacactttgctgcgcacgcggcacaccgacgccaaacattcaaaagacgacgaaaaccgggagaacgacggcaaatttgatgatgctaatgatgatggagaggacggggaggatcaacagaagggcggcgaagaaacagtggcaaaagagggggaggaagaagaggacaatgggatgggaattgaacgacggggacggcacaatgccaaagctgaaacaattggtggtgctcagctggcaccgatggtttcg

SEQ ID NO: 67368 - DNA, 700 bp, Heterodera glycines
atgtgcatttcattgactacgaatatgcgggccaaaactaccaactgttcgacattgcaaatcacttttgcgagtacgcaggttgtgcacacaaaatcgggtgcactacccccgaaattaaaaaaaaaattcttaattattgaaatttttttaaaaacttggagttttttataagaaaaaaaatttgaaaaaattatcacgattttttggaaaattttttgaaaaaacttactaattcattgtaaattttgataaatcacatgaaaaattttttaaaatttttttcttgaaattttcttataaaaaatatttctaagatttaaaaaaaaattatatttaggggggggggacgacccgggggaaatataatttttttttaatcatagaaatattttacggtgaggggctgggggaggagggaaacgaaatgccacaaaattcgagggcaaaacgccaaattgaaatcgaaaaattaaaaaataaataaaataaacttttttttaatcattttaatgaattaaacaattggttttcaggtgttgatgagtgtcccgattatggaatgaattcggctagtgaagacgaacgtcggcattttctgcgccgttattttgtccattttggccaaccaattggggaagagtgtgaaatggacaaaatgttgtgcaaaattcggcactttgaagcggtacattcataa

SEQ ID NO: 67369 - DNA, 156 bp, Heterodera glycines
ccgcttcaaagtgccgaattttgcacaacattttgtccatttcacactcttccccaattggttggccaaaatggacaaaataacggcgcagaaaatgccgacgttcgtcttcactagccgaattcattccataatcgggacactcatcaacacctg

SEQ ID NO: 67370 - DNA, 1396 bp, Heterodera glycines
atggccaccgttttgcggtcgtccgctgaactctccgtcgagtcgattgtcgctttgttcaattgttacgtccattcggtaaatttttcactttgcgtttttcctatcgctcattcctctccattttgtttttctcttcagattttcacatttttttgctcggattttgatgcacagcaacaacagcaaatgttcggcaccaatttcgtcacttttcgcctccgccaatttgtgcaatcaatcgaaaagaaaatgaatggcccgggggcgacagagggtgggcaagacagtgtggaaaatgcggaggtgacagacacacagaaacaaaccaattattacaaatatggcacatgccaacgttttagctttcgttgttttgccgtcggtcgtcgctttgccacgcgttggacagaaacgactcggacaaattgtttttgctcgtcgaaagaattgttggcgttgagtcagtgtatgttttcctttctgttcttttgatttttatgcatcaaaatttggatgctttccgcagtgtttttctcgccaaacaaatggaattgcttcggcctttcctcgaggcgcttttgccaaaaagcggcggaggcagcgacagcaatttgtccttggactccttctatcgtgtttgtttgatttaaacgtttatactagagctcgattggacctggacccactcctgggtttttcctggacctggttttttgctcaagtccaacattgaatccaggtccaggcccattttatgccacaaatttgtttttcccccatatgcattttaccccattttcagtcccttgcggcggtgttcgatttgggcgacgcttcgtttggctgtgtggcggccaaaattatactctttcagtcaattctgaagcaaatttcggcgaccgattggacaaccggggaaatccattcgcaacattcgccttatgtggacacaattgtccaagtgaatggggaaaacagaggggggtgggggtgaatattggcaaaaaagcaaaggaaaaaatggccaaaataacaattgtcagccttttccataaggtgttttactggtgttcctttttaggaatgttcgcaattcaaacaaaagttcgtccgccttttcccctacgttcacatttccgacgaattgtacgccgccatttggtccatgcttttgctgtgcattttccgtattttggtccaggggtacgcggacgcccaatttgtttcagtggcaccattgacaaaaacgtaattttttaggtacgccgacgtaaaaaagtgcagcattgagggaagagcactgcaactgttggatgtcgagcaattatgtggggaattggaggagatcaccggactgaggcaatttcacaatcatccctttattttagtgtaa

SEQ ID NO: 67371 - DNA, 4055 bp, Heterodera glycines
aacgaatttgtcatcaattcggaagcgattaagcgcatattggacgacccgcgctacgctgacaaaaaggtccaaaatatttttcaattaaagtgactctgacttaatggaattttttcattaataatttatcccaacttttttttacaaattttggtaaaatgtcgatgagctctatttttcggcaaaaaatcattaaaaaggtgaaaactatatggctaaacacaaacatagcatttattttagccctattccgaatttcacttcttaaacttggaacaaatgccgaaaatatctatttacggataactcgataaatacaatctcaaatttggctgggattcggaacaggccaaatgaatgtcatattcgtttttgtttggttttttgccatataaatgtggttactatgttttccttttaggtgtgtgtagtcagcgtggcgggcgcctaccgcaccggaaaatcgtttattttaaacttttttctgcgttatttgcgttggcactcagcacctgttgctgacagaacagtagattggttggaaatggaatcgacgttggggggattcagttggcgaggcggcgacgaccgggacaccaacggaattctgatttggccagagcctttcctactcgaagaccgcaacggagagcaggttttggcaggaggggttagatttggcggaacaattcacgccccaatttaattccctagaaattcattggtctgtctttattatgatgatttttcaggttgttgtcctcctcatggacacacaaggcattttcgacatggatacgacggtcaaaaagtgctccaccgttttcgcgttgtccacgatggtttcctctgttcaggttttaaactgaaaagaatttttgaataaaatttaaggaattccatccgtttttccattcatttggttcccagattttcaacatcaacaagaacatccaggagaacgatctgcagcacttgcaactgttcacagagtacgcccgactggcgctggacgaggacaacaacagcaaaccgttccaggcaatgctcttttttgttggttgaccctttctctcatcaatttcagtcgcttttgttccttgtccgtgactggagtgtgcctgatgacgcggagtacggctcaatcggtggccaacgcattcttgacaaacgattgaaggtactcaatcagatgaatgtatcatgaatctcatgcataaattgaagattttcttatattcttccattccatctcaaaatttaaaatattttccattagctaggattcttcgtaaaatcaattcctgtgcccccatttattctcggcttatccattgatttgttaaatgtatttgtttttgccaggttacgcgccgtcaacacccggaacatcagcagctgcgccttcacattcgctcgtctttcgacaacattcgctgctttttgctgcctcaccccggccgcgaagttgccacaaacctgcactaccgaggcaaacttgacagtttgtttattgttttatctttttgtttgtccactgaattcaaagcatttcggttttccctttagaaatcgaccccgacttcaaggcacagctccgttcacttgcgaactatgtgttctaccccaacaatttggtcgtcaaacaaattggcggtcagcccatcacttgccgagagcttgccggctacataaatgtgccctttttcgcgtcaattaaaatatttaagttcaaatttcaggcttatttcgaggtgttcagcaaggctgaaatgcccaatccgcaaaccatttacgatgtaagtggaaagaacattcattcctgtgttgttattgacccgagtgattagtgaaaaggctaattaatgctttccctccttatgactgccaattgcttttgttttttttaggtcaccgctaagaccaatcattacgaggccgtggagagcgcaaaggcggtgtatatgagggagatggaagaagtgagtttttttgtagcatttgaatgattgttgagggcaaatcataccgaaaaagccaattatttttgacatgacattgggttcatgggttccatgcaataaattcacacaactcccccccccccccttcccacttattcgaactcaaacaaattcagtcgtgcggtggcgactcgccctttatgagcggcgcggaactgcgagcagagcacgagcggtgcaaggaacaggcgatgcgcatcttcaaaacggcgaagaaaatgggcggtcccgagttggcgaagcaattcgcacaaaaattgaagcaggacatcacggtgggctttcaaatttttccattgaaatattaaactgctaaaatttgcgctatttttgttaattcgctttctgtgactttcaggaggcatttgaatcgtttgagcatgcaaacaactcaaaaactgtacatcttgtgcgtacgcccgccgtgctcgtcgcttcgatgattgccctttactgctgttcgttttgctttccctgcgcagttgtttatgtccaaaattaattctcgtagattaatgaaatatttaaaattggtattccgaaggcccataagtttacattcactcctccactgattgggcctgaattcggtgaaatgcccatttttcaggtcaactatttttccaactgctcggcctcgacaccatcgcctccattttctccctcttcctcacgctgatttttgtcgcgcttggcatttggacatattcacgctacagcggccatttccgccatgcccaagtgttcatcgacggacgggtgcacgcgctgttgcacaatgtgttggcgccggcctttttcaaggccgttggtcgcttggcgctgaacatgacggtgattagccatattttgttttcttatattctctgaaccgttttttaggcgaaacgcaataataatttgaagcgaaaatgaacggacggcgaaagcgggtcaaagcaacgaaacttatttggaccgaccgtaacaatttatttgatgctcatttatcccataaataattgttggttgattctttcgttcgaatatatgtttgtttttgtgaggcaatttcgactaatacaaccattcgacaaatttaaatttaagcctttttttatcacaattaacaacattcaatatatacaaacaaaactgggatttgttagaattacaaaatgtgagtgttcttttgcgtgacttattaaatgcgaagatgaaagggattgaaatgatgtgaaattaaacaataaattggaattattcattggaaaagagagttgccgccttccccaattccgctcgcgtccaacagattggccatgatgcgcgacatggtcgcttttctggagttcgtcgcgacggaggacgagctgttcgccgccgccccagccgctgcatttaaaattgcgctcgtttggcttaggctgtactccttgaatttgttaagaatcccaattaaaatccctattttttctccactcactgtatgattcaccatccaattttgaagctctccaaacggcaaataaaatgctttgacgaaattttcgacgaacggtcggtggggaagaggcctaatttcgggaatttacactaaaataaagggatgattgtgaaattgcctcagtccggtgatctcctccaattccccacataattgctcgacatccaacagttgcagtgctcttccctcaatgctgcacttttttacgtcggcgtacctaaaaaattacgtttttgtcaatggtgccactgaaacaaattgggcgtccgcgtacccctggaccaaaatacggaaaatgcacagcaaaagcatggaccaaatggcggcgtacaattcgtcggaaatgtgaacgtaggggaaaaggcggacgaacttttgtttgaattgcgaacattcctaaaaaggaacaccagtaaaacaccttatggaaaaggctgacaattgttattttggccattttttcctttgcttttttgccaatattcacccccacccccctctgttttccccattcacttggacaattgtgtccacataaggcg

SEQ ID NO: 67372 - DNA, 387 bp, Heterodera glycines
atgcgtcttgagaagtgttggttttgttcatcaacaatttatccgggccacggaattcaattcgtacgtaacgacgcaacggtgaaaacaatttattgatatagtacataataaattaaaatttttgtttaggttttcaagttttgtaggtcaaaatgcaacaaattatttaaaaagaagaagaacccgcgcaaattgaaatggacgaaggcatcgcggcgaattcggggaaaagttagtgtttgacttttgtttttactcttttacatttattgtaaatttaaatttcttttactctttaggaattggtcaacgatgttactcaagcgatggaaattcgcagaaacgaaccgacaaaatatgatagaaacctttgggaaactgcag

SEQ ID NO: 67373 - DNA, 268 bp, Heterodera glycines
atgagtttgctctattttcgcatttcccgagacctggacttcatgaaaatggtctataaggatgtgattgcttcaaattcatcaattgagcaattcatgggattttgtgaagaaatgcatgcgcaaggatttcataaacagccattggcaatttatcttcagcgatcggtggaaaaaaaaagaattaaaatattgaaaaaaaaattaaattattttttaggactattttgtacatatcaacaaggatggtgaatttcaactgaaacag

SEQ ID NO: 67374 - DNA, 595 bp, Heterodera glycines
atgagaaaatcctcgatgaatttgcttctgttaaatttggtaagagctctaaaaatatatcagtttttcaaatattgaaaaatctccgcatttatttggggtttttctcatatttttttttcttccacaaaatgccactgttgccaaaataatgacagtccctggactttgacttggaaattgtggcaccattcccttccccgccatccaacggtgctgcaatagacgtgccgaagaaaattttgaaattatagagatttgttaacagtttattacaataaaactggctaattttggagtttgaaaattacaaaagtttcctttttcccttaaaaactttctatctcccctatgggaccattagagagtgccaatcccaacaaaatgtttgaaataaatttcatacatatatttttaatttcaaggctttgtccgatctatgtctgctgtcaataaactcgctttatcttatgccaaaattgtttgaacgaccaattctgaagttttcactgatttattgccatttccatatttttatgaccggcgtttgtggcctggtctctattctgacttatatggccatctgtgtggaaag

SEQ ID NO: 67375 - DNA, 358 bp, Heterodera glycines
atgtcaagagttgctcggaaggatgaagtgccaatcaaaattttgaaaagggtccaatggcctcgggaattatacctgcggtaaataataaaaataaatattaaatttaaaattaattaccataatggacatattacgccaactaaacggtccaatccgatgcataattgcagaataacggcaaatgaagtgccaaaaatgggcacaaattggatgaaaaagcaagaccgaagcgtgatgtaattgatgccaaaaaggaaaatgaagaatttgacggaatatccgatcagcaaaaatgaggagaagaaagcgaacaaggcgatcagaatattacatggcaaatttaaaaataattaaa

SEQ ID NO: 67376 - DNA, 634 bp, Heterodera glycines
  unsure (1)..(634): unsure at all n locations
atgtgcacgcttagcgacccgacaaatcaaccagaaatttttttgctgctaagcaccgcttcgttggttttatattgtggcgaattcgagtgctatgcccttatttggctgctaacttggtggagaaattcgcagagtgagaaaattattatttaatttaatttttattttaaatttaaattttttcattagtttttgaaaaatataatttaatttaatttttattttaaattttaattagtttctgaaaatggccgacgattgatggtttcgttgagtgtgatcatgtcaatgggatttgtatgtgacattggagtaagcacatttgaataatttattcgggatttatacatcaaaaaaatttggaaacacatttttaattctggtttttttcgaatttcaattcatttttgagaaatcgcacagattcctacttttaaattttcgaatttgaacaaaatgaactttttcatttccgatgtcatttggtacaaatacgattcatgaaaaaaaaaatcttgcaaccctgtacaagatcttacaaaattttaaaaatctttataggacaggtcctgaataatatatatatatatatatatatantttttttttatagctgtaaaaaggtataaaa

SEQ ID NO: 67377 - DNA, 57 bp, Heterodera glycines
gctatctatgaagctattcccgaaggattcggtctccccataaatctgggcgcatcg

SEQ ID NO: 67378 - DNA, 1032 bp, Heterodera glycines
atggacgaccagcggatgcccgtctctgccgcgttcagtgtgccccaaattgcgaccgctttgggtgtgttttttaaatcgttatttttcaattttcaaaaagttggccaaacatatttttaaaattcgggaactttttcaccggtagatgggccaaagaaacagaaattgcatgacatatttatgttagtaatatgcatttttttcacagtttcacgccaaatcaacgaaaattcgcgcttctaccgtctgttggacacgctgctgaacacattgagagagtgcatcatacaggacgacggaaatgcgggtgattattccattccttattttagactccctaatttttgtgtgtgttcaatattttggtaatgcaagatttggattaataaataaatattttgaatgaccaaaatgttttcagccgatctgaccaatcctgaccatgttggcaacgaggcgttgaaggactttgaccatccgatgcatggcgagcgcattcggcagatcaatcgcgaatgccagcgccaattcaaattgcacggtttgttagcatagttttttatttcttggtaaatttttcacaaaatccccaaacagatttttttttctcgacaaattatattaaccaattgtcatcaaatacataattgtgaagcacttaagaaattggaaatcagaaaattataagcgatttgggtctcaaaaattgttttttaaaacgaaaaatttctaaaaacattgccgttgttatttcttaaaaaacaaggtcaggtgccagtgtgtgggagttgagccgcgactatttggacctgagcgaagtggtccgacttttgctgctcaccgccggcttctacacaaagtgccggcgccaaatgcgcggccaaatgcactgctatgaggacgacgggttcatttttgcacaacaacatcccgaacttgttgaacatttggaaaaggtcctcccaatgggaattcaaaatttaacttttcatttccataaacatatggcatttcgaggtccaaaataaa

SEQ ID NO: 67379 - DNA, 1160 bp, Heterodera glycines
atgagcaccagcaaaatggtgggaacaatgttcctgcaccaaaaggagggacaaagtgaggggaccgacttgggacaatgttccatggggcgaacggatacgcgacacccacggggaaaacggtaacgaacattttgagcgcttttttatatattagaagaaatgcctttttatggtaacatcatttgaaaacaaaccaatttaagaaaagaagaaaccagcaatgagaagaaaaaggggaaaaaagctgaggaagttatgccgaaaaagtcaaaggaatcgacctcaaaaagtcgaaaaaagaacgaaagcagcggagaggaagaagactttgacgacgactccgacggggaagaggaggaatatcagccaaaggtaaggcgaagagaaggaaaacggatgaaaaaggatgacatacttcagaaaaagaaacaaaagtcggacccatccccggcgaagaaaagcgacagcaaaaagtcaacgaaaacaacaaaagttaccaaggtggaggtcaaggaagagagcggcgctggggttgagcacaagaaacggaagacaacgaaagttgaagtgaaggaagaggtcagtcggaagaagaagcgaagggaaacaatgggagggaagggacactaaaatggaagagaaaaagcattctaatttccctggaatattatatatttaaccttggtatttttggacatttccagccctcctcttcccagggaagtccgtccaagaaacgtgtgaagaaacaggaggaagaagaggaagtgtggcgctggtgggaggaggacgagtcgaacgcgggcgcctccgatgggtccatcaaatggcaaacgcttgtccacaaagggcccgtctttgcaccggcctatgtgccattgccaaaacacatcaagttcaaatacgacggaaaggtatggtggaattacaacttttaaaaccaaaaattgatatgggagttttttaaggagatggatttgtctttgccggccgaagaagtggcttccttttacgcgaaaatgctcgaccacgactacacgtcaaaaccggtgttcaaccagaactttttcaaggattgggtcaaagtgatgacaaaggcggagcgagccgaaattaaagatttggccaaatgcgattttaggtaaacaaaaaataaa

SEQ ID NO: 67380 - DNA, 748 bp, Heterodera glycines
atgtccaaccaaggaggtaaaaaacaaccaacggattcgttaattagggcgaagtaccgtaagcctatcgtaggccatttccagcggatgcatttctgttccttcaattctaagcttaccaatccgttaatcgttcttcagctgatcccattgtcgtagctttgctggccaattcatcttcatcccctcccactgagtcgccttcatctgctgacattcgtccgacttcgcttggtcaattgcttctcccctcctcttcccctcccccttcgtcctctgttgctccaatcactgatcagtcgcccactgtccctggcaaaggcactcctccgaccattcgagtggacaacggtttgtccacttaattgggcgtcattcatcctaattcgttccctccccccccccaggctgcttcatcactttccaagcggaatcccttgcgcaacggccctcccatttcaaggctccgttcgagctgaaattggatgtcgagtcggtcgaagtgtgtgccatccgctgcttccaggcactgtccatggctttcccgttaattgctgttaatgaatgcccctttttccaggacgggtgcacaagtgcgctgttccatcgcgagtcgcgcagctgcgagttgagctacgacgacaaacacttctgctccaatgcgccgatcataagcaaattcgcccacttggccaatctgagcgacgtgaatccctggtggattcactgcgtcaattgtcggcccgaa

SEQ ID NO: 67381 - DNA, 55 bp, Heterodera glycines
atggaaaatgcaccggaagtgaaaagccaaacgacggagacagaaaagggaacgg

SEQ ID NO: 67382 - DNA, 1114 bp, Heterodera glycines
tttggagcataatccgtacttgacagcagccgaaagagaggcaattggcaatcggaaggaggaattgagacagctcagtttgagtgtcaaaaggaatattctcgtcgatttggacatttctaccggagcaatgcatcagcaaaaggcaatgccattgtctgttttggttgaacggcatttatttagcaaaaacccatcgaaacggtggacgaccccatcctccaggcgattctcctcaattcggcggcgcggaatttacaccaaaacactgatgaggacagcaaagagcagaaaggggaggagcacgcttcactgattgacaactttttacccagggcgtaaaattgacttgagaatcagaaattgcatctcaccccccccccccccccccaacagtacgaggacagtaagggcagtactgaagtgtcgggggtggcagcagaacaattgggcaaaccgtcgcgacaaaaactcttgtgtgtggcactgaaacagcctttcgctgggcgtttgttgtcgttggctttgtcctcaaaagactccctttggtcgtgggattctctcttcataaaccaaataatgggttttattgcagtgcaattccttggcttcaaagtgtgcaacacaaagggccgcttctcatcgccgcattggaagacgacgcgcccattgaatattttaatggagaggacacacaaaagagcgaaggtgtgtccgaaggggtggccaaacgcatgggaaataattgcagcaacgggggaaggggacggcgtttcatgccaacggagaaacgtaattcttgccaaagcgactctcgtcgattgcatcacttggacagaattcagccgagaggtgtttgtttgcccgcatcggaaatgaattcctctgctaaatccccttccccccgtttcagtactctgctgaacggactctcttccgtccattacaaaatgccttcgtcctccttgttgcggatgccgaggccttgtcaccgccaatcccccacaaatgcccgtccgaattttttgaggtcggccgatcattggtgaacgcggtcaatttagcacttgtgaacggaggagggatatatgaagaaacattgacaacattctga

SEQ ID NO: 67383 - DNA, 631 bp, Heterodera glycines
  unsure (1)..(631): unsure at all n locations
atggttgagatgggaaccgaaattcaaacatcacgaaatgaacttaaggcttttcaagaagaagtagataaagccaaaaacataacattggagcatgtggaaaagaatgacttgaaaaaagcaaagaaatcagccgacgtcgcaaagggaatcgccagacaggcaaagaccaaatatacatcaactctcgagggatataatgataaatcggaaaagggttttagcgggatagtgaataggcttaatgaggcgctcggtgagcatattaaacgtaaagatattgaaaatatacaagtatctgaagctgagaaaggaccacaaaaaagagaaagactagccaatgaggatgttcaatttcaatatgacagcattgatcaaaaatttattgtctatctttccgctgctgtctcccacatagatttgtcaaaacacctcgcctatgtgctcggttttaagaacacaaggctatttcatgcggaagaagcgaattatatgccagatttgactggcggcgtaaggcagctatacatttatgcaccanatttaatcgaaaacacaattatcggcaaccagatggccccactcttaagaatagttaacgtcgtcgatgacccaggatcgattagtgaaa

SEQ ID NO: 67384 - DNA, 1056 bp, Heterodera glycines
atgccatttcatcaacaaacgcaacacacagcaaaatgcaaatggaaatgccacaactgcctgcgtgttgggtctgcctttcgaggaaactgcgtccaaggcaatgacaacttttttgagacctgcttggggtgcaataaagtaaagttatttgagtttcgtttcaaagaatttttttgtttagacatttaaaagtcgtgaatgctatgaacaccatgccaaatgtacaaactacagggtcaagcgtgacaacgaacatgaaattgtgggaaaatcaatttgtaaaagctcgaagaaatgcgtcgactgtggcgtgatttaccaaattcgggttattataaaataaaatttttttattttattaattttctctttagcatcaccaacaaaaagagcatgtttgcggtcaaaaattctgcaaaatttgtctcggcttccatgccccgcgagactgctacataccataccggcctaaagtcaagaaggagaagcgcttcgtcttctttgactttgagtgcactacggatttcaagcccgacccgcaactcatgcggttcaagcaccaggtaattatttttttgaattcaaacacaatttaaaaaaaaaaacaaaggtcaacttctgcttcgcccatgtgacatgcacccgctgcattgagaagggcatttgggaccaggagctggagcgggcctgcgctctctgcggccgattccgaacttatgcctggtctccgtttgagttctggcacacggacgtggaatgccgcaaggtcgtcgaggacccactggctaccttcaccaagtggttgctgaactttgaaacggaagtcctcggcatggagcccggagcgaagaagcgcagaaagaggaaaaacatatcacattctattgtaatattgaaatcaataaaaataatttttttatattgtaattcaataacataaatgttcctttttataatttttaatttatttaccacttgatgatcatgttaatagattgaaattgtatataattttttttaatttaaaatgaattaaagcttcttaataataaa

SEQ ID NO: 67385 - DNA, 704 bp, Heterodera glycines
tggaagaggatcagtcagtggaagagaaagtggaagaggatcatcaaagtgtaagtgatactgcaagtggaagagagactggaagaggttcagaaagtggaagaagaagcggcagtggaagagaaagtggaagaggaatagaaagtggaagagaaagtggatgtggaagagaaagtggaagagaaatagaaagtggaagagaaagtggaagagaaagtggaagaggaacagaaagcggaagtggaagagaaagtgaaagaggaagagaaagtggaagagaaagtggaagaggaacagaaagtggaagagaaagtggaagagaaagtggaagaggaacagaaagtggaagagaaagtggaagaggaacagaaagtggaagaggaatagaaagtggaacagaaagtggaagagaaagtggaagaggaacagaaagtggaagagaaagtggaagaggaacagaaagtggaagagaaagtggaagaggaacagaaagtggaagaggaatagaagaggaacagaaagtggaagagaaagtgaaagaggaacagaaagtggaagagaaagtggaagaggaacagaaagtggaagagaaagtggaagaggatcagaaagtggaagagaaacagaaagtggaagagaaactggaagaggaacagaaagtggaagaagaagtggaagaggaacagaaagtggaagaggaatag

SEQ ID NO: 67386 - DNA, 396 bp, Heterodera glycines
atgttcccaaataagcgcaaatgttctttcaatcccgattgggaaaagcaatatacttttgtcaaaagaagccgaaaagggaatggatttttttattgtgctttttgccaaaaagacatcaatgtcgagtcgatgggagtttcggccataaagtcgcacacggaaaacaaagaacataagcaaattaaagaggaacggcgtaaaagcacaacaattgagaattttgttcgatccaaatcgacgcttaattcaattgaccttcaagttgcaacggctgagggtcatttttaatcttttttaagtgtaaaaatttgtttttaggcacttttgcttaccatgtgtgtaatcatcatcaatcgtttgcgtcaactgattgttcatcaacgtgttaataaa

SEQ ID NO: 67387 - DNA, 510 bp, Heterodera glycines
caagttttttacaaccacttattgccaatttaatttcttgcagatttaaagccatccattgcctgccggttctcggcacagcaaagcactaatagggtgtttgactcacttcaaaaaataattcattacccaaaagttttttacaaccacttattgccaatctaatttcttgcagattgaaagctatccattgcctgccggtctcggcacagcaaagcactaatagggtgtttgactttcttcaaaaaataattcattacccaaaagttttttacaaccacttattgccaatctaatttcttgtagatttaaagctatccattgcctgccggttctcggcacagcaaagcactaatgcactaatacggtgtttgactcacttcaaaaaataattccatacccaaaagttttttacaaccacatattgccaatctaatttcttgcagattgaaagctatccattgcctgccggttctcggcacagcaaagcactaatacggtgtttgactc

SEQ ID NO: 67388 - DNA, 308 bp, Heterodera glycines
aggtcccccaaatactggcaagtcttatttggctgcacaaattgccaaggactcggaatttccattcatcaaagtttgtactcccgaagaaatggttgggtacagcgagacggcaaaatgtgccaaaattcggaaggtgagtgtgacaattagcatagagaactaaataaccagtgtcaggttttcgaagacgcgtacaaatcgccccttagctgtgtgatcatcgacaacatcgagcgaatgatggattattccccgattgggccacgttattcgaactttgtgttgcaaacactccttgtactgct

SEQ ID NO: 67389 - DNA, 703 bp, Heterodera glycines
aacgatgcggggggggggggagagagctgctcctataattgaatctctaaaggttcttccgctgatgtttgcttatttcaacgcacacaagcagtatttcatggccagcagttccatcgttcagacggggacagcctcaaacaaagaaaaggaaatggtggccaggtgagagggggcaaatgggcaaatcattttttggctaacttttgcccccgggcaaatgactctttccgcccgattgtcccccgctgcttcctctgttttggcatttccctctccatcaatttcagtctgttctgtcgtttggctgcccttcttcgcatcaaaaaccacgccttcggcagtgttgccaaaatcaccgtccgatgcctccagggactgacccaggcactcgacattcgaactttggtcaaaaccaattcggacatcgttcgcaccggtgccattctttgcctttcctttcctcaaaaccctctctctgctgcataggattgctcatcttcttctccaattgtgccgatgacctttttttggctgtcaacgaactcaaagagggcggacagtactctttgcttcggggcgaaaatttgaagttttcgtcattttttccttcttttggcattccgttgcttgctaaggtcgggggtatcgatggaattcgccttccaaatgatcattccccgtcctgagtaccgttttttct

SEQ ID NO: 67390 - DNA, 674 bp, Heterodera glycines
atggcatcggcacagaacagtggccatgccgttgacccgtccactgtcagtgccgatttaaacgacatttgtggggacaccgacggaatggcaaatgaagaagaggcggacgacgctattgtgaaggaaattgtgacggcattgttgtcgggcggaccgttcccagcagcggaagagaacgacgagcaaagccaagccatggagcagcaacagaccaatgggacagcgatggatggtcagagtttgttcaccaaaatggtgtcaattgaaatagtttttaaaaaatagaatttggttggtcggcttgcctaagtttatgtgttcagatgcttctttttcatctgggctctctcctcttgcgtccgatgctcatcaaccagtgctatttgcctcatttttcgagttaatttttttttgcaattcgttttacaccgaattagccgacaattaccgagtgatttggtcaattttcaggtcccaacttggtggaaaaaagttggagtgcggtggccatttgtatcgacggagtcggcaccggggcgacagcatttattggcgctgtgaccaaaaccggcgctaccgctgtgccggttcggcgcggacagtgggcgaagcggagggcaccgaggttggcacaaatccgcaaagcaacaacttggcactcccctccataa

SEQ ID NO: 67391 - DNA, 904 bp, Heterodera glycines
atgcaaaagaaaaggcgaaagaagcagaaaaagaagcatcactcggaaaaggagttggagaaaagagtggcaaatggacaaaaaggagagaacgaaggcagaaaagaagaaaacgaaggcagaaaagaagaggagtttaaaatggcaaagggaacggaggaggaggaggaggaggaagagagacgaagtggcacttactcatcctcggggggggaagtgtatctgaacgaacgggaggaggaggaactgctgatggtcatggagcaggggctggacagaaggctgggcaaagagaggggccaagtcggggaggggaaggacaagcagcagcagcagaacggtgacaaggagcacaaggaggaggaggaggaacagaagcagcaggtgggccatggaatgggggggggggggggaaatgggacgaggggaggcgcagagccattcattggcattaccaaaggtgcgcaagcgcgagagtcttgactcacagagccgaaaagtagtttaatttgattttacgcattttttaaattggagaaatattttaggtcttaaaataatggacaatgaatgaataatttcatttactaattagccaacagatttacaagggatttttaacagatcacaacacaaaatgatcaaacagcggaaataatctcctcaaatcattcgcagacgccgaaatcgccaaattatcattcccaacaaacacaggaataattagcggaaaaatgtaaaagaaaagctgtgcgatgattaagggaattgtgaaagaaaaacgttttattccgtaatgagtcatttgggcgaaaaattgagtttatttttgtattgttttggatcaaaaaaatttatatgaaaacaaacaaaggaaaaattcgtaaaaaaagacggaaataaa

SEQ ID NO: 67392 - DNA, 450 bp, Heterodera glycines
atgaatggaatcactgctggggattatggtgcgattggcggcacatatttttggttagagtcagcaagcagcttattttggagcaaattaaaaaagcttaacccgattttctattatttttttttgataaagatttgtttcctaaactttgtctgtgacatgcgaaaacaatttttagaaacaattttttcatcaaataaaaaattcaagaaaccaactttgtattttattaccaaaactctatataaaagccaggaagaaaactgtttgcttgctttggaatggccgaacaaatgacaaattaattaaaatttgcgttttttaattaattgttagtaattactaatcagtagggcgtccaaaaatatggatataaaatcgcgaaatatggccataaaatatggacaacgaatcgcaaaatatggacataaaattgcaatatggacataa

SEQ ID NO: 67393 - DNA, 2089 bp, Heterodera glycines
atgcaacaacccaatcttttaaaaattcatggttcactccagcaaaaattatcagcaaaacgtactgcggcacacttgacaacatcgcctctctcaacaattccatcgaaacgacaacagtttcttgacggcgcggcgcaattggacatcacagcactgctaaccagcactgaagtgtcagagccagtccgtgcagtcattctccaactggacgcacttctcaagctcgcggtggacatggttcatgagacgtcgatccaggacactcgcgcggtactggaggaggaccggcgagaacattcggtcgttctgatgggcgttccggaatcggacagtggcctttcctctacacggcgcgcgattgctgaccaacagcaggtgttagacattctggacgtttgcgaaatcgaggcaatgccgaccaaggtttaccggatgggccaaagaaaggaaggaggtccccgacttctcaaagtggaaatgccaacccgaaagattacacaaacatttctccgcaataaaacccgtcttaaaaactccaaatttcaagctgtctccgtccgtccatctctctcccctgaacaactcaaggagcggcataatttgatcaattgttgcaagacagcccgcgcccaatttcctaatctcaatttcattgtttatgctggacatgtcattccccaaaacgatgtctctgtttttcgtgatgaccctggtaattattcctgtttttgccataaatccaattcataaaatcttgcgggaaccacccacactgaaatttcaaaaaattttacaaacgtaaattctggtaccgcaagatttttcaaaagtcctcataaggttaataaatatatacaaggtgctttagttaatataaggtctatctataacaaatgcgaacaattagaaacaatttttgaatccttaaatttagactttatctgttttactgaaacctggggtaaaaatgaaaaccaatttccttttcattcaaattttcttcaaaatcataccatttcttacactaacagattgaataagcgtggaggaggcatagcttttgtcgctaaaaaagatatacagttttttgtaaagttttctgaaacaaaatttgggtgtgaaatactaatattgcaatttcaaaattacaattcactaaatttgattcttatttatcgacctccttctactaatttaaaaaataccaaaaatctttttaaattccttgacctttacatttcggaaaactgttgtatacttggggattttaaccttggaactaaagatttaactataaaaaataaaaaacctttccctttaagtaattttggtaatttattttgtgatttctttaataaatataatttgacatcctgcattaatgaacccactagggagcaatcctttctagatttaatcctttcaacaaaaactgacttaataaatgcggtagaagtaaaaggtggacttttagatacaaatcatctaacaattctttttgatttttgtgttttaaagcaaaatgcaaacaagaaacaaattgttcttaggaaatacactaaaactaatacctttctattcgatgcatatttatcctcatttctccctcaactactacaaaaattttatacagttgaggataaatatgctattttctttagttctgttcgaagaaatcttgaaattaatattcctgaaactattttatctgttaagtccgccaaaaacttttacccaccgcatttattggcttcaattagggaaaaagcacgtctatataagctaatgaaagaaaatagaggaaaatatgaacctttatataaaagtatctccttacatattaagactcaaataagaaatattcaatcccgtaaagaaaataaaatactatccggtgataagaatagattattttcgtatcttagaaaatactttaaaccagtagaggatccaccagttattcagtataatactttgtttgtttcagactcaacttctaaagcggaaatttttgcaaaaattttttctgaaaactactgtaaataattattctcttgattttgatacttctttttcttctccaaca

SEQ ID NO: 67394 - DNA, 1029 bp, Heterodera glycines
atgacttatttcgagtatttaggttagttcttttaaacagagaatttgggtccaaatgtgtaaaaccatgtagaattttataagtagttaggaggtcaaaaatttttcttcgtttttcaagagtagctaatttaaaaaattggagccgttggtcatagggaatatatggaagacaacattttctgaaagcgattcgagtaaaatatttttgacatttttcaattttgataatatgcgattttagttgtggattccaagattcaggggaatattctagaagtggacgaatataactaacataaatatttttccaaactgaaattttctttgatttaataacacggaaaagtaaacgcatacggtagtaggcgttacgggtaattttgcttatgtgttcggaaaaagtaaatttattgtcaataagaatccctaagtcacgaatagtttcaacttcacaaattgcattatcattaattttatattgttccctggggttattctttccaaagtaaataataaaagttttattgatggaaattttaatataccatttcttagaccaatcagagagaatatttaaagcatggtgcatagcaattctatcattttttgttttatgtacggaatataatttgacatcatccgcatataattttaggtttaggaattaattcaggtaaatcattaatatatatcagaaacaaaagaggcccaagaacagaaccctggggaacgccagagctcattttatactcagaagagagagtattatcaacccgaaccctaaaggtacggtttgaaagaaagtcagatatccagtttaagattttacccctaataccgattctatgaaccttatataaaagtaaattatgggggataacatcaaatgctttcctaaaatctatatagacacaatcgatattcttatttttataaataccatcataccaattttcaagggttgaaattagttgtgtcgtggttgatctgccctttataaatccaaattgatgttcagagaataaa

SEQ ID NO: 67395 - DNA, 1673 bp, Heterodera glycines
ctcattacaccagctataatttacttgaccttgacttcttacttggataactgtggtaattctagagctaatacatgcaccaaagctccaatctccccagagcggagcgcatttgttcgccacaaaaccaagcgccctccgggcgtccagtgttgactcagaacaactaagctgatcgcacggtcttgtaccggcgacgtgtctttcaagtgtctgccttatcaactttcgatggtagtgtatctgactaccatggtgatgacgggtaacggaggataagggttcgactccggagaaggggcctgagaaatggccactacgtctaaggatggcagcaggcgcgcaaattacccactctcaacgcgaggaggtagtgacgagaaataacgagaccgatctcttatgaggccggtcatcggaatgggtacaatttaaaccctttaacgagtatctatgagagggcaagtctggtgccagcagccgcggtaattccagctctcaaaatgcatagaattattgctgcggttaaaaagctcgtagttggatctgtgctagccgtccggtgcacactttgtgtgttactggtttggttggcttttctgccggtctctccccggcgttggcctttaccggtcggcgtcggtgggctggcgagtttactttgaacaaatcagagtgcttcaaacaggcgtttcgcttgaatgttcgtgcatggaataatagaagaggatttcggtccgattttattggttttgctgaccgagataatggttaacagagacaaacggggccattcgtattgctacgtgagaggtgaaattcttggaccgtagcaagacggactacagcgaaagcatttgggcaagaatgtcttcattaatcaagaacgaaagtcagaggttcgaatgcgatcagataccgccctagttctgaccgtaaacgatgccaactagcgatccgccggcggatttattcgccctggtggggagcttcccggaaacgaaagtcttccggttccgggggaagtatggttgcaaagctgaaacttaaaggaattgacggaagggcaccaccaggagtggagcctgcggcttaatttgactcaacacggggaaactcacccggcccggacaccgtaaggattgacagattgatagctttttcatgattcggtggatggtggtgcatggccgttcttagttcgtggagcgatttgtctggtttattccgataacgagcgagactctagcctactaaatagttggctcattgcttctgtgggcacaacttcttagagggattttcggtgttcagccgcacgaaattgagcaataacaggtctgtgatgcccttagatgtccggggctgcacgcgcgctacactggcaaaatcagcgtgcttgtccttccccgaaaggggttggtaaaccggtgaaaatttgccgtgattgggatcggacattgcaattattgtccgtgaacgaggaattccttgtaggggcgagtcatcaactcgctctgaatacgtccctgccctttgtacacaccgcccgtcgctgcccgggactgagccatttcgagaaattcggggacggttagtgttccggcttcggtcggtatgcagactggaaccgatttaatcgcagtggcttgaaccgggcaaaagtcgtaaca

SEQ ID NO: 67396 - DNA, 1565 bp, Heterodera glycines
  unsure (1)..(1565): unsure at all n locations
catcagcggacgggggcatttggtggtgccaacgctagcccacagtancagcaggtaggtggtgaataggaatcactggagtaatgatccagcagcaggttcacctacagctaccttgttacgacttttgcccggttcaagccactgcgattaaatcggttccagtctgcataccgaccgaagccggaacactaaccgtccccgaatttctcgaaatggctcagtcccgggcagcgacgggcggtgtgtacaaagggcagggacgtattcagagcgagttgatgactcgcccctacaaggaattcctcgttcacggacaataattgcaatgtccgatcccaatcacggcaaattttcaccggtttaccaacccctttcggggaaggacaagcacgctgattttgccagtgtagcgcgcgtgcagccccggacatctaagggcatcacagacctgttattgctcaatttcgtgcggctgaacaccgaaaatccctctaagaagttgtgcccacagaagcaatgagccaactatttagtaggctagagtctcgctcgttatcggaataaaccagacaaatcgctccacgaactaagaacggccatgcaccaccatccaccgaatcatgaaaaagctatcaatctgtcaatccttacggtgtccgggccgggtgagtttccccgtgttgagtcaaattaagccgcaggctccactcctggtggtgcccttccgtcaattcctttaagtttcagctttgcaaccatacttcccccggaaccggaagactttcgtttccgggaagctccccaccagggcgaataaatccgccggcggatcgctagttggcatcgtttacggtcagaactagggcggtatctgatcgcattcgaacctctgactttcgttcttgattaatgaagacattcttgcccaaatgctttcgctgtagtccgtcttgctacggtccaagaatttcacctctcacgtagcaatacgaatggccccgtttgtctctgttaaccattatctcggtcagcaaaaccaataaaatcggaccgaaatcctcttctattattccatgcacgaacattcaagcgaaacgcctgtttgaagcactctgatttgttcaaagtaaactcgccagcccaccgacgccgaccggtaaaggccaacgccggggagagaccggcagaaaagccaaccaaaccagtaacacacaaagtgtgcaccggacggctagcacagatccaactacgagctttttaaccgcagcaataattctatgcattttgagagctggaattaccgcggctgctggcaccagacttgccctctcatagatactcgttaaagggtttaaattgtacccattccgatgaccggcctcataagagatcggtctcgttatttctcgtcactacctcctcgcgttgagagtgggtaatttgcgcgcctgctgccatccttagacgtagtggccatttctcaggccccttctccggagtcgaacccttatcctccgttacccgtcatcaccatggtagtcagatacactaccatcgaaagt

SEQ ID NO: 67397 - DNA, 887 bp, Heterodera glycines
atggacactgagcaaattccgcagaggccccgcacggtggacacggaggagtatgttcggacccggattgaacaaattgccgagcttttggaggtgaacgaaatttttttttttgttaacaaaagtcatgaaaacacgtttccaagtgctttcggggtcgttgatcagtgatcacgaatccggcaaaaaaaaagtcgaattcaaatttttcaaggaaatcaaaaaatttgaatttccaactttttgggatcctgggattcggaattgttcgaaatggatgctggattcgtgatcagcgaccccgaaaagccttggaaacatgttttcatgaccattgaaaacacaaaaaaaatttcgaaaaggggggggggcagcagccttactatttacctaatttacctaattttttttgccgcgaaacacgacccaaaatcatcgtgtcgggtttcggacttccggacgagaaacatgtcgggtttctggattaaggtttcggtatcagggtgactcggaacaatcctgctcgggataaatcaaaaatgggaaaatacaataagtttaattaggcccacaatttagtaaaagaggccatttctacaatactttcgttgaattttttttatttatggataaattaacctttaagtctcttaagggcacattttttatttaaatatgtatttaaatttgctttttagttatggcgttatgttctggtcccaattctgtttatcacatttgtcctcccattggcattcactttccaaattttgaacttggacatgcttattcatgttcaaaaggataatgtcacattcactcttgacaacaacgaacgcactgccaatgatgtgagaaataaaataaaaatgagaaattttatataa

SEQ ID NO: 67398 - DNA, 939 bp, Heterodera glycines
atgccccacccattgacgattttcttaaataatcaggggcaaagagtggtcgaaaatggcgtcttggagaagactcggatcgggagaacgaccaacgccactgggccaactcttttgtgccgaagagagagggacaacgccaagggcaaagtgccgaaaggaaaagtgccgaagggacacgcgacaaaagccaattggcagcagatggtgagaaagggcgaacagaagcacactgggaacagcaccagccaatttcaaagtgcactttgctcagttcggttttgcgttttgtttgccattgatcgcttttctgtggcaccgatcgatcgctccgttcgtccaaagaaggcgttttcatccgtcacagatgccattcttcccaacatcacacctttcttccctcccccccccccccctcagtttttcagtttcttttttttgctcttttcgatcagaacagtgaattaattatttataaagtgactctaatggtatttttttacggtttttgaatgattgatacgatttgtaattagttattattctagtatttctatactatatctgttgaataaaagttaagtattttggatgacatattatgtgttctattatgatttgtgggtgggaaggaattcgaacttcaatcctaatatacattaaaatatatattcatatatttagtttctacctttagggaaattgataaattggaaaagcgatttagacattttataaaattgattttaaaattgaagtattatcatgactaatataatgacatattatttggagtattttttctcgctgaaaaaaacactgagataaatatctatgaaacgagaaatggagagagaataataattaattttaatttaaacttttaaaattcaaaattatttatagaaaatttaaaattaatatgctaagccaaataaa

SEQ ID NO: 67399 - DNA, 384 bp, Heterodera glycines; identical to SEQ ID NO: 66175

SEQ ID NO: 67400 - DNA, 157 bp, Heterodera glycines
cttgcgctgaacggagttgtttctgctgaaactatccgtctttacaagacggctgtaatagcggcgcttggcaacgctcgctagcagctatctggttgatcctgcctgaactgatgtgaaaatttcaaagattaagccatgcatgtgtaagttaacc

SEQ ID NO: 67401 - DNA, 1436 bp, Heterodera glycines
atggttggctggggatggatgaagggccccgtcaatgggccatattatgccacttatgcccaatattttcgacggttactaattaattagttaattaggcaataattaattcgttaatttgccacttaaaaattaattaattattttattttgttggtatataaccaaataaatttgcagattttttgaagaatatgcgaaacaaaatctcaccttttgggcactgacaattgaaaatgagcccggtgggcaaaaaattcaaaaatttaaattgctaaataattaattaattaattctaattttaggtgccggacttttgcccttttggagttggcaagcgatgtatttgtctgcaacaacacaacggtggcgaaaatggagaataaataaaataaaaaaaaataataaattaatttaaaaatcatttaatttctaatgataattaaaaaaatagttttaatgaaggatatgagcatatttataatcaacactaatattttaaatataatgttattacaaaaacttacttaagtagaaaaaatacaaaattaaaataaattaaattaaaaattaaataacttttttaaattaaaaaaactttttaataaaacataagcattaaattcattaaaaattattagctaaattgtaaaattaaattttcatgaattattaattaaaattaaaaaatctttgcatgaaaaagaaattcaacaatttttttgaaattaattgccttgtgaaattaaattaaattgtcaaatttgaagtcaattcgccgccacccttctcgggcccgagctgaaaaaatcggtggcctcaaaaaatgtgaaaataatggcacacgacgaccagcggagcaatgtttatgagcaggcggaaacggtgagaggagggcacaaattcaaataataataaataaataaaataataataataaattaaaaattggattttatgcaattttaattaaaaataataattaaattaattaaaaatattttaataaaatttttcactcgaaatttttaaaaatatttcgataaaaagattatttttttgctcaatttctttaaaaaaataattgaattaaaattgtaaaatgtttttaatttatgtacttttaataaaaattaatttttaaatttgttatatgcattttaatttaaaaaataataaaaattaaaaatattttttatttttcaatcgctattttattaacaaaattcgataaaaaaatattatttttgctcaattttgcctgaaaaaattaattaatattaattatttgtttttctcaatttatacaataaaaataaataaaaaattacttttttgtttatgcaatttgaaaataattaaattaattaaaaaaaattttatttttcagttttacggaacaccaggcggtgaacagaccattgacggagttgcg

SEQ ID NO: 67402 - DNA, 161 bp, Heterodera glycines
atgatcggaacgccccactattacatgggcaggccaattgaaatggccaagagcagtcatagagaaacttgccgactcgagaccgagaatttatcgcccgagacttctcagctcgagaatcaagattctacactcactgatcaagatcaattcgcggattg

SEQ ID NO: 67403 - DNA, 255 bp, Heterodera glycines
atgggttccgattcccatattttacccggaacccgggtctccaagatggaccccggaaaggattattaccggactaaaagcccagttttaaccggattccaagggtctgctcgacttttcaagacccggaccctggtttccgattgcaaatttttcgcggagcggctttctgagatgggccccggacaggatcccggactaaaagtattatactttgacatagcaccgtaaaaaaaatttgaattaaaattttta

SEQ ID NO: 67404 - DNA, 503 bp, Heterodera glycines
atggagaaggcctgcaacatttggagagattatatcgattttagtgcgctaggttcgatgaaactttttaaaatataagcctaaactttttggcctgtttaaaaaggaattaaaaatttttaaaaattttattcatctcccttttgatagaaaaaacatcagagagccttatttaacttttaattaacattttgtgtgtttcagagcagtttctgaaaaaatatttatgaattgattttgctaaaaatataaaatagtgaagctttaaaaattaataaaaaattttaaattcagaattactggagttagcatcatagcagtgcttttccttgtctttttgatgctctcgcaaaatctggttcgcttctgaccagtttataaaaaaaaagttaagcctaaaatttttcgcatatttaaaaagcaattaaaaatttttagatttttattcatctccctttttgatagtgaaagcatctgagtgcctaaaataacttgtaaataaa

SEQ ID NO: 67405 - DNA, 1017 bp, Heterodera glycines
atggcaattcgccagcacaaggatctcctcttcggaggaaaaacggtcattttcagcggtgacttcaaacagtcgctgccggtcgtgcctcatgaaggcttaaccgctcaggtgacagcctgttttcaaacgtctccgttgtttggtcaattcaccacgatgaaattgaccatcaaccagagactgggccaaggtcagcaagcgtacttgcaaatgtgccgccaaatcgggctcggagaaaccggagagcacttctggattcctccgcagttcctcgttaagagcaaggaagagctgatagattatgtctatcctaacttccaacaactccttggcaatgacaaagagctgctcaatcgtttgattctcgctccgcacattgacacgtgtgatgaagtcaacgagatcatgatggcgaatgtgccaggtcaagtgcgggaatacttgtccacggataagccccttgacgaccgcccactggacatcgatgagatcgagtccgaagtggctgcgttgaaccggcgcacagactcgggcatgcccccgcacagtctccggcttaaagtcggatgcgtcgtcgtccttcttatcaataaaagtgataaggaaggactgatcaatggcacacgcatagttctggaagaacttggcgatgatcgcctcattggtcgtgttatcaatagcaatgctattggcggccaagtgagattctttcttgaaagaacacgaaatgtctatgaagacaaatcgcctggcggcataaaatatgagcgtttgcagttcccaataaagcctgcattcgctatgaccattcaaaaaggtcagggccaaacaatccgcactgtcggcattgatctggaaagggaagtattttcccacggtcaattgtatacggccttctctcgggcaaccgacggaaacaatgtccgtgttcatgctcccaaccgggaaattgatgcccaaggccgagccaaagtgctgaatattgtagctactaatatgctcaagttacaataa

SEQ ID NO: 67406 - DNA, 584 bp, Heterodera glycines
  unsure (1)..(584): unsure at all n locations
atggcgattttacaccaacaganaggaggtaatgagaaaaagagaaaccgtaggaagttaaattgagttttggaaatgttaagataaatattaatttatgtttgcgaattaaattttataagattttcagaagttaattgtgaatcaattagtttggacaacgatggacaatctgatggaaaagcgactgatccgcagcagcagaaagtgagcaattaatagcatttgtacgagaaagatttgaaatattttgacataatatttttaaaggaatttgttgaaaagtgtgccaagatggaaatggacttcaaaattagcacattggaacttgagaaagttggttttcatagataattaatttatattcttgtcctgacctatgcacaaaatcgataaattagagaaatttcgtttaaatgttagaaaatggaaaaactaatttactattttgtgtttgcgaaaaaaaatgggcgtttctttacgatatttttacgtttttcgagaatattctgcgtataaatatgtagaaaagatttattatacacatttggacattttgtaaagattttgaggtttttgagaaa

SEQ ID NO: 67407 - DNA, 1022 bp, Heterodera glycines
  unsure (1)..(1022): unsure at all n locations
atgtccaaacgtaccactcccaaacaaaacggatcggttatgaacatggatttgtcgaattctttggccaataagacagatttgacagacttggatttgcgaatggttgacgatccgcaggttttttaatgcttaaatggtatctcttatttttgtctcggacgatgctccattttccagaaagtttcttatttagattgaaaatttatatgtttttggcttttcccattcacgctgtttttgacttttgtcccccattttcagcactgtctcccgtccagttccggcgcctcctcttccgttcccgtcaatgttcaaccgcccaatcacagcgaacattcactaattagccgtgcccgtttcgatgctcgggcaccagccattgatctgcgaatgcgctataaattgaacggacttcgctattttcaggacattgcggtccctttccgtgcccaaagtggaaagattcaaaaattcagggcaaagaccttcgcgggagcggtaccgatccgacgttcgaatatgaaaaaaagccactgaaaattgtctcgtttaatgtgctgtgccagcgaacaatggacaaaatgccacacctttatatgcatttgcgacgcaaccactgctgtagagaatgggagcagagaaaggtcagtgtcaagattggtcactataagtcttttttttaaaagaaaaaaattggtattttaatcaaaatgcgatgaattttagttaaatctccttaaattagcgattcgattttatatttattcatacatgaagaaaaaagggtggaagagtcaactgaaatttttgcgaaggtgtatctggtcatgggtaaggagaagctgggctccacccaaaaaaatatttttctgttatgttttgttgcgattgttttatgatcatttcatgactaataatagtgctgctcatatatgggtgcctcattcgaaaagggtgcatcatttggtcacattgnatcagaattttggagatctaggatgttcaaaatcaataataaa

SEQ ID NO: 67408 - DNA, 505 bp, Heterodera glycines
atgccgtgctcgttcgggctgctcgcgctgagtacgacgccgattgcccggccggtcccccgggagatgccggcattgccggaccgcccggcccccccggcgagccgggcaaatgctatggcagcgggtccaaagagtccaaagaaaaggagtacaaacccagcaagcgcagcattgacaacttcgagcatggcttgcgcgtcgccagggggtaaatttaaaaattgaatttgaattggataagccggcattttaaaaaaccaaaagactgattttttgaaatgaacaaatctccgtattttctaagttagtcccccacttttgagagtttaattataagcctcctccgtggctttatcaaatgccaaatgtttcccatttgtagctacaagcaagaagtcggaccccctggccccgcgggaccgcccggccctcccggaccggacggaccgcccggagaatgtgaatgcaaatactgaggatgatgctgaagatggtccacgat

SEQ ID NO: 67409 - DNA, 534 bp, Heterodera glycines
gtccctctcttcgattttttggctctctctcacaaacagaaggaaacccttctgaaattggttgtcctttcgctttcggccattgtttcttttctcgtcagactttttgccgtcattcgctttgaatctgtcatagtaagtacttttgacagttttttttaatagaaattaaacaaacggtctctttcctcgttttcagcatgaattcgacccgtattttaactaccgaaccaccaaataccttactgaagagggctactacaacttccacaattggttcgacggtaacgcaccattcaaagttaatggtcgccaaattaacattggaaatttagcatttgcgtggtatcctttgggtcgtatcattggcggcacaatttatcccggtttttctttcttgaatttttttcttactttttgttagggcttatgctgaccagcatgttcatccatcgcttcctcaacctgctcaatgtcaccgtcgatattcgcgaagtttgcgtctttttggctcccctcttcagttccttcacc

SEQ ID NO: 67410 - DNA, 749 bp, Heterodera glycines
atgcggtttggcgaagctggcgaactttggggcagtttttggggttgccagacattcacttgcaaagacggtcagcaaattgaatttgtattaaatttgtggcatttgctcatgaaataaggcataaaatcatttagtataaaaagttacaaacaaattataaccacgattttttttattaaataaacgtgaagaaatttattatagcgtaatagattaaagttttcttaaaattttgatttttatttttgtcaaattttcagtttttaaaaattttcgatccaatttgtaataaaaattaatcacaaaaatatctttagttttttttttcttttgctgaattataaaatttaaaatttaaatgcccgttcttttccaattgctttgcggtgtttgttacgatgctaaaataatgttatttattattatttatagagcatggtaaagacattttccgcatcaatggatgcgctgaaagaaaggacagaaaatgctcgaaagtgtactacacacactgtatgaaaattggtggcctttcgtactgtagtcattgtgatgatttggtcgatggcaaagtgtgcaacagctttgatcagttgatcaaccttgatcagtccgatgatcagctgaacagcattttgaaatcgaacactaacagcaccagcaaagccgagaaacttggcccggcttccgccttcacttggatcagcagcaatttgttgctgatttttggtaatggggaaaaatga

SEQ ID NO: 67411 - DNA, 1159 bp, Heterodera glycines
atgggtcgaccgaaagacgggccgaccaaacttcgaatttctcaaatcgaaattcggttggtcttaattacttttaattgttaaaggcgttcgaactgagtgaaggggaatttactaaagaaaaaggatggattttgcaaataattggccgttgttttttcaggcacagaatctgtgcccattctgatcggcacggacatttgtccaactcaaatgccttttagctcatttattgacgaatatttcggtttttctccaactgacaatgaaacaaagaacaaagtggcctatcttaaagattggcacttccaaaagttagaatactccaaaatgccaattgaacaatgcaattttcagttctcatcccgaagagtcggatttgtacgaattgcccgcctttttacgattcgattgggccaattacgaacgatggacagtcactgatcagcagcagaatccattcgggggcgattaccgttttgtttatttcggcaccaaagggagttggtgctgtctgccgatgattacattttcatttcacattttggcttttcctttttgaggacgcctttccactcggacgtgctcaattccttctcttggtctgccaatgtttgcggtcggaagttgtggtatttgctacggccgggcgccgaacgccgcgtgcgccaagcgaacggcgcgtaccctgaggacattcggcagtgtttggggcaatttcagcacgacgaactgttccaatttgtgcaggaaccgggccaaattgttttcgtgccttccggctggtggcatcaagtgcacaatttggtcagataacggcgaacaacagaaaattgccaattgcatttaatgccgatttcaggaagaaagcatttcgatcaaccacaacgtgatcaacgcgttcaatctccgccatttggtcccactgctggagcatcgcctgacggaagtccgtgcggagatttcggatgtgcgcgaactgatgacggaggacgaattcgagaagcaatgcgaagtgagaaataaggccgatggtttcaaattgccaaaagctctcttttttcactttattcagttgttattattgtccgacttaaaaatgaatcgaacaaaacttttgcgactgatggaactgatcattgaatcgcggggaaataaa

SEQ ID NO: 67412 - DNA, 360 bp, Heterodera glycines
atggctttgaaatttgcacttcgccagcagaaggttcgttgtttttaaaatggtggttttttgttgccttttcctttcttttcccattaatgttttcttctttttctgtagggttttgctggcaacaggcgcttttccccttttatccgcccctttacgtcaatgccggcgattcgcttcatttcgaagtgtttgtcagggaccacactttgcatgttcagcccaaacacagcagcaaatggtgggtcactcgtttattaattggcattcaattacgccatgattttaattatttttttcactcattttgaattcactcttttgctttttcagctccctttggccctcccctccgcgtga

SEQ ID NO: 67413 - DNA, 305 bp, Heterodera glycines
gtcctcactcatccgttttggactgcaccgatttgcttttgaccgtggacgattgtcccggtgactttccgttcgttgcgtccgctcatgcgacaattcgctacgtttgtcgggggacggcgaccacgctggacaaaggtgagcagccgaacgaatcctttcaatgctttttcatcagcaatttgcccccctggcggtgccattcttttttggcccttttcttccatcggtgccctaagagatgactatttcgcctctatcattgagttacgcctccgttcgcctggcgcattgctaatcccctc

SEQ ID NO: 67414 - DNA, 535 bp, Heterodera glycines
atggttcgtcgtggtggtcgttcttcttcaccaaaagctagcgctccggttcgaagtgtgaaaagcacttctcctgctcgttcggccgttccgtctcgtcctgctggtactcaaccaacttccggtgcaacggcaccgcagcagaaagggcctgggctgctcggacaaatggctgcaactgctggaggagtggcgattggttcggcaatggtaaaagaataggtctaatttgatatatccacttattttagggtcatgccatcggtaatatgttctctgggggtaatgctcaagaagtcgctgctcagcaagatgttcctgccaattcggacaactttgaaaccaccaagcagtactcacagccctgtgagattgagtggcgccagtttcttgagtggtaatacttgtacatggatctattttatggatttcacattatttttcagttctcagaaccagagcgaaggtagcatctcccagggattcaacgacctcttcaattgtggagaagctcgctttggccgttagaccttga

SEQ ID NO: 67415 - DNA, 280 bp, Heterodera glycines
atgggaatcgaagaaacaattaaaatggacagaatagaaatagtgaaaggtgagaagagaaacgaacgatgggaataacaaaagcaaaagcaaacattaaaataatttaattaatttgaaaaaataaaaaataaattaaaataattaatattattttctttctcacaataagatttggctgcgtatgaattgaccattggatacagccgaatattaacttccgacgatgaattgtaagtttaaaatttaaaaggatggtcagggaatggccaaaagaaaa

SEQ ID NO: 67416 - DNA, 216 bp, Heterodera glycines
atgttgaagccattcgtttttctatttttaattttgtcatcaacaaaatatatttgtccaaataaacacaaagacattcgcgattatacggacgctgacatcgaaaaattatatgatcaatgggaagaaaatgatgaagacgaactcccagaagatgagaaacctccctgccaacgaaaaaggccccaaattgacctcgaatcgcttcagcaaaga

SEQ ID NO: 67417 - DNA, 143 bp, Heterodera glycines
atgacaaaatcatttcttgagagggacaattttgagagcgaattgggtgcaacgcagcaggatgacccttttggcgaggatttttgcgatatttcaagtaacgaaataattgacgtgttcgctgatggggatttggccggaag

SEQ ID NO: 67418 - DNA, 86 bp, Heterodera glycines
aactcgtgcggaaatataaaagcaaggaagtattatgctcgcctttgcagcctctgtacggcactggggccaacactttatgtgtc

SEQ ID NO: 67419 - DNA, 1081 bp, Heterodera glycines
agagaaaattttttccaaaaaattttttttaatttaaaatccccggcaaagtttttgctggaattcaaaaaatttttaaatgaggccaaaaaagattgacccggaaattacgaccgatgaggttaataaattcctagaaaagcagaaaacatacacgattcacaagcccatcaggaaaagattcctgagactaaagacggtaccgagcggcttccataccgattggcagtgcgatttgtgcatatttgaccagttgaaaaagcataacgacggttataaatatttattggtctgcatcgacgtgctgagtcgaatgatcttcagtgcaccggccaagtcaaagaagagtgaggacatgatcgaagcttttgatcatgtgttcgaaaagtctaaaattatcccgatgaaaatatatagtgacagtgggcttgaattccaagcaggaaaaatgaaaaaatattttgaggaaaaattcatcatcaaaaatgtaatgtatagtcctgatctgcacgccggagtcgttgaaagggcaaatcggacaataaaggagcgcttgtacagatattttacaaagaaagacactcttcgatgggtcgacgtaatagacaaaataataacaaacattaacaacagtgtgaatagaacactgggagccaaaccgtcttcaattaattttgaaaatgcccgtgcgctctgggaaaaattatataaggagaaggaatttaaaatttcgaaaaagaacaaatttaaaattggcgatatcgttcgaattaccaaggaaaagggaaaattttcaaagggatacctcccaaactttaccgaagaattgtttaaaatcgttgttgccaattcgacgacacccgattcatacaggatcgaagatttggaaggaaatttaataaaaggcatattttataaccaggaattagtgaaaacagatggatgatttttacattgtactaccttcgaacacatcagggcaggagaacactacgtcaaaattcacagttcgactccccgagactttggaattgggcacaaattggtcagtagctctctcatcaattatttacccctactc

SEQ ID NO: 67420 - DNA, 491 bp, Heterodera glycines
atggacaaatacagtatcacaaattgcaccatttttgtactatcgtacagtaagtaatgcatgattttttttattattaggtccgggtcttctattgttcaacccctcgcaaatgggtgggcgtcttcaaatctaatggagtctaataaccaaaaaaatactgtgtttggctggaaaagattaaatcttaattaatatattgggctgaatatgataaaaacgatataccctattgatttttggaatttccttcattaattgctttagaaaatactttaattaattaattaatccatcggttaaatccgtttacaattatttgaagaaactaattaattaaatgtgtggtctcttgcctgagcaccgcaagcagtacccgtgcaccatgagtacgtcttcacagggtacaccttcaattaaatataatcattttttaattcaaaaaaatttcagaattttatactgttttcgtttctgtgacggttgagtaa

SEQ ID NO: 67421 - DNA, 875 bp, Heterodera glycines
ctccaatatttaactaggctgttgctcatccagtctcacctgagcagcaacagttacaagtcttcctgcacaacttgtgtctcaagtagtcaccagcagcattactcaaccgtcacagaaacgaaaacagtataaaattctgaaatttttttgaattaaaaaatgattatatttaattgaaggtgtaccctgtgaagacgtactcatggtgcacgggtactgcttgcggtgctcaggcaagagaccacacatttaattaattagtttcttcaaataattgtaaacggatttaaccgatggattaattaattaattaaagtattttctaaagcaattaatgaaggaaattccaaaaatcaatagggtatatcgtttttatcatattcagcccaatatattaattaagatttaatcttttccagccaaacacagtatttttttggttattagactccattagatttgaagacgcccacccatttgcgaggggttgaacaatagaagacccggacctaataataaaaaaaatcatgcattacttactgtacgatagtacaaaaatggtgcaatttgtgatactgtatttgtccattttcatacggcaaaaaatcgttaggctcaacccgttcaacccgttgccccggcagcaagtggtggtggcaccagtattagcaccggcagttcgtgcagcagcggaacatgcggacaacaaaaacaacaggttggatagaaattatattaatcataaatttaaaaaaaaaattggcattatgcaaaaaacaggttcaacctgttgcccctgtccaaccggctgccccggctagcaccagctcgtgcagtggtggcagttcatgcggtgccacggcacaagaggt

SEQ ID NO: 67422 - DNA, 375 bp, Heterodera glycines
atgcacgcgttttgcgctcgagctatttatcatcgggcttgtcaatccaaagcgaaacaacaaagatgctgttttgaacgaataaagggcataggttattttgaagaagtgtcaaagaacatgcagcaataagcctgcaaaatctaataagtggaaaatacatgagtatagaatttattttcagaaagtgtctacagacttttggaaaaatttatttgcaatttatcaacaattttgagaagtgagttagaaatgataaacttcacgattcaaaccagttttcggtgctctaattaaccgcgataaaaacattcgaatcaattaaatagcttctgagataataaggtttatcataaaatttcatttaaaaataaa

SEQ ID NO: 67423 - DNA, 106 bp, Heterodera glycines
gcagcagggatgggccgaggtttcgcttttcgcatttcgcctttcgcattattcgcattttttggcgtttcgcatttcgcatttcgctttttggcgcgaaatgcga

SEQ ID NO: 67424 - DNA, 1168 bp, Heterodera glycines
atgatggtaataacccaatttaacaagttttatggatcaatttacatattatatgcagcacatatttttgaatcttttatgtacataattttatgattttcaattcctctaatagaacaagcccggcctccaaaaaaaaagaagtggttgtgcttaccataaaggaaatttagtctatcataaaaagataaaggaatattagggaatttatgcctttttgtgacttttttatgcaaaatataaatcgcttaattattttgttttaatatttattataataaaaactttataaatttttaattaaatttaaggtttatgctgtgacattgtccgagaagtactcagtcgaagagcttcgcgagtacaccggcagcgagaacaatttgtacacaaatgcccgtattgaccaatttattcaggtccaaattaaaatctttttttaattaataattttttgtaacaattttttgtaggaagtgggcaattcgattagccgatgtccgggtgggcaacgggtcggttttgttcatgtgacacctgtgccggacgttgaagcatccgtcacgccgacgtaaaaaatattatttttatattcgctttaatttgatatcaatcacccgacaattctgtgattgaaatgtcggggggttcgcggttggggaaaattatgcaatcaaatattaatatttttagtatttttcggtatttgaagaattctttattcgtaagtaataattcgcaaaaaaattcgtcaagttctaaaaaggctatttttcgaaaaaaaaatttttcatatcttttttgaaactaatgaaattcattgaaaacttccaggaaaaataaaacatttaggactatcgaatttatcttttaaaaaaatttttatttttcacagtttttgaaacctaaggaaatccattcaaaatttgcagaaaatttataaatattttgacaaattttgtttaaaatatcgatttttagaattaaataaattttctttaaattagtgcaaatttttaaaatttgccaaatttatacttccagaccatttgaactgaatgcaacaattagtatctcgtcggcaaaagcaaaggatggcaatccaaagaaacaaaataaggaagatgaagttgccaaggctcgagatcaggtgattctgagcagataa

SEQ ID NO: 67425 - DNA, 80 bp, Heterodera glycines; identical to SEQ ID NO: 51817

SEQ ID NO: 67426 - DNA, 1278 bp, Heterodera glycines
atgacccaaagcgaactcaaaattttgtactccctgcggcaacaagcctatcaggccaatattgccgcaggtgagtacaaatattttgtggcagatttggagatcaaatctttgaaaaacccccgcccgctcagaactcgctagggatacgcgagcaaaccaaacaaaaaaattaggaataagggagaaaaaaatccctgtgtttcctgcctattaataaatgcccgatcaatttcaaataaaatatctgatttagaacatatagcacaaaagtatgatccatcaatattcatcatcaatgagacctggttaaaccccagaaatacaattgaaaatgaactatctataaatggtagatatagagtaatgcttgcgaaccgaaatgagaaaaagggcggtggatcagcaattctaactaaaacaaatattccttatcagacactattctctgggacaaaattccaaagcgaaattttacacattaaattactttttaaaaaaccaatccaaatcataaatatatatcgtccaccgaattgtacagttcagaatactaaaaagctactcaaatttatttcggaccaaagcgattctgaaaatatcatatattgtggggattttaacatcccaaatattttatgggatgaaaataaggtaattcaaagaaatgaccctgtgtcaaatttattgattgagtttattgaccaaaaacaattgaaacaacatgtaaaggaaccgacaagagaaaagctattttagatttagtaattactagtgaatcagaaataattaatgatttaatagtacttgaaaatttttcaacttccgatcacaaaatggtcggattcaaaataaagggaaaatttagtcgtaataatcacagagtttatagaagagattttaaaaatattaattttgcaaaattaaatctagcgatacttgaaaatcgaattgatttagcaataaactcagtatacaccgttgaacaaaaatatcaagaattcttaaataaagtaatgaaattatatgatacgtttatacccaacagatctctaaaatcgataataaaacaatcatatcctcaaaaaataaaagatttattttcagagaaattacggttacataagcttgtaaaaaagtttcccgataaaagtgagattattttaaattacaaaataatttcaagggaaatgaaaaaacaattgaaccaatttagaaatgaaaaagagtcaaaaattatttcccaagggcaaaactcagttaacaaatttattcgaa

SEQ ID NO: 67427 - DNA, 1506 bp, Heterodera glycines
aatatattaagaaagctccccaggcgaaattccacttcaccggataatgttccttacattttattaaaaattgtgcagaaccaattacaaaatttttagcagatatatttaggctaattttggattccggacaaattccggaaatatggcgaacatcattagttgtaccaatttacaaaaaggcgaaaaaactgatccattaaattacaggccggtgtcattaaccagcactgtctgtagagtttttgaacgaattttgagtagcaaaattttagaatttctgaacagtatagaattttttgataaagaacaatttgggtttttaaaaaatagatcgactacaacccaaatattaaaaacgatggacgatatatataattctctacaaaagaatcaacaaattgacataatctatattgattttgtcaaggcgtttgattctgttccaattgatttattacttcaaaaaatcaaaaaaattggaattgaaggaaaaattcaaaattttttaactaactttttaaaaaatcggagttttaaagttaaaattggcgaagaattgccagaaagtttcaaaatattttcaggagtgctccagggaagtgtcttagggccattactctttttaatttttataaatgatctgccgtcctttattgcaaatgaagcatcatcagttggcataaaaatgtataccgatgatgttaaattatattatgcccatgaaaatgatgataaaacaaatcatttagataaagcaattgaagctttggaaaaatggtcaaaaataaatgggttagaaatttcaactgggaaatgttttgttctttatttagggaaaaataatatgaaaaaagattatttaattaactcaaaaaagatttcagaatcggataatgttcgtgacctaggcattataattgactcgaaactgcatttttcaggacatattaacaaaattgtacgaaacgcttatcttagagttttccagattttaagagtcttaaaaaccagggaaataaagactctaacaacagcttataaaacttttgtccgacctcaattagaatacgctaccgaagtgtggaacccaaatttaaaaaaagacattgacaaaattgaacgggttcaaaaatttttcacaagaaaagcatttagaaaatgtggttttttgtacaaaaaatataaggaaagactaaaaatcactgatttacacaaattagaagaaagaagaaaaatcaatgatttaacaacagcttttaaaattataaaagggttcaccagcctagaggctgaaaaaagtttctttttctcggaaaggcccaggaggcctttacttttgcgagtaaagcgccacacggccaaaactcaaaataattttttcaatagaatagtaaaaaactggaataatcttccagtggtagcggtgcaaattaataaggcaaaggaattcaggggtttactaaaagcaatgagttctgagtaggattttccattttgccatat

SEQ ID NO: 67428 - DNA, 727 bp, Heterodera glycines
atgcacgcgttttgcgctcgagctatttatcatcgggcttgtcaatccaaagcgaaacaacaaagatgctgttttaaacgaataaagggcataggttattttgaagaagtgtcaaagaacatgcagcaataagcctgcaaaatctaataagtggaaaatacatgagtatagaatttattttcagaaagtgtcaacagacttttggaaaaatatatttgcaatttatcaacaattttgagaagtgagttagaaatgataaacttcacgattcaaaccaattttcggtgctctaattaaccgcgataaaaacatccgaatcaattaaatagcttctgagataataaggtttatcataaaatttcatttaaaaataaaccctcaattattggtatgaacgatactttccaaacatgcacgcgttttgctttagctatttatcatcgggcttgtcaatccaaagcgaaacaacaaagatgctgttttaaacgaataaagggcataggttattttgaagaagtgtcaaagaacatgcagcaataagcctgcaaaatctaataagtggaaaatacatgagtatagaatttattttcagaaagtgtcaacagacttttggaaaatatatttgcaatttatcaacaattttgagaagtgagttagaaatgataaacttcacgattcaaaccaattttcgttgctctaattaaccgcgataaaaacatccgaatca

SEQ ID NO: 67429 - DNA, 628 bp, Heterodera glycines
atgccaatttatgatatgacaccacaacacgtgggacgtggaaagacggtggccgaactgattgcggaagatcaggcaaattcaggccaggatttattggctgaaattcagcatcgtcccaaacaaagaggtgagattaagagataaaaattactaaaaaaataaatcacgaaaaaaaatcacaaatttttgataatatatccctcgaaacccgaactcaaacatgacgtatcattcctgctatcattaaatatacaaaaatgttcttttttgtcttaaaaaatttttaaaaattcaatttgagaatggctttttctgctttttagttaatattttggctttttcgtaacaaaaactacataatttttataacagatgctcgcaatatgccatcgaattatttccatttttagaagaaattaatcagctccttgaaagccaaagatctggcccatccaactttgggcaacaaatggacgagctttgggatgcgtcttctgatgaagacaaaagctgacgaattatatctttgagtgtttgaataggctcgtggcatttacgagtaaaattggacaatgacaaaattttttgtttaattgaaactgttaacatattgaaagcaaataaa

SEQ ID NO: 67430 - DNA, 69 bp, Heterodera glycines
cctctgtacggcactggggccaacactttatgtgtcgttaattttatgctaattctggctcttttctaa

SEQ ID NO: 67431 - DNA, 816 bp, Heterodera glycines
taattaaatccattccttcgggggaccgtgccgggtgccgcggggtaagcagtgctggttcgtttcatcacggcaccgaaccttttggctagtcagcaatcgttgcttaacttgccagatcggacgggtgcgcatgattccactgttccaagcaccccaccaaaagcaaaacgatataaccaaaatataaggaaaaattttttaaaaaattttttctccatcttcctttttgatactaaagcatcagagtgctaaaattaagttgtaaataaaatttggtgcgctttagagcactttctgaaaaaaatatttatgaaacaaaaaaatcgattttttcaagtgtccgtttggggtactcaaacatttatggggagcaaaaatccaacgcagaattaaagtacaggctatagggaagctattcccgaaggattcggtctccccataaatctgggcgcatcggttcggggggactgccccgaaaacaaaaaaatcgattttttcaagtgtccgtttggggtactcaaacaattatggggagcaaaaatccaacgcagaattaaagtacaggctatagggaagctattcccgaaggattcggtctccccataaatctgggcgcatcggttcggggggactgccccgaaaacaaaaaaatcgattttttcaagtgtccgtttggggtactcaaacaattatggggagcaaaaatccaacgcagaattaaagtacaggctatagggaagctattccggaaggattcggtctccccataaatctgggcgcatcggctcggggggactgcccccgaaacaaaaa

SEQ ID NO: 67432 - DNA, 888 bp, Heterodera glycines
atgttgagggatgatgttggcgaagcgccaaaacggaggaaaaatgacaaaaaacgtcggggacggaagaaaaacaaagtgtgaattagaaaaaaaacaattaaacgaaaactgaaacaaagagtcaaattatcgattgaaatctggtagaggtaccgtatacatacatcctgtaagagttttgacgccggttacagtaactggttttaccgttattcttttcggacatttgtcattttaccgaactgggaatttgtatttcggtacataccgtatgtatgtatcgtatgcctgaaatatagttccccccccctggggttctctatctatcaaatgcaggggggtgtattataggaaatgacggtaaataatgcaaataaatatttcagaaaaatgatggcacacaaaatcatcaaccgcttacaacagacgacattttcggcacaggagcagtgaatttgccgaaaactgaacattcccagcctgcaaaagagctgtcggaagaaacaattcttgacgaggaagtaaaaatcaataatttttaaatatttaaaattatttttcaattttaagttacccccggccccagccgatttgccaccatttgatgctttcccatcgccaccaccttcatcatccaaacgacggaacacaacaattggcacccaattaccacaattgcctgattatggaaaacgtaacttaataattattcgggattttctcgatgcccagtccccgaatccccgattttggtgccgctggagagattgattatattttcaaagtttcgagaaccgtatgcctagaaataatatccgcaccaaaaacaaggaaaatttatcgactcgagaaccgtttccgagaatcacgagctgccctagaaaa

SEQ ID NO: 67433 - DNA, 1041 bp, Heterodera glycines
acttggtggaggacatctctgatcagtacgacgattctgagcaaccaacaatcatccaccacgaaccagcaacaccaacaacaatgtttgacaactatggtccgattgagaagattgttgtggtcggcaccggcctcatgggcagtggcattgcgcaaattgcggtcgagtcgggcgtcaaagtgtgcctggtgggccgtagtcaagagaagtgtgatcagacccggctgaagatcaacacgggagtgcaaaagtcgatcaagaagcgcatggcaaatgaaactgccgaggtaaacgacggcaaacatgaaaatggcatggcaaaaatgatgcaacgagttgaaaattgaaaaatgccactttccataaccaaaatttagtaattgctttcactctttaataagttttaattatcataaatattcctgatcgttttaaaaaagttaaaagtgccaaatgtctccattattcgggttttgaatcggtccaaaaatttcgtttaaacgcttttccgcagagttttttaaattaattctttcgcaatttgaaaattaagagtcaaaacaataagtaaaaaaaaaattagttattctgatcagatgaaccatcgaacatttgttttacttcaggcacaacagcagttggtcgaggcgacaatggaaagccttgagctggtgaccaacttggatgaagcgggcttgtcagatgccgacattgtcattgaggcggtggttgaaaatctgaaggtgaagcagaagctgttcattgaattggaagccaaggtgatcagaggcaatctcgaaagaattttttgatttaaaattaaattaatttaatatttaaatttaattttatttgctaataataagtgtcattcaacaaattcgaaatttataggtcagcgagaagtgtctattggtcaccaacacttcgtcctttctgctcgaggacgtatcgtgcaaaatgggcgccgccaagcgcgagcagttcggcgggttgcatttcttcaacccggtgccggcgatgaagctggtggaggtg

SEQ ID NO: 67434 - DNA, 1097 bp, Heterodera glycines
atgtacttcggctttatctgtgcaattttggcattttctctttacatgggcgaaggaatgccaatcaatccgccgccagatgaaaatgactgcgattttactaccgatttggaggttttggcggcatgcaaacaaagatacataaacaggagaagagggctgaatcctgatcaaaatgagccacgcattggcagcaaattggacaagtacaaagaacagttgaaatgtgttaagaccaatgatcataaaaggaagcggaaaattactgacgaagatcgccaagaaaaaatagaactgtataaaaggttgaagtcgaacccgaagcaaaagaatagacgaatgttaggccatttgtccaaattgttgaatgttgagccatcaaaacaaaacgcacaaactgatcagtcatttgagaatgaatctgctggtcaatcatcatcgcaaccatcgacatccgatgcccatcgatcggtttcggaggagcaatcactgtctgatgatgatcaattagtgcctgattattcaacggctgctgctgagaattcgagcaaaaatttgccaaaagaatccaccagtgaaaagcgaaatggatcagaatccaactgatcagatgagtgaacaatatgaagaagatgcgaatgtagatttagtgatactaaattttcacattttcatgagacttgcggtcttttgcatattgtagtaaattttgtgcttccaatgagcctacaaaaatttccaaaaacattttccaaccccctaggaattttttcgaaaatttccccgattttcggtgtattttcggttgtctaggtcaccatgaaggagtgatctgatcaagttggtacaaaagacttatttgatcagcatcaaaagttgtgttagcatgaattatttcagatttttcttaaattcgagattcaaaaagtggtcctaaagatatgaccacccaaaaaataagggtatgtgcgtgcgattggcctggtcgcatgtcggcctaagggaatgaatttatacgcatttagcatcattcgaaagcccattggatactctatctctttgttaaataattttattaattaattttgaaactttta

SEQ ID NO: 67435 - DNA, 381 bp, Heterodera glycines
atgaagcggcgatttgctgttgtggcattggttgcctatttgctgatcggtgcgctcactacgacttgtgaagcggccccttacgcaaaactttctaagccagtggccaaagatgatcaaaaagaacccggtgccattgtcaaaccaagccccgagaaccaagcatcattaaatcggatacactcattctccgcgtcatcgttgccctcacagtcgcccgcctcaccgccgcatgtccaaccaaaagcgtcatttcagcgggtggactcaatttcatccgcttcatcatcaaccgcaaacccaaccgctgacaatcaaattgatacactgccacccaaaaagcgcttctcgaaattgcggatcacaaaaacaaaagaatga

SEQ ID NO: 67436 - DNA, 347 bp, Heterodera glycines
atgctctcaaattctcattgcctgtcacttctctctttggcattatttgacaattttagtggtgggaagcctaaaaagatattcaacgaaaattatattttgctatttattggatttattgaattcttctgtgatgaagtgaatttgttggaggggagggagaagcttaatgtaggctgaatgtaaaaaaggcaattttacgctttattttatgtaaaaaaaattttgataggcaaaaaagatatttagaaattattattaaatttaaataaagtttaataaaacggtattgactccttttttcagatagtcaataagaattaatttaaatatttattttatttaaa

SEQ ID NO: 67437 - DNA, 492 bp, Heterodera glycines
atgggaaaaaaggggccttccttttttcgcaaaatacggcagaatcaggcgaaaatgggggaaagtgggaaaacgggcgcatcacaatggcagcgaacccatgaactgactaccgccgcagcagatgccgtcgaggctttggccgaacatcttcgcgactacaatgttgccgtgtccattctcctggtcacaattgccgccggacttgccgagatgaacaatcactacaagggcaacttcaaagggaacagaaagtgaattgtcggccgccggagtgtcgctaatttcatccttagcgacgaaaatttaaaattttatgattcatctgtttaaaataatttttcgccaaattcataacctttgtgattttaagcctttttattagtcagcattgtttacatttaaatttctgtcagcccgcctatgtaaaattgccgtatttaaaccattgcaaaatcaccattttttatcgttcaaatcgtcattaataaa

SEQ ID NO: 67438 - DNA, 100 bp, Heterodera glycines
atgggagtaaatggttcagttacggaattcgcgaacaaaattcgtgaattagtagagcaggcaagcccggatccacattatacagacgaagcaagagaag

SEQ ID NO: 67439 - DNA, 1206 bp, Heterodera glycines
atgggcgctgaaacctattcaaattggaaacaatgtcatcaaggaaatggaaattgtcaattcccatggaaaatcattgccaatttcgcgaaaaccgttgccaaagaaaatcatcggattcaaacggatcaacatcttgtgagatatggccaaatgaaaatttttaggcaacacttcccattcatttttcagtttcatcgacaaaaatgtcatcacttttctccgccgttttcgccaacttttcgccgtctgtccaatccatttgaccatcattacgcacaatgatcgcattatgcagttccttttgcgcaacatttggccaatgctaacgaaaacattcatggcttgcgattgtacgccgtaattttctatcgtttgcgtcaattcgtcccgtcaattctcaacgattgtccatcacttcgctttgtctctttcaattttgccgatctcttcgccgaatttccatgtgatgacagtgccgcggcatcggatggacaagcattggccaaatggctgttcactccacttcaaaacaatgtgccaaagatgctcaactgctcgttgaatacggatgatggaattttgccgtcgaatattgaaccgttcaaagcggtgctttcatttatctttggtttttcttaaccaaatttcccatattttaggcttttgcctcggcttcttcccccgccaatttcatcatttacatttcgtttgcgtcgtcttttgctgcttccgttgtgccatttgaactgaccaacgaaaagactcgggaacaattggctttgaaaagggctaacgatagcgatcattttctgttgatccgttgtccaattgcgcgagaggcgagcaaatggacaaaatgggaggaggaagcgattggctgggaaattcatgatcagtggaatcgaattagcattcaagtgtatcacaaggaggaaatcggggacgggtcagcgaatattactcaaaaattatttatgtttaaatttttaggcttctcgacgaaattcccggcccaagtgaccagcagaaatgaatgaatgaattgtggaaaaatgaccgatcaatataattttttgagttgaaaaatgaatttgttgctttttgatgtgctctcataaatgctttttttttgttataatgatcaacatggattttgttttttttaaatcattttaatttggacaccccaaaaatcacagagaa

SEQ ID NO: 67440 - DNA, 411 bp, Heterodera glycines
cgtgcgcgtcggtagttagccgacgaggcatttggctaccttaagagagtcatagttactcccgccgtttacccgcgcttaatcaagtttccttggcttaacattcagagcactgggcagaaatcagacacggtcaacgtccacaaggaccatccgtctcctctgttttaattagacagtcggattccccgagttcgtgccagttctaaactggtcgttcagcgccaaccgaagtgcataccctgacgagcatacacgcagctgaagcgctccacaagcagctctcaccactagtccacgcaccatccccgaaagaacagcacgcagccacgggcaaaagccgtctgtttcacgcaacagcccggctgaaccgacctttagagccaattcttttcccgaagttacgaatct

SEQ ID NO: 67441 - DNA, 3535 bp, Heterodera glycines
  unsure (1)..(3535): unsure at all n locations
cctacaggtcgcgaaagtccctaggtgctgcacgggttgcgctaatccgagccccttccggtgttggctagcactggaggggggggggtccaaagaatacgtgaagcggaccctgtgttttctctgacctcatacgggtatatcccgatgatatctatacagtgttcattttcatttcttaacctgctttttcctcaagagaaatatgaccacattcgtttgccatttcgaaggtgcgacttttgagggagttctcagggacatcgagctgttcatgaacggctcgtggcggcacgcagccgcgcgggccagttagggctggtgccaatgaggcagcgaagaagtctctgaaacgccaaaagcagcgggagaagagagagaaagcggagacgggttagagataatagcatgattgacggcgaagcaatactttgacttccaggtacggaggacggcggcaaaaagcaaaaaggggacgaaaccgatggcattgccaaaggggccgaaaccattgagctggacgctgatgggccgtctgccgtgcaaaaggaggggggagcccctccgtctgggaagaaggcgcggcgccattcgtccaacaaaccggaatagatcttgatgatctcagcaattgatcatattgatctctttttccagttgttgcgataaattatcgtgcattatttcttcgattcctccaaagcttaactcttttcctaatacctactcatgtatacgttagtaggcatgttttatgcaggtaaagatagacctggtgcccccgggcgacttgggatgtggatgatggttggcggagagctctgatgacgccgtagttccggaggaacagttcctactagtgccagcctgggctagtggagctggtctggcgagtgctttgctcgtcagataaggggtggttggggtggtacctctggaatgatgtgtcggataagcactctgccttataaagctgtcgttctgcccaggtttctcctaaccaggttgaacttgtaatgagcctttgggtatctggtcggggtctgcgcggagatagctcgcgaggagctgttattacattattggttgaacgcttttgggtcgtactgcacagataaatatgagaaaaagttttttacaacatatacctgagctttcaaatcatattgctatgtctgtgcctgcgagaaattaccccaaattgcgctctttagcgcagggttcttccggcacatcaagtcataatgggaagggtgtcgcaatgcaccggtgccccagcgatgattgtgctggtaaagatccccctcagcgggggtctcaaaaagggaatttgaggagtgtgcgatggactcccagcgaggagaaagctgtcttcgagtattggtcacggttggaacagcatgccatgttaaatggtagcgaagcccgggggacctgtgccataactagaagtcagtttctcattcattgggatggcgagagagagtcaagatccttgtcggatggtgtgcccgagtacccaatgaggacggaaagggcatactatgaaagggtccgactcttgcgacaacgcggatggcaatgggattgtgctaatgaatgcttagtaattggccaatgtacagagccgtgccgtaagccaaacgtggtagtgattaaggctgataagagtgtgaagagatcgctggttaggggaaagcttttgtccctgccccatgtaatgggtgaaataaaccaagtgagcgtgcaggttgaggtgcctttgccaagtgtacccgccagcgtgccccaggttgaagaagttgaaagcaaaggtgttactgaaacggaaccgtcgaatagaccttctttggaagggaatgcggcggaagaaggattaaggaaaccggagcgagtaaacgtacctgttcatgggataatcagtgatagtgaacggaaagacctgaaagaccggttttggagcgcctataaaacggccaagaggtctgtgggttttagaccggctctaaaaatcgaaccgagtagggttaaccgtgcccagtgggaagtactggattcctgcgttgttgaggtgctcaaaaagagggaaacctccaatgggtaccgcggttgcgtcctccggcatttgaacgttgcagtttatgcggcgggatacgtgctggcggaaggcaacaaggaaaggaggcaggtgatcagacgccagtcggcggaatggttgcttcgccaaaagtccgaaatcaacaacatccgtagacacatcggttggattaccgatgagttaacacggaggaggacgggaaagaacccaacatccagacagttgagtaattttgcatggttgcaaaggcgataccaggttttgggtaaacccgtaagggaaacccgggacttggaagtccaacgagaaagacttgtaagtcgtcttcgattggctcaggaccgagttaactcttccatggatcgtgaagagcgagctcgtaaacgaatgttacccctgcggagaaagttggaagaacctttgggtgactctaaacttgacccaaagcaggcacgaacattttgggccagcctgattggagagcgaaaggaatttggaaaaatcccggagcttgaaaactgggccgaagaagtgaggagcaaagtcaccgatggacaaggtttcgcaagtgaccatgtggatcaaactgtttggaaaaagatactgggtaaggccaggccactgaaggcgcccggaccagatggaatccccaatttactttggaaacggttaccatccgcaaaccaggcgttatttaagtggttaatggggatcaagcggaaacagctcagtgtccccagttggctcacaaaaggaagggtggtcctcctacccaaaggaggtgacccggtagacccggccaactaccgaccaatcgcttgtttgaacacgcagtatagtgactggtatggtgacggcatgggtatcggaacacctgaccacatactctattttgccgattgaacaacgagcgatggtgtctggcacttgggggtgtacccatgctatggtgattgacagagcaattacgtcttatgcagaggccactggactaccgctttatgtaggctttgtggactttgcgaaggctttcgactcagttagtcaaccgtggatcaggtacgctctaaaggtcgctggagttcacaagcgaatccgatgtcttattggaatccttatgaaatgttggagcgtaaggtatgaagtgttcaagagcgggagagtgttaaggagtgcgcttttggcagttaagaacggagtgttacaaggagacacgttgagcccgctgctcttttgtctctcagtagccgttgtttcttctgcagtaggcagcctctttgattttgaggtcaccatacctggacgaggagtgatgcagcagcagaaccacttngtctatatggatgactnntaagggtttgctcntagtgaagcgtccttgaccanngatgtagtaacattggagcgaaccgcttcagccctcggnngtgaaaatca

SEQ ID NO: 67442 - DNA, 763 bp, Heterodera glycines
ctcatatttatctgtgcagtacgacccaaaagcgttcaaccaataatgtaataacagctcctcgcgagctatctccgcgcagaccccgaccagatacccaaaggctcattacaagttcaacctggttaggagaaacctgggcagaacgacagctttataaggcagagtgcttatccgacacatcattccagaggtaccaccccaaccaccccttatctgacgagcaaagcactcgccagaccagctccactagcccaggctggcactagtaggaactgttcctccggaactacggcgtcatcagagctctccgccaaccatcatccacatcccaagtcgcccgggggcaccaggtctatctttacctgcataaaacatgcctactaacgtatacatgagtaggtattaggaaaagagttaagctttggaggaatcgaagaaataatgcacgataatttatcgcaacaactggaaaaagagatcaatatgatcaattgctgagatcatcaagatctattccggtttgttggacgaatggcgccgcgccttcttcccagacggaggggctcccccctccttttgcacggcagacggcccatcagcgtccagctcaatggtttcggcccctttggcaatgccatcggtttcgtcccctttttgctttttgccgccgtcctccgtacctggaagtcaaagtattgcttcgccgtcaatcatgctattatctctaacccgtctccgctttctctctcttctcccgctg

SEQ ID NO: 67443 - DNA, 714 bp, Heterodera glycines
gtcattttctcgaacgaaacgattcaatttgtacgtccctgacggttacgcctactattggcgtgatttgcaggaggagcagcgcttttccggcactcgttggtggatgatcagtgatagtgtgtgccggacctacggatttggaaagacgcctcttgtgtttatcgatggtggaactactccaaaggctaccaaaaagttttggaagatgagttgctgccgtacgtgggcccgttttcccgccatccatttcacatttcaacaaaacaatgcctcaattcacgtcagccgcaacaccaccagtggctcgagtccattgaacccagttattttacaatttattcggtcaaaaatgtatcaattattatatttttcacctcccattatggatttgaactattttgtagagtgaattagcaaaacgtattccagtgcaatcggaccaaaaaaatatatcagattttttaacaattttttgcggcgcatttttccaaaaaaagtttagggaaccgtagggggggggcaaaatttttgaaaatttgagtgcaatttgttaacagattttgtcaaaaaattgccctattccaaatatcaaaaacaaacgaccaacataaatattgatattttatctttttacatccaatggccgaaaaattttcaaaaaattaattttttggggtatttcttgaaaatattaaaaaatgtgactttcaa

SEQ ID NO: 67444 - DNA, 183 bp, Heterodera glycines
attttgcaagcaaagcgagacaagtgttggcatgcgcaattacatcgaacattcgttgactaaatttgcgacggagaacccatactgtgccatttacgttgtgccgggaaggaacgcgacgccagtgctaagggcggaatattcaaatgggcgactagtccacgtgaacgcaaaggctttcag

SEQ ID NO: 67445 - DNA, 994 bp, Heterodera glycines
atgagcgagcaaaaaccatcacaaaatgtgggaaaaacggagtcaattggacaaaaagacaccatggatgggaaacaacaaaaggcacaacaaaaaaacactttggaggacattggcacgacggcgctggagtcggagccgacgagtgaggagctgaagaactttgccaagatgttcaaacagcggcgggttcagctcggcttcacccaggcggaagtgggacaacaactgtacgaacttcgtggccaagtgttctcccaaacgacaatttgccgtttcgaagcattgtatcaaagggcggggggggggggggggagaagctcccggacaatctgtcagtggacaatccgtcagcaaaatttattttaaaacaccatattttatttaaaatcagtttgaaaataaatttaaattgctaaaaaagagaaataataatttgtattactttataaaaaattatgaaataagatattaaattatattgaagtattaagtaaatagaaatactgacggattgtccttcactaacggattatccactgatggattgtccgtccgtgccccgggggagggacgcggaacaacggccaaaaggttttatgggtggggagggagacggatagaattgacagaatttgctgataaaaattgtgagtctgtctctttgaaggcaattgtccttcaaaaacatgtgcaaaatgaagctgctgctatccagatggctcgaacaacacactgacaacgagaaggtcatccagcaaacggtgagacaaaccgcaaaaaaatgggggaagaaaacgcaaaatgggagaaagtggggggggggggggaatgggtgcaaagcaatgggcgacaaaatggttttgggagaaatattaaaaatattcgtttacacagtaatagaagcaaaattttatcttttttgtttgcttttttataaaaaaatttatttacctatttttctacctatttcaggatttttgtacctatttaa

SEQ ID NO: 67446 - DNA, 5723 bp, Heterodera glycines
gttgcgcagttggtgcagcccatcctcgtcaacgcgtcccaccagcaattggcggtgcttacttgttttttttttgttttttaatttttttttaattttgctatttgtaatttcaggaacctttttgtgcggatggaacgcacaacattcaattcttgattggatgcgttgctgcgttgggtcagccattgccgtaagttgaatttacaaatcgatatttaaattgtgcgcgagtttttttagcccgctgtgcctgatcgtcgtgtcggttgaccatcgccctgcgcagcagacgccagctgggccacttgccgtgacgaactgtgtgcttcgcacgggtgacggccaccgcgttgaagcctcgggatggcaggcgcatgcgggttcgctggcggccttgtgtgttggcagtgcctactggttcaccaactgcgtgagccgtgccaaataccagcgactggactgctggttccgcattggggttggaggccccaatgcgcttgtggtgccgcacgtggccccagaggtaagtttttttttaaattttaaattgatatttcttgaaatttatgtttagtttccggcaaacattgcaccagttgtgcccgttcaagttggcgcagggcgtgatgcagtccgggcgctgccaaacgtgaccaatgctggtgatgaacaacgcgaggacgcggacctggacaacaacaacaacaacaatgtgaggaattgatctttttattacgatttgtgtaattttgttacattgtgatgaataaacttttggtctcaggacaatcatggtcttgagccacgtccgagtcgttgcgcgagtcgaactgctggtgcgcgaccaacacaaagacgggctgctgaaccggttcgtttgagggtccgattcgatttgtcccccgatattgaacaaatcccgagaggagaaagacaaaagccatatcccgcccgtaaaattcgtttgctgcccaattttgacatttcacccattcacattgaaaaatcccttgactgcccaatttgcatgtgctcctttgtgattggggagggggccacttctctccattgctttcatatttttcacacgggttgtattgttccttggcttaggatccatcgttcttgtccaacttgtaaatatttattgccatgaataaatttttgaattaattaaaggcagagagatcgattgatgaatgctttgtgattgagcgctcaacagccatgcggaacgtcccacgcaacacacggggcgagatttgtgaactgcgcttcctgccgctggaggaggcacagcggcctgatcttttgatggagacgatcatccagcaactcctcgaccgtgtgctggcgggtcacccacgcccatcgatggtcggacttcagctccacccgccgggatttgatcgcccttatgtcatcgggcttcgtccgccagagcaacacaacgcagcggcattggcggcagcaatcgagcgtctcaatgagcagtcggcagccggcattgacttgcttgccggaacaacggtcaccaaagtcttggcggtctggccccttgactccattcgtgctgacccccaaaggggaggtgaggtgccgttcttattgcattaacgcattgataaaaaataggagcctgtgacagtgacgtggagcaccatgtttccaataacgtgcagtcacttgtccggattcacaaccccaacgaccggctctgccttgcgcgtgccgttgtgatggggatgcatgaccgcgagacgcgaatggctggcggtggcggcaaagcggcattcaacctgttcgccagtcgtcaagaccaacacggtccggcagcagcgcagatgctgactcgtgccggcattgctgccaacagtgacatgtacacgctggacgatgtccaacgtctccagcagtggatcaacaacgagcacggtgtgggccaaattcgcctggtggtgcttgaaaaggagcaggaatatcgcatcgtcttcaaaggggaagggtgagttttttttcattttttttggaaattggttgattgaagattggctgcgaaattcaacctttgccttgtgttggagcgcgggcacttcaactacattggacgagttgagcagctgtttgatgtgcccaactactgcatcgactgcgagcggagggctgacgcgcgttaccacgcgttcggatgcaaagttgtgtgccgcctttgtttgcggtacgggcctggttatccatgccaaactgaacaggtagatggatgccaaaaaaaaaaacaatttgtgtaaaaaaaaatattaagctaccgaatggtggaagtagtgctcgaaagtgcgctgattgccagttcgtcttcccaaacgatggctgctacaacttccatttggccaacaatcctccagctccaatggatgggcgtggacagcgtcaacgtcagccaatctgtcaatggcgccgggtgtgtcgtgcgtgtggacgtatcgcctacgtggccacacatcagtgcccacgtgaccaaccagccgacgatggaatctgtcggcgctgcaatgggccccacaccgtcgatgagccttgctacatccagcccattgacgacggctcagttcgacaacgtgcatcgattgctgttgacaacgacgattctgacgacgacgacgacgacgatgaagaattgccgcttcgtctctgcttcttcgatgccgagacgtcccaggacacgccattacagctgaacaaccgcaccgtccagaagcacgtgccgctgctcatcgtcgccgaagtcatctgcgaacgttgtctgcaggctggcatcagcgtgagcgatggccttggaagacgggctcctggctgcgtctgcatgacaggaatggtgaggggtcaactgtttcgccagtggtcttcgccaccctttgccaatgcaccgggagacaacagcgcttcgccagttggagcaccagcgttcaaccagcgccgcttcttcttccattcgtttgacaacgacggcaacgacccagtggaccaatttttggattttttgctgcaccatggtccaaagaaggcacacaccgtgtgcatcgcccacaacggtggaaagtacgatttccatctcgtacttgaggcactacaccgccgaaaccgtccacccaagcatctgtgcaccaccggattgaagatctactcgatgcgtctgtccgggcgtcaccaacggcgagtcacattcaaagactcaatcaattacttcttttgtgccttggacgcgttggtgaagagcttccaagtgccggaccatctggccacattgaagccattcttcccttatctctacatacgacgacaacatctgtcgcagcgcctcatcaatcttccgtctcaagagttttacgcaccggatacgatgaaggcagagaaacgggcgcaatttctccgttggcgttggcacgccgacaacaacggcaatggattccagctacgcgagcagctcataatgtactgcgtcaacgacgtggccattttgagggagtcggtcatccgattccgccaactcatcgccgacaatactcaaggcctcgacccattcctccacgcgtcaacagctgctggtcttgcgctggcaacttttcgccgctgtttcctgcccgccaatcgtctggttcactcacccgagggcggctacttgcgcggacgccgtgcttcggcagaatcgcagcgctacatccgcttcttcgagctggagcacccggaggcgcaagtgcagtgcgccagctggtcggtcggagaggcgcacattgaggacagtggctaccgcgtggacggactttggcgacgagaagcgcctctccgtcccctggccattgaatggcttggatgctattatcacggtaaaggcttttttccgtttccaaaatatcttaaaattgaggctgtcccgcgtgctttcccgaccggcagcaacaattggcggcagggcggacagcggaagatctgtacgaacggacggagcggcgcctctttgagctggagaatgaccacggctgcgaaatccacaaagtgtgggcctgccagtggacggagcggctccgccacgatccgaacctgaagcgccgttacgatgctgtgttcgtcccttgcccgctggacccgcgcaacgacgcactgcggggagggcgcactgaaccgttcaagctccaccacgtgtgcagtgacgacgaggagataatgtgcattgacattgtcagcctctacccatacgtcatggtaggtttttcttttaaacattcgcatattcatgatgaataccagaaagccaatcgcttccctgtgggcaacccacgggtcctgacgcgcgaggtgctgctgcgtccgccaacggtaccgctcccgtggaatgcaccggaaaacaacatcttccgggggctgctgctcgcccgggtgctcgctccacgcaacatccgggtgccgttgctcggctaccgcacaaaggacgggcgattcaccttccctttgtgcgcgtggtgtgccgaccgtcggcagcagcggccgtgccgacatgaagacgacaagcgctcgtgggtgaccgcctacacccacgtggagctcaacaaagcgctccagcttggctatgtggtcaccgatctttttgaggttgtccactcattaaaaaattttgtgtacgaaaacacaaattaggtctgggactacgaagagtgggacggtacgctgttcagcagctacgtcaacaccttcgtcgggctcaaagtgcaggcgacgggctggccagaaggatgtgtgacggatgagcagcaaaaggcatttgtagacgattttgagcggacggaaggcatccgcctggactcgaccaaaatggagttcaaccccggcctgcgcctcatcgccaaaacattggccaactccttgtggtaaatattttgggttttaaatttaaaaaaaaaaatgacatccacagggggaagctagcgcagcgcgtgggccagacggagatttgctacacgcggactccggctgaattccacgcgctcctcgacgacccaacggtggacaagttggactttgtccacgtgtccgaccacatggaccgctgcgtcgtgcggaagcgaccggaattcgccaaagccccgctgaccaactgccttccggtcgctgcgtttgtcacctcatacggccggcttcatctttacgactacatggagcaggtgtcagccatcgtcggtgcggagctgctctactgtggtatgtttatttgtcacgaatggtttttttggacagccctttgttttagacaccgactccatctactacgtcaacaagatgggtggtccgtgtgtagcagagggcgaggctctggggcagatgaagcgcgaacacaccgaccgacggatcgtcgagttcgttgcgggtggccccaagaactacggcatccgccacactgcgcgggacggcaccgacgagcgcgccaacctcaaaatccgcagcttccgcctgtcctatactgcgcagcagctgctcacctttgaggcaatgaagaacctgacgctggccacgtacaacattgacggaccaatgtgagttttgcaattaagcattaattttgtaaataaatttaaaaaaaatttagcgatgatgccttggacaatgacgacctttacgtgtacgggggcggcgaacatcgtgccatccgcgtcaacttcccgcaaaattga

SEQ ID NO: 67447 - DNA, 696 bp, Heterodera glycines
atgaaattccgcctattataccttccaattttattttttgtgattgaaatcaatcaaattaaaatagaaaataaaaaactaccgcaaaaatcatttgatgaaatatttggagaaaaatgggaagaaaaagaaggaaaacaacgaaatgagaagaataaaagagaaataattgaaaaatattataaaataaaagagaaaataaaggaaaaaggaagaaaatactcagaaaaagaatggagaaaaattgaagtaaaaatagcgaaaaaattggggacaaatcgcacatatattcaaaaatggaataaagaatttggtcttcaaaaaaagaaaagctataaatcaaaaactgatgaagaaaaacgtcaaattattcaaaaattcattaaaatgaaaaatgaatttaagcaaaaaagaaaatattcaagaaaagaatggcaacaaaattatgaagaaatttgtaagaaaattggcgtaaaccgtggaacaattaagaaatggaagaaacaatttggcattagctgtaaaataacggagaaagaaaaaatggaaaaaatgaaaaaatattggaaaataaaaagagaaaacccaaaaatgagtgacaaagaaactgctaaaatattgcaaattgatagaacgaccatttcaaaatggaagaaacagtttggaggagagattttggaggatttaaatggatga

SEQ ID NO: 67448 - DNA, 662 bp, Heterodera glycines
atggaccagcagcaaaaaattaaaacaaaacgaaacaaatttaagttagaacatgacggcgcactctatgttttcgaccaattgagcgcagatggacttaagaaattttggcgatgtgagtttcatggcccgtcagacaaatgcaagggtatgttaatatattatttttaattttgcaaatcttttaaaattcagggcgtttgcacacggatttaaataacgttgtgcagaagttggtcggagttcattcgtgcgacatgaatgctgcgcatgtggaatgtcagcgacttgtaactggactcaagcgacgtgctgctgagacgtgcgaggcatctgcgactattcgtgctcaagtgctgcaaaacacatgcacacctgtgttagcagcttttccgagcaaatacgccacaaaaaaggtgggtttatatccaaaaacaattttgttattattttcttttttaggtaatcaaacgtttgcgccgtgatgaaaatgcaccgcgagtcgaacctctcaatttggagcagttgtaaattccaaatacctatcgtatttacaagcgaactgaaattgacgaggaacaatttctattggcggacaccggcgtttttcaaattcaaggacaaaatggacctcaacggtgagacatcatttatacattaaa

SEQ ID NO: 67449 - DNA, 197 bp, Heterodera glycines
agagatcggtgaaattgccggcgctaccgaagtgaccgttcgtcaaacgtaccgtctcctcctgcccaaggctttggagctgtttccgcctgactttcgcttcgagacgcccatagatcagttgcccacttcctgaaaaggcgcaatttgggcttttcttttgaatgcgtgtcaattcgttcattttttccgttcat

SEQ ID NO: 67450 - DNA, 1738 bp, Heterodera glycines
ttcttgactttttaatttttttatttcttgcggctagtatcttctacaatactttgtcagtttggtcggatgtgcatcaaacggaaaaaataattaaaattttataaaaacacataaatagtgaaatgtccgcatcaattgccttttgctcacatctgatcgtgtcaatgaagcgccaaattgttggatgagtgcagctaaattgccgctgaagtttgcgatggaatgcctcggcgaagttgttggtacgatcagcaccatctaaggtgcgctgatgaacattccattcgtgcgggtggaacagaggcgccgtcattggaacattgaaacgcattcggccatgtagttgtccaaaaacctagaaaaataaaaaaatcataaaattcgccttcggacttaaccaattgaaaacgccgttaagttgtggtggaatttgtgctcgaagaacattaaggccattttgaaggtggtgcacaggcagaaaggccaatgaagtgatcatcttagacttctcggcgaaagcaggatcagtgttgtaagcctaaactactaagaaaaaaatttatcatctgaaaaattcaattgacatgtgtgaggccaaggattctgatctgcctcttcatgttgcggacaaggtgaaaaaaacagtagcggtcactgcatgccggaagcactgtgcggaccgcaccgacaattgccaactcgaagtccatcgaaattgtctgcggcgcgaaattcggccatcgttccaaaagaagctgtaacatgcgcgtataaattgcggcacacttaaatgttaaaagacagtagcaaattggaaatacccaaccatctctcctaaaaagattgaacattgtgataacacaattaactttactttgccaacaacacataaatttggctgaaaagcggtggcgtcaatgaaaacgtgccgtccgcgtaaatgtcactcatctgatgggcccaatccgccgtagaagctcttccaaaaatgagaatccttaataccggttcaatgatcagcatttaatgtataaatgatgtctcaccgttgaggtccattttgtccttgaatttgaaaaacgccggtgtccgccaatagaaattgttcctcgtcaatttcagttcgcttgtaaatacgataggtatttggaatttacaactgctccaaattgagaggttcgactcgcggtgcattttcatcacggcgcaaacgtttgattacctaaaaaagaaaataataacaaaattgtttttggatataaacccaccttttttgtggcgtatttgctcggaaaagctgctaacacaggtgtgcatgtgttttgcagcacttgagcacgaatagtcgcagatgcctcgcacgtctcagcagcacgtcgcttgagtccagttacaagtcgctgacattccacatgcgcagcattcatgtcgcacgaatgaactccgaccaacttctgcacaacgttatttaaatccgtgtgcaaacgccctgaattttaaaagatttgcaaaattaaaaataatatattaacatacccttgcatttgtctgacgggccatgaaactcacatcgccaaaatttcttaagtccatctgcgctcaattggtcgaaaacatagagtgcgccgtcatgttctaacttaaatttgtttcgttttgttttaattttttgctgctggtccatattatataatttaaatagccttaatttagtttataaactcattaaaataaa

SEQ ID NO: 67451 - DNA, 405 bp, Heterodera glycines
  unsure (1)..(405): unsure at all n locations
atgagccaaaaccgtgacgaaaactcgcagccacctgtacccgatggaccgtacccgctggcacaagagcgcaatgagtttgtggaagatgaagcaccggtgctgcttgagatgttggatcgtctgtcacaaggagtgggttttgttttgaattatttaaattttttaatttttccattatggcttatgctaattgttgattttgtttagggaatttgccaagccatgggcctgttttcgtttgcacttgccgactgtttggccacatttcatacatttgccatactgttcgactgtgagacacctgtgccatttgacgagcagcacaagcgatacgtgttcgaacacagggacaaaccgcggctaatctacgtttcggaagatggtagcgttatacaggnttga

SEQ ID NO: 67452 - DNA, 930 bp, Heterodera glycines
  unsure (1)..(930): unsure at all n locations
atgtgggnaatggaanaccaaggggatatggaaatggagatcgggggaaatgtggaaaatcagagggtgaggaatgtgaaanatagggggtacaatcataactaacttatgttttccagggatggctttctcaggatgaactggtgatgcgaagctcgtcagacgagttggacaagctgagcacgtgccttagtgaggtgggctttcaattgcttattgattgatcagtccgtcctatcaaatagtgattattcacgtcatattaaatattgactgaccagtctatcctgtcaatattgatccatcagtctgtcctattgaacaattattgatcatccgtcttattaatattattgatcaacctctttgatcagtccatccatcaaatagtcaccttttaatattgattagttaatttgattgatcagtccgtctttgattgatcagttcattctattaaatattggttgatggtacgttctatattgatttattagtccgtcccattaaatattgaccagtccgttctaatgattaatcaatccgttacattattgattaatcagtccgttctgttattgattgataaacaaacaaatcgttttgcaaaattggcttctcttatcgaattgtcttgtcaaatatcaaacaatcagtgccttttctccgttcgttttggtttttcatgtgaattcactcgtccgtcccttcgttgagtctgtcaaaatggcattggcatttattcattcttttggcattttgttttcctttttccctcccttttaggcttcctccgaaactcaggagcgtcgtcgtccctctctgatcagtgacattgtgcaggcgcagctcgccctttggactttggtgctcaccgttttctattcctacgcttggcagcagcaccgcaaaaagtttctcctttctctg

SEQ ID NO: 67453 - DNA, 539 bp, Heterodera glycines
atgtccaacacaaaggcggccggccaaagcgccgccggtgcatcagaaattgcggaccaagttgaacaaaaacacaatgcgatgaaggtgagaaacaatttaaaatgatatgtatagaaaattatttaattgtgtaaatcaggggacggtccccaagattttctacttgggttttaagggggcgggaggtaacaatgaaaaaatagatcagtctgctgtttagttttatgcatttggcatgggttttcggatttccgaaaattaatttatcaaattctttcccaaattaaattttttgtttatttttaaatgtggttcagagaggatcatttttatgaaacacctaataatgcctactataattaattttttaatttcagtccacttacgacaaagttctagctttattggaagagaaagaaggcggaaatgaggagcggaaacagcgggcggaagagttgcgcaagcgcacaaccgaattgttggcaaagattaagcggagtcgggaagagaaaatttgtgagctatttttttattaa

SEQ ID NO: 67454 - DNA, 508 bp, Heterodera glycines
gcacatttgggcacagttttggggattaaaatttaaagcatttacccaataacttaaaaaaataaaacaattctatcattaactagcagttgttagacttgaattttttaacgcttacatacattaataaggggggggggggtgtcgacaaaaaattttttggtttaattattttattgattgatggctgcgcatttgcaaaaaatattgggcaaatggcaagaaatttaaaaaaaagtatcaggttacgcatttatttacaggcataaaagaatgcaaaattctcttaattcttccttaattgtcctcctataaaaacattaaaaaaagagaaaaaatccaaaatatttctagtttttccaaaattatttttattttataagatttttaaaaattttctatttgaaaattttttttttttttgagttttgagggtaagctatatgacgggtggtgggggctatctgctcccgttttcccctccgttttttcaccccttctcatttgc

SEQ ID NO: 67455 - DNA, 784 bp, Heterodera glycines
atggaagaaaattttggtcagccaagtgtgagaagcagaatgttggcacaaggccgtgcactgcgagaaagagttggccgtgaaggcaaccaaaatcagattttggctgaaaaggcattccgttttgaatttgaaaggcagtcagcgcactcaagttcggatgagaaaagtttgggaagatccgggtatgaaggccgagcagagcaagagcaaactttggttgaagggctaaaagctgaattgctgagagtgaaggacgaacgagacgtggcagaggcaaaagtcgaaattttgctacaaaaattgtcggacaaagaacaaatcttcaatttcctaaagaccaacaacgttaaactgctggtggaaagagagcaaattcgttgtgaattcttgtcaatggaagatgagttgaagacggtaaaagaaaaattggaaatggcagaacaggaaaatggacatttttcaattctttctgtccaacaaaatttgatggcgcaggagcagagtcgaaaaataatggctttgatggaagaggttgaagaaatgaaggctaaaaacagcggtgaacaggaggaatttcttaaaaattccgaaaaccgaattgctgaacccaaaaaatccgtctccaaattgccactcaaactaaacattgtcaagaaaaggaaccccaaaatcgccaaaccaaagaaaatttcccaaaaaccggaggctggaaaatgcaattttcttccactgaattcaatcattttccggaaacctcctccgcaattcaaaccaaattacc

SEQ ID NO: 67456 - DNA, 585 bp, Heterodera glycines
atggacaacaacagtgccgacccggtcaccaaacaacttctgcaaatttgtgttgcacttttgcagcaagttcaaaatcaacaggccgtcatttccgagcaagaccaccaactccaacacttccgtcaacaaaaaatgatggaggaggccatccaggatcacgagcggcgccgaagtgtggtggtgcaaggactgcccgagccggccggagacaaaccatcggaacgagtggctgccgaccggagcgaattgtcgcatgtactcgacgagcttggcgtcgagtgcccgatttctagctatagaatggggcctccataccaagctggttcaggtcaccgcccgcgcttaatcaaaatcattctcccggcctcaaaattccaaaggcagctgctggcggaatggaacaaaaaacgggcccacatcaagcaaagtgggaagtggcaacacctgaacattcgaccatcgctcagtccggcagaactggaggagcgcagggcgatgcaaaaagaatgcacagagcgaaggaaggccgaacccaacgccgattggatcatttacgccggaaacattgtcaagcggtcggag

SEQ ID NO: 67457 - DNA, 358 bp, Heterodera glycines
atgggaagaaggacgctttccaaacatgacaaatttgaaagaaatgtcacattctttttggcggttcttggactttcaatcgcccttttcatctatgtgtcggccaaaattgacactgttgcgtcggatatgagcgacgagatcattacacttcatgccttgcagtccaaatttaacgagcactacaatgaaatgcttaaatattacaattctcgcattttggctgcccaatcggatttcaattctcgttacgaccggcttcaatcggaatttattcaaattcaatcagaattttggaaaaaatcaaacaagttcacggagcgtatagtcaatttggagttggagttcaagaggtaca

SEQ ID NO: 67458 - DNA, 1730 bp, Heterodera glycines
atggaagatgggctgccgttgccaatgccaccatcaaaagccaaagtcgccgcccgacagaaggccaagacttcatcgacaacaacagcagcaaaagtcgtcgccacccaaaatgcctgctgctcatcatcatcatcaacagcagcaaatgttcctcagccgtcgtcgtcgtcactttccgccgccgaagaattcgctaaacaaaaaaagcggaataagaacaacaaaaacaaattcaacaaaaaacaggcaagctttaataaaaagtttaaatttcatagcatttaaataattaaaaatattaacctttcatagtcttttaaaattattataaaaatggttttaataattatttttaaaaatatcttccaaatttcttttctttttagccgccgcccccatcaatccgcattcctaagggcaaaacgccgaagaaggtccgtccacgccgcccggaacccgaccagccggacgaccaatatgagcttcgggcggtgttggcgaccgccgaagtggtgtccgggggcacgacacatctgtgtctgtatgtggatttccttggtataaaaattttttttgaatttttacactaaaatttctatttaatttcgatttaatttttaaatttcagattatcaagggcaagaggactggtgtttgtcaacgaaaagcgacgccctagaactgacgcacttccacgacattgactcgacaatggactctacgctccatgcaattgtgggccgaccggtggcgccatttctgcaacaacggcttaatgctcgcccactttttcatcaacgtaagaaaaatttttcaaaatttaaaatttttgaaattttttattaattagtgcgtcagcagcagcaaaatggtccgcaagtggtcgagcaacaattgccatttgtgttttcatcttctgtcgatgtcacgccagcgcaaagggcaaaggtggattggtctttctctctctttctctttctctctcacatttcataaagtctgggtgttgatgggcaggccttccctcgtgttggtccccccttcaatgcttatctcggagctgtgaaaggcggtaggcaggccttcctccgtgttggtccccctattgttttttgcttctcatttctctctttctctctcacatttcataaagtctgggtgttgatgggtaggccttccctcgtgttggtccccccttcaatgcttatttcggagctgtgaaaagcggtaggcaggccttcctccgtgttggtccccctattgttttttgcatctcgtttctctatctctctctctctctctctctcacacacatttcctcgtttctgtgttttgataagcctgaccaaaaatatttaaaaattcaggcaaatgcattgtttgaagcgttcaaagtgcgagaaggattgaacgaagagtagaaaaaggaggaaaagtgcggaggaagcagatggcgaacaacaacaaaaaatggcacaaaaattttttaaattttcattttgtatttccaaaaattaaacggaagtgtcacggggtggctgatttaaccatttgtttttttttttaaattttttcactcaattaacttaatttcacacgttttttattaaactttttgaactttacgggtctttattgagataataatgcaaaggttagaaaatgtcgtccaattaaaaaaaaaggtttacataagatgattaggttaatgaattaagtgatcgata

SEQ ID NO: 67459 - DNA, 633 bp, Heterodera glycines
aaaaaatttttgtgccattttttgttgttgttcgccatctgcttcctccgcacttttcctcctttttctactcttcgttcaatccttctcgcactttgaacgcttcaaacaatgcatttgcctgaatttttaaatatttttggtcaggcttatcaaaacacagaaacgaggaaatgtgtgtgagagagagagagagagagagatagagaaacgagatgcaaaaaacaatagggggaccaacacggaggaaggcctgcctaccgcttttcacagctccgaaataagcattgaaggggggaccaacacgagggaaggcctacccatcaacacccagactttatgaaatgtgagagagaaagagagaaatgagaagcaaaaaacaatagggggaccaacacggaggaaggcctgcctaccgcctttcacagctccgagataagcattgaaggggggaccaacacgagggaaggcctgcccatcaacacccagactttatgaaatgtgagagagaaagagaaagagagagaaagaccaatccacctttgccctttgcgctggcgtgacatcgacagaagatgaaaacacaaatggcaattgttgctcgaccacttgcggaccattttgctgctgctg

SEQ ID NO: 67460 - DNA, 913 bp, Heterodera glycines
  unsure (1)..(913): unsure at all n locations
atgccaaaacaaaacgaaatcgttttaaaatattcctttctggacttgacttggtttcttgatatcgaagctgttttctacgctatttctaaaacggttataccaaaccccagatttttgaatccggttttcagaaaaaatgccttgtggtgaaaacaatatttcacatttcactccataactttgtgagttcggcacggatcgagaccgggataagaccattggaaagagcagctcgagctctacaagaaggtatggaaagaaaaatagttatttctgggactttttcagaaatcagaattaattctccaatgtggcccaaattttaggcccccagccacagccccttgcttctcccagttttaagtcttggatttgtcaaataaattcaagacttcaaattaataatcaaaaattctcttaaaattttttgaacccaattcaaaaaaggaaaaaaatttgcagtcaaaaaattattcgaatttctccaattttgtttccataatttccgaaagttattcggtatcataatgccaaaacaaaacgaaatcgttttaaaatattcctttctggacttgacttggtttcttgatatcgaagctgttttttacgctatttctaaaacggttataccaaaccccagatttttgaatccggttttcagaaaaaatgccttgtggtgaaaacaatatttcacatttcactccataactttgtgagttcggcacggatcgagaccgggataagaccattggaaagagcagctcgagctctacaagaaggtatggaaagaaaaataagtatttctgggacttttcagaaatcagaattaattctccnatgtggccccaatttangcccccagcacagccccttgctctcccagttttaagtcttggatttgtcaaataaa

SEQ ID NO: 67461 - DNA, 309 bp, Heterodera glycines
atgtccagagtcacgcagatggattgcatcagggtgtacgcgccgttcagccaaagtgggtccgggacgcacatcgagaacgtcgtttacctcgagctgttggacttggagacgcagcagccgaggacaccgaatcgtggactgatggacgtggacaatgacccggacgcagcaataccggacgtgggcccaagagtaccggacgtggacaatgacccggacgtggaacgagataatggaaacgcagcgggtgcaaacgatcaagaaccaaatgattttgatagttcttttgatgatttttttgattga

SEQ ID NO: 67462 - DNA, 438 bp, Heterodera glycines
aaaatggtgtaagtaaaaatcgtaattacgctcaaaaagcttctcaaacaattttagcgcttccaattcctttctacaatcgcctttatacatcccattatgagcgctaaaattatcagagtgccgaaaatcgcatgtgatctaagcctagaaaaaatggtgtaagtaaaaatcgtaattacgctcaaaaagcttttcaaacaattttagcgcttccaattccttatacaatcgcctttatacatcccattatgagcgctaaaattatcagagtgccgaaaatcgcatgtgatctaagcctagaaaaaatggtctaagtaaaaatcgtaattacgctcaaaaagcttctcaaacaattttagcgcttccaattccttctacaatcgcctttatacatcccattatgagcgctaaaattatcagagtgccgaaaatcgc

SEQ ID NO: 67463 - DNA, 187 bp, Heterodera glycines
atgttgtatttggatgtcaaagaaaaaagctatcgtggaaaaagagctggcgccgaaacgcgagcgccgaaacgcgtgggtcccgtttgtacagtctttctaaaatattttatgaattttaaaaaaatactatttttttcagaaaatttttgtgttttaaaagtaggtatttaaaataacaaataaa

SEQ ID NO: 67464 - DNA, 274 bp, Heterodera glycines
atggtaggggacgattgagtgcaggcactctcgactgccaataaaattgattttgccttctcattttttaaattatttttttttactttttctaatatttattcccatttcagtgcagaaatcgtacgtggcaacaaaagcgggacagtaaacaaagaaaagaggaaagattgaacgcagcacgtgcgcaaattgatgctgatgtttataatggaaaatttttttttcgcagataacttttttgattttttcgcattattgatcaatttaaaaa

SEQ ID NO: 67465 - DNA, 138 bp, Heterodera glycines; identical to SEQ ID NO: 50950

SEQ ID NO: 67466 - DNA, 778 bp, Heterodera glycines
  unsure (1)..(778): unsure at all n locations
atgggaaaagaaagacgaagcgaacgggtcgaagaagagacagagcaaaactcagcnagatgagaaaacaacgggcaaaaggcccatggaagagaaagggacgaaaaaggacggggagagggaaagagcggatgagggacagagacggacagaaaggcgaaggggtaggccatgaacacaagtcaattcggtaatagtgccgattgtaattattgctaaggcattgacagaatcgtacaataatatgagcaattagaattttcgaaaaatgtccgaatttgggtacatggttcgaaattgagccgaaaaagtcagattcgtgctaagtgcctcggattaaccctgaaaatatttttcgaaaaatttaaagaagtcgaaacttcaaattttttgagtttcgcagttttgctcttaaaatggtttaaatgtaaggaaacaaacaaaatcatctaagtttcaataaagaagacttttaaaccattttttagataaaaaatgctaaatgtgaaaatgaaaaaattagatttttttcgaaaaaaggagactaacatcgtcactattaccgtcaattctacccaattcatttcagataacacattgaataaccctgagtatcgaaacggagaatgtttcaaaattgaatcgcactccttgccctcttccaatgtttcaaagcccaaccaaccgccacattttgcctcttcgtcacttctaaagccagtcccaatgtcgaagagttcgtccaattctttgcacgttggcatcgcatcaactcaaa

SEQ ID NO: 67467 - DNA, 733 bp, Heterodera glycines
ttagcatcatagcagtgcttttccttgtctttttgatgccctcgcaaaatctggttcgcttctgatcagtttataaaaaaaaagttaagcctaaagtttttcgctcgtttaaaaagcaattaaaaatttttagaatttgtattcatcgccctttttgatagtaaaagcatcagagtgcctaaactaacatgtaaataaaatttggtgcgtttcagaaccctttctgaaaaataatctttttgaattaattatgcaaaaaacaaataaataatgaactctcttccttaatattttcctgcaccgtcggttttgatagaaaaagcatcagagagccttatttaacttttaattaacatttggtgcgtttcagagcagtttctgaaaaaatatttatgaattaattttgctaaaaaaataaaatagtgaagctttaaaaattaataaaaaattttaaattcagaattactggagttagcatcatagcagtgcttttccttgtctttttgatgctctcgcaaaatctggttcgcttctgatcagtttataaaaaaaaagttaagcctaaaatttttcgcatatttaaaaagcaattaaaaatttttagatttttattcatctccctttttgatagtgaaagcatctgagtgcctaaaataacttgtaaataaaatttggtgcgtttcagagcagtttgtgaaaaaatatttatgaattaattttgctaaaaaaataa

SEQ ID NO: 67468 - DNA, 1273 bp, Heterodera glycines
atgtcttccttctacatcaatgaaccagtgacaaatgggaaggtaattatttcttgctgattgtgatatgcttttatttaagttgtatatctttaggtctgtcttcaaacaacaatcggagacattgacatcgaattatgggcaagggagtgtcccattgcttgtcgtaactttgtacaactctgcttggatggctattataatggttgtctatttcaccgagtcatcaaaaacttcatcgttcaaacgggggaccccaccggcacgggccaaggcggcgagtcggccagcggagagctgtttaaggtggccttttacacttgtttctttgtacatcttttttcaaaaacttcgattttgtctgttttagagtgaatttcatcagcgactcaaatttgaccggcgtggacgtgtcgggacagctggcgaaaagaatttgaatgggtctcaatttttcattacacttgacaaagccaccgaattggacgggaagcacacagtgtttgggaaggtgggcaataccaaaattacaatgtaaaacaaactgacttttattttaggtggtcggaaacacaatttttaatcttttgaagcttaacgaatacgaagttgacaaaaatgagcgtccaatttacccacataaaattacgagcgccaaagttttggtgaatccatttgatgacattaatccgaggaaagcgacaaaggacgatgagagaaaaaggtccaaaagggagaaaaacgcaacaaatgtcgcaatggcagcgaccaaacggaacacttcgcttttgtcatttggagacgaaattgaggaggaggacgaacaaagtgaacatctgaccaaggtaattcagagctgacaataatatttgtactttttatttttctaaatctcttttaatgcgaattaatttttagttcggaaattcagttaaatatttaataaaaaattaagatttattttgaatttctttagaagtttaaagggaaaagtgcgcacgatgtgttggaggatgagttgttgagcagagagagggcagtgaaagcggaggaattgacgacgagcggagaccaaagagaggcggaggaagcggacgaaagaagccgagaagagcgactggacagagtcaaacggaagttgcaggaccaaagggaggggaaaagggcgaaaagagcggcggggggaaaggggacgacgaggggagacgaagaggaggatttggaacaattggtggacgatgagaaggaggcgcaacgacgggaggaaatgtga

SEQ ID NO: 67469 - DNA, 1697 bp, Heterodera glycines
ttttcccggcggcgcctatcggctccgccggacccccctcccctcgcccgttcaccaaacaaaaaatttgttaaaaatctgatttttgatcccgaacgcaatgaaatttacgatttaaagaaatttaacaaaatgttcttatttttgaccctggatattcgtcccctattagcgggtcatcacagaaaccgttggacatacggtacttatcctttttgtcatccctctgaattttttttaccttgttccccccatttttgaaaaaaatgaaaattttaaaaagtcgttaaacccagggctcggatcgacaatttttcaaaatcagaacagattttgttttgcgaaactgcctccaaattagttatttttaaaattattcgatcaataatgtattatttttttcgcctccgattgtcgaatttaacgatttttggggaggaaataagcaaatcgtaaatttcagtgcattcgggatcaaaaaataagatttttaacaattttttgcgggtgcagttttttttttttttaccagactctagtgttcggtaattgactaagtctatcgtatggtgcacagttgggctggcgtaattaattaaatttggctttagactcatctatacttttaacccaatcttcccaacatggttgatggacaaattaaaactgcgcaagtgcaagaaaatgcaatgaagcgaggatttgtcaaacaggtcgcagtaggaaaaccatgagaattcgctgataagctcgtgttttatttaggttttgagtggcgattccgttgtgttacagcttccgccttctgtccaaggcgcggctcccacggaattgactgtttacttggccaatgtgtcagcaccacgtttggctaaacggcccactgaaaacactgaggcaactcccgacgaggtgccatcagtttataaaaacaggagcataaaataagacattatggcacttcataaatatgtgtaattgagtaagactattattatttaattcgaaattatgacaattttctaattagtccaaattaccattaaacacagccttatgcctgggaagcacgcgaatttttacgcaaaaaaattgttggccaagctgtgctttttatgcgcgaatttcaagccacttcaggcagagaacatggcaaaatccttctcgggtcatccggcacaagtgataaaaaaaatttgaaaaaggcaatttagtctttttttagacattgaaagtgccgaaaatgtttccgaaagtggcgtttcggctggttggttggaagtccgacccggcaaacaaattgagttggaaataattcttgttttttataccttctttcattcagcgattatggtaagaaactgctcgacctacaggaacaggcaaaatcggctaaaaagggtcgttggtccgaagaagagagtgcaaaacatattcggaacattcaatggaccatcgaagaaccaagggaattggtggccttatactctgggaagcaactggacgcggttgtggagcaggtcagatgggggatggagggaggcgaggacgggtggaactgacggaaggccaacccaacatgccaatgttgatcgagaagtgttttgcaactaattcaggtccgcgatggcacaactttccgcctatttttgttgccgtcctttgaatatataaccgtcgcacttagtggaattaag

SEQ ID NO: 67470 - DNA, 250 bp, Heterodera glycines
gtgtccgtttggggtactcaaacaattatggggagcaaaaatccaacgcagaattaaagtacaggctatagggaagctattccggaaggattcggtctccccataaatctgggcgcatcggttcagggggactgcctcgaaaactcaaaaaaaattttttggataaaaattatttaaatgatctgactagataatatttaaaataggttatttctcttcctttcagtatccctgcaaagtttggtgcgct

SEQ ID NO: 67471 - DNA, 130 bp, Heterodera glycines
tatggcgcggaaagacttccgatttccgacatttttggggtaggaattccgacttccgaaatttttgatgaaaagtcggaaattttttaaatttttcttttcaaaaaactagcaagttttgtacaatttc

SEQ ID NO: 67472 - DNA, 897 bp, Heterodera glycines
cacattcaaatcaaattttgttgttgacacaaagggttagaaaaactcagttttttcttttttgcaaatttctgaattttcaggcgcgggtgccggccaactgactgtgcgagtgaggggccctaagggggcatttaatgtggaaatgcagcgggactcggcacaggaacggaccatccattgcaagtgggcaattttggcatttccaattaaaaatataaattatattactctgctgttctttctaaggtatgaacctcgtgagcctggcgattaccaagttgaggtcaaatggcatggacatcacgtgccgggtaggatttttttttttggcattttttacatttacaattatttgcctccgggtgcaaattagtgacaatagacccatttacgggaactccaagtccttgtattcccccccccccctaaaaaaacggaccgggctgggacctcggtaaaatttattaggtcttcggcatcctcccttctgtcatttttttccatttctacaaaactttatttgtttctcataggttctcctttcttcgtgctaattgtggacacggaacaggaacttcaacgattcttggcggtatttaaattaaaaaattcccaatttttcgcaacttttcagggcggcgttccctcgccgacgcccccgtcgccctttgtgccgcccggttggatggcgccccctcctccccctccgggggtgctccctttgcccccaattatgccatcaccgccggttggacagcctattagcttttttcacccccttttttcgatgtttttcagccacattttcgtggtgctcctcacatgaagcaaatgcaaatgttgccgcccccgtcgccggcacaccaacacgccatttacggaggaaggcaccat

SEQ ID NO: 67473 - DNA, 49 bp, Heterodera glycines
attgaaagccatccattgcctgccagttctcggcacagcaaagcactaa

SEQ ID NO: 67474 - DNA, 449 bp, Heterodera glycines
gcatggccgttcttagttcgtggagcgatttgtctggtttattccgataacgagcgagactctagcctactaaatagttggctcattgcttctgtgggcacaacttcttagagggattttcggtgttcagccgcacgaaattgagcaataacaggtctgtgatgcccttagatgtccggggctgcacgcgcgctacactggcaaaatcagcgtgcttgtccttccccgaaaggggttggtaaaccggtgaaaatttgccgtgattgggatcggacattgcaattattgtccgtgaacgaggaattccttgtaggggcgagtcatcaactcgctctgaatacgtccctgccctttgtacacaccgcccgtcgctgcccgggactgagccatttcgagaaattcggggacggttagtgttccggcttcggtcggtatgcagactggaaccg

SEQ ID NO: 67475 - DNA, 770 bp, Heterodera glycines
atgccttcgatgctgatggacgacgaacatttgttgtccgcttggactgcccgggcttctcactggacgagttttgctataacaatgaaaaaactggggaggtaataatgtttttttaaacgtgttagggcgccgctgggaaaatttttgaaatttttcagtaatttgttaaaaattaaagtcaaaaaagttgctgaattgggttccgggggggtggaccgggtcgaatggacgccgatgctttggccccctcagccgcccccccccctcctgtctcgcccttgcttgtattcaaaccctatttttaaacccgaatttgtttggccaggtgttggcatttgcattcaaacgctcccaagtgttgaaggcggaggaagacgacgacaaaatgacagacggtgaggaggagaagtcaagtgaagcggaagcagcagcgccggaggggaagaggtgccgaagtacgacgacgacaacggcgccaccgccggagggggaggcgaacgatgatgaagcggtggtgatctgatcaggagttgaaaaacgcctgaaatccgatccgggcacgcagttcccgcaatattattccggaccctgaatttttcaggaaatccgggctttattcgtcatccaccctcacttcctaggaaaatgtgataggatttggattctcattttgttcctttttcaattgacagcccccaataattttccggaccacgaaaaactgatattattgaagccaattttcaatgtgtttttttttaaataaa

SEQ ID NO: 67476 - DNA, 704 bp, Heterodera glycines
gggtgtcaactacaaagtgggcaaattcccgttcgtcgccaattcgcgtgccaaaaccaacaacgacgtggaaggctttgtgaaggtgatcggcgacaaggacactgatcggctgttgggtgtgcatatcatgggaccggttcgtttgcttcttttaattaaatattgcattcaaaaattttggcgttttgtccctaactccaacaaattttttttttttttttgctcagaatgcgggtgaaatgattgccgaagcgacgcttgcgctggagtacggtgcctcctgtgaggacattgcgcgggtgtgccatccgcatccggtcagttggttttgtttgcgtgtgccttgccgtccagggaagcggcaatatttgatccgaaattgtccttctattttcttttttggtgaagatcgagaagacaaaaaaaatttaattttgaaaattttttggagtggggcggctcgagagagagaaataaagtgcacccaaataaattcccacaatttaacaacttatcttggaccatggaactcttctaacgcttttttgataagtccggcttggcccaatggagcctgccaattcgttttccatttcctacgtccctctcatccattcattctcttgctgttttagaccctttccgaggcgttccgcgaggccaacctggcggcatactgtggcaaggcgatcaacagcatt

SEQ ID NO: 67477 - DNA, 236 bp, Heterodera glycines
aatcgaacgctaacggacgacctaatggaaaaaaatccccgaaggagagaatttaattaaatccattccttcgggggaccgtgccgggtgccgcggggtaagcagtgctggttcgtttcatcacggcaccgaaccttttggctagtcagcaatcgagcttaacttgccagatcggacgggtgcgcatgattccacagtgccaagcaccccaccaaaagcaaaacgatataaccaaa

SEQ ID NO: 67478 - DNA, 132 bp, Heterodera glycines
atggcgtcggatggacaagcgatggccaaatggcttttcactccccgcatggacgatgtgccaaaagtgttgcgatgctggttgaacaaggatgacggggatttggcgtcaaagattgaagccttcaaagcg

SEQ ID NO: 67479 - DNA, 618 bp, Heterodera glycines
atggctcagtcgccggccgcgcccgccgcagcggcagccgccagcacagcgagcgcaattctcagcgcaaaagcggccgccgccgctgctgtggacgacgaattgggcagcagcggcggaagcggcagtcaaacgctggtggaagccattcaggtgaagcaaaatgggagaattaattagtcattttatttatttatgcaaaagagaaaaaagtccacaaaagggagtaatccacttactctgcggacatgtcatagattaatgtcgtcctcgagtaatatggatcaacaattaaacaaaattaaggaatcacaacaaaattaaataaaagaatgaggtcaatcaatcaataaaaccaaatcacatataaaattataaatagctttaattaattaatcaaaagagacaattcacttttccggtcattttattcgttaaggagtttaattttagttttaaattgatttaaagaatttattttaatgatttctttatcaagttgattccacaattttgtagccctccccgcaaagggaataaattttttgcctaatttatattttgtgttaaacctataaaaggggacattaaagcgtttagaaggtttgaaaattttaa

SEQ ID NO: 67480 - DNA, 754 bp, Heterodera glycines
atgccgagaccaatttcgaacaaaatcataaacattggcggactcgtggaaatgaaagcgaaagaattggagccggtaaaatcgtctacctaaatgacaattaaaaggaaataagaaaatgtttaggaaataaaagccgtcgtggacaattcgcaggccggcgcagtgattatttccttcggcactatggtcgacatcaaaacaatgaaaagcgaaatgaaattggcattttttgaagcatttgcccgctttccggactatgaatttatttggaaaattgaattatccgaagaagaagccaaaatgtttgccaaatataaaaatgtgcacccggtgaaatggatggaccaaaaatcgttgctgagtgagtgagtcgaaaagcacaaaagagttgagagagagcttctaattcaggggtagtaaggtattttaggtttttgccattttgtctttgactgtattttttctttttaattaaatttcatattttaaattaaagtgcaccccaaaatgcgcgccttcgtctcccattgcggtttgaacagtgtcagtgaggcagcgcgatttggggtgccaatattggccattccgctgtttgccgaccaactgtacaatgcgattttggcacgagtgaaaggaattgccatccaattggacgttggccaactcaatggggagggggccgagcaactgatcattgaaggacttgacagggcaattacctaattaatcgggacggatctaatggattaaa

SEQ ID NO: 67481 - DNA, 266 bp, Heterodera glycines
atgagtgagtatcggtcggcttcgaagcctttttctttggctaatccatttttcaatgtatttgattcgcaattttgataaactgatcatttgataatgtttttttttcatttttttgattggttgattttgactgattaattatttatttcattaatttcattttcttaattgcattttatttgaatttcaacagtttccattggtcagattgacaaagcctattggaacctgcgcaagtgatacgtacggtattttcaaataaa

SEQ ID NO: 67482 - DNA, 1300 bp, Heterodera glycines
atggacaatgtggatttgctgaatccgtcgtttatgcccctctccaaaatgagtcacagtgagagaaaatattgaataaaattgaataataaaatgaactgaaaattaaaatggataaaacgaaataaccaaaaaaaatttgaaaaaattattcaattaaatgcaaatgtaaaataattaacatgattaattaatgtgttttttttaattccaagtgattgttttattaataaacagttgacattgtcataagcgaaatgccaataccgaccggcttcggcacgcgtgcaaatgcgaacattttcaatgcctgcgcaactctcgcatttggtaataatgagattaattaattaattatcggaaaataaaattaatttggtacataatgagattaattaagcaattatcgaaaaataaaatttagtgcataaatattaaatatttattgtttaataattaatagataattttattttgtaaaattattatggtttatttatttaaaggttttttgaccaaatttcttcttcgtgcgttgaatggtgagtgaatgaagagtgaaagaagttaatgaagaagaagaagatgaaaagccaaagtggtggatgaattgaatgcataagtttggggggggggaaattaaattttcattatttaacaataaaattttcaaatttttcatttcatttttcattttaattatttattttattccatattttttaaaatcattttcacatttttaatcaactttttagcataccaaaaaaacattaagcagaaaatgaactttgttctcccattgtctgtcatctgctgcttcttcgctttgccatggatttgctacggtaatttttaaaatttaaaaataaaaaataattaaatttaaataattaaaaatgattttaaaattaaatttaaagggacccattgcaaagttgggatctacgaaacgtcaggctatgctgctattgtggcgtccgaatgtgctgcggatcaacagttctgttctgcaatcggttgcgcactcggtgggtcactaattacccaattaaaattaattaaattaattaattgccctcttaggcactgaacacatcgtcattttgtgggcttgtgagcagcaaaatgacactcaagtgatcgtcagcagactttcttttggcacttacaaccacacgtgcttggctcagattgggcagaagggtgccaacatgtccaatgaagagttcgccttccctgagctgaacgactatatcaaatgattggtaaaaaaacaatttttaattaaaataataaa

SEQ ID NO: 67483 - DNA, 399 bp, Heterodera glycines
atggccaatgagcacgtgaaactgcccgaggcgcaggagcccgacaaaattccgacccttccggcggtggcattgaacaaaagtgggcggcaaaatgccaaagtttttgcatggcatggcacatgggcacaaaaaaatgatagggaaaatgctaaagaaaaataatagtgtgggaatggcacgtggtattattccgtggatggaaaaatgatagaaattgaattttgatatctcaatttttaaattggaaggcatacagtgcaggaccggattcttccgaggcaacggttacggtaagacggaggtgaaggagtgcgttggcggagaatactgttacgcggtcagctgccaaattggtgattaatccctatttgtatttattattctaatattaataaa

SEQ ID NO: 67484 - DNA, 243 bp, Heterodera glycines
atggcaatgatcgccccctttgatcttttgccgccaattgccttgctggtgctgatcgccatgatcaatcaatgctcgcgtatcataattagtccaaatattaaagtaattaatcaactaattaagcattgacctgtaagattggacatgcaaatcacaaaatgggcgaaaaatcggcgaatgggaaatgtgaggacaaagtgccaaatgcgcagcattgcttttccgtgctttgcatggagc

SEQ ID NO: 67485 - DNA, 1204 bp, Heterodera glycines
  unsure (1)..(1204): unsure at all n locations
atgccaggaaaattcaattttcacttgccaacggaaaagaaattattgaaaatggaaatttattatcagagtaagtgtaattatttaacaatctaaatttataaaaattaggaaaaaatcaacgatttggaaatttttcaaaatatgaaaattaatttaaatttaagtagtgtatttacaatatttcgctgaaaaataacagaaaaatactaattaaggaatgaaaatgttaaatcaaaattattgaaaatattttttgtaatttatttttaaggcaatttttaaatttttaaaaaatataaaaaataggaatgttaaaatgacattcattgttttttacttttaatactgaaaaaattcaataactttgtaattttttgaataataaaattaattaaaatttcaaaattaaatgaacgatttttcattgaaaaaacaacagaaaaaaataattaaagaataaaaaatgttaaacgaaattttttgaaaatatttttcttatttcanncaaagatgtttaaaatgatattcattatttttttataaatttgtcgtcatatcacaaaacttgttctattctttaggaatttgtcagacgaatacatttttcgcgcattgccaattttcgaattaaaatttacaaaatcgaacaaaacaatcataattaacacaggtatttttattattccttgctctcattaaatgccaaaaataatttcacatttaaatttagtctcgccaaaacaaatgaaattgcgctcagaattttttgccgaatcaaagcttggcccatttttagaagaatttgccggcctttggcttttggcggcggacatttggccaaagtttggccaaatgccaacaaaatttgtgtttatggtggcgaatggatgccaattaattcgtgtcgatggcccacctcaaaaatgcgcaactttttatcatttggcatttgaaaagccacgtgccattcgccaacaaatcattaagccactcgtaggaattaattgaattgtttgtttattttttaatgaaaaattatcccaattatggtctcttttaaagatatttctgaattttttcccaaccttcaaagaaatagttttaaacttgattagttattaacggagtttttcattttttttacaagatttttgggtttattttagaagaattattttgtcccattgtataaacattaaaa

SEQ ID NO: 67486 - DNA, 371 bp, Heterodera glycines
atgccatggacagtttattttatggcaagtttgaccgaatattctgaatacggcagaagatgcactgcttcattaatttcaccaaaattcgttctgttggccgcccattgttttgacaaaatgaaagaatttcagccatttttattgggtaaacaaaattaataattaattaaatgttttgaaataataaaatttggcatttttaaaggatttggctcaaattcgcgagtcttcaagagcccaaattatgacggttttgttgttaaaatgactcgtgtgaccaatttaaatgtgttcatccatccaaaatatacgaaaaatggccttggcttaaacgatttggcattgataaaggcacttaattaattaaa

SEQ ID NO: 67487 - DNA, 446 bp, Heterodera glycines
  unsure (1)..(446): unsure at all n locations
atgaactttgaaattcaattacaaatgctgggtaagcgactgatggatgagctgcaaccatgccttatttgtgattagaatcccggacgaggacggctcccgaaaaattggacactaacagaaaataaaataacttatccataaaatttgcatgattatttcatagatcagatagtataataaagcattttcaaaattccaatttttttttgttttttgctttttttggacgccgatttcatcgaaaaaaataattaattttttgcgtgatttttaatagattatttactaataaaaaaataaataactttcggtgattatcgaggacaattcgtcaattagtaaaatgcaaataaattcgaaatgacaataacttgtacaattttgagatggaccaaaaaaaacaacaaaattaattcgtattttcagacaccttanaacattaa

SEQ ID NO: 67488 - DNA, 679 bp, Heterodera glycines
gcacagcaatgtctccgttctgtgaattgggtgcgtcggctcgtaaatatgattgatgccgaccgactcgtccacgctgaggcacacgaatttggaggcattcaattgcctgcgcgaaaacttgaggcatttcgccttgttcgaggtgttaaattcaaaatgaaaaatttatttaccaccaattcattataaatatccaattaaacattctttagagttgctcgccgttgtcactgctcatcccaatttaccacagaatattcagcaaactgttggcttgcccatttccgctaacaatcgtgattatgttggtttagcaaattttaaatttgttttttaattaatttttaatattcccccttttggggctcaaatggccccggatggataagcatgaacatttatccttgtccaatgttggattgtttaataaaatttaagtcaaaaattgaaaaattgccatttatggaaaaatttgttaaacttagagattttttcctttaattaaaatattttctgactaatttgtaagtgaaattctcatgttttgcattaataaaagcgtttgaaattaaatcaaattattttatttttaatttacattattacaggttcgtctgtacccgtatgcataaagatcggatcctcggatcacgacccttattacaagggaaaatag

SEQ ID NO: 67489 - DNA, 562 bp, Heterodera glycines; identical to SEQ ID NO: 38762

SEQ ID NO: 67490 - DNA, 133 bp, Heterodera glycines
atgtccagtgaacaaaatggaaacgacaaacaaatcgaaaacggagaacaacaaaacagacggagaaggagagacggggaaggaatgcgaaaaggacaaatgaaacagaaaacatcaacaaagttgtatttaa

SEQ ID NO: 67491 - DNA, 205 bp, Heterodera glycines
tagtttttgcatttcaaaagttcgctgtgaattgtgcactgtatggggcgaccttttctagagcatatgggcggcagaaaatattactcatgtgcgttcggctcgcaattaaacagcggagataaattctgattgggttttaggtcgaagatgcaaaacgtacctcaccaacagaagggagttgatttcgcacaccttcagaggt

SEQ ID NO: 67492 - DNA, 179 bp, Heterodera glycines
gacaaactgatgggactccgttcatcatcaggcgaagaacagtttagcactattcccgcccgattttatgaggtgctaatttattgagccaaatttacttggaatgatcttttggaccgatactcatgatatacaatttatcttttcgtctagtcattaattttttacatcaacttttc

SEQ ID NO: 67493 - DNA, 662 bp, Heterodera glycines
gttttcggggcagtccccctgaaccgatgcgcccagatttatggggagaccgaatccttccggaatagcttcactatagcctgtactttaattctgcgttggatttttgctccccataattgtttgagtaccccaaacggacacttgaaaaaatcgatttttttgttttcggggcagtccccccgaaccgatgcgcccagatttatggggagaccgaatccttccggaatagcttccctatagcctgtactttaattctgcgttggatttttgctccccataattgtttgagtaccccaaacggacacttgaaaaaatcgatttttttgttttcggggcagtccccccgaaccgatgcgcccagatttatggggagaccgaatccttccggaatagcttccctatagcctgtactttaattctgcgttggatttttgctccccataattgtttgagtaccccaaacggacacttgaaaaaatcgatttatttttgttttcggggcagtccccccgaaccgatgcgcccagatttatggggagaccgaatccttcgggaatagcttccctatagcctgtactttaattctgcgttggatttttgctccccataattgtttgagtaccccaaacggacacttgaaaaaatcgatttttttgttt

SEQ ID NO: 67494 - DNA, 413 bp, Heterodera glycines
atgcctattcaatgtttgtctgaacatttgttttggaaggaaacaaatgaaaaacacacccagtttccatccgtccaggccgcaaccctggataccagcgcaaaaggaccagtggaaagcgaacgcccacgcccacccaactgggaagaaaacccagtaccaggcaggactccacggttttcatggatggcccccaggatattcgaaaaagcgtatcaaatatcctataggggtttactaccgcgtcaaccaaatatgcaaatgtttcggcccttcaaagccgtagacacggtttgaatttcaaaaaaatacgagcgggcctcgtcagtacggcactcgtattttattattttttgttgctaagctcaccagtcagcctttggcgtcaccccggattgttgcttttaatttta

SEQ ID NO: 67495 - DNA, 896 bp, Heterodera glycines
atgaattgtgccgccgaattggtgatcaagcctgatcagattggacaattacagcgtctgccaaccgtggcaattagcaaaacgaccaaaataccgaaaagcaatttaacagaaaggcatcgacgacgattggatgagggtaattaaaaattgagctcacatttatacacttaggcaatttttttggctcaagtacagtttatggatgcaatcgctttttatgtgtccaatcaataccccgtgtatgcatgacaatatccacaaagatttgctagaattcttcaaaattttgaatattctcataattaactagtcatattcacgtcatagctacatagatttgttaatacaacgaaatttgtcgtagtttttgttgtgttaggacaaattccgcaaaaatgtcaaggcctcgatcttcaatatccgattttgtcactgattaagccgtgtcatcccacagcaggtcaaccgaaatagagagttatccgaaacatgaccaccggatgaaactaattgattggacgcacaaaagtcgattgaacgcataaactgtacttgagctattttttatcaactcttttggacggatctattctggcattttgccgaaatttccttaattttgaattgtatacaaaaaaaaatacatggataattggaaatttaaaattagaaaacacaaaaagggtaattcaacaaatgctaaaaaattaaaaaacggggccgacggcacaaatttttcaaaccattttaacgctaattaaaaaagcactccctaaatgctaaacaaatttcaagaaggattcaatactggcgtgtgcactttcccaccatcacccagcagccaattggtgccggacacaattcctattacaacggttggcacaaaaaattga

SEQ ID NO: 67496 - DNA, 470 bp, Heterodera glycines
ccgacccctcccttcacccctttctttccttcatcatttcccgtttgccctaattttctcatcatttcatccatcaatcactcctcgttcgctacttcgttcaatcctcaccgtcttccccatttgtctgctcgacggacattcacggctaacgttcagtcgcgacaagagaattattcataacttcaccttaaatgaaccaaattttcaaattttgaaatctttcgtagcactaaatttttctattattctgcaaaatttcaaaaattcgttaagtttcaaaaaagtcataatctaagaaactgaaaaatttgaccaaaatgaatcaaattttataatatgtatcattcgataacctaaatatttaattttttcgtaagattttgattattttaataacgaagccagagatttcgcggctgcttctcatagagcaattacggaagcagaaaaaattaagtctcgtcatc

SEQ ID NO: 67497 - DNA, 276 bp, Heterodera glycines
atgattcccggcttttcgaattgggtgagaccaattccgactcgaggcccaccaatttcttaatttcaccaatgttcatgttgtgtttaaggatgccgaatgcgagggcagtttcgccattgagccaattgacggtgccgaactgaggggccaatgtttggccaaaattgcgaaataccaaacgaagcgaaaggcattggacaaagcagtcggccaaaacttttttgttggcattcagacgaaactgtggcattcagacgggccaagcagaaacag

SEQ ID NO: 67498 - DNA, 230 bp, Heterodera glycines
gttattggcagttggaaccttcgaaatgccccgcaaaagcgctttccattcattgaattgaatggtgaacgaatttcggattcgcaaattattttgtggagattgtcggactatttcaaaattgaagtaattgcacgtattattgtcgttacttctatttcctattccaaggatgggttggacaacgaacaaagggcaaaagcacgtgcaattgaaagactaatcgaagg

SEQ ID NO: 67499 - DNA, 128 bp, Heterodera glycines
  unsure (1)..(128): unsure at all n locations
caggagaagtcccnggatcagagcgcctacatgtgagaagatgcaacaacgaccggcggatggatggacgaaacctgaagagcgagcgacctgtcagaagatgcaaagataaagaagatgtctcataa

SEQ ID NO: 67500 - DNA, 1662 bp, Heterodera glycines
atgggacgagtcaaaggtcagtggtcgtgaatgatcaaccaatcagtttgacactcatcttgtgcttcctttttggcccattctcttggcaaaacttcgcttccaaattagtcttggccatcattagcgattaatcgctgctaatccgtctccccatttgcagaagttgtgccggaagaagcagcggatttcttcgatcagctgacgggccgggacaagcaagtgctgcgcgaagtgttggccaaggcggacacttatcaaagcactggcgaagtgctgcagggtttgttatcatcggcggatgagaagcatttacgagaccgtaaaatgtcaacaaaaacaaatagcacggcatttcgacattgttttttcgacttttttccgacccttttgggccaaatttccatttcccccgtaattttcggtccccctatgtgtaaatcttcttctgtaaagatctgcgaaacggttcttcgacactgtacgacaaggctgtccaagtgagttggagcaaatttatgttgttgagtgtatatctgggcttattgcaaaaaggtggtcacttccgttcgtggcattgtcggcaaactcagtgtgcccgcgcggacattcgtcgacgaagttcggtggactgtttttttgttgtttggggtgtgggatactgtacggaaatgttaactgtagcaatcaaaattattaatgaacatcatcggactgctgtgcaacttaattattgaaatttcctgtttcgctttgttccgatataagcgctttatcactgatataataggttcggttcagtctaagcttatctgatttgctggtccattgagttggtctaccgactgatctgttcagcctaatttggtttgatcagtcagttcatagtttatccgtccgttttctgacccaaactcttttgctagcctatttccgctggtttatttttacaccaaatttctgtccaacttttcgggggcaaaaataggcatttcggggtcgggcagaagccaaacattctaatgtttcctgcccctcctttggcgtttcagtccgtcaaacagttgcgcaatgcccttgggggcggcttctctctgtccaatttgaaggcccaagctcagcaattagtcgcccgttatcgccaattggacgctagcacaaaagaggaactgcgcaatgcttttccaacgattgccttcgttttggacagtgagaaaattgaattggcatttcttaaaattcgcataatggcattggcacttctgctaaacgacggcattttcagacccggtcgtacaaacgatggcatccggactgttcgacattaagacaaaggacgaagggccaatgggagagcgagggagagaaagaaatggggagggcgagagaggagaggagggggatagagacaatgggggaatgacgagagggggagggagaggagaagacggaggaggaagaggaggggaggtagaggacgaagtgggcgagagagcggagcgacggaatgtcgtccaccgacggaagaaccgatcggcggtttccgtagcatcaatggcagcactcgcagcaacaagcgcagcactcgtaacaacaaacggagcaatgtcaacaatgatcaatcagcagagaagaagcaacttgggaaggagggacggatga

SEQ ID NO: 67501 - DNA, 1005 bp, Heterodera glycines
atgggtgggaggtccgtgcatgaatttttttatgaattagcgtgataaaaattaatgtctttttattttcaaatttaggacaaacaatgttaaaataatttagattttgatccaaaaatttattttcttataagtttaaatctgatgacatttaacgaaatctgttttgaaattgcaccaaattttcaaaaaccttgagttcggaaactttgaattaacattgaattaccatcaaatatggagcagtttcactggcggaatttaagcctattttatcccagtcaaaatgaccgggcccggtcttagacaattaatcgagaacgggctacccggccaaaaaaaagcgcgttttacaggacgacctgcccggtggtttgtccaaaaaacggaatcgggaacgggcgtcctagtaaaaggccgctgggcgccgggtccttccgctctttcgtgactcttagtaatttcttgcctttttaatgcatttttaaaaaatcactctttcgatccttttttcagggcaaggaatacaaaagaatgttcattcgcaatgcaagcgatgggctcattcccatgagaaaaagggccacggggagggatggcacgcttttaagccggactgtgtgttgactaagccgaccacgcgcagcgaatgccaacggaatcggcattggatggcacgcaattgtcccgaggcgtgtggctgtgaatttgtgcgcgatttgttggacaagtgcaggtgggcaaagggtcaaaaagatgccaactaatttagcatttcattatattttaattttaattttaaatttttagcaaaaatatgcccgaggattataaattggagccaattgatgaatgagaaaagaaggaaataatttcgaatggataagatataaatgaaattttataaatagggctgcaaaaaatatgtacaaaaagtggtccaaatatgtacataaatatgtaagaaaaatccccaaatatgtacaaaaaaaccccaatatgtaa

SEQ ID NO: 67502 - DNA, 427 bp, Heterodera glycines
atgcacgcaatccggcacgttatttttccgactgcttgtttgctgccattgaggcaagtgaatcatattaaaaatttctaattacataaagaaaaaaaaataagtgttaaatttttgatttttgcttaagaaaatatttacgagaattttaaagaaaattttcagaagcaaaaggaacacgaagtgattcggcttgtggtcacactttcggagaatggccaaatgccggcaattggcactgaattccaaaaaaaacacggcctcccattggcatctttcattgtaacagaggcgaaaatggccacaaaaaacacactggccaaattggcaaacgcattcgtcgaaggaaagaattattcaaaatgagtcggggaaagtacggcactgacatggcaaatgccttccttttattcgcgagacaaataaa

SEQ ID NO: 67503 - DNA, 238 bp, Heterodera glycines
atgccatggattacggcaatttcaaggaaaatatttgaagcagaaatggagaaaaaagacgaaggaaaaaaggaggacgaaatggccaaagaaaagtcaaataagctgaagaagaacatgtccaaattggaggagattttgggaaagcaaagagccgaaaagggaaaaaaagaacaaagaaaagaacgaagaaaagtgatgagagaaattgcgaagccgaggccaaagagagacgaag

SEQ ID NO: 67504 - DNA, 306 bp, Heterodera glycines
tcagtcggctttatttatacagttgaacacaacacagagttggtaggaacgatgggattgataaatactttcgaaataaatttaacacgtctttgtgagtgtggggaattggtgtcggcgtaacattaaaaacgatgttcatctactaatgaaagaaggaaaatagtcattacacatgcccgcaaatattttctaagacccctcccccatcttcatctgattctcatatgaagaaaaagggaaaaggttcaatttttgcttgtgttttggtgtgatgtgtcatcgttcgctcttgcccggccgttt

SEQ ID NO: 67505 - DNA, 118 bp, Heterodera glycines
atggtgccgaagcaaggaattcgggcttcaccggacaaggtggaagcaattcaaaaaatgccgacaccggaaaatttgaaagaacttcactcgtttctcggcatggttggctattacg

SEQ ID NO: 67506 - DNA, 744 bp, Heterodera glycines
atgaaagcagactcatctcgtgtgatggaatacattcaaaaattagacaattacgatgcgcctgacatcgcaaacattgccatcacggacaaactgtacgaagaggcatttgctatcttccgcaaatttggggtcaatgcgtcagcaattaaggtaacattttataataatcacatcatcattcgattttatttttaggtgctcattgagaatgttaaaaaccttgacagagcttacgaattcgcggaaaaagtcaacgaaccggcagtgtggtcggctttggccaaagctcagcttaacgaaagcctggtcaaggaagcggtggattcttttgtcaaggccgacgaccccagtgcgttcatcgaagtggcaaagaaatgcaatgaaactgaccattgggaggatttggtgcgctacctgcaaatggcccgcaagaagtcacgggagtcattcatcgagaccgagctgtgctttgcttatgccaagacagggcgtttaactgaattggaggaattcattacggagccaaatcacgcccaaatacaacttgttggagatcgttgtgcggaagatgggatgaacgacgcagcacgaattctgttcagcagcatcagcaacttcgcaaagttggcaaagactcttgtcgaactcggtgacttcccgggggctgttgatgcaggacgcaaagccaattccacaaagacatggaaacaggtgacatatgaattatgtttgctctcttaa

SEQ ID NO: 67507 - DNA, 1006 bp, Heterodera glycines
atgctttttctcctttttatatttgtgttcttaatcataaacaattcaactgacaaaacattgtcagttaatctgtgtaaaaaatgtcgaccaacttttgctgaaatatttggcgaagaatggcaaaatgaaataataattggaggagatgaaaatgaaaatgaaactgatcaaaatgcaaattttcatcaaaatgaatcaacttatcagaacgatcaattagattttcaacaaaaaaaagaaattattcacaaatttcatgcaattagagaaggaattaagaaacggggaaaatattcggcaaaagtttgggttaaaactgagcaaaaaattgcgaaaaaattgggaattagtcgacagaaaatttataaatggaaaaaagaatttggacaatatttaaaaaataataaaaattattatgaaaagaaaaagaaggaatttattgaacgaattgacgagattaaaagaatgtcaaaaaaaggaacacagaagcaatttgcgaaagagttgggcattgatgaaaaaacattaagaaaatggaaaaaggaatttggcattgaaattggcaaaagtaaattttaatttaatttaataattatttatttttaattttttaaggatattcgaatgaagagaaaatgagcaaaatgaatgattatttgaaaatgaagaaagcaaatccgtctttgagtgataaagaaattgctgaatttttaaaaatcactcaacgcaccctactaacatggaaacaaaaattttaataattttacttattttcctgttagcctatgaattattgtgctttatttgtttttccccttttatctgttggcattttccttttaattgttttttttattcataaatgatgtaaaaataagaaaggataaagagctttaattaaaattatcataagaaaatatattaaaattcacagttataatgaggattggcatttgtgctctatttcacgttttctaaaatttattatccacaaaataataaa

SEQ ID NO: 67508 - DNA, 2929 bp, Heterodera glycines
tcaagccaaagtggcacaaaacccaaaagggaggaaggccaaacaacaagcaaggccaatcatcatccgctccggcacaacaatgttggcgatgtggttggacaaatcacagccactgggagtgtaagcataagtcagcaaagtgccaaaaatgttcccaaaatggacatttggaaggccaatgcgacaaggtgcaggaatggagacggagaaacaaattgccaattccaaaaaggaaaattggaaatttacgaattggaacggccatgaaagtgaactccgcttcgcttttcaaaaccgacgtggcggtagatggcaaagacatcaaattcgtactcgacagcggggctgaaataattgtgatcgatgaactatcacatgaagtcatcggcagcccccgactccgcaaatgcaccgaaagtggatgcatgttcgatggaacacaagtcaaattcgtcggaaagggagtcgcaaatttcaaattccgcaatatttgcattaaaagcgaatattatgtggcaaaaaggggatcgctaaatttgctaagtgtgcaaatgatggacgcttttggactcctgaacgaactcaaggccaaaattgatgcgccagtgaatttgtgcagagtcggagacgagacaagaggttttacaaaagctccaaaaccgtcacaaaattcgacagtcaaagcgcacatcgaccatctcaaagcgacatttcccgacattttcaaaaacgaattaggccgttgtatgaaatttaaggcgcatctgactttgaaagcggacgccgcaccggtctacagaaaggctcgcccagtcccatacaacgcgcaagaagcgattgatggagaattagagcgatgggagaaaatgggtgtgattggaaaagtcgaatacaccgaatgggcagctccgattttggcggtgaaaaaggccgacggaagcgcacgcctatgcatagactattcaaccggtctgaacaatgcccttcaagaccaccaacacccactgccgctacctgaggatattttcgcaaccttaaatggaggaaaatatttttcgcaaatcgacctcagggatgcatatctccaaatcgaattggatgatgagtcgagaaaaatctgctcgatttcaacacaccgtggcaactatgaagttaaaagacttccttttggcgtgaagtcagcgccagccatattccaatcggtaatggaccaaatcttggcagaatttgaattcgccacagcttacttggatgatgtgatcatcgtaagccaaagtgtcaaagagcacgctgatcacttgaagaaagttttggaaaaattccaagaatggggattccggatcaaattggaaaagtgttcgtttttccgagaagagatcaaatatctcggacaaatcatcgacagaaacggacggagaccggacccggagaaaatctcagcaattagtaaaatgcccgcacccacagatgtgccatcgctgcgttcatacctcggaatggtgggccactggcagcaattcgtcaaaaacatgcgttttgtacgaaaaccgctagacgatctgctgaagcaggacagcgaatggaagtggagtgaaaaatgcaaacaagcatttgacaaaataaaggaaattttgtcatctgaacttctgctcacgcattacgacccaacaaaggaaatcgtggttgcagcagatgcatccgaactcgggattggagcggtaatctcccacaaatttccagacggaacaataaaggcaattgcacatgcttcatcagctctaacaccggctgagaaaaactattctcaaatcgagaaagaaggattggcactgattttcgccgtgcaaaaattccataaaatgatctatggacgaaaattcacgttgctaaccgaccatagccacttcttgccattttcggaagcaaaaagggagtgcgccagtgcagtgccaaccgacttctccgatggtcgctgatcctcctcgcatacgattttagcattgagtacatcagcaccaatgattttggtcaagccgatgtgctttcaaggctgatcgcaaagggaaaaagcgacgaagaccgagtgattgcatctctccgatcagattcggaaattgacgacattttgatcggatcaattgaagcactgccaattaaatttaaggaaattgtcgcagctgcagaagccgacaaaaccattcaaaaagtcaaggaatttttgacgaatggttggccaaggaacgtccgagacgaaagtgccgaaataaagctttttcatcggatcaaagaacagctttgcatcacgagaaattgcctgatgtacgccgaccgagttgtcatccccgaaaaacttcggcagaaaactcttcattcattccacaagggacacccgggaatcaaaagaatgaagcagttggcgagaaattacgcctattggccaaatatggacgccgacatccaacagatggtagaaaactgccaaccgtgccaaatggaagcaaaggcaccagttaaaagcaaccttcaaccgtggccaaaaccatctgcaccgtggcaaagagtccacatcgactatgccggaccatttttcggcaaggaatatttaatcatcgtcgatgccttttcgaaatacccggaggtattcgaaatggccacaaaatcgacagcggcaacaatagaaaagcttcgatatttgttcagccgacatggcatcccggaaattttagtgtctgacaatggcacccaatttacgagcaacgaatttgccaaatttatggccgtcaacggtgtcaaccacctgttttcagcgccgtataatccaatgtcaaacggccaggccgaacggttcgtggacacgtgtaagagaacgtttaaaaaattgaaaggggagggagccccaagcaaggaaatcatcgaaactttcctg

SEQ ID NO: 67509 - DNA, 543 bp, Heterodera glycines
atgcagttaagccaaagtggcacaaaaccgaaaagggaggaaggccaaacaacaagcaaggccaattatcatccgctccggcacaacaatgttggcgatgtggttggacaaatcacagccactgggagtgtaagcacaagtcagcgaagtgccaaaaatgttcccaaatggacatttggaaggccaatgcgacaaagtgcaggaatggagacggagaaacaatttgccaattccaaaaaggaaaattggaaacttaagttcacttttgaaaaccgctgtaaatgcaccgaaagtggatgcatgttcgatggaacacaacatctcaaaacgacatttcccgacattttcaaaaacgaattgggccgttgtatgaaatttaaggcgcatctgactttgaaagcggacgccgcaccggtctacagaaaggctcgcccagtcccatacaacgcacaagaagcgattgatggagaattggagcgatgggagaaaatgggtgtgattggaaaagtcgaatacaccgaatgggctgctccgattttggcg

SEQ ID NO: 67510 - DNA, 324 bp, Heterodera glycines
atggcacaagccaatattcaacaattgctggacgcaattagtcaactcgtcaccgcacagcagcagcaacaaaacaatcaaccgaatccgaacaataatgttccggtgccggtgctgcctgacatttcggacttcgaaccgaccgacgaaaagggacgaatttcagaatggatcgaaaggttttcttttgcaatggactgttcggcaccaaacgcaactgacgcagtgaaagtaaaggcattaatgaacaaattgtcggaaacggcattcagtgaatattccaaatcatgcctgccgtcaaaagtgaccgacttcgacgaatga

SEQ ID NO: 67511 - DNA, 829 bp, Heterodera glycines
atgggagaaatatcggcgcaaagtcctgcaaaaggagaagaggttggccgaacggactgagtttgagcgacaggcgggagagtctgctggtgagcaaccgatggcactgtaccggacgcccgacttcacctggtcaccggtgcacatccgtctgctgtccgacctgctcgagtccattgagagtgtggtgcaggaatggaacgagtttgtgttctataatagattcattagtccgaaactggggatttccaattaatcagggggggggggggttaattatggcaaattcgaaagcagtggcattttataattgcctaaatctaatcggctttaagttcgagcacaccaattgcggaccatctgaacaacgcggacaaccaggtgttcatcgccaacaccatccatctgctcagccaactcggcgacagtctgacaatggcatgcggtggactgcttccactgttggccgccgcaacggcaccgaatgtaaagttgaaattcatttttaactaatatttacaattacaattgttgtctcttttctctgatagcaatgtttgtttcagagcgaattggaaatcaacgacaccacccagcaagagttggacattgaggacgccgcccgttttattgccacttttgccgaactttccgatggtttttgtgttcgcctcgggcgtcagtctaaacgaagtgcggccaaatttcattcattttgattttcttttaatcactggcaaaatcaaaaaaaacctttccattttcagttggagcaggagaaaacatgccatcgggtggcttttgcgccatcgctgagacttggtactga

SEQ ID NO: 67512 - DNA, 398 bp, Heterodera glycines
atgtttgaatttgtacgaagtgtaagacagcaaatttctggcctttcactatctgacactctcacaaaaaatcgagtgaacaaaatgattgattgatacatacagtatgaacaattttgtcataaatcatttgaattaattaagcaaaaactgttgatgagaagccatgtgaaaaaaagaattgcttgttcggcataagaattgaatgtatgtaatggcattttcgtaaatttttaaaaatttaattttaataaatttacatttttagagctgggtgaaagataaagtgaaacagaagaaactgattgaggacaaaaaaaaattataatatttctaatatgcatttttttttgtattccgattattttaatcataaaaaggcaattttatgtattaaa

SEQ ID NO: 67513 - DNA, 150 bp, Heterodera glycines
atgtccaagccgaacaagtgttgtttgacggtagttgttgtcgtggttgtcggagttgtcgtggttgtcggagttgtcgtggttgtgggagttgtcgtagtcgtggttgtcgaagtcgtcgtcgtggttgtagttgtcggagtcgtcgtc

SEQ ID NO: 67514 - DNA, 316 bp, Heterodera glycines
taattaaatccattccttcgggggaccgtgccgggtgccgcggggtaagcagtgctggttcgtttcatcacggcaccgaaccttttggctagtcagcaatcgttgcttaacttgccagatcggacgggtgcgcatgattccactgttccaagcaccccaccaaaagcaaaacgatataaccaaaatataaggaaaaattttttaaaacattttttctccatcttcctttttgatactaaagcatcagagtgctaaaattgacttgtaaataaaatttggtgcgctttagagcattttctgaaaaaatatttatgaa

SEQ ID NO: 67515 - DNA, 403 bp, Heterodera glycines
caaaacgctcttcgaataaccctaatctctgtccaacaagcaattcgatgtctgacatctacggcttcatcaacaatatctcagatcgtatatcacgacgcgtacgtcgcaagcgcccaacggagtctggggtttctggtgaggaccgagtcactttttcgaaagttcattttctttcggttttcaggtgtcagcggcgcaccgccggagactcggaaggacgacaaggcgaagggcggcggctgctccaaaaagtgcgcttgcatcatcgtgtgcagcattctcacgctcattgtgctcgtcatcggtggactcgtcctggccgctgtcctgacgcctgaaacattcaaaaatgctcctctgttgagcctcatcgcgggcaaaaagaatgggggcgcggatg

SEQ ID NO: 67516 - DNA, 1745 bp, Heterodera glycines; identical to SEQ ID NO: 8271
  unsure (1)..(1745): unsure at all n locations

SEQ ID NO: 67517 - DNA, 1729 bp, Heterodera glycines
cttcttctcgccattatggagtcgcggcacgactcggaaaatgcggacagagtgttgcgaaacatggcacacattaacgggggcgggaagcagctgctgaaagccattgcacaagcttattgcatgccgaacacgcaaaacttcgaattgtttcgcatgcgacagaaattgctgtgcaacgaacaaagtgggagggagaagaacgacccaaaagcgaaggaggggcacaaaagcggcacattttggcggacaattgccacaaaagtgccatttgtcggtccaaaatttgccgaaaagccccaacagcaaaatcagcaacaaatcgcctctccgttatccaagccgacgaatttggcctttggcactttggccgaccctcgcgaagtgagcagaaaattcaagcacaaaaaattggatttgaaattgtcaggttggacacaacatttatattttggcacaccaattggcacggcatagcgccgaattggatgtaatgctaaggccggagaatgccaaggacgaaaacacacgcgaagcattggcatattatcgaacgcacacgggccaaattgaggtgaaaatgagaaattcagcagcaaaatgagtgacgggccaacctacaatcagtgccactcaaagaataaaaatctttggcaaaatgtctttggtaaatttcaaagatcgttcgagcggaccgcaaaatggagcgcgtcatctttccgattcacaacatttgcgcctatctgacctccgagaccaaagagagtgtattcataaacacggaaaaggacgcgcaggggtcgaaagtgacggactttttcgaacgatggccctccctttacgaggaaatgaaatggcagcgcaaattgcagggtgattagtgccactctgatcagtgatcacccatcattgtctcttccgatcagatcgcctttggctgagtgcatgcacaaagcgtttgcccctgtggggccgaatgggctttttcatggccgttctgatcaatctgatcctcgccgttgcatatcccttcgatcatgaggactcatcagcagctcgtcctcgtatgttgtgatccttttgatcgtttccccacctctgatcacttcctcccgctttagtcgcactttctcccagcaatcccttcctttacatgtcatttgctgccgctctgttccacctctattcgtcctcctcctcctcgtcctcctcttccaactgctggtccctccctcgctcccccccccccactttgtgccaccctttcccctcccctcaggcaatgtcttggcctttccctatcctcccaactcggcattttcgctctgatggttagctccacgctgttgctgatcgccctgctcggtctcctcccctccctctatccccccccccgaaatgaaaatttttaaaaattttccagcaaataatggaaattttttcgaattcccccccccccaaacgaaaatttaataggcaattttcgtaacaaataacactctaatttcaaaaattttcccggcgacgcctatcggcaccgccggacctccactttccactatttttacaagttttgtgccttaaaacggtcaaaattgggtcatttttagtgaaaaagtgcagtttttaatgaaaaaaagttattggttaaatagcaaaaaaaaaaaaaaaaaaggtcttcaggtcgggtccccccccccccggaaaatgtttctagatacgcccctgc

SEQ ID NO: 67518 - DNA, 855 bp, Heterodera glycines
atggttagctccacgctgttgctgatcgccctgctcggtctcctcccctccctctatcttcttggcattttccaggtcattatcgcaattggtccccaaaaatggttgaatttcttcggttcagttggccaacaaatgtgtccatttggccagttatgccggcaatcggggaattgttgagcgcaattggcacgaccttctgacggactccacaatgctttaccatggcggctatttgctgtgctgtttgttcggtttggtcgtccacccgttcatttacgctcttctcgtaataactaattagttaattaatcattgtccaatttccctcttgtttttcagctgtttgacgtcgtggccagcgaggacactcttcgaaatgtcattcgatcggtgacgcgcaattggcagtccatcattctgaccggcttgctggccctgatcctggtctaccacttctccatcgttggctatttgttcttccaacgcggtgccctccaaaatttgccaattgaatttcttcaatttattccttcagactttcgcttggaagtgcacaaactcagtgcacagcgtgcagaggaggggcaaaagccatgtccaaatgatttgccgtgcgaatttcgttttcattgcgacaaaaaaagtgacggcgaaaaatgcgacggaagggaaaaatggcggagaacggcggaaaaagaaaaggaggaggaggaagaagaagaggagctgaagattccctcctgcgacaccctgctaatgtgcattttgacaacacttaattggggtgaccatttgggaggggggaaaactcattcattaaatggtcgtaaattcattcaaatgagcatttag

SEQ ID NO: 67519 - DNA, 76 bp, Heterodera glycines; identical to SEQ ID NO: 53797

SEQ ID NO: 67520 - DNA, 356 bp, Heterodera glycines
atgatgagtcattttgagatgatcggaacagataatcaaatgtttccgcaaaatgtgcgacttaatccgggcttggcgctctgctcttccgcccctttcggaggtgccattcattgggtgccgaattgccttttcttcctttctaagggcacatcggcacatcgcttccctccgccgtcactgtctctcccgccgcagtcgcatcggtcggtggcggtgagctccaacagtttgcaattccgcgcatatcgcaacagtcgcaagctcagcccgtgcaggggttgcaatttgcattgggacagtcggcgatatttggcggagaatcggcgagagacggtggaggacagcaaacgcag

SEQ ID NO: 67521 - DNA, 3089 bp, Heterodera glycines
atgtcaagcttattgtcggaagtttttttgaacgaattaataattgttatggtcggaatttgcattcttgtgctttcagcactgtgtttggtggtcaatttggcggtcattcgggttcgaattataaaattaattttatttttgcattttccttaaataaaatttatataaattattttttaaaataatttctcaagataatcatcgtggacaatgagctgttccggttgagctgctacaagtttatgttggcactttgcttcgccgactgtgccctttcgtgcgtccatttcgtcaccggcttcttcacaatttctccaaacactttccatttagggatttgccaggcaattttttaaacaaattttaaaagctgtttaaaagaaataaataaatttaaaaatttttttggcgctttgttcagccgcttggcgcaattgccacgccgagttacgtattttacacaattgtgactattattttggcaattaatcgtttggttgtgttgacgtccgatcggttggataatttgctattctcaccaatttgcataaaggtaaaacaatttaaaggtaattatatttaaaatttttgtattgattatttttaatcatttaattacccattggctttagctgtggtttctgttgccggctttggtctcgcttagttttgcgttggcactttcctccccgtgggccgcaattgcctattggcccgaccaattttcgtgggcttacgacgacagtcggccgctgagccattgggtgcaaattgtggaggaaatcatcgaattgggcggcattccgacggccggcctcatttacgccgcaattttcttcacaattctctacaaggtggcccaattataaagttgatcaaggagagtaattagcattactttcttaatgcattaattagtcaccattatccccgaaattatttttaattaaaggatgttggttaaattaattggtaaaccgatcaactttttctctcggatttattcattccctttcactctcagtttccctctgctatcagttgcaacggcttccgatcattcagttcaatcccttgccatcatttgccttttctcatcaattttaatcgttaccgatcacttactttcttctgaccaactatttcaatcccttccgatcactttccattttgctcagtttctgtcttttcggatggatgttccgtcttctaatctaccgatcactttccgtcttctgatcagttccaatgcttccaatcacttgccgttccttcagatcactttctttcttttgtattctcaatcccttatctttagacacttcaattcttctgatcagtttaaattcatttcaatccagccgatcatttccctcttgaataattttaatcattaccgatcatccgtcttctgattagtttcgatcacttcctttccctgctaagttcctccttcttaagcggatcaatgggctcgttttgcgccagaccggcacagttgctgaagtgaaagtgctcatccaagcgtttgtcatcaccatttattgcaccgttctcaactatttttggcacaactctgaagtgatcttttaattccttttttttgttttttatttattattttattttatgattttcattttcagtggcttttgccaaacacaaaaatggcaaaatgtgcgctgaatttcatgtggattgccaacggggcggtcaatcccatcatttattttgccgtcaacgcgtaagaattgtccctacttttttattatacattttttattcgcaaaaatggaaataatttaattaatacttttttaatttagtgcaattcgtcagcgaattagcgcgtcttttggcgtttcgtctcccgcaaacactccgcaaatgttcccccatatttccactactgttcttccaccgcagcatcgtctgtcggtgccatttccaatgcaaaataattttttgtctacgaccaatttgccaagacgagcttcacggaattaaaggcttatataaatataacgatcatttaaaatagggttcggaccccgtgggcgggggtggcttttcacgggggcgggggtcagagtcgcggagacgggggcacgaaaattccgcccccgctggggcgggggtttgatttgaattaattccaaaaaattcacaaaaaattaatttttatgaatgtgtgttggctccacattcctttagtcaatgtttcgcctcgattcaattcctttggcataaattacacagattttgtctaaaaatgaccaaatttagggattttgggcgaattttttaagaaaaaataggttttggagggccggcgtgccgatatgggcgaattttaggcaatcgtaattaatttctaacagctattcaccaaaaattatatgttctttgagcgctcattgattagatcgacgattttgggaggggtgagagcggcaatgttgttaaagctatgctcccaagcagctgatcaccgatcgcaacagagaagggcggaattgctaaaaaatcttccttaatttgtttccaaattcatttaatagatttttcggtgattttttggacgggggatctttgctagcaaataaaggttttttgtattttgctcatttatttgatcgctaattttgcgaggggcggtgggagcgaaaggcaatgctgctaaagcaatcgccccaagcagctgatcaccgatcggaacggagaaggtcaccatttggacgtacaaaaaatggctaataaaatagagtgtaatgcgatcattttgtcattttcaccccgggattgagccaattttcgccaattttattactatgcgacttccttattaaattctatttaatttaattatttttaaattattttaattcattttaaatttatacttattttaatttaattcaactattttttactgagaataatattttattatttcaggtccaaaatgccttggttccggcatagcgcaaggcaaggtcgccgtcgccaataacaacaacaacagcattagggatcggtgaacattctttttttggatttaaaaatttctgtgtaaatttaataaa

SEQ ID NO: 67522 - DNA, 627 bp, Heterodera glycines
atgtcttcttttgtgtcccttcttctgctgatcggactaattccgctgcatttaacccatggaaataatgtaaatatttaaaaatatttttatcgaataaacgtttgctttttaaaatttaattaattatagcgaatccgaagggatgcgacggaagaagaagcggagaacaaaagtgcagcaaacaattcgaccgaagaggaaacaagtaaaatgcaacacttaattaatttaattattcatttgattttctaattttcaaatttatccttttctttccgatgaacttttgaccaccacgacggaagtgccgaactcgaccactgccgaagacggcacggacttgtttgatcggatgctcctttcgggaatggacccgtcactggggccgatggaggaatgaaaattggaggatcaatttggagaacccattttggcatttcactttttgtaaaaatttgcatttttataaaattgaactttttgttccaagtctcatttgtttaattctgacaaaatgacgaatttacataattgccatttggcggtttcccgaaggattcgatctccccaaaaatctgggcgcatcggttcatggggactgcccgaagaaccaaaaaaaataaa

SEQ ID NO: 67523 - DNA, 447 bp, Heterodera glycines
atgtgcagcactgagcggtataccacagctccaacgtatggaagcaccccaaaagcatggctcgtgaggcagctgccccgtaatgttgggcagcgtccacaagtcagctcgaacgacctgtgcccgtcagcggacgggggcatttggtggtgccaacgctagcccaacaggacagcaggtaggtggtgaataggaatcacttgggtaatgatccagcagcaggttcacctacagctaccttgttacgacttttgcccggttcaagccactgcgattaaatcggttccagtctgcataccgaccgaagccggaacactaaccgtccccgaatttctcgaaatggctcagtcccgggcagcgacgggcggtgtgtacaaagggcagggacgtattcagagcgagttgatgactcgcccctacaaggaattcctcgttcacggacaataa

SEQ ID NO: 67524 - DNA, 580 bp, Heterodera glycines
  unsure (1)..(580): unsure at all n locations
attgacggaagggcaccaccaggagtggagcctgcggcttaatttgactcaacacnggggaaactcacccggcccggacaccgtaaggattgacagattgatagctttttcatgattcggtggatggtggtgcatggccgttcttagttcgtggagcgatttgtctggtttattccgataacgagcgagactctagcctactaaatagttggctcattgcttctgtgggcacaacttcttagagggattttcggtgttcagccgcacgaaattgagcaataacaggtctgtgatgcccttagatgtccggggctgcacgcgcgctacactggcaaaatcagcgtgcttgtccttccccgaaaggggttggtaaaccggtgaaaatttgccgtgattgggatcggacattgcaattattgtccgtgaacgaggaattccttgtaggggcgagtcatcaactcgctctgaatacgtccctgccctttgtacacaccgcccgtcgctgcccgggactgagccatttcgagaaattcggggacggttagtgttccggcttcggtcggtatgcagactggaaccg

SEQ ID NO: 67525 - DNA, 381 bp, Heterodera glycines
atgagtctgaatgggtcgtcacgagagaacgttacaaatacgatgagcaattcaatcttctacagcccatcgatgggaaaatatccggtattttggatgcgatgcttaatgtatcgaacttcatcccattaaggacgcgttgccaaggagcatatgctaaagtcaaaactcccaaattctgtgctcggaaagatttggaaattgtccgacgtcgacaaagacggacatttggactcggatgaatttgccctgtccaactatttgatcaatttaaaactcgaaggccacgaactccccacagagctgccaaaacatttggtgcctccctcaaagaaagcgatggctggcgatgcgtcgtcttccgacaaccaaatttaccct

SEQ ID NO: 67526 - DNA, 211 bp, Heterodera glycines
atgccgtcgaattttattaagtatcagagttttttaagtggaaataaaaatgaagtattgacaattaaagaattgattgattgccgtttaaaagtttgtgaaaaaaaatattataccattaaggcggatataaaagatttaaaaataaataaatacaaggtttgattaattaaaaattaaacaaataaaattttttcaggcatgttggtaa

SEQ ID NO: 67527 - DNA, 427 bp, Heterodera glycines
atgtcacatgaaaatgctggaaatagtgtattagaatttgtatcagctggcagtaagcaatattcaattaagtataggaatgacaagaatggtcaaatatggtataaaacgaaaattcgcggtaaaatatgttatgttttcttgtttaattgtgctttctttagggataacttttaataagaagaaccaaattgatcatgatgaatttaaaaacatgattataaattatgaaaataataaaaaattaattttcgattatgacaagtttggaccaacaagagaaagttatattttatcaagaaatttacgaaaagaatataaacccattcaaaaaaaaggcattattggaaacaattttgaaattattccatttggtttatggtgaactaagtataacggtacgttattaaaaaataatagtaataaa

SEQ ID NO: 67528 - DNA, 507 bp, Heterodera glycines
atgtgccggctgcgctggtggcccaacttcctctctattcctgcattgcaattgtggtgagttgagtgattttgatcagtggcaatttgaatgacatcattaatcattcttcccctctttcttttccttagactcatcacggccacttgaactctggccattactgctcgtttgtgcgtgacggcttcactgacaattgggttttctgcaacgacgacaaaactctcgtaagaaaacaatttcgaatcaattaatgccggcttttcatccattctttttaggccactgaaagctgcaatgtggacacgcgaaatgcctacattgtgttctaccaacgcgcaaattcagtcgctgccaaatgagatgaaatgagaggataaacattgttgtatatatgtgtataattgttgttgtatatgtatgtatgcgtatattatcgtatgtgtatattcatttgtatgtatgttcattagtattaatgatgtgttgatgaattaaaaaaataaa

SEQ ID NO: 67529 - DNA, 393 bp, Heterodera glycines
atggatgaaaagccggcattaattgattcgaaattgttttcttacgagagttttgtcgtcgttgcagaaaacccaattgtcagtgaagccgtcacgcacaaacgagcagtaatggccagagttcaagtggccgtgatgagtctaaggaaaagaaagaggggaagaatgattaatgatgtcattcaaattgccactgatcaaaatcactcaactcaccacaattgcaatgcaggaatagagaggaagttgggccaccagcgcagccggcacatcgggcgaaaagtatttgctcaggctgaagttgtccaacgggaacgaaacgggcacgtgctgtttgatgtattggcgctcaaatggttcatagatgaagcgcttgaagcaaatgatctgtga

SEQ ID NO: 67530 - DNA, 1649 bp, Heterodera glycines
atgctcaagaaggtgcgctatatgccgccaacggattacgaatgggttccggtaaggagaatgttgaaaaatttgtgcctgtttgagtaccgaggttgggcaatgggggatgcctattttgcgggtccggaattacataaggtaccattttttgtggattttagggccttttaaccgacggttaatccagcttttaagataaatttttggcactattcaaattaacacgaaaacaaaacaaaaaaaaacacgaccaaaaaataatttgacacattttaaagtaccataactttttctagcagcacccaaattaaacattgttgggtccatccgatagccacaagaattcctctattagcctaaaaattttaaaattaaaaaaaaattatgcccacaaaatttcaaaaaaaaaaaaaaattctttgaacatttttgaccataactatttgaaactttttaaaattgccaaattattttttggttgtgtctttttttatttttgtaaaaactgtaataaacccaaatttttgcaaatattttttcacatttatatttggcaattaaaccaaaaccgatgtggggttttctgccagaatttgtcaaaaaagagttaattttgatgaacttttggtggaacatttggcacatttaatgactaattactttaattgtggacaaaaaaattttaatgtttaaaaaatttgctattaaaaatggactatcccctgaaaagtccaccatttaaacaaatgataaaaaaattaaacattttgttctgctctttaaaatttccatttttcaattaaaataaacaaaacaaaaattttcatcaaatatttagcccaatggccaacaacagttagcgctgactgatggttctgccgtggcgatggaccacctccaatgggagaccatccgggagcgggtgatcaaggcgggcactgtgccaagactggtggacagtctgatcgacgaggacggacacatggacttgaaacaggttttttggaaatgcggtggaatgttgagggtttatacaaaacattggccctgatttaaattggggtccatttttggttaaattttgtttctggggttttttgaggttcgctgaccacaaatccgacatccactttggcgccaattctgatgcttaacccgaactaactcgaacaaaatttcgattttttttgttttcgaaatcgggttaagcatcaagaattttgctgaaatggatgatttcctgttttttagccgaaaatatttgctattctggggtcttatattaaaaaatttaaatgagtattatccaacaaaaaaatttttgaagcggaaattttaatcatttaacaatttttcgcaaattacatcaatatcgccatctctcaacataacaaatgctggcaattcaattttgactgccaattcataaaaacgaattttaatttttgtcggagtcaaaaattaaaaaaaatttccctccccccttatttagttcaaacgttttcttcgccatttgtcgcgccttttccaccgtggccaaagtgttccgactggtcaccgatttgtacacaaaaagtgattgggcaccggccgacgatcaggagaaaattcggcggtatttttgcggaaaatatggaatttgttta

SEQ ID NO: 67531 - DNA, 1862 bp, Heterodera glycines
gaaaaggaacgggaaaaggaacgggattttagaatttgggaaaattatgaaaaggaacgggaaaaggaacgggattttcggttttgggaaattattaaagggaaagggaaaaggaacgggattttcgattttggaaaattattaaagggaaagggaaaaggaacgggaaaaggaacgggattttaaaatttgggaaaattatgaaaatgaacgggaaaaggaacgggattttcgattttgggaaattattaaagggaaagggaaaaggaacgggattttagaatttgggaaaattatgaaaaggaacgggattttggattttgggaaattatgaaaaggaacgggaaaaggaacgggattttagaatttgggaaaattatgaaaaggaacgaaaaaggaacgggattttcgattttgggaaattatgaaaaggaacgggaaaaggaacgggattttagaatttgggaaaattatgaaaaggaacgggaaaaggaacgggattttagaatttgggaaaattatgaaaaggaacgggaaaaggaacgggattttggattttgggaaaattatgaaaaggaacgggaaaaggaacgggattttcgattttgggaaattattaaagggaaagggaaaaggaacgggaaaaggaacgggatttttgaatttgggaaagttatgaaaagtaaaggaaaaggaataggattttcgattttgggaaattattaaagggaatgggaaaaggaacgggaaaaggaacgggattttagaatttgggaaaattatgaaaaggaacgggaaaaggaacgggattttcgattttgggaaattattaaagggaaagggaaaaggaacgggaaaaggaaagggattttagaatttgagaaaattatgaaaagtaaaggaaaaggaataggattttagaattttttaaaattattaaaaggaacggaaaaaggaacgggattttagcatttggtaaatttttgaaaggaaaaggaacgggattttagaatttgggaaaaatatgaaaaggaacgggaaaaggaacgggattttcgattttgggaaattatgaaaaggaacgggaaaaggaacgggattttagaatttgggaaattatgaaaaggaacgggaaaaggaacgggattttcgattttgggaaattattaaagggaaagggaaaaggaacgggaaaaggaacgggatttttgaatttgggaaagttatgaaaaggaacgggaaaaggaacgggattttcgattttgggaaattattaaagggaaagggaaaaggaacgggaaaaggaacggtgattttagcaattcgaaaaattatgaaaagggaagtgaaaaggaatggattttagaatttgggaaaattatgaaagggaaaggaaaaggaatgagaggaaaaggagtttagaatttggtaaaattatgaatgggaaagggaatgggaagagggaacgggaaaaggaataggattttagaatttgggaaaattagaaatgggaaagagaaaaggaattggaggaatggggttttagaatttgggaaattggtaaaaggaataggattttagaatttggtttaaattggaaaggaaaagttaaaaggaatgggattttaggatttgggaaaattatgaaaggaaaagtgaagaatgggattttagagtttgggaattttaggaattgaaaaggaaaaggaaaagaaaaatgaaaaggagaaggaaaagaaaaagggaaaggaaacggcaaaggaaaaaggaaagagaacgggaaatggagagggaaagggaaagggaaaatgaaaatggagaaggaaaaaaaggaaagagaaagggaaagggagagggagagt

SEQ ID NO: 67532 - DNA, 252 bp, Heterodera glycines
atgttagcgtcgcccggtgcccaaacccaaattttgttgtggggagaaaggcattttttttgcacgtgtaagttacttgtataaataaattttcaattcaattttgtttggaactcacatcattgacaccaatggcacatattctggacaaataaaaagggaaatttccgcaattgtacagacgccacaggtggaagtgacggacaacacgtggcaaaggcaaatgctgacaaaaaatggggcaatttttaa

SEQ ID NO: 67533 - DNA, 1154 bp, Heterodera glycines
atggtttcagctaaattgccttccatcggtcgctattcctttgccatcaccggatacgacctcaaccaaccaacgaaaacaacaaaagcaacaacaaccggggttagtttctcacaaaatttgttcccttgagctaaattaattgcaatttttcaatttcctcagcctcaatggcctgctgcgcactgcacaagttggacgaggcggcacacccgtgtctgagcatgatcaactacgttgttcgatggcactgaacgacggcacagaaaaccaaattggttggcaaaaaagcacttacacacaaacaaacacattgttaccctttttgcatgctcataattaaacaaacatgcttttaaataaattgctgcacccaaatcaacggcttttgataaattgcattactacaccaaatatacacttacacatttttaaattatactgccttttaatttactctaaacaatgaaacatttataaaatatggcattttcagactgttacaaaagttataagtaaaacaaatatacagtttagtccaacaactcttaaagcaacaaacaaatgcgaatttttatgcacaaaatactgttttttacaaacaaattctctatcataaacgcatttctattatttttttaaaaaattgatacattcacattgttttttgtactatgagtgaattttgatattaaaattttgaaaaaaataagaaaatgccatatacgaatactttttgggcgatactatagatggtggatggtcaacctttttgaaaaaaatgttttgttttagaaagtcaagaaaaattgttatggagtttttttgggtaaggaacataaatcaaatattcattttgaacaatttcgaatgccggacccgcattttgaacaacatttcaaaaacaaaactttttaaatttattatttttgttagcaaaattgatcaaaatttgtgttccctgacccagaaaactcccaataacatattttcacgaacttttgagaacaaaaaaaattataaaaagattgcccaaacaccatcaatagtattactcttttttgtttattaaggcacgtgttaagggctacaaaacggttatttgacttaaatttacagccctactacaaatataaaaatatttttttttacaa

SEQ ID NO: 67534 - DNA, 478 bp, Heterodera glycines
atggacagcgatgtgctgggactggtcgggccgtgcctgctcatggaaagtgcccagggcgtggccgatttcgtgggcgattatgccgaccaaatcacagccgggcgtagcgatggaaatgccctgggcaagtgccataattcattgcgcaaatcgttccctagctgctctgctcgatcactcacttgcgttccgcccgccctcccgacaaaactcgagcatccgccgccgtcaaaaaattcgatccgatcggtgtccggcccgccctcaatgaagcgaaggcacgttgcgttctgccaaatggccaatgcaagccgtattttctgccgtgtctgaagtgagaaggccgaccatttggccttgcccattaattgccgtgcccaccttttccggcacattttccgccatttcgtaattgatcggtcgccgtcggtcccatcgtttgtagaagggttccaaaagcaaagcaaagattaaa

SEQ ID NO: 67535 - DNA, 3870 bp, Heterodera glycines
ttttcttttccatgtccaccattgcatttctgattatcttcagccttttgctattcaatcgttcagtcgaagaacgaacgcgaaaggccagcaaaagcgcagttgaacaaatcaaaaagattttcaacgaaaaagcgacgcaacggtaaaaaagaagagaaaaggaaaaggaaaagcccactcgcctctattgaaatcggcagaatcattcgctttcagtgcctttgcacagaatgacgcggcactgatggcggatgagccccggcggggatttgtgccgagaagggacccaacggcaagaaggcaccacgacgaattggcggtgaacggagaggacggcgactattttgagggcgatttggaattggcggaatggcaggcggagagactgtggcacaaattgggagaagcgaaagcgaacgcaaaactgaagaggaggaggaggaagaagagaaaaatcgcaaaagtgaatgggaaaaggggaaagaataacgttttccaaaatttaataatggggaaattgaaatggaaaatccccgggaaaagtcaaaacgaaacgacgagcagagaatgggacggcatttcgctttaagtgatggcacagacaagagattgggtctgaatttccatgcttctcatcttggcccctttctcggctccatttaatctttgctttgcttttggaacccttctacaaacgatgggaccgacggcgaccgatcaattacgaaatggcggaaaatgtgccggaaaaggtgggcacggcaattaatgggcaaggccaaatggtcggccttctcacttcagacacggcagaaaatacggcttgcattggccatttggcagaacgcaacgtgccttcgcttcattgagggcgggccggacaccgatcggatcgaattttttgacggcggcggatgctcgagttttgtcgggagggcgggcggaacgcaagtgagtgatcgagcagagcagctagggaacgatttgcgcaatgaattatggcacttgcccagggcatttccatcgctacgcccggctgtgatttggtcggcataatcgcccacgaaatcggccacgccctgggcactttccatgagcaggcacggcccgaccagtcccagcacatcgctgtccattacagcaatatcccggccatccgatggaacaatttccaaccaattggcgacgaccaagcgcaaactttgggtctgccatatgacgcgggtcagtaagtgttcagtggcccgaccagcagaaggtcacttggaagtggggaaagaaacggcaccaccaaattcaattggccattcttggcacatttcctctctctctctctctctctttctcccatggcttacttcgtttggccattggcatggcatgggcaaaggcatttgttaaggctcagtgatgcattacggcccttttggctttgctgccgaccaatttaggccaacgatttcgacgttggacaaacattggttagtttttgattggcttatgctttctttgcctttgctttgtcaactttgggtcactctttcgttaattaaattcgattttctaattgcttttttgcccaattgtctgatcactgatcgattgtctgtcccttcctctctttcctttcttttccttcttttccccctttttggcagtttaccatcggtcagcgtgaggcgccttctttcctggacatcgaagcggtttctgtttttctcctttggaagcagcaattaaacccccggggcaggggacagtcccaggggaaaagcaaagcataaaaggggcccccgaagggataaaagcttaatcacctctcacagattaatcgtgcctacggctgcactggtcagtgcccaaccgatctgtggtgtttgcatggcggttacacggaccccaacgactgttcgcgctgcgtttgtccgatcggatttggcggcacattttgcggggaagtgcagccgtctccatgtggcggagtgatcaaagtatggggaggctgatcaaacggataaaggaagtcccaatcactcgttaaaatcattctcatcatggtcatgacaaataatcagttttcattccgatcggccactggtcaaattttgttcaaccattttagctccattttttgtaccgatcattcaccccattgattgctgcttttcattgatcaccccccacaggcttctcccatggttcaaaccgtcgcttctcccgacttcccccgcaattttccgtccgatttgttctgtgtttggctttttcgttcgcctccccagggccaccttttcattgaatttgtcgaggagtccttcggttatccatgcgaagatacttgtgacaaggctttcgtggaactgaaaatgggcccggactttcgtgttacgggttacaggttgaaaagttggaaaaattttgcttttttacttttaatttttcaattcgaccgttagattttgctgttcttcgcctccgttaatgacttttcaatcggttggcgaagaagcagtgatcattcactatggaggaacccaaacggagcaacgcgcgggtttcaggcaaggaaaaccaatcgattgggcttgtacagacggatcagcggtgctgatcagcgattttgatcagattgcgctttttcaatgatctatgcttttgatcactaacattgaccggtgtttaggttctgatcagaaatatattagcaagaacacagtcaaatatcagtcattcagtcaaaagaatcaattattggaagtgataattgccacgacccaagcttagggcacgcgtgtggagtgaaaagaaatggtcggtaacaacagaggaggaagaacaaatcagcaccgaaacaaaatggggaaatgcagtgaatggagccgaagtcagtggcacagaaagggcgagcacaacagaagcgacaatggcacagacaaacggagacggacagaacacgacgacgcgtgagaagccaatgccaacttcgcagccacccccagaagtgccaatgacatcttcgtcctcctccttcccttccgttatgccaatgccattctcttcctcctccccctccgttatgccaaggccattctcttcctcctccccctccgttatgccaatgccattctcttcctcctccccctccgttatgccaatgccattctcttcctcctccccctccgttatgccaatgccattctcctcctcctccccctccgttatgccaatgccattctcttcctcctccccctccgttatgccaatgccattctcttcctcctccccctccgttatgccaatgccattctcttcctcttccccaccgcctcctccttcctctaatgagtgctctttatgcctacaatggtccgaatggaatgactgttcccaaatgtgcggcggatgtggtcgtaagacgcgtcgtcggcactgtccttccgctgtttcatgccaaagggaggaaaagcggatttgcaatcgaatggcatgccccgaaggcaccaattttctgttcaataacggcgagttccacctgttgtggaagggctgctgtgtagggctgttcctgaacaacagcacggcaaagggtgatgggtgagtggggggggggggggggaggacaaacaaacgatggccggcgaacgagccgaaggatccgccaaaactcagcaaaatctcactgccaatcatttcatagtttcatggactaatattcccctctttttgagttcgtccgtccgcggagagtgcggtccgttggaaaacagtgaaaacccttttttacgaattatttcgtctctgctgagttcgcacgacggacaaaaagaaaagacgaaaagaaatggggggaaaagcaaaagtggtgaa

SEQ ID NO: 67536 - DNA, 1194 bp, Heterodera glycines
atggagcgaaagaagtcgacgaagttggcgaatgtgagtttttccctaatgtcactgcattttgtccaacatattcctttttcccacaggtaaaactgccaacactttgacggattttctccccgaatttggctccgtttttcccgatggcactacaaaaattgcctcagggctccatcaaatgtttggccaattctatcaacagtcttccaacttatttccctcgtctgccgaagacaaaacatctcaaaatgaaaaggcaacagaaaatgagcgtttgtccgtgggaggaacttcttcttcccgagaaaacatttgccaaagatgggagcgaagggattcaccagcaaaaatggtctttctaaaaggggttttatgtgtattttaaaaatgttttcagtctcttccgctgaccgaattcagctgttccgtggagggcgacgaatttgcacatttggcggaccaatttgccaatggtaaaatggaggaggaaaaggggagggaaaaagtgcgagtggagcggaagagaatcgttgtacgacgcaaaaagctgaaaaacaatggtcgacggagaagggaccgcgaagaggaaaagggggaactaaagtgggaccaaaaaaaaacaaaaaaacaaaaacaatgctttaagaggaaaacgacggaagccatcggtggatgaagaaaaacggcacgaagaaagagacaacgaggacaacgcgacactgacagattgggaacagcagaggacgaccaattggacaacgccggagggcgtggggacggagggaaggggcggccgatggacgccgggggcagtgcccgacgagcgacagcagcagattctggaaggttggaaggagaagcgagaaagtctgctgccttagttcatgtgaccctttgtccgatttagtgttgggaattgtgccaaaatcgatggcatcttccgaaaacggctctaaagaaatgctaatacttcaaaaactgcaaaaccaaccaatgaaagacgacaatgaattggaggagggaccaaatggaagtcaaatgagtaaaaacgtaaatgaaaggacaaaggacggcgaaattgacagtgaaccattggccgatttgaaagtgcacaatgccaatgggtactctttcccgccggcaaaccgtggacaatttgtggaggacgaggtgggcagcagttactcgtaa

SEQ ID NO: 67537 - DNA, 365 bp, Heterodera glycines
atgtcctcttccccctcaatgccatcaccacacgaactgatcagacaattgatgccgatgagcaatgatctccaaaacagactccagcagcagaacggcacggccattgctcaaatgccgccgaacggattaaatgtttgtttgaataaaaattcgaaaaaacaaaattcaaaaatcaaaaaaaaatttagattttctccgcccctcaaaagccctttctgatgccgccgcctcttctgccgattggcccaatgcaaagtttggcacacctccaatttctcggccttttggccaaggcccaacttttggcacaatgccaaacggcggcacagcaaagcgtgccgggcataaataaggcaaaaata

SEQ ID NO: 67538 - DNA, 367 bp, Heterodera glycines
atggagactggtatattatttttcaacctcctcagaagggggtatataattggaggctggcagattaatggagactggcatataaaaagagtatatacggtggtaagtaaggagaagaagagcacagctgaataggaaggcaataatttcaattggaaattgcccaattttttaaaaagatattaaatatttttaacaaaaatttgcattggatatggggatggtgaaattatttaaatttttcccgatttaaaagattaaactattattttaaatattttcagcaaatttcaatttctattattaaaattattttaatatttttcagcaatattttaatttaggttttcacagctgtaaaaataaa

SEQ ID NO: 67539 - DNA, 651 bp, Heterodera glycines
cccttcaagtgcaagtactgtaaccgtaccagcaagtggaaggccgacctgatccggcacgttgcgagtaagtgccgagatttgaatgtttgggaaatcaaatccatactcccgaattcgagactgatcacaagaaccaagtttcagcagagatcttatatttgaaatttgccaattatgaaaatgaatagcaaagggacccatttttggtccgaaaatttttggcttgaagaaccctgttggattacaaaagtttttgaaaataacatcctaggaatattattttagaagagaatgatcccaaattatcttaaaaaacaatgcgccactcttcggcgccaaaattgcggtgcccgatttagctatcctgctaaataccattttatcccaataatttgtttgattcaaaaagtgccaaaaaaaatttcaaaattttcagaaacccacggcattcgtgtggtgtccaagtacagtcggagcaaagcgttggagctggacaagcagcaacagaagcaattgttgatggtggaagaagcggtagaggaggaggaggaggacggcggaagagcttttgattcatcttcgtcatgctgtgacagtgaaacgccgacaaaggacgagaacaacaatcaaaataaggcaaaattttaa

SEQ ID NO: 67540 - DNA, 997 bp, Heterodera glycines
atggcacgcaacaagcagctggtgcaacgccaacaacagaagcggcgaattgatgcgatagtggagagcggcgatgaactcgctggtgatcagcgaccggtgattgacaactcgcaacactctgccgaactcgctgatcttttgtcgctgaaacgagagactgaactcgctgatcacctgtcgctgggcttgcagcacaatgccgaactcgccgatcagctgtctctgaacagagaggcagaagtcgctgataagctgtcgctgggttcccactattctcctgcactcgctgatcaattgtcgctgggcccccagcacactgccgaactcgctaatcaaatgtcgctgaagagagaggcaaaagtcgctgatcagttgccgctgggtcctcagcacactgccgaactcgctgatcagccgctgtcgttcccgaactcgcacgcttctgctttcgctgctggctcagtcgctgaagcgtcgaaactggcacactcgctacatcagcaacagcagcagcgtttgcagttggacgcgtcacttgcactgcttcagcagctgctgaatattttgccgccggtggcaccgccgccgccgccacccaatggcacagaacagtcgcgggacggcaccgctgggagcatttttcggcctaaaatggcatgaaaaattgacgaatataaagatattgaacacccatatttgtctggcatttcttttttgtattgtcgcgatgcgacgaattttctgtccttttaacgtgacattgtagggccatgccgggatgaatgtttaaaaaattgaaaagatgaaaatttaaactaatttttaaaatttatggtttttaaatcgaaaaattgtcaaaaattttttattgggctgtaattttgccttaacaagtcggcatttatagagtttttttttcgggggagagaaaatcgtgccgggtttttaggctttgctaggcttaacaaattttcgcttgattaattaaaattta

SEQ ID NO: 67541 - DNA, 915 bp, Heterodera glycines
gtacatcgatcactccgtcatcgcttttcttcgttcaaatcatcaaatttttgacaaaagaggcatcgatttacatttgtgtattccttattcaaacaccacggatggccagcggatttgggacatttttggtcgtgaaatttggccaattttttcgacaaacattcatcacttgcgctataccggtggtgatcatttggacaatttgcttcgtcgcatttcgccgacaattctcatcgatcttgatcagttgacttcaatccattcatttgatttgttgcccgctgcgattggtgatggttttaatgtgccaaatgaaacaatttctgctggccaagcattgtccaaatggttgcacacaccgagaaaagatggccaacccaagcgattgcataatttcaaggaggtgtggcccaacatttttgtgatttttgtttttccaatcaaattgtttagcattttctccgtgccaatgccatttcttccgtcacttacgaaattcattttcctattcatgcgccgtcaatacaaatggtgccatttgaatttcttaacgaatggacaaaggaaaagctgacaatgaccaaagcaaatgaaaatgaattgggcaaccgatggataatgaaacgatgcaaaattattggggagaccgcggcggttcagcagcagaagaaagatgacaattgtaacaaagtggccatttggctttacatttgcaatgattgcattgggtgagcaattaaaaaaggcatttaattttgtttaaataattaaaattccgcctaatttagcccattgtctcctccaccattcgcagaagaatccggacaaagcatcacaaaagggccgtcttctgctgacaaaatgagtgatggacaaaacaacaaaaacagtgatcagatgcagaagaaatga

SEQ ID NO: 67542 - DNA, 304 bp, Heterodera glycines
aaaattccctcaaaaataaaaggtctattgcgcaccgccctccctatcatgctcgagagcatttgtatgtgtataaaatttatcaaaaaaagagatagccatttttctgggataacctctaaatataaaaatcctctgtgaaataaaatggcgattgtgcacagccctccgtctcatacgcaagcgcttttgtgaggtataaaatttatcaaaaaaagagatagccatttttctgggatagagtataaatttaaaaattccctcaaaaataaaaggtctattgcgcaccgccctccctatcatg

SEQ ID NO: 67543 - DNA, 355 bp, Heterodera glycines
ctaaaattatcagagtgccgaaaatcgcatgtgatctaagcctagaaaaaatggtctaagtaaaaatcgtaattacgctcaaaaagcttctcaaacaattttagcgcttccaattccttctacaatcgcctttatacatcccattatgagcgctaaaattatcagagtgccgaaaatcgcatgtgatctaagcctagcaaaaaaatggtctaagtaaaaatcgtaattacgctcaaaaagcttctcaaacaattttagcgcttccaattccttctacaatcgcctttatacatcccattatgagcgctaaaattatcagagtgccgaaaatcgcatgtgatctaagcctagcaaa

SEQ ID NO: 67544 - DNA, 868 bp, Heterodera glycines
atgcacagtcatcgcattgagaatattgtgttggaaaatgtggggctaaagttaaaataaataaataattattaaaaagaaaatttgtttttttaaattttagtaaattttatcattaaaaatttttattctgtaaatttgcagagttttgaaaatcgcacaagcagctggtggcaatccgagaatggagtacaggtcagttcaatgcaaattccactcttttttaatttaaaataattgaaatgtctaaatgtatattggcgttttcaagaataaatgcatatttaccattttcgcgtttttaaagcatatgtctcgtttttttggaaatttttacaagatgaaaaaacgaaaaatacacccctaaggaccgactttttggaaataaaaaaaatacatttagtgcatatttggcaattttcgagtttcagtgattgttccgacgccctcaaaaaatttcggaaatcggatgaaaaaaatttaaaattgcaatttcgctataatatcggtaatcagcaagccgatacatcatacatatattgagatattttacatcaattaattaattattatttttctaattctgcagaatgtttcaattcaacttgacctggaggcagaatttcacttcacccatctgatcatgatttttcgctcctttcgtccagcagcaatgttcattgagcggtccaaagattttggcaaaacttggtaaaaacaaaagttagcgttcacttggtgaaattaagaaacacatcaccaaaaatataacaattgtaacttttatgtatttgccattttaggactatttaccgttatttcgcttatgattgctcagcctcgtttccgaagtaaacaaaaaaataaa

SEQ ID NO: 67545 - DNA, 937 bp, Heterodera glycines
  unsure (1)..(937): unsure at all n locations
atggcaaaaagtcaaatcgcgtctctagttggtaattaattattgaattatttgattttttttttttttttttggttttttcctgagggatctcaaaaagtagatcaaattttttcaaaattctattttaattttatttaaccctatttttaaaattttttacacaatttaaaatttaatgtaaaaatataatttcatataaaaacaaattaattagttaatgctttttcagcacctagagaaatttaaaatttggcccaaatgttatggcatcccactaattatagatttttcataaaaatcctttaattaagtgtaaatatcttcctaaagtctatatttttttaaccgagcagtttcctaatctgcaaattttagaggcagaattttcgggaatttttacggcacccagttacccctccgctgtattaaaaaagcaaaataatatttcaatcaatttaccggttcttcgagcagttcaacaacatttttgcaccgctgttccaaccgggacagtcgctgctccaactgttccgtgtgcatgtgttgttggagcagtaacagggcgaacagcaacaggaacagaaatggacaaatgcgatgcacacaatcggtggagggccaaaggttggccaattttgaatttggcgccatttcgttggcatttgtgtggcattttggtttcatttttgtggcattgtgtttggccgacttggacgtgttgaaaaatgtggtcgaatttgttgtggatgatgaagaagcaaatgaagagctgggaaaatcctgaaatttttaaacaaattcagattgaattttgggtgaaaaaaaaattacaattttaatttttggataaattttctaagtcatttttaaggatcttctttttaaaaatnaaaaactacatggcctgtgtgtggggaaaaaattgctacaaata

SEQ ID NO: 67546 - DNA, 78 bp, Heterodera glycines
atgcccgtccgtggcaacaaattttcccggatatttccttcccacccgacttcgtcaaagagcgcgttaaactcgacg

SEQ ID NO: 67547 - DNA, 1351 bp, Heterodera glycines
acagaatttccgcagaatggtggcgatgtgcacgtaaaaatggaaattgacagcgaggagcaggcgggcgaacaactgcaatttttcgccaaatatttgacaagtcaaaaagtgagcggtgggagaatgccattcttttcactcgacgcattaggaaaattaaacctctgtctttttgagttttgaaattaggaaaacaatttctgtcttacaattaacatgaagctaatggctccgtctttgggcaactgtttgggtttttatgttgtttctttcagttgttccctttgcaattggccgactcgcagttccgtcgctattttttactccaatatttgatcattgccaattaccttctgctcaaagtcaaactgaaagagtgcgtgtttttaggcataatcaaaaaataaatattgtgaaagtataattttttcataattttgcatttttcaaattaagtacctcacaatttcagcactttcacgctcaccacgctccaggaagaagaggtgcgcgagctgaccgacaaatgttttgcacttttgcgtgagacccatcccaacgggtcgctgttcgccgatgcggtgaaggtacaccggttttcactaaaactatataattttgaaaaatttacaaattcaacatcgtaaaaaataagaaactgaaaaacgaaatagaacttcgtaaaaatttttgttgaaattttaacatgttgtcgattattaatattatcttattttttgagccgttgtatttttttaaatttcagaaagtgctcagccgtgaacgcctttggtccacctggaagaatgagggttgccctgatctgatcacgcccctgctgaacgcacaaaccatcgaaaaatacgcagcatttaaacggtaattggacttattgagcaaagaaaatagagactgaatgaaatgaaaatgcaaacaatttttgatacaaaaattaatttttttttaatagaaatattttatttattctttcaacattttttcaatttttttcatacttaatgaaaaaaatacattcattaaatttgaataaaaatcttcaaagaatttttaaatcaaaatcttactccttttttaaatttatcgcaccattctttgcctctgtttgcagaaaggcggtggcccaatgcgtcgctggccaattggaccttggcaacaaagaaatgacgcgcttgtggaacattcagccgaacaatttgctggcctgccggtcacagaagcgcaactgcacgcccgaccttgtccagtttctgagcgacgcgcttgacgagttggacccggaacagcaggtggacgagcagtaccaaagcgtcaacgacgagaagtacca

SEQ ID NO: 67548 - DNA, 904 bp, Heterodera glycines
atgttttacgatttgaagtttaagagctccaatgttcaagagtccaacagagtgccgaccgtggccaatgcttccgctgtttccacttcaactgcatctttcctcaagaagacaattaaactgactgcggaaaatttaccggttaacaattgatggacaaaatgaaattgagaaaaagaagaaaatatttttgtttttttcttgaaaatttatgcttttgaaaataattcaaaattagaatttgttttttaccaaaacttttctgacaacatttttcaaaatagcaaattctgagagtttttagtccaatcttttaaattagattttttaaaattaggttttgcgctttggtgcttttaggcgtttaaaaacttaaaagaaatgtatagtgttttaaaacttacctattttttatttgaaaaattttatttcccaatttctctttcagttattaaaagaacgcgcagagcaaattcaattggcaacaaagaaaattgaagaagcggcaaagaaaagcgaagaaacaacgaagaaaattgaagaaacaatgaagaaaattgaggattcagaggccgaacggaagagagagcacagcgccaacggagagaaaagtgagaagcgagagagcgaaacaaaaagcaaaaagagagaaagagaaaaagagagcgaaaacgaaaagccaaagaaaggcgaaaacgcgcggaagagagagtcgagaaagagagagttcaagaaaatccaaagttgaacacaaacaaacaaacacaccaatgtcatcgtaattgcattcattcctcaagtaaaatatgtatgtccacgcagttttcgtaccaaatgcatttttttgttgttgaagaggaattcaaaagggatacaccacaaaacgtcggcgcaaaaaaataga

SEQ ID NO: 67549 - DNA, 1662 bp, Heterodera glycines
atgccaagtctgttggcagacgagaacgatacccatctttattatgtcagagcatactgtatgaaccgaggcaaaagattccacgccaactacggtacatttgtcgtgaatcggtcagcagcagccaatgaggacaaagtgaccattagctttgaacagaaagaaccctgtgactattatgccgcggaagttctgctgatgcggtccgggagtctctacggaatgggatgggtaaggaaaagggaaagaaaacgcaaaaattgaaaaattataccgaaaaaatattttgcagttacaaaattatgagattggacaccttgaaaacaatgggatgaaccatcggattctgttcggcaattatttccatctgaccattgggcccactttgaccactgaaaaccttttctatcacatccgagtgttttgcgatgcgaaggaaacgccaacaaaaaggaccaaaactgacggtgacggattaataattttggggttttccagaaacgatttgcccaaagaagccgagaaattctcgggtcaagtcagcaaccgaggcatttgcgcactatttttgattattttttgttttgtaatttagaaaacggtgtaacctccgatactttggaatttcctgaaaggccgtgccaatacaacgaataccatttcaaaacgttcaccaaatcctcaacaatggttgtgttcggcagtgagttgcggctgtgcaacacttatcacgtcaaagtgtgggcaacgccaacggaatggaaattgaaatatgtacgaacatacagtacagtaatgggctgacaaaacaagcagactgtgctttcaacaattgttactcaaaaaattatcaaaatttaacaaaaagttttcctaattttgttccaaaacaatcaaataacaaaaatgccaggctctaaccgatggggcggggcgaggacaatttcccattcgcccgaaaaaatgttaaaaatgggaaaatttctaaaaaaaaaccatcgcattcttgccaaattaatgcaaaggttcgaattgcggctagtgccgatcagtcctcccccgggcgagtgccgatcagtcctcccccgggcgagtgccgatcagtcctcccccgggcgagtgccgatcagtcctcccccgggcgagtgccgatcagtcctccccgggcgagtgccgatcagtcctcccccgggcgagtgccgatcagtcctcccccgggcgagtgccgatcaattccccacctcgggcgagagctgactccccaggcgaatgccgatcagtctcccaccccaccccctcgttttctttcaaatgccctctcttcagcccgacgagcgtccaatggtccatttcgtgtgcagctcctacgggaatggtgaaaagcgggaaattgtgttcaagagaaattttcacctacaaattacgcccgcccttggcgaaggggaggaggaaaatgtttattatgccgaagttgaatgcaatgggaacaagtaccaaacattcagaacattcacaaagtccaaaacggacgtggtgctgcacgtttccgactgcaaaagttacgacttttcggtgcgcaaagtgccgaaagcgttgtttaaaccacaggacaacatgagaaaagtgcgttttcaattaattctatcggaaattgcagtataa

SEQ ID NO: 67550 - DNA, 514 bp, Heterodera glycines
atgagagccctctggcgtttggcgcgggccttcccgggcacactcatccgctgcatttgcttctacgccgcccaagccctggagatcgaacggttggtggcccaacaagaaatcccggacattttagtgacgacagcggacgcgacacagggccacgagtcgtcacttgccgtcgtcgtcacaacatgctccgtcttcgacagtggggccgactcgcagcccttctgggcggacgctgctcgcgtggacgtcgccatctctcgtgccagccatggaatgatcatcattggcgatttgctgctgctcaaccggacggagacgtggcggcgctacctggaccaagcgacgactgagacaacagtggtcggtccggagtacttcgacttcgagcagttcaacaaccccgacaactactacgacaaggacggacagctgatctcagccaacggcggtgcggtacggtcagagcatttctacagcaagtacggtaagaatgtgtggtacaataactccg

SEQ ID NO: 67551 - DNA, 1066 bp, Heterodera glycines
atgttcatagtttgcgccactataaaaacaaggattgttttttctttattactgctattattaattaattaccctcaatgttttgtgatgggccgacatcgaatcattgcggcagaggacatggaaacagtgctaaatcgcctgcgcccttctgtggaccgatttgatgccaattttcagcgcacatttaacgaatacggacgtgtggactccgtgcgtgaagtcagttcaaaaatttgttttatttttttacattgtaaattattttaaattatttaatttttaatttaattaataattttcttttctttctcccttatccatcagaagggatttctgaagatttttgactccattttccaattgatttttttgggcaactgaatttcattttaataattttttgatacttggaattcttttttgaaaaaaaaaagtttggacatggaatttcgattccgatttttaattgaaacaacccctcatggccataggaactcaagaacacaaaaaagcagggttttcaacatttttgttacaactttttgcaaacttcacaaaattttggaatgttggcagaataatagaaagaacatttaggattgattatcccatgattcaagaattaaaaaacccaaatccccaagtgataagccaaatttatttggttttctgctgtttctttcagtttcttgaggacagtgtggtgccacggtttactgtggaggagcacggtcgtgttgattttgtggacgcttttcaacaattgcagttacgcattcaacaattttttgacaccaaaattcgcgcactccaccgtttggtgggcgccgctgaaaaggaggcacaaaaagtggacatggacaaagtgatgggtccaacgttgggcagtgagggacgctgccgggaccaaatgagggcattgaacgccagctcagtgcacaacccaagcatttggaagaaaagcaatggaaagacgaattcgggaatccatgttggcattttggggatgaaagtgcttggggacgataagcaattagggcatggaatattcaagactttttga

SEQ ID NO: 67552 - DNA, 453 bp, Heterodera glycines
atgtacattgagacagcccaacataacttgggcaaagagctgacggaccaaagtgtccgcgcagatctgattgcagagagacaaactctctgcaaaacaatttctcttcttgagaaatacaatggaaaatgggaagccattttcctgagagtgaagggacaagctcttcaagatgaagagcaaaattacagagacttcaaaccagaaggcaaggccttcatgcattgggtcgaccaagcccgagggcttgtcgacaccattggaggggctttaggcctctcggagctgggggatgcaattccccagccaaatcagccagcacaagttgtgcagcaggcaccagtggtgcatcagcgtcatgatgtgacgcttccgccgataacattgcccaaattctcgggggaaccccgagaatggcctttgttttggaagctatttgagacttccgtttaa

SEQ ID NO: 67553 - DNA, 1207 bp, Heterodera glycines
gaggaagaggaaaaagagagggaaaaggaagacagggaaaaagaaaaagaggaggagaaagaggaagaggaaaaagagagggaaaaggaagacagggaaaaagaaaaagaggaggagaaagaggaagaggaaaaagggagggaaaaggaagacagggaaaaagaaaaagaggaggagaaagaggaagaggaaaaagagagggaaaaggaagacagggaaaaagaaaaagaggaggagaaagaggaagaggaaaaagagagggaaaaggaagacagggaaaaagaaaaagaggaggagaaagaggaagaggaaaaagagagggaaaaggaagacacgcaaaacgagcacgaggaacagagagagcaacaccagcagcaagttgggcatggtcatggacaggccgcagaatcagttgagacacggcatggccaattcgaaatgagtgccgaggaaagggaatgtctcagctttttcggtatgacttttgactttttgactctttaacgaataacggttcatctttttttttttgatcaaattgtcttcaatgcttctgctgatgaggaaggggaaagtgatgatgatcattatcattatcagctgcgcaatgcgccttcgacttctcatagcgtaactttttcattttaattcaaattaaaatgaaagttttgttttttaaagcaaccaaatttcaccgacattgatcaatatttgcacttcaaactccattctgatcagcgttctttggcaaatgcccttttcaattgggagaaaatgtgcaaaaaagcgacggacgaagtgatcagttcgccaaaggtgaaaaacaaatgtggccattaattgttttcaatttttcagattttgcaaatcatccgcgaatttcggaccgaatatttgctgcaatttgtttccgctaattttgcaattgaatgaacaaattaggcaggaaactgacattactggcacttagcattaaccgtttagttatcgattgattgatttgattagattagcatagcacgttgcccgaacaaatttgtaaattttttattagaaaaaatttaaaaaatcaaatgaaatttaaacttcttcaattttgtttttgatactcttgttatttaaatacatatgtaaaaaaaattgtttttatttatgttagaaaattatcgcgaattttaatttagaatattcgaaattatcataaaaa

SEQ ID NO: 67554 - DNA, 60 bp, Heterodera glycines
ttaccgtatatgctctaattatagcccagtctctattaatcccgcagtctccaattatcc

SEQ ID NO: 67555 - DNA, 77 bp, Heterodera glycines
ttcacatgacactgatgcccctcaatttgggatgtttttgtatgtcaaatttggcccatttttgcgccaaacattcg

SEQ ID NO: 67556 - DNA, 305 bp, Heterodera glycines
atggcttttcgctgtgatggagcaaattactacaattattttattgttgatgaaaaagctatcaataatgtcacatgcaaagggatcaaaaaggatgttttaccaaagttgcctgagtattttttctatgattcgtctcaattcgcttcactgtaattttacacgtttaatgagtgttcatttgattatattccatgttaatttaggaaagtttcgatttgccaaaaaaatggtttctttaacttatttaaagaatattatctggaagtcactgacatgggcaatccgactgattcgaaggctca

SEQ ID NO: 67557 - DNA, 488 bp, Heterodera glycines
atgaatggggtcacgaggacgttgaaatgggcaaatgtttggagaaaattggcgtcaaggctggcgattcgcgtgatgccgaagaccaccatcgctttttcccatttgtgccggaaactcatttgtccccagaccatatggacaaatcattttggttctggaaatacatttactatccgatggaagaagtaggacgaaaaaaattataatttaatttaatattagattttgggatagctattttaaattagaacaaatcgtttttttattactttgtaaattgtacatttaggggcccaactgttgcagtgattatgccatttcttttcactatgttcagccgaattcgatgtatagcgatttgaattatttaaataattaattaattacaggtactcacttgaatatttggtttaccatttacatctattcggcaatgaaattgaattaaaggacaatttcgaaaaaaacaggctaatttattgaaa

SEQ ID NO: 67558 - DNA, 531 bp, Heterodera glycines
atggaaccggccgccgttgttgtggtgccatcatcgtcagaaactgtgccgagcaacaccaccaaccaaattgccgacaaacgagatgacactgccacaacatcgtccattgacaaaattgtgagtgccagtgacacggcactgcgcgtcactgtgccgtccgcaattgtgacgtcgacgacttcatcgcaaaatgccaccaccaccaccacaacgcgacgagttaataataatttaaaaaaaaattaaattttgtggcatttggtcccatgccaccttaaactctcaaactgattaaaaaaactcagatgctaagccccgaggaatgggaggtgcgcatgcgcggcggcattctcagcaaagcgttgcgccgctacgccgccgacggacacttaaaaggcgacgatgtgccaaagtgaggaggagacttttaaaaattgaaaatttaattttttaatatatttgtggcgattcgaatcggattttctttaatggcaaagtttttccttgccgatttcttgagtcaataaa

SEQ ID NO: 67559 - DNA, 546 bp, Heterodera glycines
atggccgagttgcgctgccaattgcgtctttccccgccctcctccgccctcgtcgctcttccgccctttccttcgcctcgtccttgctacgacttcgccccaatttcttcgtcttctccgacttccgcggtggccaacggaagggaaggccttctgattgagttggtgcgtcagcgagaacaacagcaacaactctttcgtcccaccgcggtgctgccttccgaagttcagcttttgacctcggcaattaattcgttgtctaatgggtcgccccagggattggcactgcaaatgcagcagcaacaacagcaacaggacaacaacggcacaatgactgtgccaacgaatggaattggacaagacgcgcaacaacagcaaatgggccaacagctgaccacggctttcgacatgagagagcctcttgcggtggtgcagcaacggacgatgggaagcagcgaagaggcgaacgcaatgccaacggcggaaggggcggcggtggacagcgattgtgcaacgccggcgaccatttcacagcaaaacttgcag

SEQ ID NO: 67560 - DNA, 98 bp, Heterodera glycines
agaagaacgaaaacggaacggacgacggagaaaagccgaagagatcggaatttgacgaatgggtggaataaaagaggagaagacaaacgagagaaaga

SEQ ID NO: 67561 - DNA, 676 bp, Heterodera glycines
aggtccgtcgcaccgatttgctggcggatccgcgcagcaaattggctgattggtttcgcccgggcactaatcgcccgcgtgggttttgcgttatttggcaaatcaagtgttaattgatatgctaattttcctttctgttaagcaattcctaccgacaaaggggggaatctttttttggacagagaccccaaaatgttccgtcatatcattggttatctccgcctgaaaaaggagcgatgcgccgcctctttgggtccattccttcttatcatatggcatattaattatcagctccttccacagcacttccagcaaagccagacgatttggccaagtgaacgaatggccccgtgattttgggcttaatttcgcttttagactaatcggcgaatgtgaggcgcttaatttggtcgaatttcgcgaattggcgttggaaatgcttcaaaaatacgtcagaacggaggaacagcattatgtgaatgaagaggggggggggttaacgattggccaaagaaaatgctaacaaaaaaaggtcacttcgtacgttcaaatggcactgcgcgactacgaagcgtggcaatttgagcaggaacaggcgagacaagccgagaatgggcaagggaggggggggggggtaaagcggggtacgaacccccagggaaatttcaatacagta

SEQ ID NO: 67562 - DNA, 183 bp, Heterodera glycines
atggagaaggcctgcaaaatttggagagattatatcgattttaatgcgctaggttcgatgaaactttttaaaatataagcctaaactttttggcctgtttaaaaaggaattaaaaatttttaaaaattttattcatctcccttttgatagaaaaagcatcagagtgccttgattaacctgtaa

SEQ ID NO: 67563 - DNA, 153 bp, Heterodera glycines
taagcctaaactttttggcctgtttaaaaagggattaaaaatttttaaaaattttattcatcttcctttggataaaaaaagcatcagagagccttatttaacttttaattaacatttggtgcgtctcagagcacgttctaaaaaatatttatg

SEQ ID NO: 67564 - DNA, 881 bp, Heterodera glycines
ttccttgtcaattacttaattgattttacattttggcacagattacgggctttggcttcgcaaagcgcgtcaaaggacggacgtggacatgtgcggaacgcccgaatatttggcacccgaaatcattctgagcaaagtctgttttcttgattgtttttttaaatcggcaattgtgtttattctaataaccatttaattagggctatggaaaggccgtcgattggtgggctttgggtgtgctcatttatgaaatggtcgccggttatccaccgttttttgccgaacagccaattcaaatttacgagaaaattgtttctggaaaagtataaaccaataaaataatttaattttaattgttttaaattaattatttcaatttttttgtgttgtttaggtcaaatacccgccacatttctcctccgatctgagggatttgctgaagaatcttctccaagttgaccttacaaaacgttatggcaatttgcggggagggccaacggacattaaaaatcacaaatggttttcactggtcgattgggtcgccgtgcttcaaaaaagggtaatcaaaaagcactcggatccattctcaaccccccaaactctcaattctcgaccttaccgatcagtgccgtgccatttccccgtcaatttccttggcttaggtctgtccgccgagctttgtccctcccgccacaatgtgcggcaccagcgccgccgcctccgccgctccctcagccggcgatccgtgccgcatgtttgaagcgctttatccgaaagtgaagggacccgacgacacgagccatttccaagcggaaccgattggagtcggcgatgagctgagaatacagtgcttacaaatcggcatataagtttgcgaggac

SEQ ID NO: 67565 - DNA, 706 bp, Heterodera glycines
atttggtgcgctttagagcacatcggttctgaaaaaaatatttatgaaacaaaaaaatcgattttttcaagtgtccgtttggggtactcaaacatttatggggagcaaaaatccaacgcagaattaaagtacaggctatagggaagctattcccgaaggattcggtctccccataaatctgggcgcatcggttcggggggactgccccgaaaacaaaaaaatcgattttttcaagtgtccgtttggggtactcaaacaattatggggagcaaaaatccaacgcagaattaaagtacaggctatagggaagctattccggaaggattcggtctccccataaatctgggcgcatcggttcggggggactgccccgaaaacaaaaaaatcgattttttcaagtgtccgtttggggtactcaaacaattatggggagcaaaaatccaacgcagaattaaagtacaggctatagggaagctattccggaaggattcggtctccccataaatctgggcgcatcggttcggggggactgccccgaaaacaaaaaaatcgattttttcaagtgtccgtttggggtactcaaacaattatggggagcaaaaatccaacgcagaattaaagtacaggctatagggaagctactccggaaggattcggtctccccataaatctgggcgcatcggttcggggggactgccccgaaaac

SEQ ID NO: 67566 - DNA, 509 bp, Heterodera glycines
atggccaacacgttcggctacctccgtggctatgatgcgttgcacggcgtcggcattgtgctgaaagagaacgacaaccgtgccgacgcttccttcaattactgcatcaacggtcttctgagcaatctgcacaaaaatgtggcacaggtgtgcttttggcacaaagaccgaaactttaaatttttgagttacgcatttttggttcaaaaccggcttaaatactagtacaaggaaaccattgaaagtcatcaatgtttcaataaaaaatttcattttagagcaaaaatttgaaaaatgcctgcttcttagtcgattttgtttaaaatgatcaatttttatgatttatttctcttttgccggcggcaacaatcccaccccttccctcttttttcatgtaccttttctcaattttgcagaacatcgtttttctgatcacccattcgtcgggctcgggaaaaacaattgccctgttgcgcaggctgctgaaaccaattgaagaaaaggccggc

SEQ ID NO: 67567 - DNA, 596 bp, Heterodera glycines
atgggtggcacttatcaattgattgtccaaattgactccaaaaatgtgccgggttcaccgagcagggtgattctcacattttatcttaaattatttctattattccaagtccattcccatcaattacctgctgaattaatctctgtcgacgcgaaaccgctcaaatttggcgtgataaatgaggatattaggtgaaattgagaagaaattagttaaatcatttttaaatatttattttaattcgtttaatagaactataatcgacgcacgaaaggccactgctggacatttgtcggcacaatgttcaggaccgacacggcccgaatattgcgaattgatggacaacagagacggaacggtaatcaactcggacatcttttatttaattgaaattttatattttattaaatttttttagattttttaatttattcaactgaatgttaaaagtggaattaattgatttgaaattcatttattaattattaaaagtttataaattttctatgtttcacgttttatttaagaaatttttgaccatattttcccagtttttttattagaattaatttttaacggtttttttttacaaaaga

SEQ ID NO: 67568 - DNA, 69 bp, Heterodera glycines
ttttggtgactaactcacagaccactaagacgaaaaatccagcataattgtacttggagcccaaaattg

SEQ ID NO: 67569 - DNA, 265 bp, Heterodera glycines
  unsure (1)..(265): unsure at all n locations
gcagatttaaagctatccattgcctgccggttctcggcacagcaaagcactaatagggtgtttgactcacttcaaaaaataattccatacccaaaagtttttacaaccacatattgccaatctaatctcttgcagatntaaagctatccattgcctgccggttctcggcacagcaaagcactaatagggtgtttgactcacttcaaaaaataattccataaccaaaagttttttacaaccacatattgcccatctaatttcttgc

SEQ ID NO: 67570 - DNA, 771 bp, Heterodera glycines
attctgcagaatgtttcaattcaacttgccttggaggcagaatttcacttcacccatctgatcatgatttttcgttcatttcgtccagcagcaatgttcattgagcgatccaaggattttggcaaaacttggtataaaaaacttaacaggcaatattccgccagatttacatattcatcaaaatttagagacaatggccaaaaatataattgttgccttttcaggaccatttaccgctatttcgcctatgattgctcggcctcgttcccgaagtaggcaaaaaaaaaattaaataaataaatattataaaaaaaatcgagtttcagcattcccgaggggcctcccagaaagcacaatgatgtcatttgtaccaaaaaatatagcagttttgaaccggcaactggcggagaggtgcagaatttttttaatttttaaaaaattgccattcattgccataaaacaatatacggtatttcttcgatatttcgactctcccccccccccctcccacggatttaagacccccctttgagggggtcgaacaataaagagccgggtctaataatagaataaatacggtatacaaactaacaataattattcagttggtttacaaagtgatttcgcctcacattcccacggaggacccatacgcaccggagattgcggaactgttaaaaataaccaatttgcgcatcaatttcaccaaattgcacacacttggcgacgacctgttagactctcggccggacattgacgaaaaatattggt

SEQ ID NO: 67571 - DNA, 457 bp, Heterodera glycines
atgcagaagtgcaactgtccatgttggtcagtaatggctatcaaattatcggtaaatatttaacaataataataataataatattcacatttatctttatctttattttttattttggaaacgaatttttcatatcgaatttataaggaaaatttaaaaaaaaattaatgacaaaaatttatcaaagtaaagaataagtcaaaaagagattataaatcaaattatcgaaattagttgctttttttctaatttttgaatttcctatttcgatacataaaattttctgattttgaaataatatttttattgcttttttagccaaacccaatggaaattttagccaattttttatttgaaaatttttctgaaggttttattggcaatagtcgaaactgtgccagcagcaatgatgacaactgttttaactgcagcactgactatgtgtggacattggtga

SEQ ID NO: 67572 - DNA, 217 bp, Heterodera glycines
gtctctgacaatataaacaccgcgaaacaactttctgcaacatttttatgcttttttctgtcaaatttgttgttcacaattttgtacattgtcatcacattgaatttggtcactgaagcctatcaaatcagtttggtttatgcctgtggaaattggagcatcgcaattctttgtgtggccactgaattcaccataatgacgtaatgaatttattaaa

SEQ ID NO: 67573 - DNA, 204 bp, Heterodera glycines
ctcgcatgtgtcggccctctcctctacagtgtgttgcacaaaggcgtcggtcttcgcattgaaaagccaccgctgatcctcgtccttttggccatgtccaccgtttccatgcttttgttggcactgttttgggaatggacaatgccaatttttggtgcccaacactctgtggccatccttttgctcacttttctaatggcattg

SEQ ID NO: 67574 - DNA, 472 bp, Heterodera glycines
aaccgcagtggtcgtggtaactttcgtctgcggtataacccaatggcggctgttgaactgaccctgctcgggaatcgtcttgaggacagggctcgtaaacaccgggtggccataggcgcatcgacgtcagcatcaactgtgaacgaagccaacgcgggcgagaatggtgagggaggtagcggacaaaaccagaacggtgagttttaaaaatgtgcataaaataaaataatatatagaacaatcaacaccgcgcacttcacgcgtgcctttgtcggccatgggtattaaaataatcacatttcaatttttatccccctaaaaaatagataatgttgtcgctggtcaggctgtgcatcaacctcagatgttggaaggcaaaatggtgaatttatttaataaataaattaataaattattttaattattttaataatattaaattttagtcgccttcttttgggcaaacaattga

SEQ ID NO: 67575 - DNA, 56 bp, Heterodera glycines; identical to SEQ ID NO: 52733

SEQ ID NO: 67576 - DNA, 955 bp, Heterodera glycines
atggctaatatgaaatacttgccgcctgaacttttggacgaaatggctttttacgtatatcctaaccaacatttttctaaaattctgacttcttcctggctactcttggaatttttgatgccccgtatcaaaagatggaaagaattattgaaattagtatgttatgtaatgcacaaacgcaaacaaaacgggaatttgaccaattaatgcactttttacgttttttcagcgccgttccgaggtgattaaaaagcacaaattggccaaagacgatctcccctggaccaattttgccacggtggcaaaaacagacagtgtttgcactgattttcttaacacgttcgccgaactgtttaaagaggcatgaatttgaccgttttccaaattattaccatttttctaaacgattaaaaaattcaggaaggtttttatgattccatcgacggaagtgtaagtgtttgaaaagcaacaagaaatgagtggtaaatgactttaaacacacggtttagatgttgaatttgttgctttccaatctccgcgagctttacctccgtgttaaacaaacacgtgcgtggttggcacttgtagtccaagccgaactttttccggctacaatgcttctgattgaagaactttgcgagtttatcgaatcggtttgcttgtttccctttccatgctttttaaaaaatactttttagccgggtctttatttcggagccgttcccgagtcaacatcagaggttttttaatgtattcttttttttgtcgtaacaagaattgttttaggaagatccttatcaaactgtcgcttgcgttggaccaacggtaataatttgggttatgtttctgggagacaaaagttgtttaagaaaaatgcggctggtctccagtcgacttcgtcatctttggctcccattccgccaccgaagcaaaaccgattgtgccatcgcgacag

SEQ ID NO: 67577 - DNA, 1046 bp, Heterodera glycines
atgtcatgcgcaccggaccaggacgttcttgaatttggcgcttccgtcaacgcaaaatgcgaacgggcggacatgacactcagcaaagatgagataaaatgtctcattttcattacaggcctaagtgacgcgcatcgcgatttgcgccaagagtgtttgcgtcaattggagagggcaaaaagcgcaacaccgccacgaacggtcaaactcgaaaatttgcttgaggaatgccgttcgattttgtcgctgcaacactccgctgccgctctcacaagttctggtcaagcacatgccatccaatgcaaaccacaggttttgaaggaggataagccgaaaaacaagggttttaagccgaaaacccaattaaattcgggcaaaaatttccgtaatgagggaaataattcgggcaatgtcaattcaaatcccaagcgacaggaatttcgtgcccaaacgtgtggacgttgcggcaaagggcattcatatagggtttgccgataccctgccgatgtccaatgttttggctgtggaaaacggggccacgtaaagcaaatgtgcccaaaccgagcccagtcaaattccgtcgccgtcgcatcaactttcagcgtggcacaaacaaaccgagattggatttggatcgaattgcaaatcaatgacaaaccaatcaagttggctgccgactcatgctccaacttgaccatcattcagctgccaatttgggaaagtttgggaaaaccaaaactcaaaaatgctggtaagatggttggttcttattctggtgaaaaatttaagcttttgggaaatttctggtgtaaggggtcaatttcagaaatgtgattttaagtctttgttgttcagttgcaaacacaacagctccaagtatcatggggttggactggattaccctgtttgaacaaaagacgcagctgccaattgcgaccacactgccagtgttgttcgactccactcttcaccagtcggtcaacgcaattcagtctcccaaagacccaaccgatttggccaatcaaattaaagcgcaattcccacag

SEQ ID NO: 67578 - DNA, 704 bp, Heterodera glycines
agggcagttcggcaatgcctcggcactccttttggcactttctttggccattccctcgaaaattcgctccattttattcttccaaatgggtcagttttgacaaacattagttcaccacttcaacggcatgattcacatcatcaattcatttcctcccaattttaggccgactcattccgacccaaaatctttgcaaagtttgcggggataaaactttcgggcgccattacggtgcatgggtgtgcgatgggtgcagctgttttttcaagagaaggtgaaaaggatgactgactgatcacttatcagagtcatccgacgaactgatcacttctcctcccatttttatgtttagcattcgtcgaagtgctgaatataaatgcgttggtgagagttttgctggttttgtctttctgattaatgccgttttgaaagctcagcgggcactggcaaatgtttggtggacaaatgccgtcgcaattggtgccaggcgtgccgttttaacaaatgcattgccgaggcgaatatggccaaagaacgtacgaatggaattgataaagcaataaaagatttgttaaaggcgtgcagaaggagaggggtccgagaaaggcgaaacggagcaaaagcggaaaaagaaacgaagtgccaaaggaagcggaaaagagccaaagggaaagcggagagacggacggaagggggcagcgaag

SEQ ID NO: 67579 - DNA, 513 bp, Heterodera glycines
atgctgaacaattggagcaatgcgatcgggaacatcggtgtggccaaaatgggaaatgccaattggacagtgccattggcgcattgtattgccaatgcaaccgtggtaaggggaaacagtatttcaaaatgtcaaatcaaaatgccaaagacagacacaaacgtaagccaagagtcgatgaaaagcatcatttgctcttgcaattaatattttgtacactaccatatgcatcatttttaggctattttggggagttttgtgaggccaaattgaacccgtgcagttctgctttaccaaccgcaccgatttgcaaaaacggcggaatttgtcaagaaattggacccgaaaaagcgtaaacaaaataatttaatttaactttaaaaattgtttatatattgtatttttatttattttataattaacgcaaattaaggatttgccagtgtccagaaggttggacaggcgatcaatgtgataaagcagaggacagttgtgcagggaaggaatgtgtga

SEQ ID NO: 67580 - DNA, 3360 bp, Heterodera glycines
atggacaatgccaagccaaaggcaaagggcacaccgccaaattcgaatgtttgtgcagagacggatggacaggtgaagaagcacaagggcagccgaatgatggaaaaaagaaagaacaattggcatttttcagggccaaattgcaatgtgccaaccgatgaatgccaaaaatggaaaaagtgcctaaacaatggcaaatgcatcacactgattgatggggatgagttgccgcgaaaaagggtgtgtttatgccctgacggattttgggtaatttaaatccaaaataatattcataaataattctgtttcaattagggtgatcattgtgagaatattgtcaactattgtgaactggagggaatttgtgtgaacaagggcacttgcgaatccgtcgggccaaattatcagtgccattgtgacaagaaaagtgccaagttttatggtttcttttctctcttaatggaaaaaggctttcatataatatttgatttttacctttttttggtcgaaattgtgaacaaattgtgaaaccgtgtgaacccaacccatgcgcaaatggcggaaaatgttcgccaaattacgacgacgacaaaatgggcttcgaatgcgaatgcggcccaaattatgcaccggagacaaattgcactcgaaaattggtaattaaaaaggaaaacaaacagcgaataaatgggatcaattgtaattagacattgaaaaattaattggcaattgacagagtccgtgcgaacaatggccaaattattgcaatggcggaacgtgccaaattttgccaaactcttccgattcgccgcattgcctttgcccagccgattcaatgggaattcgttgcgaaacacgtaaaatatttaagctttccaatttactaatatatgattttttgccaggaaagtccacccattacgatttgcatttttacccatttttaaattcgtcgtccatttttcaaacaattcgttcgcccacttttccgtgtttcgcgctcattaaaaagccattttcgctctgtttttggctccgatttggtctaatggacggacaaacaaatgaagtgaaataataaaatactttaatccatttttgtataattattttataattgtttttgatttttccgcagttttccccggattctcatcgctctttttacatttctataaaaacttttgaaacgatcggagtgaaaaggtacggtatattaaaaagggaaaagttttcttttgaattttacagtcagcggacagatattctgctttttgatcagtttggcgtgacaattttcggcagcaaattgcaatttgacaatgggcgcccattgactgctcaaatttggcaccacgtaaatgttttttttcaatttgatacaaaaataacagattttggccattagatttgcttaacttacgacgtcaaaatcattcgactgtttttgaatggacattttgtccaagttcgttctgctgtcgttagaaattatccagccattttcattaataaaacctgtgaaattttgttggccaaaaatggcggaaaaaatccttttgttggtcagctgagccaagttggggtaaatgagacgaaattggggcaggatttgtaaaataatttaaatattttcattattagctgtattcgaaacatttcgaagacgcggaaattgtccgaatggcgtggagttgtcgcgaatggacacatcgccaagaaaaggcattcactcacttaaaacattaaatttacaaaacgaatttaagcgattttcactcattgaatgggctcaattcacgacagtcgatggtaaaataattatattaattatttatttttataacaatttatttagttttcaacaaggcccaaattgctctcattcccggaatttgcagtgaaagcgattgtcagccggggcggataagcgattgtggccaagggaaaaagcgtataaaatgaaaaaagaattcattaattaaaaataaataaataaataataattatttggatgttgccatttaaagtggtgagtgatacaaattgttaagttaaaacgccgccccatctgctgttctgtccccgttctcagtttgtcactgtccccgtgccccaccagcgcctaattcaaattcattgggagggtaaaagaaaactttaatatttaattttttaataattctcgaaggatccctcgagaaaatgtttcggcctaccggcacttcgcccattgttcgctttgagagcaattttcggcccggccaaacctttggctggggccaatttcacgtcgtttatttggcggaggattcgctcggaaattgggccatttgcgaagtcaaagagaaagacaatttgccaacccattttgatcacctcaatttacagttcgatgtcgtcgtttcgcccacaaaatgttctgatctttttgtgcccggctcatttaacaaattgacagtgcacaaattccgcgtcgaagaggcgaaacaagcggaaaaaagcgtaaaaagcacaaaacgattactaattatcacttatcagatggacccattgcttctccaattcattcagatcaacctcaaatgtttgaacaccgaattggtttccaatgtcgtcgcgaaaccgcccttttacatttgcgatcgcctggtcatatttaatgcattttgataaatattttttaatttattcatttaactcagtcagtaatttctcgggttcacccaccctttttaatatttatttttcctcatttttcagggccaatgggaccgtttggcaacttttgggcgcactttcgctttgccttcgtgcacgccaactgaaaatgcaatgcaggttaagaacaaaattaaatattgaacactaattactatataattggaatcactattcaattgtacaggaggttatcggcgatttgcatttcgaaggcccatgcgatagagcagcgaaatgcgcacggaaagtggtcagtgaggggggggggggaaggaaggcattggcaattgttaatcaatgcttttttgttttctatttttgggtgttaaaatattaaattttattttttatacaaatattttttaattctgtttttaatcaaattctctttttttcctttgtcttttgcaattttttctcaccttttttcctttttcagattcaaaccatcgaaaatgcgagcaaaagtttcggctccttttgtacgcgtcccttctgcgatggccaattgggcatcaaaacggaatgccttggcgaacggagcgccattagtggcgccaatccatcgacgacggcggcacaaaatcctccgtcggctggtgcgacaccgcttgtggacacgtacgagcgaaagcg

SEQ ID NO: 67581 - DNA, 755 bp, Heterodera glycines
atggccaatttatgccctacaggtaaattcatttcaattccctaattttcaatattcaagcattctttcagcggacgattgcaatgcatcggctgtccccccggcacttccactgaacagcaggtcgatggcatggcattctttatgttttcaaaaacataatttgtaattgtttaagggcaccaccagcgcggaccaatgttcggtgcgttgtgcggtgggcgaggaaatgggcgcgggggaacaatgcgaaatgtaagagcccaatttgaaaacaaattattttttctttctattagattaattaattgattattcggtaaaagattccaataaaaaagtcaaagaaattcataccttttggaaacacacaataaaagtggttcagcttttgcataatttgaatttcaaattttgaaggtgcgcccgcgggacattccgcgcggaaggaatgaacgcgtgccgacgatgcaacgtaaaaacaaattaattcaaatcaaatgtttattaattattcattttgtttaaatgttggccattttcagctcggcttcaccacccctgcgaatgggtccaattcggcgtcggattgttcgctcattttctgtccgcccggccatttccgcaacacaaccattggacctgccgatgacagcttcaatcagctgaactctgcgttcgaagctgtgtgtgtgccgtgtcccatcggatattatcaggcaaaaaaaacaaatgggaaagaagcatttaaatga

SEQ ID NO: 67582 - DNA, 392 bp, Heterodera glycines
atggaacacagaaatagtgaagaagcaaagaaacgagagtaaataagagagcgtaaggaaacaagtacttttcctttttttctcttctcactgctacaccccatccttttttgatttacattatcaccagcagggaaagtgtttttcttatctaaatcccttgcaataggttttggatatagaatttttggaacggggccatcgggggatggccctacaaaaagcatttgaaacgaataaattttattttttaattttggtttaaaattaacaaaaaaatgaatgatttttaaaatttcagagggacatttgtcggagtgctggtgaataatgccaggggcctatttcaatcaacatcaagtcaacgacttgatgacttgatcatcaagtga

SEQ ID NO: 67583 - DNA, 309 bp, Heterodera glycines
atgattatggctaaggtccaattcttcaattgccggactgaagcgcagaatgtgttcactgatagtctaaaaaaggcaaaaaacggcgaaaagattagggaaaagggaaaagccaaccaaaaggcaattagcgctgagggaaaggcgccgcaggcgaaacagtcgaaaggcctcccattcgacgctaacgatgcgattggtgttcaggcgaatttcttcggcattcggaaaggcaatgaaactgtgccgggaaatactctgagagagaagagtgatcggagtttaaacatccaaagttaccgtaattaa

SEQ ID NO: 67584 - DNA, 304 bp, Heterodera glycines; identical to SEQ ID NO: 51570

SEQ ID NO: 67585 - DNA, 304 bp, Heterodera glycines
aaaattccctcagaaataaaaggtctattgcgcaccgccctccctatcatgctcgagagcatttgtatgtgtataaaatttatcaaaaaaagagatagccatttttgtgggataacctctaaatataaaaatcctctgtgaaataaaatggcgattgtgcacagccctccgtctcatacgcaagcgcttttgtgaggtataaaatttctcaaaaaaagagatagccatttttctgggatagagtataaatttaaaaattccctcaaaaataaaaggtctattgcgcaccgccctccctatcatg

SEQ ID NO: 67586 - DNA, 316 bp, Heterodera glycines
atgacttcattttccgccccatttcaacacttcgctctttcagttgcgaatgtccgcgcggatttatcagtcagtcggccaattgaaaggattaaattaatcaaaaattttaaaatttagcaaattcgagtgtgcccggtgaatgcaaccaacggctgaaccaatgcttcaacgcgccatgccttcacgggggcacgtgccatgccctcgagggcggctttagctgttcgtgtccgaacggatggaccggtgagtttcgaaattgaaaaaaaaacattttgaacatgtccaaattcattttcgtatcaaaaataaa

SEQ ID NO: 67587 - DNA, 974 bp, Heterodera glycines
atgggtaggatggtggtagcttttctaaccaccaactcccgtcaaatgaccatgaactacgttcttattgacagggtaaaaaagagggtcatggtcatggttgaatgaccaccaacttcgtggttgtttgaccaaagttcgtggtagctcttgttgaccgaagtttaccaccaacttcatggttatttaaccattaccaccttcttattgaccgggcccagacaaaaatagggcactacccccaagtcagaacatctaaaattttggactcgtcaaatcagaatatttctgataaacaccagaaaaaacccgctgaaaaagtgttacacaagcgatttaaagtttttttgcaaaatgttcaagttttacatacactctattttttacagttctgggtttgaaaaattttcgatacgcagcaccttgcggttttatgaaaccgatattgtatttttcaaagttttgtgcgtaattgtattcagctaacacagataaaaatgatacgtcaatgaaatatttgcgcaaagaatattgtgaaataattaatcggaagtaagggcaaataatattgtgaaatcaattaatcgaaagtaatatgtggaaaataatattgtgaaatcaattaatgggaagtaatatgtggaaaataatattgtgaaatcaattaatgggaagtaatatttgcgcaattaatagcaatcaacttcgtatttattcgcatataattaaatattgtgaatcataaaatgtaactagggcttcgatttttaggtgctaaaaactgccaaaataagtaggttttaggttctaaaaaacccccaaaataggtgctaaaaatgggaaaataggtgccaaaaagttccgaatttaggggtgtaaaatcgaaaattttcatcaaaaagcaaaaatattttgccaagtcattaaggatatacataattttcaaaatcaaaaattatcgtcaagaaaataaa

SEQ ID NO: 67588 - DNA, 192 bp, Heterodera glycines
aaactcgaacagaaattcttataatttaggcctttttctccaccagcggcgagtcaaagcggcgaaaaagatgagaaatgatcggctattttggagaatattgaatggacaaattggtctgctgatcacttttgatgctcatttttgcttgttaattttgatgtgtctttctgacgaaaaaattcatttctt

SEQ ID NO: 67589 - DNA, 403 bp, Heterodera glycines
  unsure (1)..(403): unsure at all n locations
atggtcnccttccgtgatccgaaaactgttgccgagaagcgtttcaatactgccttatgcaaaggccgttctgttattgagcatgcactcggaatttttaagcggcgcttttcgattgcaaagttgttaaatgattttttaaaataaaaaacgctatttcagaacatcatgtcgcttgaggcttagacggatcgcaactgccattctagcagcagctgttctacataatattgccattgaaatgcgtttgcctgaaccaccactggcgacggaagagtcaaatgaaaatgatgatttaaatgaaataaatgaggatgaaaatcgaaatgccattttaaattatcgtcaagcgcgccaagctggaattgagaaaagacatgaattggtggcccgttttacttaa

SEQ ID NO: 67590 - DNA, 80 bp, Heterodera glycines
tatttttttcctgagctccccgtggcctgaaacgcacgaaaaacatgtttttttgggctgttgttaagctacttttcgag

SEQ ID NO: 67591 - DNA, 287 bp, Heterodera glycines
atgctaaaattggagaaagaaggaaacgatgatggatatttcgtttgggtgttgaagcgatgcccaattggggggacgacggcggttcaatgggagcacaaaaatttgaacaatgtcaactttataatttttgaatttgggtgagtggcaacagcattttcattgtttaaggtaatcaaaatttcacttcatttaggcgattgtctccaccaaagacgggccaaatgaatgcaaaatatcgtctgaaaatgaatgccgggccaaacggacagcggaagaaaaagtga

SEQ ID NO: 67592 - DNA, 944 bp, Heterodera glycines
atgagtgggacgatcacaaggtgtgatcgggttttccgacgggggagtcggaggccaagattttgattgaatagccatttcattgatttgatcaaatttggtaaaaaatgtgatgatttatttaaaaaatttaatttgaaattttttcaaaaatgttttttgttttttctcagatggccacgtgctccatgttgcaaatattattggcttcgtctgatgactttttgtggcattttttaaggtcatcattcaacaattagatttttatgaaaattgaaattttggcataattttgccattcatttgtgtaatgcattcatttatattttatttacaattcttttttttacaaatattaaattcaaattgaagccttggctaaaaaccattgaaataataattaaaaataaaaatttaaataaataattaattaatttcttaatgaccaggcatgagctgccaccgaagcgttttttcagtgtgtttgacccatttgatgacgaatacaaacattggaacaaatacggctcaaaacggatggacgagcgattgaacagacaatgctattaccacaacaagcggcattattttgttggataaaatgccgaaaaaagaaaaacataacggcattattttcttcgacagaatgccaaaaacgattgattgatgtcaatttttttgttatgataaaaaggggatctacaaaaccacatcctgggctaaatctctttgcaaaaaaaaatagggctggtgatttaagccacgaaaaatcgccaaaaagtcgactaaaaaaagttttaaaacagcaaaaaaggcattaaaaagccataaaaagacgaaaaaaagtaaaattaaaaagaaatatccaaattaacaaaacaaattaaaaaaaagaataacggagaacgaaaaaatgtggaaattaaaaaaaaattgcaaaagaa

SEQ ID NO: 67593 - DNA, 499 bp, Heterodera glycines
atggagaaggcctgcaaaatttggagagattatatcgattttagtgcgctaggttcgatgaaactttttaaaatataagcctaaactttttggcctgtttaaaaaggaattaaaaatttttaaaaattttattcatctcccttttgatagaaaaagcatcagagagccttatttaacttttaattaacatttggtgcgtttcagagcagtttctgaaaaaatatttatgaattgattttgctaaaaaaataaaatagtgaagctttaaaaattaataaaaaattttaaattcagaattactggagttagcatcatagcagtgcttttccttgtctttttgatgctctcgcaaaatctggttcgcttctgaccagtttataaaaaaaaagttaagcctaaaatttttcgcatatttaaaaagcaattaaaaatttttagattttttattcatctccctttttgatagtgaaagcatctgagtgcagaaaataacttgcaa

SEQ ID NO: 67594 - DNA, 916 bp, Heterodera glycines
  unsure (1)..(916): unsure at all n locations
atggactttaataatctgtcttcaaattcgacaattcttggggatttggtaatttataacattaaaaataaaaaattaatattatcaattttttagttttacaccacttacaaaaatgccggactgagtgccggcctcgtcacaatggctgtgctaattgctttgtgtgctgtgccgggaaattgcatgaatctgttccttgtttatttgacaatcaaacgaaagtaagttttttaattaaaggaataaaattaaaattgattattttattaaatttttgattttaatttatttttcttcgtcatttttgttcactttcttttgcctattccttcactcaaatttttatcaaaattatagggatttgtcgaactcaattttaataccatattccctaaaatatagcctcccccaaaattctgcccgaccattgagaaaacgcccttccgaggggccaaatttgagttcgggaccctgtgactgaccatttttccgtttttttcaattattattttttattttcgcttttaaatttatgaattttaatgataaatcaaatttcaacaggtcgcttcgcgggagcagcaattatttgctggcattgaactcgttctacgagtttctgcaccaaacgggccattacatttttctgttcaccattctgagcggacgcaattttattccgttttttggcagtgccatcttccaactccaatccatttttggctataatgcggcaattttcacaatgattgagacggcggtggaccgatttttggcggtggtgacgccgaaattgtatgcttcagaaaatgaaagaatttatataatttntattggtacttttccattatgcggacacaccccaaaattatacaaaaagaaggggaaagggccccgattttatgcctcctaa

SEQ ID NO: 67595 - DNA, 359 bp, Heterodera glycines
atgaaccgacggtaaggaaatttttgaaaaattaaaattttcgtttccaatttttcagttggatttgtgcggatgtttggatggacattctgccatcttttgaccgtccccaactcggactcaaaatggcactgatttccgaccgtttcgacattttagtggacaaacattttgatggaaaaggcgaattgacaatttggaatgaccatcgcaattcgcaaggacacggaggacgagcaaattggaccaaaagcgaaactatttatgcaaatcaaggacaacaaggacaaatttttgtggaatttccgatgcaggaccatccgttgccaacaaatcccgattatggaccttatgattat

SEQ ID NO: 67596 - DNA, 155 bp, Heterodera glycines; identical to SEQ ID NO: 51421

SEQ ID NO: 67597 - DNA, 1021 bp, Heterodera glycines
atggccataaaatatggaccaaaaatcgcaaaatatggacataaaatggcaaaaatcgcgaaatatggacataaatggcaaaaatgtcaaaatatggacataaatttttcaaaattgagtgcaaaatttcttcaaatttattggttgaaattgcatatgagatacatttccaaattttttgactcggtaaggcgctttgacaaagacggctttcgttttgcaattagtcggtcaacattcggaaattggtctcgaattttttcggcaattacgtgcaatcattttaaaagaaaaaaaacataaaagctaaaatttattaatttttttagcgcaaaatcaacaacaaaagcgaaattttcgcttttttgcttatttttgacataatttattaattttaagaaaatttaaatttattcaatattctcgagaaattttggcgaaaaaatgattttttgaaaaatttttcgggttttgggctcaaaaaagctaatttagctgctgggggccgttctaatagaggtttttttgaaaaatgccaaaatatggacataaaatatggaccaaaatgccaaaatatggaaaaatatggaaatatggacataaatcgcgaaatatggaaaaatatggaaaatatggatatagaaatccttcctagaagcttcaaaccaagctaaaaacatgtttttcgtgcgtttcaggcctcccacagtccaggaaaaaaatatggatttccatgtaattctattccctaataattagacgacattttcgttgcttttgcccgcttcttctttttctttcgctggtggcgacaatggcctaaaattaagatattttaaatatgatcaaagtgttattctataaattaattcacctaatttttcaggacttttttccattttttcgtgactttttggcgatttttatgacttttttagtcgactttttgaagatttttagtgccttaaattcccagccttatgcatcattgattgatttgtactttgctttctcattttaa

SEQ ID NO: 67598 - DNA, 773 bp, Heterodera glycines
atggataccggattcgtggtcagtgacctcgaaaacgcaaggaacttgtttttaagacaataaaattcgctgacgcattttctgctgacgctttttccactgacgcattttccgggcgccatttgatttacgctcccttttttgtttagacatttctccgtgccaccacttctgtcgcttacaatgttcggcttgaacttctagtggctaacgaaatgaatattgttgagccatttgagttggtgaacgaaatgacccaagaaaagttgacactgacgaaggacgaagagatttgtctgttgaaacggtgtccaattgttggggagacggcggcggttcaatgggaaaaagacgaaaatttggacaatttgaatggagtgatcttccatctttatcatgattgtattgggtaagcaaaaagattggccttacttttgaatagagtgccacgggaccgggaattttgggcaaacccgggaccgggaccttttcgggttgaaaacccaggaatttttgcctgggaaaaccgggaatagtcccaggggaccttggtactcaattgtactcagttgtccgctaccaggtcccggtcccgtggcactctacttttgaatagagcatggacaggagggtacagtagtgtcctccgtacagtactttaaatgttcattcatttcaaatttggtttatttaggccgctgtctccgccagatcaaagcgatgaaaaagtgttctcgactcccgggcccagtgatcagcggaagaaggagtga

SEQ ID NO: 67599 - DNA, 100 bp, Heterodera glycines
atgattaaagttttcattctcgtcttattttgtacattctcagtatcagccgaatacgatgactacattgatgatgaaatagaaggccaatcctcagcag

SEQ ID NO: 67600 - DNA, 276 bp, Heterodera glycines
gcatacggagataaaaattctaaaagaaaatggaatctgtcaaaaataaatgctattgaatactgtgggtccagtcgggtccatcatcatacccatattggtagcggtggtgttatcaatcatttattcaacaatattatacaattggatggtccgactcttctcgacttgcagtcggatcagagtctgattgcgtggagaagtggggaaggggataagagtcggattaaagggaccaccttctcgtcgacattaggttatgtcatatgtgattag

SEQ ID NO: 67601 - DNA, 1049 bp, Heterodera glycines
atgaacacggaaagtgagtactctttgttaattgacattatattgttatcaattattgaggacatcatcaaatgtaaaaaaccaaatttcataagcgggctcaatcctaagccaaatattaatctcttttcaattacgatagatattttttcaacaataaaaattaattagttttttacagagcctggcgggaacgggattccgcgggaaaacacgggaatcccgttcccgttttttttgccggacgggattttaacaggaacgggaaaatggctggaataccgttcgggaatcccggcccgtcattttcgttttcccattcccgttcccgtaagttttttatcaaaaacgggaaaaaagtacactgtaagaatgggagtctgagtaaaaattttgaagggaattgtgtgaaaagagattgatataggtatatatatatatattagagagcggcgggaacgggaatcccgcgggaaagtgaaaaattaatcatgaaaattagtcaaaggaaaaaaattttaaaaaaataattaatatattctttaaaaggaagattgccaagtgtgcaaatggcctaatggctactctccttgactttcccttcttctttccccttgttcaatccctctacagaaattaaattattttgaattttttttttgtatactcgtgggtttcctataaagaaaatatgattcctatagttttttttaaattgatacatattttatcattttttaaatgaaaatcctaccaatttagcttaataatcccaaaaaccaacctttttttgttgaaaatctgttaacaaattgcacccaaatttttaaaatttcccccggcggcgcctatcggcaccgccggacccccttttccccaaaagttttttggaaaaagtgcgccgaaaaaagtgatgagaaaagcaaactgaattctgatattattcgatcatttagtccgaaaatgattaattgtttgaaataattaaagaaatttgttttaaaattttcattaaatttaatttagctttaacaattggattttattaa

SEQ ID NO: 67602 - DNA, 632 bp, Heterodera glycines
atgaacttccgtggtgcaacggaagcatatgccattgttcattcaatgccatttgcccgtctttcacatcatgttgtcaaattggcaattcatttgccaaaccaacagcccattgtatatagggcattccagctggtgagcaaagctcaacaaatccagcaaggcgaactgccagaaacgcattgttcagcatattggaaacaatggcaaaatgagtggaagaatgacccaaagtttaaggacattctttttgaaaaagtcccagagcagttccgatgggcaaaggacaaatgggtcctgtacaaaaggcagcaaataaaaaggccacctatcggccgaattgttcctgtacccccatcggacccggaaaggttcgcgctctattcacttatgcgtcactttcctggagatccagatcatcttaagatggttaatgggttgctttgtacctcattcactgaggctgcaataatgcatggtcttcttgaagacggcaaaatttgggacaaaactctggcggaggcagctctgtcgcgctggccagatcagatgagatggctttttgtgagcatcatggtctatggccagccgagtaatgccatagaattgtggaacaagtacaaagaccaaat

SEQ ID NO: 67603 - DNA, 357 bp, Heterodera glycines
atgacgacaaatttgcctcaaggcaacgaagctcaaaatagtgggtcagattttgatccggtatacttttcgcctgaggagaaccaaagatgggcaaacttactggtcagaatgagagcattcgagcaggctgtctgccgacaatttcgtcaaattgaaacccaatttgctcaaatttcgaaccaaattcaaatttcaaacactgctgatcgtgtcagggaattagagtcttccttaaaggaactcgaaaatacaatggaaatggacacatttcaggctcaagaaaaaatgattgatattgaacaagaagttggtaaagtgaatatgagaattgattaccaggaaagattgactaaa

SEQ ID NO: 67604 - DNA, 303 bp, Heterodera glycines
aaaattccctcaaaaataaaaggtctattgcgcaccgccctccctatcatgctcgagagcatttgtatgtgtataaaatttatcaaaaaaagagatagccatttttctgggataacctctaaatataaaaatcctctgtgaaataaaatggcgattgtgcacagccctccgtctcatacgcaagcgcttttgtgaggtataaaatttctcaaaaaaagagatagccatttttctgggatagagtataaatttaaaaattccctcaaaaataaaggtctattgcgcaccgccctccctatcatg

SEQ ID NO: 67605 - DNA, 756 bp, Heterodera glycines
caagtgcaacagctcaaagagatcgctcctaaggctaagctgaagaagctcggtctcgcggacattggcccggagctcagcagcgaaagcgaaggggacgaggaggaagaggatgcggctcacaacaccgagcagcagcagcaggacgatgccaacgacgtcccagacgacctgaccatggacgaaagggccgatgctgctcgccgccgtgaagttctcgactttgagacaccagtctacgctcgggaactgcgggttttttttttggaatgttcttagacccttgtaattatctataaataaatatgtactaaatatacatttacaagggtgcccatgtaaatgtacgttttgtacatccttttataaaaaatttttaggaacagcagcagcaggcgccgcttctttcacctccgcgggtccgggccgctgccacgccgcctcgtcgatctccgcgggcctctgccacgcctcttccaccccgcgggtccgggcctctgccacgccgcctcgtcgatctccgcgggcctctgccacgcctcttccacctccgctggcctctgccacgcctcgtcgttctccgcaggctgccgctgaagcctcctacgacaagcaggaaaagtcgtgccgaaaatgccaccatttgggcgtccagtgttggggttgttcgggctggttccacaaggtcaaagcgaggggctgctgcaactacggcagcctcaataagatcgaacgcgaatcatggctttgcgtgga

SEQ ID NO: 67606 - DNA, 661 bp, Heterodera glycines
atgagttcagtcttttttctaatccctgccaatattcgtggattaattgtgaaaacagcgacaaattgcaaacaatttggctgggtcagcatgcgtttgcacattgttgcagtggctgcaaaccgtgcccatgccgtactcttcccgtttcattatgcacaaaaagtcacaaaaaagtgagacaaaaaacaaaaacaaaaagtgtgattttatatggccaagacaggacaaggatactgtattttggaacggtggtgattggtcaaatcccaaaaagtatcaataaggcaaacctaagaaaataatcaatggtaataattagagccacttttcctgaaattttcatagcaaatatgcaataaaaagccaagaatacacacctaagaatcgaccaaaaatttcagaaaatataaaatatacccctaaaaataatgctaataatttaagttaaattttcaatttaaatttttttccaagggcaatttatgaaaaaagagaaaaacatctaaaaatatgagcccattttcagcattgaagaattagtttctgacatcacatgaacccggatttgtatacaaattcaaattttcgtattccaattttcaattgtcttacattagcattgttgaaatttcagaaaaagttttcatttgaaaatcaa

SEQ ID NO: 67607 - DNA, 418 bp, Heterodera glycines
atgaataaaatttctttgatcccctcttcttcaatggcacttttgctggtggtggttgtcctgctaataatcccgtttgtcccttttacgctttcagaacaatgcctgtacgatagtgtgacggagagctgtctgaaagtcaattgtccatttgactgttatgttgctagtccgggcacgtgcggatgcaatgcgagagtaagcaaaaccatgggcttaattaggcacagaaagtttaggtcattatcgatttgggttcgaaaaaatcaaattcttcctattatttttccaaaatgttcagatgaaatttgacagcatttggaagcgattggtgtagtaaatggcacaaaatgaaaaggaattcaaatcgacggcttagaagatgacaaagattaaaaatacattcaatcacaataaa

SEQ ID NO: 67608 - DNA, 402 bp, Heterodera glycines
gctatagggaagctattcccgaaggattcggtctccccataaatctgggcgcatcggttcggggggactgccccgaaaacaaaaaaaatcgattttttcaagtgtccgtttggggtactcaaacaattatggggagcaaaaatccaacgcagaattaaagtacaggctatagggaagctattccggaaggattcggtctccccataaatctgggcgcatcggttcggggggactgccccgaaaacaaaaaaatcgattttttcaagtgtccggttggggtactcaaacaattatggggagcaaaaatccaacgcagaattaaagtacaggctatagggaagctactcccgaaggatttggtctcccataaatatgggcgcattcgttcgggggggactgccc

SEQ ID NO: 67609 - DNA, 53 bp, Heterodera glycines
gtttgcctatacggaaaacaatagcgttacaatatcaccagaagaatgctgcg

SEQ ID NO: 67610 - DNA, 534 bp, Heterodera glycines
atgccgaaaaattttgtattttcacgacatatggcaatttataatacgtttagatctcaacgattaatttcttttatttatttttcggctttctacaataaaatggacgcgatcaagaaatacgcgatcaaaaaattccatgatttgggtaagatttttaagaaaaaaataaattttcaaaaaaaaatttaagttaaaactgcaaagagcccacaattgccgaccacactgcccatggaaaagttggtttggccaattggaaaaaattttcttaaaaaattgggccagcccatcatggcaaattcagacagattggcgctatatacgattttaggcgcccaaacaatgactaactcagtttcttgggcaataacatttttcttactttattaaatacctacattcttggtataaaacgaaagctgaaagtctcgggaatttattaatacaagaaaagagcaaaaattggcattatgcaaaaaatacactgagaaagaaacaagaaaatcagcttttttcaagtataattattaa

SEQ ID NO: 67611 - DNA, 1199 bp, Heterodera glycines
ttagactcaacagagtacccggtgattgtgcagacgatgtggcctcgcggttctgcggacgttgacgccaacgcggacccgtccgtgccgcgcaatcggctcgttctgaaaagtaagaagcgccactcggtggaccaatccatggttgtaatggcgacggcatcggccatcgacacgtacgtttttggcttttttcaaataaacactgcttttaaagggcaataaagttaattatttttaatatattaaaaagcatatttaatttaattacaatttatatgaattttttctattaataaatcacgaatatttcaggtttctcgccaaatttcttgcccaaccacaagtaaaaagaaaggaaaaaaaaaattaaactttattttaaattaaggaccgtgaatatgcggacctttgtgtgctgcctgaactcactgagcagacattgctggagaatttgcgtgatcgttttaataatggtaattaattaatgctggtggatttaaatgttatttataattaattttttttaacaataatttattttttaaatataattataggtaaaatatacacttacattggcccaattttggttgctgtcaacccgttcagctttttccctatttataatccaaaatattcgcgtctgtattgtcagagtcgacgtttgggcatattacctccgcatggtacacataggaaatttttttaaaaaatttaatttaaattattttttattttaaatagtgtttgccattgctgacatcacctaccataatctgatcaaacaaaaagaaaatcaagtggtcgtaatttctggagaggtaaaaaatttctatacggcgctaatctctgacaaatacaaacttcaaacaaaataaataaacttcaagctgcatacattattagctcataaaaatttaaatacaagtagattccatggatgaaattgaattattgattttcaagcacatccttagaaataagtactattttatatttgtaggagaaatttgaatgtcattcttcctgattaaatcgaaattcatattatggacttatcgcttttttttgttaagtccggctccggaaagacggaatccgccaactttttgctccatcatttgaccacactcagtcagaagggcaaccaagcaactattgagcaacaaattctatctgctggccccgtttggagg

SEQ ID NO: 67612 - DNA, 8417 bp, Heterodera glycines
atggatttccatttaccctgtgtcatcgtccatctcattctttgcgtttttgtgcttcctttttcatatagtcatcaacaacaatcaattggagataatcaagcagaaaaaactcttgagaatgcacttgggtaaacaaattcgattcaaattagtgttatacacagggttcgtagatgaaaattttcaaaagcctcatttggcaagcaaaaaagcctcattttgggtcaaaaagcctcattttcacaaatttattcaaaacacgtttaaaatgttcaaatgtgatatttttattgtccatgatcaattgcaattttttcttagaactaagcattttgtgaaattctgagcatgaaaaatcgaagttgatttttgcggcgctttttccaatttttttggggaacaggggggtccggcggtgcctatcggcaccaccaggaaaatttttgtaatttttaatgtgatttgtttaacagaatttgcccacaaaaatggccaaattttgcaattttatgcaaaaattttaagaaaatagaggatttttagggtccggcggtgccgatagggccgccgggggaaaaattgagaattttgaccatatttttagcagattttcattaaaaaattttttattttgtggttttttggaaaatttaacaaaaaaccacaaaaagcctcaaaatttctgaaaaaaccacaaaaagcctcaaagcctcatttcgaaaatttagcctcattgacctatctaaaaaccacaaaatgaggctaaagcctcagatctacgaaccctggttatacatatttaaaaataaaattattgataaaaattcttttgtaaatttgctaacgaaatcccatatcggtagatagtgggagatgttggttctattgcaatttaatgagtccaatcaatacaaaatctcagcgtttagacaattgccaaaaaagcatccaataaaaattgactggactcataaagatcgaatggactcataaaatgcaatataaccgtgatatgttaggataaacaaactttaaattacaattctaactagggttcggaccccgtgggcgggggtggcttttcgcgggggcgcgggatggcgggggtcagagtcgcgggggcggtggccgggtcacgacaattccgcccccgcagggatggggcgggggtttgatttgaattagctccaaaaaatttcaattccttttggcataaattgcacagattttgtctaaagaatgaccaaatttattgatttatgctaattttttaagaaaaaataggttttttggggggccggtggtgccgataggcgccgccgggggaaatttttttatgaattttgttagaaattagccaaatttttcagaaatttcattcttttgtatgaaaatacgctctaaaatcagaacatttcctagaaataagaacataaagaaaccctgcattaatcagataaaaataaattcaaatgaaaacgtcaaccggtgtcgaactcctaacaagaaatactgttagtgttgaagcactaaccactaaaacacaaatatattggaaattaacagcaaatatactttatttcataaaaaatttgtcaaagatggttaaaaattcaaatttgtataaattttttgccttttatcccacgatatgcaattcttagggggtgtattttcacccccgtgcccccgcgggggcgaaggtcgcgggggcgggggtcagagtcgcgggggcgggggttaggccaaaaaacttgtcctgcccccgtcggggacgggggtgacggggtccggaccctattctaaactaatgattacgttaaaaaaatcgtgggataactatttacataaaacttactaaattaaatctagtaatactgctgctaatcagccacgaaaacgaccaacaccgccgagttcgcctcctcgtgcatttgtggacgagtttgaaaaacggactgacaatggaccaagagcggaaaatgccgaaaatcaaccaaatcttttgaatttgaatcgtcatgagttcaaccagcttgacgaagttggcgcaacaacatttgaaccgttgatcagcagactgatcaactcggcccgttttgatttgccacaacaacttcaccaaaactcttccgctgctacagctaataatattagcatggtgttgcccattgcgcaggaaatgatgttcgaatttgtgccacactttgaacgggatttttacgagctgatggtgccccaggggtacaacgaggtgggatttgacaaatacgatttcaaattattgaaaaataaattaaattaatatcattttgacggaaacaaaaaaatcgagacggatgagaatcccgcttttatcccgttctcgtaaaaacccaatcccggcaaaaaagacgggaaacgagaacggcattcccggtttttcaagggaataccgttccagccggtctaattttctgcaatttctaatttaaaagaatgtaggaatcagaaaaaagagagtccaattactgatccaaaatgttcgatttttgtttcgaactaattaacaatgaatttatttccccataggctaccaaactgatcgctgttgtgtcattttttgacggacctttcacagtgtcaccacaatttgaagtggtcgaggacaaaaacaattggttcagtattggccacattattttaagccaggtaataagcactcaaaaaatttggataaaatttgtcaataagtgaatttttaaatttaaggaattaaattacaccctcagcgaagttcaaattctacttaaacctggaagcattgtgcagtgggaacagaatgagaatggtgactacaattttgagctacaggtagaagagtctcggtcatatacaatatttgtgtaaaaatttttttttaggcttcacatggccacataaaatttacatcgaaattacgcgcaaaggtgctgaagggtatgcgcgaaattacatcaatgtggacggaagaagctgaactgacaaaacctactgtaacgacactggttacggtaagtataaaaccaacaggaggaatggaagatactgtattctctaaaattgttcaaatcaatttacttactatgcgcttttttgtttaatgcatgcttttcaggaacccactaccgtatcatcggattcacaaccatttactgtatcgtttgacgattttactgatgagaaaagcgatagcagcagcagctacaatgaaactactgcttcctcttctgatgatgagccggctcaaatcatattggatttggatcacaatttgtacaatataaatactggttcatcaacagaaccaacaaaaacaattgaatcaaaagattccaaggatgaagcactgtttatgcttgatccaatcgagattgagctgaacaacagtttaaacagcattttgtcagcgtccagagagatcaaatggacaagaaggagggaagtgatgatgaaaatgaggagaaggaagtgaccaagacatcagtgaggacaaattttgtacagaatgaaatgggggaagatgaagcggaaaatgtggggatggaagggaaaaaagcggaggaagagaacaagaaaaaagaagagaggcaaaaagataaaggaaaggaagaagaagaagaggtagagaatgtgggaagagagcaggaaaaagaagaggaaggcaaagcggaaaagaaggacgaggaagtgggaaaagaagaaaagaatgggcaagagaagaaggaagaaacgaagagggaggaggaaaaggaagaaaaggcggaggccaaaaaagaagaaaatgaaaataaagaggaaaaagaaacaggcgaaaataaggaagagaaaaagcatcatcttcttgatgtgaacgactacattaaagccattcaaattgaactcgatgcacaattaatgggccaagacaatgacacaatttggcaaattgccgttccattcgcttcattgccttctttggcccataatccagttcccaatttggccatatcaattcctgaaagcaaaagccaacctattagccatgacgaaatggattatcttgtacggcttgaacttcattcatccaacgacactgtgttggacatgcgtcctcatcacattggaccaggagacagtgcacaattatggcttaacgaccaagaaaaagtggcaaatgagccactcgatttcacagtaagtaaaatatatctatcaccataatagggatatataaattattatggaattgggtatttggaagtgaattatctcggttgagtcattagtctcactcagtttgaaactactaaaagttgtttaggtttttgcgagtctcgaagactttggattttcaattcatattttaacatttaaattaaattttaaaataatattaaattagagttggaaagaaattaattcattttaaaaatataagaatatttccttttttacagttatttgcttccgttgttgattggaatgggcatcaaatcagtcaaccaatgagcatttttaaaggcaaatttgttgttgaggacccacccaagggaccaccaccacaaattcatcatcctgaagctttaacgggctatgaatttgtgattgatgaaaatgcaactgatgggacagaaattggacgcataaaattggaaaattccgatactaataatgcggatgaacatgccgaatttgagctgttcggccacggatcacatttgtatggacaaaaaacaaaatttaaaaaatcccgaaaatttccaagattcaaaattgactcgggtggcataatgaggctttactgtggtgccgaaaatggatggaaatctggcaatggtactcatcaatgcttggaccacagcatggtacaagtataccatctaattgtgaccgctatgcgcaaaaatggaggcattaaaattcaaaaagttaaaagttaagaaaataattcagggttccgatcattgccggaggcagtaactgttcgggtacgggacgtaaatgacaatccgccagaattgaaattgttctccgatgaaattgttgttgtgaatggacagttgagaggtgatgccccgtttatgatcggcatcagtgacaaagacaggcaagaaatggtcaaaaatcgaatttttaaagccctgatcagctgggcaagcccttcttcgatcagttatcccaaatcaaaaatcatgatatggtttaaagtgtcaggtcaatattttggtatagaaaaagcggattttgttttttaggttaggtcaaacacttaatttctaaaacggtctaaaatttttgtttgccttataatgaatcacatttggatgatcagaagatgatccacatattgatcactgatctgtcaacatttataaacagtttaaataaaatcacatacgatgatcaaatgttctacgtgttgatcactgatctgaaaaaaactaattgatttattattgtaaataaatttaacaaaatttaatttcagtgcacctgaaaaccgtttcaatgccctttcattggctggaaatttgtcaattttctttaaattggaacaatttgatgaaataaatggacttttcggcgtcatattaaaagacggggtcaaattaacggaagagggcacccatgaactgttgttggttgttgtggacggaagtggtcaaagtgacacgaaaattgtaccagtacgggttacggtacacattattctgtctgtaaacggtaacatttgtgcattaattattttcagaataatttgaagctataccatttcaagaaccaattatataacaaatcgatgccagcctaccgtatccataccggtaatttctttggttttacagtaatttaattttttggtttatttgaaggggtgccaattgtgcagttgcagttaaagcacccaccgccgagtactgttacagtaaactatttgatcagtgatggaaaccctggctggttgtcggtggagccattcattggcaatgtttttggtgccaatgttccaaagtcattaaaatcttgagttcggcatttttgatcctttttttatttagggaaggtgtcccaccaggcaattacagtattcaagtggttgctgtagaccaggaaaaacgacaggtaatgcatgaattttttttataggattatttcataattagcacttaattaagacgttttgaatataatgtgatcttaaaggttttggcggaatgtcaactgttgttggagctgacgggtgaaccagtcattgatgaacagctccaattcccatcgccatacgtctcgttaagcattgcccgattggacaacgatgatgaaaatgatgtcaattccaaaaaataataatttaaaatataaaaatgtgatttaagaaaatcgttgatttggtgccattcccagagggcgaatatctacggcacgctgagttcaattatggcgatttaagagcctgggatgaggctgaaaagccggcacaactgtcgaaggtgtccattcaaattggaaaattgattatttttttaatttaaaattttcagggagccttaactgtttttatgcccggaaatgggaccatccgtttggacatggcaaagttgcgcaatgtccgttcgcttcatctcaatttcacgataaaacccaatccaaattttattgccacaaatggaagcgaaagtatggaaagttttttagttttttttgaaaaaaaaatttatttagaaatcaacaatgtaactcttgtggccatcacacttcaatcggatgaaacaaaaacattggcattacaacgacagcgcgagaagccatgttttgccgctccatggacaaatgaatcggtgccaattcggcttcgaattaccgaagaattgccggtgaaccatcattaattactgtattttcacgggctacagtatttcttagatggggcaaataaaaaaacgaaattattatgaaaaataaaaaaataaacttaagattgaccatcccatcatcaaattgcctgcttacaacccaatgaacagcactgatcggctcaaaattttcatggatggtccttattcaaaattgttcaccattaatgatggtaaaatttaatgggaaaacaggcatggttaaggcaatgtttttctaaattaaattaatggcatttttaaatatttgaatttcattattaaaatagatttttattagaattattggatttccatatcatcccaagccttgaaaaatcaaattttcagatggtgtcattgctgtgaaagctcgacttgactttgaacaacttttactggatgatcatctaattgaaatcctattgcttgctacgtcaatgaaatcgccaccgcaaagcacgacagctcttgtacagattgaactgctcgatgttgatgacatggcaccggtcattcaactggtcaatggcatgctaaaagagccaaacaggtggtgaattggagcaaaatattttctggaaaaattgaacatcaattttactgggataattggattcttacagagaaaaatcgtcctgatttttttggagtagttttatgactcagaaattccgtaaaaaaaaaattaaaacggaaatatttgagaataaaagcattaaaaaaatactttaatgaataaaacacaaatttataatagaaatttgatcaattgagcttgaacattcaactgtaattaaataaatcgattaaatacaaaatttaattatttaaaaaattagagtgctagaggatgaccaaaatgctttgatcattgtggacatagaggaaaacagtggccatggcaagcttgaacttatgctgttgaatgtttctgatgttgattcgaaaaagcatcaatgtgaactgatcggaggcgaagggaaatttgcaatcgagaaaaaagtcaaattaataattaattaattgtaattaattaacaattaattttgttttataaataattagaatgcggcggagaatcagtggagtgtgaatgcaaaattgagtgaattggatcgcgagttacaagaccattatgcactggtgttcaggtgcaatgatgaaggtggtaacaacggcgaaattccggtagaattttaaaattaatttttaatcataatatttatttcacccaatttcgaatataattattattatcatgcttttgccatatttaataatttgtcctaatcatacatatttttggaaaatattttcagatccaattgaatgtgttggacaaaaatgacaatcgaccagtgatcacgtgggatcggcaggacacgcaaatccgcctgctggataatatgccggctggcagtgcggtgggacgctttttcgcccgggacaaagacgcgggggacaatggtcgcgttgaatttagtcttggacagcgacagcagccggctgccacgaaat

SEQ ID NO: 67613 - DNA, 1180 bp, Heterodera glycines
  unsure (1)..(1180): unsure at all n locations
gctcaacaaacacattcagtcgcactatcgtccgctgaatttgcnctggacactttgcatgcgttcaattttccaatggaacaatgaaacagtgaatgtaaaaaacattgaacaaattaattaccattttaaaaatttaaactaaacgagtttttttttaatagttttgattaaataaaaaaaccgaatttcaaattagaaaaatattggtctgaaaattttcatcggaacacaaaaattaactacattttcattataataaaatctaattatttttcattttaagcatttttgggtgtaaaagcttaatttttcgcttcattttggttctgtggtgccatactgtcgacgtaggaaaaaatttaatttctatgattattgttatttgatcaaaaaataataataaaaaagcataggtttggagccacctgctcggcttcgtctggttcgtctacctccaatggtgggccctcaatgaatcgcttccgtcggtgaacgcgccgattgcggactattgggtgatgggcacggcaatgctgtgcagtcaggtgaataattaccatgttaattgctttccaattaatagaattaatatttgaataaaattaatattttttcatttaaatacaaaaatgttatgcctaaattgcatctgttcaaaatctattgcagctctgtatgcttctctcctctgcttaccatattttcgggtgccattcgcctcagcgccgcaaacaatggtaaaataaatttttaaaatatttttgtaaaattcaaatattttctatggaaaggcttcgggccgaccttttcggcgtgtcggctggactcagtggactgtacatgaccggactgtacacttcattttaccattttccggttagttcaaaaaaaaaattatcagcgatttatttgctatttttggaccaaaaattaaacctaaaaatttccaaaatttaggagcttcaaaaattttacggcactctgatcggtgccatggtggttttaatcgccatttacgtgccattccgtcgcttctccatccagtccaaatgtcgctttggtgtgccggatgtattgtatttgtcaatggcactgatcgcactatacccgacttggcattggacccaggcaaatgctaattattaaggctggcattttgacttgatgctaatatgca

SEQ ID NO: 67614 - DNA, 734 bp, Heterodera glycines
atggccaggtttgaaccggcatatctggcttaaggacagtgcttttacggctgaactacagaccgtgccctgtacgacgccccacgcgatcatataagatttacagcgcctcttgtgatcctttacactccctctcgggaaacctacgactttatgccaccatggcatgctctggtatcagggaatgcttgtcttgtctgaatcgatccaaattgggcaaaattcatattcgaagagtcggtcgagaaagttactctgacattgagacaaatgtcgatcatttcaaaaaaaaaataattgcgtcgaccaccaatcctttaggcaaattcgatgtgatcggctgctcccaccagtggtggcatttgctaatcctcgccgcgttgacctattcccactggacgggcatccaactgctgatcacttaccatcgcacggcactgatcagacagcagcctctccatacggaccaaatgcttcttcaatctgccgcttcgccttttgtgccagcgctttcgtcgtcgggccgactgggaacgaatctcttaaatcacaccgcgacatcaaccaacggcggatgaccacacaaatcataacggagggcaaaatggaaaaacaatttcgcatttaattgtatttaacatgcacaatttcagatgaaaaatatttttgaaccaaaaaaagggctcccggaaataatgccaagggaaattgcgtcagtatactgtgtttctaaa

SEQ ID NO: 67615 - DNA, 563 bp, Heterodera glycines
atgcacacaaaagtggcaaaacactcaccaactttaaaattcgaattcaatccgaatgaaaagccgacggttggccaagcgattaatgcccttttgccgaccaattttggcatgccattggcacaagcgatggcacagtttgacttcaaagtggaaatccgtgaacgtgccattgagtgtgcgctggtgtttgtcgactttgaccaatgggagaattcatttttagaacatcacggagtgtacaaagtgttgctttacccaaaatcagggtaagacggaaaggatacggtactcaaattaaaatcattgtctgattttacaagttcagaaataatgtacgcacaaatgatcaatcgatgacacaaccgtgggcaacaaacactgatcagaaaaaaggtaaattattaatacaaggaaaaataagaaattttttttagctgattgtgaatttcccataatttatcgtcaatttcaagaaattagaataattagggcaaaaagtgccaataattaagaaaatatccccgcgttattcttgagtttattccataatttagatcata

SEQ ID NO: 67616 - DNA, 563 bp, Heterodera glycines
atgcctctggattatattttttttaccagaaaatatattagacctggatttcctggaccaaaattcatgaaaagttaggtccagaaaaaatccaggctttccatgtcctggacccggattttttttttcatttttggcctagattcttgtccaaattcgggattttgtcaaaatggatgtcagatttgtaattagcgaccacaaaaacacccgtttaccaactttttatgacaaaaaaattttcaaaaccaaaaaaggacccctagtgtttttaataatttatctaaaaatctaatttttttttacaattttcaggtgctaatgccacaaggcatcggcctattcttgtcccaagtcttctccaacatttggccaaccaatttggcatcacggatttgcatctgtccattgcgcaaggcttttggcggccaagaatttggggcgcacaaatgccgtgcacagaagtgcccagtggcaacgaattaattgccaaatttgacacatgccaagtggctaattgcaggcaatatctataaatgccagaaaaaatttttattataaaa

SEQ ID NO: 67617 - DNA, 55 bp, Heterodera glycines
aaattagtcaaaatacatgtcagattcgtgattagcgacctttaaaaccccggat

SEQ ID NO: 67618 - DNA, 555 bp, Heterodera glycines
  unsure (1)..(555): unsure at all n locations
atggcaattcaatttgataaatgcaggttaacatcggaaccaaaggtagatgcccaaatcaanttattaattattcttgaaacattgtgtaattaacctaaatttacatcaattatgtatagatgagagaattattgtttaaaaaaaataaataaaattgttaaacggaatttttaactcaattgcactgaatcaaaaaagttaacgctaaattcatttattaaaattaatttttagctaaatttgggttttagaagagggtttgttgaaccaaaaatggatttgaaaaaggtcgccctttttttttgctccgggttcggaattgtccaaattaaaccaaatattcatgataatgtattatggtactccggggaacgtgtttttgtgacatattatgtttaattgtcatattactttatttaatattaaagataaaattaaaatcaaatatttaatagtcataatatttatttaaaattaattatagattagagtttttttaatttaaaaagaaaaatatttttataaaatattaaattccattataaaaataaa

SEQ ID NO: 67619 - DNA, 271 bp, Heterodera glycines
ataaactgatcagaagcggaccagattttgcgagggcatcaaaaagacaaggaaaagcactgctatgatgctaactccagtaattctgaatttaaaattttttattaatttttaaagcttcactattttatttttttagcaaaattaattcataaatattttttcacaaactgctctgaaacgcaccaaattttatttacaagttattttaggcactcagatgctttcactatcaaaaagggagatgaataaaaatctaaaaatttttaat

SEQ ID NO: 67620 - DNA, 436 bp, Heterodera glycines
ggttcgatgaaactttttaaaatatgagcctaaactttttggcctgtttaaaaaggaattaaaaatttttaaaaattttattcatctccctttttgatagaaaaagcatcagagtgcctaaactagcatgtaaataaaatttggtgcgtttcacagcacgttctaaaaaatatttatgaattaattatgcaaaataataaataattaatgaaaaagtcagaatttcgaaaaattttaaaaacaacaagcgttggcattttttcaggttaagttagtcctttacaatggagaaggcctgcaaaatttggagagattatatcgattttagcgcgctaggttcgatgaaactttttaaaatatgagcctaaactttttggcctgtttaaaaaggaattaaaaatttttaaaaattttattcatctccctttttgataga

SEQ ID NO: 67621 - DNA, 723 bp, Heterodera glycines
atgtcttcagctcgatgccggatggctttggggcccgcgctgttccgacttcggcaacatgtcactacggccgaaaatttgctggacgagcccgtgatcaatgccgagacgaccgaaaaccttgaacaggaacgggggcacatcacccgtatcctgtcaaggatggaggtcgagctggacgcgtggggtgccatcatgaacggactgcaaggcccagcgagagaggcggaggaagcgcttttcactgcctttattcgagatgaccggcacttgacggagtggttggaagatgcgcgagaaatgttggctcacatagcagcagaactcgcagatgaacccaaccagccgatcgcggcgggaggacagcaaccagctgttgttgtgaatccacccgtgccagccgtgccattcgtcaacaatgccgcatttctcggcggtgccaatgttcaacagccagctgctgttgccaaccatgccaatcagccaccattggtgccaaataatgcccaaatcgtgccaaacttgccggctgttgctgcgcctgcgcctttagccactgctcggctgccgcagctcagtcttcctgttttttcgggcgaaccaatggaatggcccgcgttttggcagagtttcgagagtgccgtcgaccgtgccgcccttgagcccgtcgacaagctcactatctccacggttgcttacgcggaaaggctgctcgtgccgtaa

SEQ ID NO: 67622 - DNA, 666 bp, Heterodera glycines
  unsure (1)..(666): unsure at all n locations
atgccaggagacattcaaattggcgcactnttcccaatgcatcgccaaattgccggctccgaggggtgcggtgccatttgggaacagtacggtaggtgtattagcggtatttgtaaattcaaaattcgaatttccatcgcagtgctgttaatattgggcggctcttttaggaattcaacgagccgaaattgccatgctaacggtgcagcagctgaacaaagtgttgccgtttcggcttgggattagcatccgcgactcgtgctggacagaacgaatcgccatggagcaggtcaccgctgttttcgctgccaagagcagaatcatttttaaaatgccaaaattaaaatggaaaaacattttttaaatttaaaatgtttccctgcagaccatcgcctttctgcgcgagggggtcacccaatgttcgtgctgccaaatggccggctgtcagaagaagtcgagccccgtagtggccatcgtcgggccggcgaagtcgtccacaacaattgcggtgcagaatctgctccaggtgttccgcattccgcagattggctactcggcaacgaccacggatttgagcgacaaggagcagttcggatactatctgaggtgcaaaatgctcgaattttcatgacaaatcccaaaaagatgggttttggaaagcattag

SEQ ID NO: 67623 - DNA, 1219 bp, Heterodera glycines
cgttggcacagacaatcaaaaagggccacggattatttatctgcaagagccgactgttcaccaaatttctcctagtcaattccgcaattttgttatagaaaataccacagatcccgaatggaaaggtgaaaatgtttttttaatttatattttattttaatttgaaattttagcaacaaaaaatgcaaatgaagcatcatcatcttccataaacatcccaattaacattgatagtgacagcgatgatgatgattatgatggtttggacagaagagatgcattaaggacaggaggcccattgcttttggactttttcaccggaaaggcatatcagcaaaacttaagcaggcaaaatcttggagaatattcaaaaagcaatttacttgatatgtcaaatcaaccaaataattcgaatcaaatgattttaccggttgtgagaaatcagccaagcaattctgatcagaccaagcaacggagtgtaaacgatgattccaatatgcttatgcgagtaaatccagctaataatttgccagaagtgatagcttcagtaaccaattctcagcagcttactgaccagaataatcagccgttgacggaaaatccaactgatcagtctgtaagatcaaatcaaaacaatcagcatgaaattcaagaaatattacatttaccaatgaaaaatcaacaaaacaataaaagagcagcagcaccaaattcacgacaagaatttggatttgatctggagaaagtgccaaaagcaaaaaagggtaaaggtttggcagaatggttgggtcatagcatagatcaaaagcagaaaattgctgtcgaaaacacgtctgaacagccaactattactgatcatattaatttatcgtcacagacaacccaattaaacaatttgaataatccaacaaccaatcaaaatgtggttgatttatctgacaaaactttaagtacgaagcaaaccaatgaagtcggtccgttaaactcaatggacaattctgatcatcaaatgatgggaaacgctgttgttcagcaagtcgcatcagatcagtcatgccagtcgacccagactgacaaattgtctgatcaaataacctttacaaaccaatttgacccgaacaatttggaaaataaattcaatcagtccaatttcatcaatttttcattatcagggcaaaatcagacaaataatgataatcactctgaacaatctgaacca

SEQ ID NO: 67624 - DNA, 1112 bp, Heterodera glycines
atggcaaccgatttgattcattggcacaatgcaggcagaaatgtgccaactttgagtcggcggcacaaggcagttcaacaggcgatgaaggacaacatcattcaatggttttgccagtccgtgagttgcacaaaaaaatattttattttattttaaaaacgcccttttatagcaaagtgttctggtggtgttcgcgcagcggtgaacgctgatgcacgagtgattgaatgtgccggcactgacaaatgcccggacggctacacatgtgttggcaataaaaactgttgtccagcgtcgaaaggtgccaaacaaataattttggaaatggcgcatcatgcaaaattgttttcaaaattcatgaaactatattttgaccattacttaatatcagatccaaattcgaagaaagtcgaaaattcatatcgaaattcgcttttttggctcaagtccggattaaatacaaagaaacaaactaaaaagccaacaaaaagatcatttaaataattctaaactaaaaagaaatttcgactttttgttcggtcccggtccagggttcagaatttgcacaagtgaatgcttgattcatgatcaaatgaccaagaaaacactcggaaaacataatttcaactgaattttttaattattattttttcttttgaaaatggggagagaccaaacgatgcgcgctttaagcaaaaattaattgtaatatatcttacaaaattaacaccctaaaagaaattgtctgcggtattgaatatgatacgggacgatacgccttccaggggtcgcatacgccggtaaattttggacagaaattgaaaacactgcactgaaaatttacagcgttacttctacaagaaagacattgacaattgccttctgttcacttattacggtgcactcggaaatggcaacaatttcgagtaataataattaattattattttaaatttgattctccaaaacacaaatatttaggacatacaatgaatgcatcaaatactgcaagaagacttaataatttatgtagttataaatatttcatgatgtgaagtcaattggcgttgagaaaaaaattatgtcatttcataaaaatgatcctaaataaa

SEQ ID NO: 67625 - DNA, 56 bp, Heterodera glycines; identical to SEQ ID NO: 52733

SEQ ID NO: 67626 - DNA, 192 bp, Heterodera glycines
atccgcgtttcattacgccgctttgttcttcctcttctgagcccgtaaagcgccgttctctgctggtggagccaatggcaccgctcgaagatcaccacgagttgccggtggtcgttttgcaagaggagcgactgaactcgcaaccgccggtcagcaaggagtacctgcaagaactgttcgttcaattggatg

SEQ ID NO: 67627 - DNA, 601 bp, Heterodera glycines
gaatgtccccaagcacagccaggcccccagggtgcgcctttgccccagggagtgcctgggtcgcctggagtgccaggcatagatgccgatggaggagtccgtgggcagcccggcttgccggggcctccgggagcaccgggcgagccagggcagccgggccaacccggcgaaccgggcccagctgggataatgcagtgagaattataactaataatataagcataaaaacaatgaatattgccatgaaatttagcgaagttgacggaaagccaggaccgccagggccagcgggaccgcctggtctgccgggcacagagggcgcgccagggcagccaggcgccccgggtcaacccggcgggcagggggcagctggcgaaccgggagagccgggcccaccgggcaaaacaggcgccgccggacaacagggaccacagggcaaccagggcacagggtaagcgtggaggaaaacggggtaaaaatttatttttatttaaaaatcattgagagtcgaaatttcggcatttataaagtaatgaaaatttgtcccttctgaagaggcacttgcgaccattgcccgccgccgagaacagcgccgggctat

SEQ ID NO: 67628 - DNA, 1470 bp, Heterodera glycines
atgcagaagggatacggtagggacaataaacggtgttggcttgaagatgaacttttccgaagaagaatgcgagtcaacatatttctggcaatcggcatacaaatattgttatgcttcgcattgtttaagaggtatgactttggttaaataagaccaattaaacgaattgaaaagggtaattataatgatgaatgttaattaattttaaagtttgacggttccctggagcacgactcaatttaaaacccaaatatgggtcaaggagtttaattactacttaaatactgagttcacaactctgttcttatttatatcccacaaatatggatttaaagttcaacctaatgcttcaagtcttatctaattagagttcctccccgatcttaggtggaagaaatgtatgggctcataaacgaaaatacttgaccaaactttttaagaatgactcgaaaattaagaaatgtcatgtatgaaaccatcataatcctcttaaagaaaaaaaaggcttttttggaaccgtactattatgcttggacaatcaaaacagaggtatggaacatgtgacttaattactattaaatacagagcctacaactctgttcatcattatactataccgaaaaatttatacgaatttgacattcgaacccgtatcagttaatatgtatataaaattaggattattctctccggtcttaggaacaaaacaaatctcttagactaaatttttttaggacgattcgacaattttgtggatggcatttttagctcgtcataattcactttatcaaatattttaaggaaatgaatggcttacgcattatgggtgtgccaaaagcccggagaaaggtgcatgtagcgacaatgttgagaaggagatgaaagatttgtatggccttgctgtgagctgttcattttgtacaattggacgcaaaatggacgacatgagcaacaagaatttcccgctgtacaatacaaccaatgttgtaatgccgccatcaggacgaggtgaaacatttaattaattaatatagttagtagagcctggaaatttctaatttgcggatcgagttgcgggatttgaactaaaaatcttttgtctagaggggatcccgcgggattaattccgcatttcgcaaatccactatgctctacacggtaaaggttgttttaatgtgattgtacagtcaccgttcggaatgtcgtttgtaagctatcgtggcgcattacccatctctgtaaaggattttttgggtgctagtcgctttgtaaaactgccaaacttacagatttttcgttactttttaacacaaccaaattaaaaatctacatattacgatagctctgggcttgctctattagcataaaatttcagaaaatttcattgagttttcagaaagtcataaccaaaaagcaatctatgcgctagcgtgtgataccaagattaaaaaaggcaggaagaaattgtaa

SEQ ID NO: 67629 - DNA, 757 bp, Heterodera glycines
atgaaccaggggaaagaagaaggaaagtcaaggagactagccattaggccatttgcacacttgggcaggggtccgtatcgttttggcgccgacgttttggcgccgacgttttggcgccagggtcgttttggcgccgacgttttggcgccgacgttttggcgccaagctataataaaaaaaagaaaacacccaaatttaaaaattttgtaaaacaacaaaaaaacgtatttttcgcgaaggtaatactgccgatggttggttgcccccttttttgaagaaaatttttttgttttcaaaagtcatgaaaacatgcttccaatggttttcagggtcgctgctcacgaaccaggcatccatttcgaccaattcggaacccggagccgaaattcgaacaaaaaatcgaaaataaaaaatttcaaaattctctttttgtttctaaaatagattaaaacaaccaaaacgttttggcgccaccgatttggcgccatgtagggaggaggtagaaatgatgaaatcgttataatttttctgacgaagtctatcaaagagccggatttaattcttcatttactctttttcgctttggcttatgttctcttaattttgtatttaggtaatgaatcgtcaaattgatacgaaaaaacaaaagcctaaaataacgcatgaaggccagcttcggccggtgggctgatcgaatgaaagaatgtttcggagacggcacattctcattggcacctccaatgttctaccaaataaa

SEQ ID NO: 67630 - DNA, 862 bp, Heterodera glycines
ggtcgacagtgttcgagtgcacatggaagaaatcaacctgagcttctcccaccgttttgcggtgatgcccgacaattgtctctccatgtaagtttggcattttgtttttttttgacaaatcaaaattgcctttcatttctcggatgggaaattggggaaattgacccaactcgaaataactactttttcttccatttttatagcctcggcacggagctgctgggagctgttggctttatcctaagcttacccgatggtttgggcattcgtgcggacatctgtgcagcgaagtggttttaaaccgccctaaattttggagactatcttttttttttgttagcgaaactcctcaaactccgtccatttcgttttcgcaaaaaatgtaagttgtatggcgttttgtttgtttttattgcttttttatgcattttcattttaaaggctcaaagctgttttgggtgaaggtgctggtgactcggggaagaagaacgaaatggtgtacgttgaatttaatccggataaaattggtcacagttccattcgaatgctattcggtcatccttcaaaaaccaaattagccaaagactcattcctccaacaaattttaaattcgaaaaaagtacccaatttattgaatttctatccctgaaaaagtgggacagtaacatgcgttaatattcgatactttgtttatgttttttattacaattaattaatttttcccaatttccataaagccttttggcattttgatgactgagttttaaatatctttttcatttgaaggatcgagggaaaagtcaaatgggcgaaatttttgacggaggatgagattcaacgggagatggccgacacaatgtag

SEQ ID NO: 67631 - DNA, 224 bp, Heterodera glycines
atgggggtctgggtgagaaaagagaagggaattggtgagggatcacaaatttttgataaaaataaattaaatatttattttcatttatagcatttgtccatatcataagtggtcaagtggataaacgtttttactttcattatttgtctcttcggttcaattccctgatggaacagaaaattttttaatattttctttaccattattttaattgaatttaatta

SEQ ID NO: 67632 - DNA, 54 bp, Heterodera glycines
cgtcgccaatacgaggagacggagttggagaagcggcgcgaattggaactcgag

SEQ ID NO: 67633 - DNA, 141 bp, Heterodera glycines
atgaccctcaagtgccttccgcccgaacttttgttcgaacttatgccttttgtccctgctgaaaatgccgttccggatgcgatttcgtcatgtcgactgttccactgccttttgtttaaacgtgtcctcaattggaaaaag

SEQ ID NO: 67634 - DNA, 1074 bp, Heterodera glycines
atggaacggaacaacgaaccgctcgatgaggaagcggcaaacgggaacggaaatcagggggatctcccctccgaccgacaggacggggaacgagcgaatgcggcgcagcagaccaaaacaaagaaagggatggacgcgcaaggcctggggacaagccaaacgggtgttacacccgcggcatcgaagaatttgcgcagcggagcaattacggtgaggtcggcccgagatcggattgagagagcggctgacacactctcgtcgcgaatcgcagaagcgcgggagctgatggactcggatttcacgaggggcgaagcgcccgagcacgccgcgcggctgatggcaatggaacggggacttggacaggtcacccggatttttgaagggcatttcgataagggaatagcagaagcgggtgcggcacccgaggagcggcaggatttcttgtatgatttcgtggccgcccccttgccagcctcgacgaagtatctgcaactgcgggagcatccaactcctgccgaactgctccaaattgcggctgagcatctcggtgatctgcaggcgatgaggcaaacatttgaggacgaagaaagggagcagagcatctcccgatcgagcagatcagtcgacaccgaggacagtcacccatcgaaggagctcccacgcaccatggcaagacgaagcatgccagagtgggagacatcgttcagggatgtcttggcgcggttccaggctggacaagttggccaagcgccacaaagattcgaacaagccaaccgggtggccccacccgtcatgccaaacatggctgcgctcatccaacgccgctcaaatgccccatcagtggccagtgttcgggtgaacaacccggtcagggaatggatggcaaggaaccgagggggagagaacgaacccccggcgcaacagcggccacaagctcagcaaccgctgcaagccgaacagcaacgatttgagcgacttacgctcaatgaccagggacaagcattccctcgggcatcccatcatgcccgtattcgaagggaggagcatcccagtcgggaacgcctccgaacttag

SEQ ID NO: 67635 - DNA, 648 bp, Heterodera glycines
gccaagacatccctgaacgatgtctcccactctggcatgcttcgtcttgccatggtgcgtgggagctccttcgatgggtgactgtcctcggtgtcgactgatctgctcgatcgggagatgctctgctccctttcttcgtcctcaaatgtttgcctcatcgcctgcagatcaccgagatgctcagccgcaatttggagcagttcggcaggagttggatgctcccgcagttgcagatacttcgtcgaggctggcaagggggcggccacgaaatcatacaagaaatcctgccgctcctcgggtgccgcacccgcttctgctattcccttatcgaaatgcccttcaaaaatccgggtgacctgtccaagtccccgttccattgccatcagccgcgcggcgtgctcgggcgcttcgcccctcgtgaaatccgagtccatcagctcccgcgcttctgcgattcgcgacgagagtgtgtcagccgctctctcaatccgatctcgggccgacctcaccgtaattgctccgctgcgcaaattcttcgatgccgcgggtgtaacacccgtttggcttgtccccaggccttgcgcgtccatccctttctttgttttggtctgctgcgccgcattcgctcgttccccgtcctgtcggtcg

SEQ ID NO: 67636 - DNA, 617 bp, Heterodera glycines
caggatcaacgcccacctgtgtccgttcggcttcaatctgttgcctgagggctctgatcgatgcttcgtgccaagccggcgtattgtatgcccagcggcataaaatgtgcgctaccgtaatcatcagcgaattggcaggaggcgccaaaaaggttgttgaaagcttgatcaaaaggtaaagctaagtttggaggagtgctgcgattgttgtttgttggcctatgaattgtcgcaaaggggcgaaagatgcgcagcgcccaaagggttttgagttgttggcaaaggcacagcacaaaacgcactgtgtttaggttcagcccggactgtttgaactctttcaacaaatgctgtgggaattcgtcggcggaagggccgcaattaaacggtgaatttggggagacaaatggggaggggttgccgaaacggacggacgaaattcagcgccaatccttttggcacaaccgtaccaaagtgttgcggttgccattgggcccgaaaatggaggtaaagtgaagggacagagcaacaacagtcgagcggaacaattggacgtgaatttagcagatgccaactgtgaaagtgccaaatgccaacatttgtgctcagttaaagacgac

SEQ ID NO: 67637 - DNA, 49 bp, Heterodera glycines; identical to SEQ ID NO: 51181

SEQ ID NO: 67638 - DNA, 847 bp, Heterodera glycines
acaagacccgctctcgcattcgttgacgaacgattctcaaactgctgcggcaattcagatagtaactgcgtttaaagacacaattttgtcgccaaatgtttcattagttgtgatttgtttgtactcttatcaaaaagaatcacttcaaactgaattcgaaaagcagagaattgaggtacttgtagtgacagttgatggatatcaagcgcaagaaagtgatttagtaattttggtcacaacaagaacgagtcttcgagatggggcattaagtgagaattcagaatttttgaaggattcgagaagagctacagtagctctaagcagggcaaaaagcggtttatttttgattggggacttcaaaactttaagtgagggtgaggtatggaataagtttttggaaacagcaagtgaggactctcaaattgttggtgaggaatatcttcagatcctacgaaatggtcgatacatgcgtgatcgatattggcaattaattgatggcattggcagagtagtccaggatctacagtggttacaaaagaatgatgaaaattggcgaacgatgcaacagcagagcacttcaagcagcatgtccacatttgagtcgagaaaaagaagagctgacgaacccgaccaagggccgagtgcacgccgaaatgagacatggaggccgcagcagcgtcttggacaattcagcggtgccgtttttgtcagaagtcgcgaaccaacgggtcctcgtggtgcttgctttgtgtgcaaacgtgtcgggcatttggcaaagaactgttggtatgcggatggacaatcagcaggacgtggtcaaccaaggggcaaagggcaatggaaataa

SEQ ID NO: 67639 - DNA, 439 bp, Heterodera glycines
aaaatggtgtaagtaaaaatcgtaattacgctcaaaaagctcctcaaacaattttagcgcttccaattccttctacaatcgcctttatacatcccattatgagcgctaaaattatcagagtgccgaaaatcgcatgtgatctaagcctagcaaaaaatggtgtaagtaaaaatcgtaattacgctcaaaaagcttctcaaacaattttagcgcttccaattccttctacaatcgcctttatacatcccattatgagcgctaaaattatcagagtgccgaaaatcgcatgtgatctaagcctagaaaaaaatggtgtaagtaaaaatcgtaattacgctcaaaaagcttctcaaacaattttagcgcttccaattccttctacaatcgcctttatacatcccattatgagcgctaaaattatcagagggccgaaaatcgc

SEQ ID NO: 67640 - DNA, 638 bp, Heterodera glycines
atggcatttgttgggcatcccattttggcagtaagtgttgtcaaataaatttactaagttcctttcccattcatttcgctttaggacattcgcaagggtttccgtcttcggcccactcaaaccgtggacaaatccaagccgatcattcaggcggaaggggagcagctgaccgaactgcttcaaaaccgttcgccttcccccgcggagctgccccaagcgaaagccaacggagtgccaaaggcgacaaaggcaccgccgccggcaccgccgatgactcagcaaaagaatgaggcaaaaagacagcagcagacgatgacggcaaaggtgttgtatagaaaggactaatgaaaaatacttttaaaatttgtgacagccatcgccgaaaaacattggcaacggtcagtcggtgagtgccgaccaacggcaaaaaatgttggcacaaatccgttccggcggtgttcgtctgcggcacgtgcaaacagcagataaaagcgggctgattttggacgagcaacagaaatgcacaatcggcacgcgtaacggcgccgcgtcacctcagtcgttggactcgcaggggtgagggagcaaaacggggccaaccaaatgccaagcgcaaaacgcaccggtgaagcgtgcca

SEQ ID NO: 67641 - DNA, 587 bp, Heterodera glycines
  unsure (1)..(587): unsure at all n locations
atggcaatcaaatggtaattactttaatggatattaaattatcaatctcagagcaccgggactttgggaaaataaatatgcaaattaaaagtgctacaaattagccgctttttcttttccattggcttttatttatcatttttagttccgttttgccgcattgtatggcattggaaaccttatggacgaagccaatttacaaggcttaccataaatgcacaacggaagacgagcgagagaagcaaatgcttttccccgtgttcngcagccaagaaaaatattttgtaaaattntaaatcttttaatttaactaatttttattttggatattttaatttatctatttattttttatttattttactaaatgtttcgaaacggatttagaaaccggccgagaagcaaactgaaattttttatatcgggaacggtttgccgggatgttatgcatatgaagacccacaaaggtgggttattggttttttttgaattcccgcccccattccttcttactgtaacttttgtaaaggttgcaaaaatttgaattataaaaatttattttttttaatttttagaatatgaataaa

SEQ ID NO: 67642 - DNA, 157 bp, Heterodera glycines
atgcgaatttacacgaatttggaaaaaattgaaataatagagaaattctatagaattaaagaggaaaatccgagaataactggaaatcaaatgagcgatattttgggcatttcaaaatatacattagggcgatggaaaaagcaattcagtgaaaaag

SEQ ID NO: 67643 - DNA, 277 bp, Heterodera glycines
atgcgaatatcccaaaatttgtcagttaaatgttataatgacgccgagaaaaaagaattgctgaaattgtatgaaaaaattaaaaagaaacaccccgaattggacaaagaaaaaattgggaaaattctaaatgtgacgggacgaaccctaacaaattggaaaaaccaattttatgggaatgattccaagaacaaatgtgaaaatgtacagaagaaaagtaagttttttttattcaaaattaaataagtttttgaaatttaaggcaaataaaaataaa

SEQ ID NO: 67644 - DNA, 660 bp, Heterodera glycines
aaacaaaaaaatcgattttttcaagtgtccgtttggggtactcaaacaattatggggagcaaaaatccaacgcagaattaaagtacaggctatagggaagctattccggaaggattcggtctccccataaatctgggcgcatcggttcggggggactgccccgaaaacaaaaaaatcgattttttcaagtgtccgtttggggtactcaaacaattatggggagcaaaaatccaacgcagaattaaagtacaggctatagggaagctactccagaaggattcggtctccccataaatctgggcgcatcggttcggggggactgccccgaaaacaaaaaaatcgattttttcaagtgtccgtttggggtactcaaacaattatggggagcaaaaatccaacgcagaattaaagtacaggctatagggaagctattccggaaggattcggtctccccataaatctgggcgcatcggttcggggggactgccccgaaaacaaaaaaatcgattttttcaagtgtccgtttggggtactcaaacaattatggggagcaaaaatccaacgcagaattaaagtacaggctatagggaagctattccggaaggattcggtctccccataaatctgggcgcatcggttcggggggactgccccgaaaac

SEQ ID NO: 67645 - DNA, 457 bp, Heterodera glycines
gccttttggagaatttggcgttgaagccatcatttctctcgagttcgaacgacaacatttcggagataaaaatcatattgttgaaagcatacaaacattttaacattatacctgaagaggaaaaccttagtgaatttgaaaaaattacgcaaaattttgctaataaagaaaattatgaaaaagtgcagaaactggtcaaggcatttaaaatgagcagagcattggagcgtaatttgattctaaagattttttaaaattaaaaaatatatttgtccattaaatattcaattaatgaataatttattttttctatggattattaagaatgacaagaagtagtgtctaaaattgacataagaaagataaaatttaacaaaaattccttcaaaacccattaaaaatttaatttacaaatttaagcaccatacgccaaactaaacggataaaaattaataaa

SEQ ID NO: 67646 - DNA, 129 bp, Heterodera glycines
actcaaaagtaccgtaaggcgttggaaaaaatcaaagctgagatggtaaaggatgcggattactgtaaggattgtgcaattcctaccgttaacgaagtcttggcaacaccaattccgcttaggaacaaa

SEQ ID NO: 67647 - DNA, 373 bp, Heterodera glycines
atgggaaaagatggcatttctgctggtggaagacattggcgtggcatcaaagtgcaaacgaagccgaaaagtggcccaaacggagaacaaatgagaaactttgagcttgaaacatcatttacctctcaaatgtttattcatgaaaataataagaaattaatattatcattcattataaaattagtaagtaataaaaaaaactaccaaataaatgttaagaattacttaattagtattaattagctgatttaacattactaattaagcatcaatgtcgggttgaatcgacgtcaattttcgatcagatttgatggtaatgaccaaagcgattccttcacaatgttttcgccgtcaaataatggtaaaaaataaa

SEQ ID NO: 67648 - DNA, 657 bp, Heterodera glycines
caaaaaaatcgattttttcaagtgtccgtttggggtactcaaacaattatggggagcaaaaatccaacgcagaattaaagtacaggctatagggaagctattcccgaaggattcggtctccccataaatctgggcgcatcggtttggggggactgccccgaaaacaaaaaaatcgattttttcaagtgtccgtttggggtactcaaacaattatggggagcaaaaatccaacgcagaattaaagtacaggctatagggaagctattaccgaaggattcggtctccccataaatctggacgcatcggttcggggggactgccccgaaaacaaaaaaatcgattttttcaagtgtccgtttggggtactcaaacaattatggggagcaaaaatccaacgcagaattaaagtacaggctatagggaagctattccggaaggattcggtctccccataaatctgggcgcatcggttcggggggactgccccgaaaacaaaaaaatcgattttttcaagtgtccgtttggggtactcaaacaattatggggagcaaaaatccaacgcagaattaaagtacaggctatagggaagctactcccgaaggattcggtctccccatatatctgggcgcatcggttcggtgggactgccccgaaaac

SEQ ID NO: 67649 - DNA, 508 bp, Heterodera glycines
atgagaatggctttcatgttcgggtggatgaccgatgtgcgtgccaccaaaatcaaattggcaatggacaacggaatgccaacaaaatttatcaacagttcaacggcaccgccgaggaacaaaagaaactgctcagtgtcagttggtgtcgttgtgttcatgtttttgtgttagcatacgttgattaatttcaaaatttaaaaataaattaaaattacgtttttaatcaactgatatatagaaattataataagtcaaaccaaattatgggggaacagaaaaatcattcaaaatttacacaaatttccccattattaaatacaaatttacaggcatgcttatgtaaaaaatcacacgctttttttgtcagtgaaaatatgacagggacaaagtgtcaacaaattacgaccaattaattgccaaacatctaaattttaatgagtttttcacttcttttcatgaaattaaagagccgtcaaaaaaggttgtgcatgactaacgaaataaa

SEQ ID NO: 67650 - DNA, 1209 bp, Heterodera glycines
atgcctaaaaaacttaaaattattagttttttcataagccaaaaggtattttgataatgttgttaagcataatgttaagatgcatttaccgatgaattttatatgccaaatctgtttttttctgtcctatgtcactctaattcgagagatgattaattcttattcgataagatataagcgatcaatttttatttacagttgatcatcccaatttatattgccaccacaacgccttcaccacatgatcataagcaaccaataacgaatctgatcacaactgccgtccaattgctgctggtcggaagcattgagttaggcattttttacaaattaagccgatacaattccaaaatttatcaaaaaatgttccaaaatattggctcgaataatctgtcaattcgttatcaggtaatacatataaattaattatataatcattatttattttgaaagctctctgaaaacattcgcattggcaaacagctaattccaccgctgtttctgaatttgggcaacattttcgcggggacaatgattttattatgggactttcttgatttgccattttatatttatatattcaatttggctgcgattatcaactcaattttcggccttcttatcgaatttttcattataacgtaaacaaatgtaaaatttaaaatattaatttaatttaaaagttttaagatgccacccatttttgaaaagggatttatgccattttttgaaccgtattggcaaaatgtttggatttaatcttttggcctataatcatcgaattgctgatgcaactgtaaaagttggcacaaataatactgctccatctttgtctgctgtcaatggcattgctcaacggaatttgatcagcggaaaagcattgattgataaccaaacaaaaccagaagatcattttgccatgctgaaagaagcatgggagaaggggccgatgaaatgacaaaattaactgaaaaactttttgactcattctaattttggttgagaattaatgctttataaggaaaaaaccgaatcatttgggatttacatgaaatgccataatttgtgttataaattatatgattttgcatattttttctacgcatatgctatgaagaaaggggctcaaaaataccattactgcgttaaaattttggatttggtgaaggtttttagtgcatataaaagcatattttggggttttcgaga

SEQ ID NO: 67651 - DNA, 1105 bp, Heterodera glycines
atgaaagccattctcatcttccagagtctctttattatcttggtaaattaaattcaattaaatcaaagtatttaaataaaaacaagaaatgattattattctaaatttaagcgtggttcctgtcgttttgtcatctgtctgttcaaattcttcctttgggacccaattggtgccgaatctatgcaatttttcccggcacttttgaaaatatatttcatcggcatttatgctcgtaattttgtgccccatgttctgatcgttgaacgcattttgtccactttatttgtccgaacatatgaaaagaaacgtggccatctgttcactattctgtggacgccttttgcggtgagagtaatgacaattttattagccaattaaattatatttccagaaatgcctaaaaaacttaattcgagagatgattaattcttattcgataagatataagcgatcaatttttatttacagttgatcatcccaatttatattgccaccacaacgccttcaccacatgatcataagcaaccaataatgaatctgatcacaactgccgtccaattgctggtcggaagcattgagttaggcattttttaccaattaagccgatacaattccaaaatttatcaaaaaatgttccaaaatattggctcgaataatctgtcaattcgttatcaggtaatccatataaattaattatataatcattatttattttgaaagctctctgaaaacattcgcattggcaaacagctaataccgccactgtttctaaatttgggcaacattttcgcggggacaatgattttattatgtggctttcttgatttgccattttatatacatatattcaatttggctgcgattatcaactcaattttcggccttcttatcgaatttttcattataacgtaaacaaatgtaaaacttaaaatattaatttaatttaaaagttttaagatgccatccatttttgaatagggatttgtgccaatttttgaaccgtattggtaaaatgtttggatttaatcatttggcctataatcatcgaattggtgatgcaactgtaacatttggcacaaataatactgctccccttcttgctgct

SEQ ID NO: 67652 - DNA, 605 bp, Heterodera glycines
taacttaattgtttgccacagttatttctgcgcaacgaaacaatcgccgaacaattcaattcggttaaacgattgaccgatcaaagtcacgtcaaatggttcggaaatgtgcgaataatgacggagagattgtcggaattccaaggcaaaacgaagtcaaaaaatggacaaaaaacagatggaaaaaataaagtaaaaaaagggagggaaaggacaaaaagtgagggaattatttggcagaattcaccggcaaatttcaaaatgtatccgtcgcgggacattggaattctgacggaacaatcgcaaagggacaaaatggcgatggccgaagttggaaattggaattaataataattaacaattaattggaaaatgattagaaacgggcttatgtggacacgcaaatggagagaattgggaaggcattggacgaaataatgccaaaaaacggacaaaacgaatcttttgggggcgacagaataacgcaaacggaatgccataacgaagtggggggaaagagaaggaaatgaacaatttgaacattgttaattgttaaggtgatgcacactttcaacaaaatttgttttaatttctcaaaggtaaaa

SEQ ID NO: 67653 - DNA, 512 bp, Heterodera glycines
  unsure (1)..(512): unsure at all n locations
atgctttcccctcgtgccatcgcacaaaatcaaacagtagcagcagcagcggcatcaggcgccaatgtcggcacaaatgcggcgccggtgcgacgcttttggccctcgtacattgaccaacatgtggcccagctggactttgacgcctccgtgatgatgatgacgagtgccggcgacgagtgccaaaatgacgatgacgaagaagacgacgatgaggaagacgaggatggtggagacgaagatgatgttgtgcaacaggggggaggacgaccacaacaacggctacaaattgggagcggaatggcacgagggggaggaggggcggaagaaacggcacgggacggcaacattttcgagtaatttcggttttatggcactaccaaatttanaatgaactcattttcaattatccggcggtcgtttcggtcattacagtttctgggattntgatcatgnaaanccgtgtttcatggtccaattccaacccccacgatttgggtagtcttgtgata

SEQ ID NO: 67654 - DNA, 201 bp, Heterodera glycines
atggccactttcaatgtggcccatctcatcactttaattggcgttgtggtacaaaaatataaattaaaatttattcatattttttctaatatttatttttgttttagtcaattgcttcatccgttgttgctgatgagcaacaaaaccaaaacaaaactcaaaatggaggaggaggtttaaagcatttgttgggatcggatg

SEQ ID NO: 67655 - DNA, 623 bp, Heterodera glycines
atgatccgtaattgggcaaatttaacaatttcatgggaagacaaattggacagtttgctgaaaggccaaatatttgaagaaaaggtaattaatattactactcagtgttgtcatggtaaattttcattttttcccccaaaaaactgaaaaaattacagtattccacgctagtactatttcaattacggtatttatttcactaatgatttgctaattatatacattcctccctttacagtatgcccattacattcgcatcatctgtaaatctgcttcactggcagatttttatgatttttgtgggtatgccgagacgcgaattcgtctccaattattgattgacattgaacgctttgatcacatccgattagcccatgggaaacaaattattgcaaatgaacaatccactgaagaaattgagaacgaaaacggcacaaaaaatgagcagaaaaggcaagtgacaattaagaaaatattcgttatatttgcgatggttagttaattggcaattttattttaatttgattatttcttgtcaaaatttatttgactttaattaacaaatattcaattttaagtttattacatttacaatagcagggatctcatatgagagactttag

SEQ ID NO: 67656 - DNA, 557 bp, Heterodera glycines
gcatatcttccgtcgttgccaaacgccttggaaatccgttgcgctatggaaatccgtcccgccgttgttttttgtcccttaaaactgttgcacttgccaaactgacgcaggtgcgaatattgtgctcttttctaattttaagaatacttcagaccattcacaaagtcaatgttaaagaaattcggaagctttcggtgaaggaagtcgaatcattaagttttataccaccgaaaatgctttgtcatatccgcgaggaatttttatgtaagaaaatgaacataaagataattttattttttttaattttagcaattccgcaaaaccaaaaaggaagggttttctacgaactttcagcagagaaaaggagtcgcattttggccgaattgctttgtcttttgctgcttttcgacggttacttcaaatattttactgccacaaatcatcccctccccattatcgttagatcccgaattcactttgccaatttctccgattgtacaggatttttatatgtcggaaaatgtgttgaaaaatctgctcgttgcgatgggatgcgt

SEQ ID NO: 67657 - DNA, 1993 bp, Heterodera glycines
atggctgtacgaaaatgcccaacttttgcacaccgaagggcccgagagcagcaagtgcgaggaatggcatcgccgtttcaaagagttcagcagcacggccaaccaactgacggagctgtacaaaaatgtcattcgcttgccgaacaaagtgtggtttctgccttcccctcccccttctctcttctgtcctttcatttctgttcttcacttttagagtcttttgcaagaaatttttccatatttatgggaggcgcaaggacttttgtctgttctttgcgcgttgctcaaatggatgcgcaagggaaaccttctcattgcaccgacaggtcactcaatcaatcgtgggtttaatttgcattttcatatttcagaatcggccacttggggactcgaagacgtcgactacgactcggagccgtgggccctcggcggtggtcttttgcccgacatgcaaaggctcgtgatctcttcggccaaagttggcgaaattttcacggttaaatacgcgattccgctgtccctcacttgctacactatccaacccgtggatttgctcagtttggacaaggtttcctcatccccccctctttgaattttccctccgttcagtcgctgctcttcgatctgttcgccctgtccgatgagcaacttcttgccaactccgccatttctctgcccggcaattcgtcgcttcgtcccgaagagtttttcttcgacctcaacttcgccccgttccttaaatacggtgccccgtcccatcacttcgctgccgaatgtgcggacggaggagaggccgacgacggagaggcgaattcaaaaggcctttgctcattggcacttggcattctgaacgcgtcaggcctcgtggaaagcttcaattccgaatgtattgtcaaattccggcaaaagtattacccgtctctctcaagtgaacaacaaatggaggacgactcttcccagtcgcccggagatgtaccaatggaattaatgccattctattttaatctttccattcactcagagcacgtcgcttgactcggagattgcccataggttatccgttccgttgcgtctgaccagcgactttctcgcctccttccccagcctcgtcgagattcgctggctgatgggctctaatgaggcggtctccgtccgtcgtctcctccactgcgtttccgcctctttggctttgaacggtcagacaatgcccatttaaatattcgtttgtttgtttcctttccactttaaaggttccaacgggtttttcactatcgtcagctccgattgtgaggagcgtgtcgaattgctcacccgactcggcctccaaccactagtccaccgcgacatcgacgggttaatggatggatttgtggtgatgggccatgctctttgattcgccatgaaggaaaagaagcagcccacgttctttctctcccccccccccgtttttttgacactgtttcacaaatctttaatgttaaattgtacctttcctaattatgtttccatataatcagtcaaaactaggctttctctgtttgttattgtccaaaattccgcatggccatcggtctcccccaagatcattgttttgaaaacttgaaatggaatgccaaaaacacacatggggttggactttcaaacaaagagcgtagccaggcccttgagcgactaccatgtttttacttttgtgtcaaattttaaggaaatttgggcccgaaggtgctgataggcgtcgcttgggaaatttgagatttttgatgaaatttcttaaaagtggtacttttttcgagtttccaaattttcgttaaaacacccttttttcgaactccccatgatattaaaaatgttcactgtaccgaaatgaatgcctcgatttccattcgcttctctcatttccaattccctcgtccctcccattcgctttgcccttgtctcacctatcacttaatcatcaaattaatacctaattaccaatggtcgttgtcaacga

SEQ ID NO: 67658 - DNA, 1612 bp, Heterodera glycines
gacggtgtccttcggctcggccatagaagaccaacaattggccgtggtttggcttaggaattggatcgtcagtgtctcattgagcggcttcatcaattacatttgccccgagacactgaaagtctgccgagtgctcagaggacataacaaatccatcaccgcgttgacgctgtccgaagatcgacgaatggcattcactgctgactttgagggacatataagtgaggaaacttcttaatttaggaatttaatatttattttctaacctgaaaactcagcccgttggaatgtctcggatggctcttctgaacgagtgactccccaagtgcacaagtcgcaagtgtccgggctgagtttgaccagcggcggtttgctcatttccatcggatgggacgattcggtcgctttcattgaaaatgccctttccccttccattggtcggttttggtttttatagcttttctttacatatattcttttagaaaatgttcagtcgctttcccaccgtttgtcctcccaaccacgcggtgtggcgagcattgggcaaaacggggaaagagttgcggtcgcatgccatcgctccattttcattttcaccgacaaaaaacaatcaagcgttatcgatataaagtacgaaggtacttctgttgccattcaccccaatggaattcttttggcagttggaggaaatgtaaaaatttcaaaaaaaattatttttattttgtcctttaggacagtcgcgtgcatttgtacgatttgcctaccaacggcggcgcatttgttgagaaaaaagtattacaacatgcaggtgccataacctcggtgaacttcagcccaaatgggaagtatttggtggccacggacattgccagaaaagtggacactttggcactttcgggtcattatctgccttttgccttcaggtggtgccttacagtgtggacgacggtttcaaagtggcatctgaaaaagaatggtcttttcatacagcccggatcaactgctgcgcctggtccagcaacaggttgattatatgttaatggcgtggtactgacttatgaaaaaactttactaaatttttggacaaatctattaacaaatttcatcaaaaattactaaaatttttcataccggcgttcccggaaaatttttaaaaaagagcgccgcaacaaaacgggttttaagcaaaaaaaaaatcgtccgtttacatggctgagttttcgcaaaattgaccgctgtcctccctttgcaaaaattacgaagatctttggggtcgctgattatgaataagaacataaattccaactaattacaaatcccgaatccgttttaaggaatttaaaaatcagttaaataataatttttcatgggcaggggtaaacaatgcattcaaataaagtggccactctttgtcttcagtcggtacatcgccacgggttctctcgacaccaatgtgatggtttgggacttgcaacaaagcggtgaacatccgctagtcatccgcggtgcccattcgatgagtgccatcaacggagttgcttggctttccgacaatcgactgcttactgttggccaagactcgaatgtgaagcagtggacactgaaactgtga

SEQ ID NO: 67659 - DNA, 659 bp, Heterodera glycines
atgttggacatttctcgagcccggcaaatgtaattaattactattttttataagttccataagatagaatttatatttagaacaattgtgttgaacaatacgcgccaaggtttcaagattgttgacactgggaacgcagcaacaccgccaccacaacaacaacaacaacatcatcaacaacgacaaacacaaacaccacaacaacaacatcatcaacaacgacaaacacaaacaccaccacaacaacaacatcaacaacgacaaacacaaacaccaccaccacaacaacaacgacaacaccatcaacaaacacaacaacaacaacaacagcaacaacaagaacgacaacaaacacaatctccacaagctcaacaacaacaacagattttgcgtccagtgccattgaatatgtttcaatttcaacctgtaaacgacgatctgttgcccggtacaagtggtacaacaacacacattggtatatatgtggggggagggacctaggggaattcaatttctcgtttcattttaagttcccatggcatttaaaaataattttaaatatttttctaggaaaaatggtctgtttttgatgttcaaattttgcttaaaatcctcaaaaaattttttgggggaacatttaaaatacaccagacccccca

SEQ ID NO: 67660 - DNA, 677 bp, Heterodera glycines
atgcttaaggatattatggaaccgctagtcaaatttcataaaggtaattactatttgaaaatgctgatcaattaaatttcttaattaatttgcaaaattaacggaattatttttagttgggattcatttggatttcaaattaaagaatttaattgttgttgaaaaaatgatgaaatcaaaacacaagaaaaagaccttatttggaacaaaggaatgtttggaaaaagtcaaggtcaaaacttttaagttgatcgattttgatggtaattttttttaattctatcattttaaataacagtttttagtatttaaaattcataaatataaattaaattatgaaatatatttttatctactcaaattttaagggtccgttttatatttgaacagagaaaaaaagggaaaaattgcttgggatttaatgggctacacagaagccttcagtgcacccgaactgcttcaggttggaagaatttaaaaaatatttacaatttcgataggttttccgtgaaatttttgaaaagttgtaaatgaaaatacctaattcggtaatattagtattttttgcatttcattattaaatacagattgaatttctgctaattatatcgttaataaaataatatttcagaatttatctctattcactgagggcgatattgaggttatttgaaata

SEQ ID NO: 67661 - DNA, 643 bp, Heterodera glycines
aaaaattttattcatctccctttttcgatagaaaaagcatcagagtgcctaaactaacatgtaaataaaatttggtgcgtttcagagcattttctgaaaaaatatttatgaaataaaaaaatcgattttttcaagtgtccgtttggggtactcaaacaattatggggagcaaaaatccaacgcagaattaaagtacagactatagggaagctattcccgaaggattcggtctccccataaatctgggcgcatcggttcggggggactgccccgaaaacaaaaaaatcgattttttcaagtgtccgtttggggtactcaaacaattatggggagcaaaaatccaacgcagaattaaagtacaggctatagggaagctattcccgaaggattcggtctccccataaatctgggcgcatcggttcggggggactgccccgaaaacaaaaaaatcgattttttcaagtgtccgtttggggtactcaaacatttatggggagcaaaactccaacgcagaattaaagtacagactatagggaagctattcccgaaggattcggtctccccataaatctgggcgcatcggttcagggggactgccccgaaaacccaaaaaaaaattttttggataaaaattatttaaatg

SEQ ID NO: 67662 - DNA, 192 bp, Heterodera glycines
ttaaaaattttttgatttttattcatctccctttttgatagtgaaagcatctgagtgcctaaaataacttgcaaataaaatttggtgcgtttcagagcagtttctgaaaaaatatttatgaattaattttgctaaaaaaataaaatagtgaagctttaaaaattaataaaaaattttaaattcagaattact

SEQ ID NO: 67663 - DNA, 361 bp, Heterodera glycines
atgaataatgacaaatatggaatttttttggtaaattttcaatttaatattcgtcagccatctgattgtacattattggtctcggccaagctcggcttatacttcaaaaattgaaaatttatgtccttctcatttgggatcagactcaaaaatacagtaccctttgaccttctttgtaaaaaccttacaattttttatttcgcttttcagctttacatgcgttacatggatgaacatccttgttggacgttcattgcttttgcgctggcattttgtataattgggacgattggaatagcatccaatggggcagtgatttatgtgacaattaaaactaagtaaaaattataaaaaaaataaa

SEQ ID NO: 67664 - DNA, 759 bp, Heterodera glycines
atgccaataaatccgacaaatgtaatccatttaatggaagagtattatcatggtaatgctccaaatccatcgccaatcactgtcgaggagaagcaattggcagaagattttttgaaaactttgattttttgtgcgaataaaagcggcgaaattgagattagcgaagagctggtgttggatgattttgccaattttcatcaaaaggaagatcaggcagtcctatagaatcttcatcatcaagctatgccccctctcctaaaaaaattttcaatactgatttcgcctaattttgtggtttgagaaaattttacgatttacacccccttaaatttgaaacgaaacttaattactttttacagtcgaaaagtcccctcctaaatttataatatttctatcgaaaagtcctttgctgtcgaaaagtccggcgcccaaatgaattgctgcataacattttttagcatcaaaatgaaaaaacaatggttcttttcacaatataaagtaatgcatggaaaatgaattcggaaaaacagtaaattctaccgtatcttcacaaatgagtcctttcaacaaaagtacagtttggtgaacggattgtcattgtccagcggagtgttgcagaagggacaaattttgtgaaagccttgtccgccatttgggattagtgtctttgaccaatgtctgtatgtaaagatattgattgttacagtagtaatcgatgtttatatagaataagtccacaaatatgatcatataacatga

SEQ ID NO: 67665 - DNA, 1701 bp, Heterodera glycines
atgaactttgatcagcgtgccgagccaaatggcatccaacaaaacccatctgcaatgatcggaagaactgcacgggccaataaccaatggccaaattatccgatgccatggccaattagtgccaatgatgaagaggacaccaccacacactcaataacattctcattcagcgacatacaacaagtgattgctcaatacagtcaggacccaaaccgggatatgtttcaggtcgaagagatttcatcaaaaaataattagggacagagagcagctctaattagttttggcaagagatttacaatccgaaattctatttaaaaatttcaaaaattattaatgaatttattagcttagcaaaccataaaatttttaatagctgcaaaataccttttttggcctccagaaatcgcaaaatattttccaaatccgtgttctctggccttatatctgttaaatagctgttataatttgttttaaaatttaattaaataaagcttgggagagaaaatagcgaaaaaattgattttatctgaaaataattcagaaacagagatcacccaaatcacggtgagaatggatttgtatcccacaatccatttgaaaaattagccatcattcgaaaactgttgatgatcttttatgagcttataaaagcaaaattaataaaaagccacaaaactctcaactaaaacaattattttgcccccaaaaccaccaaaatgttttccaaatccgtgatctctgaccttgtatctgttaaaagatgttataattttcttaaaacttaattaaataaagattgggagagaaaatagcgaaaagattgacttcgtcattgatcaccttacgacaatttctcggtttgcttgtcgcattgtggccgagcgtaatgcccccaacaatgtgtacatttacgcggctggctttgacgattcaaatgatgtacataaatggcttcattatttaaattttaaaaaatttaaataaaattattattcctctccattcgttcagacagaagtcttaattaaaaaaaaagaaaattaatttttaatttttaaaagacatttgtcctgcacaaataacttttctgatgtggacgtggatttttctagtttttttttatgaaaaatttttggaagtgaagaaataaaatttgaaaattattttgtcctgaaaactattctgattgtgacacaaattttttagagatattttttatgcgtaaataataggcaaaattgacaatacacactaaaatgctgtaaatttgatgaaatggacaacctataaaatttatttagagtttcaaaacaaaacaattaaaacataatttatttatttttattcattcagttatttttgggcccagacgcaaataaaatagaaaagtcaaatggtcaatttgatggtttggttactaatggtgtgctaattctttcacccaatgataatgacgatgaggtaaaagagaaacagagaaaatttatttaaaattttttttattttcagggtgcctccgtttatttatcagcttcctcttcaaacaatgatgatgatgaaaatgaatcagacagcgaaatttctccaaattgttggaaagaaggtaattgtcatcattttgaaaaaaataattcaaaaatttgagaaatttctcatttttttcagaattgcttaaataatgccaaatttaaaattaaa

SEQ ID NO: 67666 - DNA, 1352 bp, Heterodera glycines
atgtaatactaaaattcatatgtaagaaccttgttcagaattttttcaaagaagtattaacattgctgtgtacaaaattggtgtaaagaatatttatttttttagcttggatggccctgtgttttggagtcgtcgcgttctctatgttttttgctgctcatgccattttgatcgacatgaggtagggcgcggagttaccaattatggaattattgccccccccctcaaaaaatattccaacgctttttttcttataaaatttgtgtttttagctgaaacttttttattattttttatatatacaaattgttttaaaaacaataactttgcagaaattttttgtggagataatttgacagaaaaatgtcaggattaacaaataaatgaaaacagccatattctgtataacatttatttgttagcgcgacttgcttcgactgatggagcagtggaagcatcgaattgagagagtctgtctggtggaccgtccattggactacccatttttgcccgattcgctgtttggctttttggctaaccatttaccccagttagaggtgaacatttttttttataatgaatgctaccgcagttggagtgaaatttatttttattttttggttacaaatcaaaattaaatctactcaattttttgcaactttttggcattttttggttttagcctattttagaatcaaaaataagatgttgaagaatattaacgcttcaagtatttttgtcgaaatttatgaaaaaaaaactaaattttaaaagaggatataaaaatagttgttttttcaatttatgtagaatttattgagctatttctaatcctcttaattgacattttaaatttttaaaagtttgtttatttgcgcgagctggaccttgaaaagatcaaccgagtcactgtggaacgattgtcgcagcacaagcgtttaaagaaaatgattgtgcacggctgtcgcaattatgaggtgctgatgatgtttttttttatcaaaatgaaatttaatcgaagattttgctgtaggcactaataggttcagtgtttcgaaattaatgaaacgaattctttaatttactgaagttttcaaaaattttccacaaaaaatgggcataaagccattcgtttaaatagacaaagttaaggggatagagaggcaaggggcggggacaacaagagcagagaaaaaattggttaaggaattgatcaaattatgctttaccactaattagtcatgtcattattatactttcattatttaccacaggtgttgcaagacttccgaaatttgccccaacttcttgtcgtcaagggggacattcagggcctgaaggtatggcgaact

SEQ ID NO: 67667 - DNA, 322 bp, Heterodera glycines
atttataagcatttgaagggttctcagcagtttccctgcaaaatttggtgagcttctgatcagtctagaacgttgggtgataaaatgaaaaaaataattaaaaaaaaataatgctggtgtggtaagtgtgaagaactgtgttcctccaggcaaaaaattctaagaaaatttataagcatttgtagggttctcagcagtttccctgcaaaatttggtgagcttctgatcagtctagaacgttgggtgataaaatgaaaaaaataattaaaaaaaataatgctggtgtggtaagtgtgaagaactgtgttcctccaggcaaaaa

SEQ ID NO: 67668 - DNA, 1326 bp, Heterodera glycines
  unsure (1)..(1326): unsure at all n locations
atgcctgatttagtgcacagtggtgccgaagtaatatcaattcagtcaacttccgaagactgtgaaagacaatcaaatggttctgtatgtagagtcagtggaacaaccgaattaacaatttcattagcattaaaagatgataaaggaaaaataatgggttcattagaattaattttacaatttttacgattacactgtaaccaacaaactttaaaatggttacggtcatataaaataaatgttatttcaaaaagacgctgtccaacaatgggctcatgcacaaaaagtaaatgtaaaaacattaaaatggatgaaaaaattccagaaatggaagattatgaaaattttccaggaaacaatttctgtaaaaaaggagacgcaatttggggtcataaatgcgcactcccatcatcggaatgtttcttttatagaacttacgcagaaccaacatcaaacacaatttgggaattaattagatgtaccggatgggattatgaattaaaaatgagtttaacattaacaatcggaaacgaaacaaaatctaaagatttgaccatgtttcctggccttacagttaaatggagtaaattttcatttacaccggaaggattaacacctccaatttcaccaattttaaatgattatttcatagtgtcaaaaaatgatataatttatggtggaaaagaatttctgacagatttgacatgtgatgacccaaatgaggcaaaaaatttttcatgcaaattaaataaagaagtgtgcagagaatgttggattaatagggaaaaaggagaagttgaatgcgcatgcagtgaaaaaacaatagaaaaaatgacaccaaaattacctttcacaacagcaaaattaaatattcgcaaagaaggtaaaaaaatattaagcgagactgaatattctccagttaaattagcaataagagttaatggtataaaaattgtaacagtcacagatggaacaaaatgcaacataaaaccaactaattttagcggctgttacaattgcggcacgggtggaaccctaaattatgtgtgccaaacagaatttggtcaagcagaagcagaaataaaatgccaaaatgggccaatatttttagcaaaatgttcagaaaatggacatgaacaaaaggatattttaccctttgaaatggccgacataaacatgaattgcattgtcgaatgcccagggggccaaacaaactttanacttaaaggcacacttcgttacgtaccagtanatgaaaagaaatttcgaanaataaacacagaanaaataatgaagacgaatcccgatggaattntgaaacattan

SEQ ID NO: 67669 - DNA, 422 bp, Heterodera glycines
atgaaaaaattagaaaaatcgtatatttatagtctgatgggggtgataaagtaattttcaatttttctgttttttgggtaatttggtaaacataaattaagggagaaaataatcaattgaactacataccataaacttaatctaataataatatgtaatttgaccagtacaaaaaaataatttaattgttttaaaatgcaaatttactattagcaaatttggcataaaaacggtttgaaaaaatattttatttgtttaaaaatataaattcaatttcagtttttataggaatttacatatttaccattggatttaattttaattgccttcggttgactcattaaacaaatgaaaaaattaaaatttaatttacctatgaaatttgttctttgataatcgtcattagttgaatcattaagcaa

SEQ ID NO: 67670 - DNA, 132 bp, Heterodera glycines
  unsure (1)..(132): unsure at all n locations
atgattctgtgggtggcactgcgcaagaacagttacgaaattatgttgaatgacacggcgttggacaacagacaattttggccaaatgattggtgngaggggtcgggacgagagaatgtcacacatatcgtg

SEQ ID NO: 67671 - DNA, 2409 bp, Heterodera glycines
atgctattacttgaggagccaataacaaaccaaattgaggttaaaagctataattagtggcaagaaaaggaaaacgataattcagataaaagaacctgtaaagcttacttacaccaaattctatcggaaaatatgcaacggcgtacagtttacattccgcctccaactgcagaatgaaaccgaccagttcaaaatcagtttgttacacgacagaccggaacaccacgacagaagtgatcaaaatttaaattaattaattattataatccattaagcaaataaataataatgtaataattcagttggctcaacagtttttgaaattgaagtcgcactaccaagcaacttcactttcgtcgttcattatgtgaggaaatgggttttttacttaaattcttaccaatataaaattgattttcaatataagagaattggaaaaatgttatgaggctttggcctgaagcttttccttacaatttcaaaaaatataaaacaatttttagtacggtattagaacatctaacaatggaagcctaaccttaaatgtcgacgatcagagagaatatgagtttaaactcattatcagtgacacatataaattcattgtgaatagaactttgttttacgaacagaacacaagcattacgccggcttgggcaataaattttgtccgggtaattaacgtactaattgggcaattaacacttttattgaaaaggtggaaggcaatgtgaatctactcgaagagccatcagtgaacatttcaaaggtaagttttaattttatgaaaaagtgtcaatttcttaaatgattatcgactagccgttttgacaactttttctttgagtttagtgcagaaaatcggaaaaaaatgccagaacaatggaactctcttcagtgctaaactacggagatgttgtgacaatccaaggaaagtttaataaactcaagccagaactgaacatttatttgcttcacgaggcagcggaagcggacacaaaaagtgagtgacgagaatttcgtaataaaatttatcagtgaaatggtcgcaagtgtcagaaccgaaaagcctggaaattattctgagtaaatttaaattttgctgaaaaactcacataaccagcattcgtcagtggaagggggcaaattggcggcatgtccgtgccgagaaaattaagacgatagaattttatttgagttgataaaagctaaaaatttaaccaattcgagaaatatggttttattattacataagtacaaatcttttaagcggctacggatgcaaccgttggtgacgtgctgttgcatttgcattttgattttaatactacaaaaatcaaatgcgcccataaaatatattcggtgaattttttcctaataaaataaaattaaattaaattttacattcaaggaaaaaaaatatgttgatggaaagaacacattcttaactgacatattattgtacgaatctcaaccattcatattgcaaattctgatggctgatgatggcttctacggaagcatttcgagatcggattataccaaattttgtgattattacgtcgcccaaatcaatcatgagaaagcaataatgccctttccgccttttgccattgaccatattcaagtaatattaaaggcgaaattttaaaaattaggctggaggcttttttgtattttctgagactttttattaagttggaaaaatattcaaaattgcataaaaataccaaaaaatacaacaaaaaaaaaatcccggggcttattgataatgttagattaaaaacttttttatattattcaaaatttgaaaatcaattccacgtccaggtccgagcttttttcaaaatgtcaaactcaaataaatacccatcaatcccttcccctcccactttcagatcgatggcgatttgaaaccggtaaaaggaatcaaactgattcaagttattctgcctaataactcaacacattttttggatgacaaaaataaaacgattaattgtacgcccctcccatacaaacaaatcaatcggaccgatgggcttttgaaagtgaatgaaagcataattgtgatgatggagttgaggggatttaaccccggggaaaagcaagaagtgggcgtgttcttctacaaccaggcaattggctaccacgacctcagtgagtggtgacaatttcattaataaatgccattaaaaaggggcggggtggggcttaaagcaagcaacagattaaatttgaaaatattttttaattcagtgcgaatccgaagatggcatttcaatggaactgtattctttgcttaattatggagaattagtgaaaattgaaggacgagtggatcgtaatgccacagtaatcaaaatttatttgtttcatgaagtggcgcaattcaccgaaatgagttaa

SEQ ID NO: 67672 - DNA, 337 bp, Heterodera glycines
ggcggtggcgtctattcggcgcgagctgttgccgctggtgtcgatcattacgccgaacctgccggaagcggcggcgctgctggcgtgcgcgccggcggaagatgaagcgcagatgcgcgagcaggggcgggcgctgttggcgatgggctgccgggcagtgctgatgaagggcggccatctgagcgaaagtgagagcccggactggctgtttaccgcagaaggcgagcagcgctttaccgcgccgcgcgtcgccacccgccacacccacggcaccggttgcacgctctcggccgcgctggcggcgctgcgcccgcgccatgccgactgggcggctacg

SEQ ID NO: 67673 - DNA, 1325 bp, Heterodera glycines
  unsure (1)..(1325): unsure at all n locations
aatctccccagagcggagcgcattntgttcgccacaaaaccaagcgccctccgggcgtccagtgttgactcagaacaactaagctgatcgcacggtcttgtaccggcgacgtgtctttcaagtgtctgccttatcaactttcgatggtagtgtatctgactaccatggtgatgacgggtaacggaggataagggttcgactccggagaaggggcctgagaaatggccactacgtctaaggatggcagcaggcgcgcaaattacccactctcaacgcgaggaggtagtgacgagaaataacgagaccgatctcttatgaggccggtcatcggaatgggtacaatttaaaccctttaacgagtatctatgagagggcaagtctggtgccagcagccgcggtaattccagctctcaaaatgcatagaattattgctgcggttaaaaagctcgtagttggatctgtgctagccgtccggtgcacactttgtgtgttactggtttggttggcttttctgccggtctttccccggcgttggcctttaccggtcggcgtcggtgggctggcgagtttactttgaacaaatcagagtgcttcaaacaggcgtttcgcttgaatgttcgtgcatggaataatagaagaggatttcggtccgattttattggttttgctgaccgagataatggttaacagagacaaacggggccattcgtattgctacgtgagaggtgaaattcttggaccgtagcaagacggactacagcgaaagcatttggcaagaatgtcttcattaatcaagaacgaaagtcagaggttcgaaggcgatcagataccgccctagttctgaccgtaaacgatgccaactagcgatccgccggcggatttattcgccctggtggggagcttcccggaaacgaaagtcttccggttccgggggaagtatggttgcaaagctgaaacttaaaggaattgacggaagggcaccaccaggagtggagcctgcggcttaatttgactcaacacggggaaactcacccggcccggacaccgtaaggattgacagattgatagctttttcatgattcggtggatggtggtgcatggccgttcttagttcgtggagcgatttgtctggtttattccgataacgagcgagactctagcctactaaatagttggctcattgcttctgtgggcacaacttcttagagggattttcggtgttcagccgcacgaaattgagcaataacaggtctgtgatgcccttagatgtccggngctgcacgcgcgctacactggcaaaatcagcgtgcttgtcttccccgaaa

SEQ ID NO: 67674 - DNA, 1189 bp, Heterodera glycines
  unsure (1)..(1189): unsure at all n locations
tttcggggaagacaagcacgctgattttgccagtgtagcgcgcgtgcagcnccggacatctaagggcatcacagacctgttattgctcaatttcgtgcggctgaacaccgaaaatccctctaagaagttgtgcccacagaagcaatgagccaactatttagtaggctagagtctcgctcgttatcggaataaaccagacaaatcgctccacgaactaagaacggccatgcaccaccatccaccgaatcatgaaaaagctatcaatctgtcaatccttacggtgtccgggccgggtgagtttccccgtgttgagtcaaattaagccgcaggctccactcctggtggtgcccttccgtcaattcctttaagtttcagctttgcaaccatacttcccccggaaccggaagactttcgtttccgggaagctccccaccagggcgaataaatccgccggcggatcgctagttggcatcgtttacggtcagaactagggcggtatctgatcgccttcgaacctctgactttcgttcttgattaatgaagacattcttgccaaatgctttcgctgtagtccgtcttgctacggtccaagaatttcacctctcacgtagcaatacgaatggccccgtttgtctctgttaaccattatctcggtcagcaaaaccaataaaatcggaccgaaatcctcttctattattccatgcacgaacattcaagcgaaacgcctgtttgaagcactctgatttgttcaaagtaaactcgccagcccaccgacgccgaccggtaaaggccaacgccggggaaagaccggcagaaaagccaaccaaaccagtaacacacaaagtgtgcaccggacggctagcacagatccaactacgagctttttaaccgcagcaataattctatgcattttgagagctggaattaccgcggctgctggcaccagacttgccctctcatagatactcgttaaagggtttaaattgtacccattccgatgaccggcctcataagagatcggtctcgttatttctcgtcactacctcctcgcgttgagagtgggtaatttgcgcgcctgctgccatccttagacgtagtggccatttctcaggccccttctccggagtcgaacccttatcctccgttacccgtcatcaccatggtagtcagatacactaccatcgaaagt

SEQ ID NO: 67675 - DNA, 217 bp, Heterodera glycines
atggcctatcacaacaacagccagcagcatttgaacccgcctcgcctctgcttccaaaaccgttccctaagtgcccgtgaaagcggtgccgcggaagatgaaggccaccgattcgatgctaccggagtcgacgcattttggcaaagaaccgcaacgccaacaacggcgacgcgtggacggcgccaactgtccgccagcactgatcagttgcttaccg

SEQ ID NO: 67676 - DNA, 219 bp, Heterodera glycines
ataaattgtgaaaaacgaaatgttgcgttacaaagtgatccgatcgctttatccggttctgtgtttgatcgcttccctttattatgcattgatcaatcgcgtgttcacgctgatcagtcacttttggccaaagagcaaagtgacgtggacagagggcgaggcggaggagccgcttctgttcatgtcggccaaaaaaatggcggagaaaattcggcgtaa

SEQ ID NO: 67677 - DNA, 1268 bp, Heterodera glycines
atggctaaacagacgcgcgacgagggaaagttcgttgagttggatggtgccgagatgggaaaggtggtggtgcgttttccacccgaagcaagcgggtgagtgaatgttgttgtgatcactgatcataaacaaaacaaggggagagaaatgaaagaaattttaacacttccaaccaaaattcattgttttttacgcggcgacaagcacgtaatcgagcggaaagaggggagggggacttcgtaatcaaaggcggcagaaattaatgagaaaaaaaatcgccagcgatggagggggaggggaagaggagaactattgagataaagaaccctagggtttgacatttttcggaaacggacagaactgacggacgagttactaatttatttcagttatttgcacattggacatgccaaggccgcactgctcaatcagttctaccggcaccaattcgaaggtcggctgattctgcgcttcgatgacacaaacccggccaaagaggacgcacacttcgagaaggttttgtttcacatttctcagattttggggggtaccatttcaaaagcattaaaaatctttcgctttttcatcacaatgcttaaacccaatgcttactaattcaggtgatcgaagaagacctgcgcctgttgcaagtcgagtgggacaaaatgagtcggacttcggaccattttgacgcccttttggacttttgtcagcaattgctggtcgctgggaaggcctacgtcgacgacaccgaagctgagcaaatgcggaaggaacgcgaggagcgggtggagtcgcggaacagaggaaatggtaactttttgggtttggcaccgtacgaaattttcaagaaaaaaatcttagaaaattctatggaaacaaaattttttgaaatttttgtttcttcgaattttttcagaaaagtttttctaacatttttttcttgaaaaatttctgtttgaaaatttttagaccttattttgtgccgaaaaattttcggtttttcctttatgatggtatcccttccaagactcttttacccaaatttttccaaaaaccaaaacaaacttcctggaacagtccctgattcagcggtcgagcagaacttggcattgtggaaggaaatgcaggagggcagcgagcgtggacagcagtgttgcgtgaggatcaaaatggacatgaagcacaacaacggggcgttgcgcgacccgacaatttaccggtgcaaaggcgaaagtcacgtgcggcacggggacaaatacaagtga

SEQ ID NO: 67678 - DNA, 155 bp, Heterodera glycines
atgattgcacgtaattgccgaaaaaattcgagaccaatttccgaatgttgaccgactaattgcagaacgaaagccgtctttgtcaaagcgccttaccgagtcaaaaaatttggaaatgtatctcatatgcaatttcaaccaataaatttgaagaa

SEQ ID NO: 67679 - DNA, 1894 bp, Heterodera glycines
atggacatgaagcacaacaacggggcgttgcgcgacccgacaatttaccggtgcaaaagcgaaagtcacgtgcggcacggggacaagtacaagtgagtgggaatgggaaaaattaatttttagtttctaaaaaacccccaaaatagttgctaaaaagttccgaatttaggggtgtaaaatcgaaaattttcttcaaaagggtaacaaaattattccaaatcagtaaaaaacatgtttttcgtgcatttcattcaggctacggggagctcaggaaaaaaatagtgaaaaaacctataaatcgtatccctttcattaccttttgacagagtgtacccaacctacgacttcgcctgtcccatcgtcgacagtttggaaggagtgacccacgcgctgaggaccaccgagtacatggacagggacgagcagtacaacaccatttgcgactcactcggactgcgaaagccgtgcatttgggcattcgcgcggctgaacatgacacacactgtgatgagcaaacggaaggtgggcaaaagtatggcaccgagcattagcaatgtctgtttcgttcagttgacctggctggtcgagcagggcttcgtctccggctgggacgacccgcgaatgcccaccgtccgtggcataattcgccgggggctgaccgtcgaggggctcaagcagttcatcctggcacaaggaggaagtcgctctgtcgtcacgatggaatgggacaaagtctgggccttcaacagaaaagtcatcgacccggtggcgccccgctacaccgctttggaaaacgcttctgccacgctcgtgccggtgacggttcgccaatttgtggcggaggagtgcgggcaggtgccactccacccaaaggtactcacttggccagtctcgcccatgctgaccggacaattgcacgtgtagaagcccaacggagagtccaaggaaatttggttcggcgccgatttgctggtggagagagcggacgccgaatgcttcaaagtcggcgacattgtcacctttgtgaactggggcaacatgaaagtggcccaagtgcggagggaagagggcgcggaggggggacgaataacggcggtggaggtcgacttggacttggacaacaaagtgagagacggaccaaaatgccactcatgtcagaccacagggcgggaccataagctaaaatcagtcacggcattggtcggacacatttaacttagtcaatgggggagggagggcacgaatttcaagttcattcccctaatattgagtcattgtcttccaggactacaagaagacgttgaaagtcacttggctggcgaaacgtgccgaaaacttcgcggtgaaaacggtccgttttgatcatttgatcagcactccgatcattggcaaggaggaggactggaaggagttcgtcaatcgcgacagtgaggtgagttggattgtgcccattttgttttgttttacaatttttttaaatttcttttagcattttggcactttgttggccgagccggcacttcaaaaagtgaactgtggagacattttgcaaattcagcgcaaaagcttttacatttgcgacgcgaagacagccaactcaatgacactcatcgaaattccggacggcaaagagacaaataatgcagatgtggacgacggcgaaatgccaacattttgtgccaggcttttaccctcctgtgacgacagtgaaatggcaacattttgtgccaggcttttgccctccggtgacgacagtgaaatggcaacattttgtgccaggcttttgccctccggtgacgacagtgaaatggcaacattttgtgccaggcttttgccctccggtgacgacagtgaaatggcaacattttgtgccaggcttttgccctcctggtga

SEQ ID NO: 67680 - DNA, 159 bp, Heterodera glycines
atggcaaaggaacagcggaagagagagaaggcaaatattggagacagaagggaaacgagaggaaggacaacagaaggagaagaagcggataaggacggaaaaggaggaggagacaatgagggcggggaaagcatcggcaaaagatggcggaaatggcaa

SEQ ID NO: 67681 - DNA, 155 bp, Heterodera glycines
  unsure (1)..(155): unsure at all n locations
tacagtttctttctttttaatcaacaccagaaatcaccaaataaaaacaacaaaacaattgcgaatacttccacatgaatacactgtctncattaacaatctttgccttcttcgtctnctttccttcctttttcgtctctttttccctctggccc

SEQ ID NO: 67682 - DNA, 101 bp, Heterodera glycines; identical to SEQ ID NO: 56211

SEQ ID NO: 67683 - DNA, 941 bp, Heterodera glycines
atggcattcatgggctctgatatgacaaaaattagtccatttttaccatttcgaacttcggaagaaatgattggtgatatttctgaaattatggcgattcaaatgcgtccttttcagtctcatcactcggccggtccaacagcaggaagcagtacacctcgcagcataacaaccactgcagcagcggcggtggttcggtcggtcgtcacgcgttgcctccgaacaattcgctgccaaaacgacagcaaccgcaccaccacagccaccaccacatgaacaacagcagcagggggacaccgtgcaacagcggcacgggcagtgggaaaagcgcgcgcgtgcgccacgacgcggccgccgcgacagcgacgggacggacggcgaagcgaacggtggcgacgacgaacggaacgcaaccacaacggaatgacaacgcaaacagcacacacaccaacgccacctccaccaccgcatcagcaacaacagcaggcaataacatcgcaaaccacgcgatggacacaatggccggtggggaaagtggcggggagggggggggacaacggtggggaactcgaaaagccaaatttttggctcttcaatccaccaattcttccagtattattttacaaaattacacaccgctggaaaaaactgtatttttggctcacaaaaaagatatttttcaaaataatttgaggattcttttgaaacttgagaatttctcaaaatttggcgccctaagttggcgatggaatgaatgtgcgcttatttcagcaatgtccagcagtaccatcgacatggacttgctgcccgccgaagtgtcgtccggatacgactcggacctcgtgtcgcgcatccaagacgacataatgcagcagacgccgcctgtccagtggaatgacatctccgggctggaggaggccaagcgattgctcacggaggcg

SEQ ID NO: 67684 - DNA, 489 bp, Heterodera glycines
atgcatgcgccattatacggctataatcaaagcagcgttgtcgccgaaccaacaattgccacaactgattcaattcccattcgcacgagtttcgtcacacctgaaggaatatatcggcaaatgactgtcaacgaatttttcagagcgaatcgcatacaaaatcaggtaaaaaacaataaattttgataagacaatttgtccactcgcaaaccctaagatttgtgagatgctatttttacatcatttatttacataccttttgaggtcgccggttccgtatgcaacacacccgtccgtttttccttcctaagaattccagtaacgaggctaagctttgctgaagaagctttgccttccacttcggatgtacaccatcacgagcttttaagggaaaattacaaatggcattctaatgaaatgaatggatacatcgacagaatttgccataacattggacgagaaatctatgtgtttgattacacgaggtga

SEQ ID NO: 67685 - DNA, 400 bp, Heterodera glycines
atgtgttctgttttcgctaaacatccgattttgctgttcaataattcgtccgacattttttactacgaaatttcaatcggaaataagaaaaagtaagagattttttattttttgaataaatttattaggaatataaaaatttaattatttttattattattaataataaatttccagttttatgttattcggattcgccgtcaaacagcagacaacactgtatggatatgaaaagggcacttatgcatatgacaattatggcaatattttcattaacggagaacaaaaggaatcaaatgtcaaatatttctacggtgttggcgataccgtaggaattggcgtcaattcggccactcggcagatcattttcacaaagaatggacaacgtttgggttggtaa

SEQ ID NO: 67686 - DNA, 585 bp, Heterodera glycines
atgttgtgcaaatgcggcgaatgcttcgaatgcgaagatgaaaagcgccgcctcaagcgcaatcgggagctcaatacccgcaaagagcaaattaagaactgcacaggcaatcatctagcaccggctatgatggaactcaaacgccggaatatgaaactgtttaaaaaggcttataggccggtgaagggcgtcatcaataaaataaccgggggtgagtttaaaaaagaaattgaaaaaaaaaaaattttttaggcccttggaatgtagaatgtgaggtctgccatgagaccttcacatacttcatggtggagtgggaaaactcccggaccgacttctcgtggggtcccgggaggaccatggtcgaagcggataacatagtaaaaatttttgaaattttttccagttaaaaattaattttagaatcagaaagaaattttggctcactatgtaggccaaaatgatctactccagaatgaagtggactattatcagaaccttggtaataatcctccgttgaatgtgcccccaatgggggaggatgctataattttgaccagggacgatggtatgccgattggtgcagag

SEQ ID NO: 67687 - DNA, 1782 bp, Heterodera glycines
atggaccccgcatttttggccgaattcgccccgcccgaaggagccgaattgcatcgtcataaaataaaaaaaatcgatcctgatcttcttcccacttctgccgaagccgacacttcgtttgacgagcgcactgtgccgctactggacaaggaatccataagcacacttctcgtcctgttcctgttggatcaggagaagttcgacactgtgcgtcttcaggtagaagactactcagcattcattgcttacaattagtattccctttggtttcagaaattgttgaaactgatctgcatagatccgggcacttgcgatttcaccatttgggcactgctgtcaatgttcgatgggctggacaagttcaaatcagtggacggttacgaggcacctgcggatggcggcaaattccaatttggatggatcaatgagcttcgtttacagaatgttttgaatcggcccgaaagggtccttctggtcacttcaaactcaggtaaacccatcctgttttatttcagtagctattggtttttctacatttagttttcatcaacaatcaaattcgaacaatggcagctcaacgcgtaatcgacaatttggcacatttggctcagagctttgcgcggaattttatgcccacacaaattcgtgcgccaactgtgatgacggactctcctccagcaacggcctcccttttttggaatacaattcgcaggtgtaatccattctattttcttatttgaatttgatgtttagtataaatgggcgaccaattgatgactctcgcaaagaagacgccaaaatgatgcaagaaatgatcgctgactccatcgagaaatcgccgttggcacaacttttcagtctgttggattccaatttatcaaaggagagtcgtgcgatttcggatcggattgttcgcattatttcatcggtaatttttgttttgttttttatggtttattttctatttttattatagcttgcgcaagcagttccatcagactttcatgaaaagctgtccgatgaatcgaagctttggcttgggatgcgcttgaagagcttcacaaatgtgtgtttatcgtttatacacgatattgtttaaaaaatagctttaggctttaatgagcagctgcgccggagaagccttgcgtgatggtcgttcaatgttggctgagatgtttcgggcaattccaacagaaagctctgctattctgcgagcaatttacgaatcggtcacaaaccatgggaatcaattgaatgcccaattagttttgatacgccgtgctgctgaatctggagacggtgtgtttggtgccttgtgcatttttatatggttcgttaaggacaacaaagcttgttgcacgtgttgaaagaggtttctggtcgagaaagtgttcccggcaaatttctgaagtcgctggaaacggtgagtttttctttgttacgattgcatcacttatcacaacttatttatatatctttggtgtttttcagtttcaatatttgtgcaaccagttgaaaaaggtggaggaacagcggaagaaagcgcaactcacaaaaaagaaggacgacactgagaaggagggagccgaggaacagcagcaggcaacgacatcgaaacctcaagccgacacacacgcgaaggaggaaagtgacgaggcaacactggtccggaacatggtcgatgagctggcgccactttgggaggagctgagcaattgcctgtcacttctcgagaaggccgaagattccaacatggcggtttttgtgtcttcaaaatggtaa

SEQ ID NO: 67688 - DNA, 70 bp, Heterodera glycines
tttttgtattcaccgatcttcagagtaagtggctaatgcccttctgtagatattttattgactgaataaa

SEQ ID NO: 67689 - DNA, 2403 bp, Heterodera glycines
atgaccaagcgtttgttgcctgaccagcaacagcagggcttccatccgcttcactcatcagtgccaatctacgcaaaagcaaatctgcgcggagacttcaatatggagaagcttgtcaagctggaaagtgaacttaggaagggcactgaacgacaccgactgcttgtcaaaggcatcctgaaactggtaaagtcgagcagcactcaaccgttggacaacgaattggcacacaacgcgctgacattgttgcttcgcctcgtttcattggatgggatgtcgcatgagtttctgaatgtaagtctatctaatgtattttcattttaaacattccctttttaagggggatggagtgaagacactgttggagatgaagcgcaatccaatttcggcacaaatggtgacaaatggcacgacaacgcctccaacactgaacacattggcaacgctcattcttcgccagtgcatcgactcggacgtcgcacttcttcagtcagccttcgaacaaatgatcaccgcaacttgcaatggccagccaatttcgatgcaggaaatcacttcgcgccgacatgcaatgagaacgaagcgttatcagaaggatgttaaggtttgttaattttcattcaaagtctgtaatgtaattcactcgctttcagagagttgtgcgcatgttggtccctttggcggtgcggtcgccctcactttacatggacgcggcgaagaaatgcatggtcatcaaacaaaacgaaattctggtcaaagaacagcgcgctgacgtcaaaggcaatggaaatgcagcggcggcttcagaccaatttcttcaagcggttgttttcattcctaatcaatatgtaatcgtcatctttacaccattttagcttctgagtcaaatcgtgacggagttgacgcaatttgacacatttgcggacgcagacaaaaacactcgtcttatgcagcctccaaacctgctcaaattaattgccgaagtgcttcgcagttatccaaaggtggctgttccaattttcatcgagcaatccctgggcgaaaaatcggttcttcgctggatcatcgaacgtttcctcctctccgctcccgtcaacgatttgtccgacaccgcccacttggccaaaaccgtggtcagcgagctcgtctcaaattcgtcaagtcagcgcatcaccgatcatgtcgtgggcaacatcaaatcacttctcatcgaatgtggcgactttgactgtacggttgtaacttccgatgagagcaacaacggtgcatatgtgaaatttgcggacaaagtgaccattttggcaaagctgacaatgcatttgagggagtgtttgcaggtgcgcgtaattaaatggtaaagaaaagagatggaatatttttgaacaggtgaacaatcaacacaatgcaaagcagggcatgtttattgttaaaagcattcacaagaagaacttggcaaatgtttttgtcagaggcatttggaaaattccggtgagttttctttaaatcaatgttttgttgatctgaatgttaaaaatcgcttttagttacacgagaagccgggtatcgacactgtgaacacattgctgaagctgctcgaaggaatgatgaccaaaaacggcgcagaattcggagcaatgggcgcacgttcttatttgttgccatccttctcttatgacccgcgctcatttcaatattacgacgacgatgatttgactctaagccgtgctacctttgaggagatgggtcgaccggcagccaacattgacccacccattgcttcgactccccgagaagaccaaaacgcgcaccaagaaaatcatgtggcaattcctaacgaacatggagacgtggaacaattggacgaatcgatgggcgaacccgggcacttgcgaggagatattatcgacagtatgttggacaccactcaagaagagaacgaggagggaggggagagtgaagatgagtcgcctcatgactcggaagaggaagacatggacaccggtgaagaattgacgcagcaaagaccagcggtgcacgagggcgcaatggaggacgaccacatttccgaggcagccgacgccaatgagcaggttctgcaatcgcacttggtcgctgatgatgacttcgaggagatggatgacgacgacgatggcgaggaggacgaagaagacgagaccgaagttgagggaggcggggagttggccgattttgacgtatgtcatgtctgttgtgttcacttaaatgcaataatttgtttaggacactctgcttgactacgtgacggactttaatgccctcgcccaacagatgcacgacattcgacggcggatcaatctgaatattgatacgaacgctttaaccatacgaccacaacaggtgcagaaaaggaacgatgaatattaa

SEQ ID NO: 67690 - DNA, 1227 bp, Heterodera glycines
atgcaaaacgaagtgatggacagtgatgaggacgaacaattgacagggaatggcgccgctgaggaagcgatgttggatcaaggcgagtggggtcatcaatcaactgaggaaaagtgcatttactacagcactattaatattcttcgtagttggacctcttttttgtatcaaaaatgaccttaaatttgtcttttttttcatttttaaatacaaattatttagaagggacgacattttccgaaaaaagaatcggaaagaaaaaattggcgaagcttcaggcaaaggcagaagcgaaggcactgcgagaacaggtaaaagcactggtaagtcattttaaaggcaatgaatggttttcaggaacaaacggaaagagaagagaggaaacaaagagaggaagaaattagaaaagaggaggagaaaaagcgacaattggaggaggaggaaaagaggaaacgggcagaaaagaggagactcgagaaggaggaaaaggaccgccgggagatggaggagtatttgaaagtgagggacggggcaaaaagggaaaagtgccaggctcttgcagagtttacccaatcttaaataatttaaatattcaaaaaaatttaacacgacaatagaagtccatttcacaccttgcatttttgaaaatttctaaaaaaaactcaaaaaatagtcagaacaaaaaagtgtaaacaattccaaaatatgtagaaaaagccgaattataaaaaatgcaaataaaattcccaactatcaaagcacatagaacccaaaaccggtttttaataaagaaaaataacaaacagtataattctatgttttctttcaaatgcttttgttgtttattacaaaatttttaaatatattattttgcagataaaaggtgcctttgaagtgcacgaacagggctttgactatgatgaaaatgaggacaatgccgacaaccttctcgagtcgtttgtcaattttgtgcgcaagaaaaaggtcattcgttgccttattggccttttttattgtcattctccgcaggttgtccacgtcgacgaattggcgtcaaactttaaaagtaaaccaactgacattgttgacagactgaagacactgctgcagcaaaagcgactcactgggctttttgacgacagaggtgtcctcggattccgtttatcccatcagctgtcccttcccttaaggactttttgtttctataacagaggaggaattgcttga

SEQ ID NO: 67691 - DNA, 137 bp, Heterodera glycines
atgggagaacaagtaaaaagacatggacgtaccgtcaagcaattcctcctctgttatagaaacaaaaagtccttaagggaagggacagctgatgggataaacggaatccgaggacacctctgtcgtcaaaaagccca

SEQ ID NO: 67692 - DNA, 401 bp, Heterodera glycines
atggatattcattcggtgcaacaagccaaaaaagtggccgaacagctcgagcgggaaaagcgcattcgccgtcttccaatgtcggaaacaattaacgacttaattcggtgggactgagatcgaaaatgttattaaattcgctagttatgttactcatttgactactgaaattattttgttttttacaacattttgtgccctaataatgactttcgattgtttaatgtgcgttaatatttaggtacacccaggagatgcagaaagacgactgtaagtgttttgaagggattctaattacagacttggatggattaaactttgatttattcatccctccgaatcatgcaaaaagtttgcggtttaacttctgtaaacaatcaaaaaaatttttaattctgtaa

SEQ ID NO: 67693 - DNA, 482 bp, Heterodera glycines
  unsure (1)..(482): unsure at all n locations
atgggaaagtacaaagcaatggcaaaaacgctcaaaacattcaaagtgaaggcatcgcggaagcaattggaaaaagcgaaaagggcgagacggaggaaaacgaacggcgaattggggacagaggaangtggcacaaataatggagacggatgggaaggcggaaaagggggcaacgatcaggaaaaacgacggacgattgaggaaaagcgaaatgccatttgttgggacagaaaaaggacgaaaaaacggtgganaggtgagcaaacattaattaaagcaaaatcgttgaaactttcagcttagcaaaagactcgaaaacaaaggcacccggcgaagcgcagcagggagtgacgacaaacagacaaataacgaagaaaaaggcngaggaaagtgatgagaaatcggaaaagggaggaacggaagagggaaaaggncggcgaatgcaatggaaaaagacgaaaaatancagattatcattatga

SEQ ID NO: 67694 - DNA, 893 bp, Heterodera glycines
atgcatcgacagctgcgcatcggctggttcgaccagcactccaacgaggcactgaaccaagaacagtccgccatggactatctgatggtcaaataccaaatcgaccagcaggtgctgctgattattcgttgcattgcttttggcaatttttaagagcgcgaggaaaaatttgggaatggtcggcctcgcctctcacgcgcacactgtgcacatcaaaaatttgtccggcggtcaaaaatcgcgggtggcattggccgagctgtccctaaagcagccggacattctgatactggtaaagtttctcgggatttatttacataataacgtgagaatcggtgaaccccaaaaaaagtcgcagagacaaaaaaaattctaaaaaatcttaagaaaaattataatgaaaaccaaggtgttacattgaataaaatttacaaaatttcaggaattttttttagtttatataatttttgaaaattaacaaaggcatacatttaaaaagtgggggggggtctacctcctttcttttcatgaacaatggtaaaaagtcttcgggttcccactccatttttttggttgcgggcctttgcaatcacacaaaataaaattattttgtgcatattcgttgtttttcgtagtaccaatcgaataaatcgaaatttcttccataatatgcaaacaaatctaacaataatctgttggttaaggacgaaccaaccaacaacttggacatcgaatccatccaagctttggctgaaggcattgaagacttcagtggcggtgttgtgatggtaactcacgacgaacggcttatcagagccacagactgtcgtttgtgggttgtggaggatcaggtggacggggaggaggaaacaccttcgcattgtgaaatttag

SEQ ID NO: 67695 - DNA, 1229 bp, Heterodera glycines
atgagtggacggaagtctctggaaagaaaccatcatgaacggagttctaaaacttcccaccatcgttcggcggtaataaaatttagtggcgaagaatgtgatagcaaagatcggtgagtctttttttgttttatttcgattgaattggccattctttaaggaagtcttctcatataagaagaactgactctgataaaattatgcgatctgttaatagcgtcaaaaaccgcttaaaagcgtcattaaatgctgcaattgaagcggaatcgacgaaacaaaacacaggcaaaagagaaatgtcaagttcaaatggtcagtgagacatttgtggtttaaaatgcattcaacgtttgtccatttctcaaacaaaaattaaaaatttgtgcaaaagtaaaaaaaccggatttagctaaaaagcatagaaatacgaattgatgttttacagatgtagctgattcatttgcaaggcaagctgagataaaccgaattgaagagccgggcttccgaccttcgtcattcaaatcggacgctgacacatcccgaaaagttattaacagcgttttatttttaattgtttttttcaagaacaattccttggaaaaaatgaatgacaaaggcaaaacgaacgcgacaaaacacgaccgggcgatgtttggaccaatttgggcgggaaaagaactcgaaaaaggacgaaagacagcacaaagcgaagcaaaaagggacacgcggcaacatcacagagaaacaaacgaaaagtttgagggagaggctcaatgtcagcccggcactcgtttcacattggcccatgaattggtaagacaaacgaagacacttttttattttagtgggcctcatcaaatcacaggaggacccttactactttcattttttggctgcaatatataatatattttttttgaaacttatttacggacttttcggattgcttataaattacagatccaatcaaattctaaaattatttttcgacatttacaaatgtggaaaaagtcatttgtttaaatttagttgtcacaaaacgcagaaataagaaacggacgatggaaagagctgttcaaagaaagaaggcaaaacgctctggatggcattttgtgaattcgtcatactttatataaatttaaattaattcgtaaatattatgcatggtttaacctctattcgaatattttcacaattccttatcatttttttaaaaagaagaaattaaa

SEQ ID NO: 67696 - DNA, 502 bp, Heterodera glycines
atgaaaatacgccctaaaatcagaacatttcttagaaataagaacataaagaaaccctgcattaatcagataaaaataaattcaaatgaaaacgtcaaccggtatcgaactcctaacaagaaatacggttagtgttgaagcactaaccactaaaccacaaatatattggaagttaacagcaaaatttactttatttcataaaaaatttgtcaaagatggttaaaaattcattgcgggggtcagagtcgcgggggcgggggtgacgggggcggggtccgaactctacttctaattgaaataaaatgcgaaaaaaatgacctcaaaaaattaactgttgcagttgcaaattgagtatatttcaagccttttgagataaagctcatacgattttcggcaaggaaatttttgtaaaagggtcggtgttaggtcgagcctaaaaaagtatcaatgataataataattaaattaattaatattttaattttatttgctgaataataaa

SEQ ID NO: 67697 - DNA, 1303 bp, Heterodera glycines
acaatgacaaaaattaaggaagacattggtgaagcatttgtctggatttcagtggacgagactacggataaaatggggcgaatgatcgccaatttgttgttaggcaaattggatggcaaaaaatggcaccccccgcatttaatttctgtgaaagcgcttgaaaaggtggacagtggagcaatggcgcgttttgttaatgaaggccttggtagtcgtttagcttttattcctagatattttttaattttagacagtttttctgctaatattaagaaagagcgagtgctgtttttggttacggggcgaatgatcgccaatttgttgttaggcaaattggatggcaaaaaatggcaccccccgcatttaatttctgtgaaagcgcttgaaaaggtggacagtggagcaatggcgcgttttgttaatgaaggccttggtagtcgtttagcttttattcctagatattttttaattttagacagtttttctgctaatattaagaaagagcgagtgctgtttttggttacggacggggctgcgtacatgaaaaaggccggaagacaattaaaagttagaaaaaagaaaattcaaataaattttttctctttttcaggttttttacaccaatttgttgcatgtgacatgtttgtgtcacgcattgcaccgcgtggccgaaaaagttcgtgacgagtttgcgcaagtggacaaattgataagcaaaacaaagcaaatatttctgaaagcaccgcatcgcctttctgtatatcgtgagatgtgccctgaattgtccatcccccctcggccagttttgactcgttggactacctggataacggcagtgtccttttattgggagcattttgaggcattaaaagcgttaatttatataattttattttttgtagtaaaggtttgtattttttaggtagtgaattcattcaatgcaaatgatgctgtgtgtgttaaggaatgtcaattgtctttcaacaattcagtttggcaggacctggcttacatccattcaaattttggacaattatctgctgcaattacaaaattggaaacacagggaatgaccatttttgatgccatggatgtattcgctggcgttcacaatcaaatggacagtgtttatggcgaaaaggcaaccgaaattcgcaaaaaattctcggacattgtggccaagaacaatggaattgaaaaaatatcccaattttgccagattctgtctgggaaaaacactgaatctgatgtacccccaaacctcatccctttttacaaatttgctccattgacatcttgcgac

SEQ ID NO: 67698 - DNA, 218 bp, Heterodera glycines
gagttggtcacactgtggatgctgaacgaaatttgatcaatttgtatccacaatgccatctgatcactgctgatccgtcagcagaaattaatgacgcattgacacatcaaattggtggcaaatttgttcatgcagcaattggtggcaaaacagcaatgggacagccggtgaatgttcgacgagaaggcatatttagcaaaaactaaaaaataatttaa

SEQ ID NO: 67699 - DNA, 302 bp, Heterodera glycines
atggatgaagaaataaagggagggaaaatttcgaaagaattggaaaattaccatgaacttttgttgcgtttatttaagatcaaattcaaacaattgataaatcaaaatgacaaatttgtggaggaaatgttgactaaagagtgggtcattgaattggtgggaaaatatttgcccaaattgacaatgtgaccatttgggtgagaatttcggactgctttttgttttgaatacataataccatttctcatttgcagctttgtcgtcaattcaaaaagagaagcattaagaaaaatgactgttag

SEQ ID NO: 67700 - DNA, 1038 bp, Heterodera glycines
atggatgattcatcaacaccaatcgatcgcgacgaagtaatggttaacttcaagagaaacctcgcattcatcaacaaccggtaccaaattgcactgccatggaacgacagagtcggaactttgccgacaaactaccatcaagccaaagctcgactgatcagcctgatcaacaagctccgcgcactcaacttggtcaacgaataccaagcaattttggatgagcaactgcagaagtccgtcatcgaattggtcgactctcccgagcaatcaattggaccagttcactatctgccgcaccgtgccgtcgttcgtaccgacaaaacaacaacaaaaatccgcattgtgatggacgcctcggcaaaacccaaacacagcccatcagcgccgtcactcaacgaatgtctgcacaccggacctcttttgctaaaggacttaactggaattttgttacgcttccgccgtatggaacatgtcctattggcagacatcgagaaagccttcctacaacttggcgtacgtgaacaagacagagacgcaactcgtttcctatggctaaggaatccaacaaacaacgacttgaactcgctgaaacgagaagacattttggtcttccgtttttgtcgtgtcagttttggcctgacagtctcaccatttctgctcaatgctacagttcgtgaacacctggcattattcgacagcaccttagcaaaaaggattgatgagaacctttatgtcgacaacattttgatcgaaatgtggccaaacgagcaacttcaacccgtcgtggaagaagtcaagtccattttcaaagccgctggaatgaacatccgcgaattctacggcagcaacatcgatggtataaagcaattgccatctgaagaccaggccaaagaactcgaaaacacgaaagttcttggcatcacttggaagccaaaattcaaccgaatcgtcttcaaaatgccaacattcgacggaaaaatcacaaaacgaacaattctgtcacacatcgcgcaagtctacgaccccgctcggttttaa

SEQ ID NO: 67701 - DNA, 228 bp, Heterodera glycines; identical to SEQ ID NO: 65316

SEQ ID NO: 67702 - DNA, 214 bp, Heterodera glycines
atggcacatttttttgaaattatgggttgggagaagtctaagacatcggtatttcgtgtacaggcagttaagatgctagagtaagtaagacgcaaatttccaaggacgcccttgacatggatcaaggatgcagaattaagtgcatatttggcgacgattaaaaaaaaattaagaaaaaataaacaaaaaaattttcagtgttaaaattttttga

SEQ ID NO: 67703 - DNA, 509 bp, Heterodera glycines
atggattcacttcgatcgctctgttttgacttctttttggcagcaaatgtattcgtatatattatttaatttttttttatgttttaattaattaatttattttatattgctaggaaaccaattcaaatactttgcactttatggtcatttacatgattttgcatcaacaaattcagacaaaattacacaacgaattaaaggcataaaaatttgaaaaaaaaattattttaatttttaaatttaggaatatgcaattgaaaaaggacttttaccaaaaaatgaacaaaatgctgaggattattccgattggctttgttcggccatcggcttggagcatcgaccattcctaccgtatacaaatgccgtagtaaatgtaataaaaaaaattatttgagtatttaaattaaaatatttcaacgcttattggttttcaaaattttgaatatgcctagttttaggcttaaattttaaaagttttatcgaacttaactcttgctataattaataaa

SEQ ID NO: 67704 - DNA, 263 bp, Heterodera glycines
atgaaaattggtgtccttttaacgcgtagtgaatggtatcgccacaatggtctcggcgatggggatcgagcatctctgcatggacaatttcgtggatgccgtccagcgaatggaggagcgccatatgcatgtcgaaatgccattcaatcaggacaaatatcatcagtaaaacttaataatcattatactgatactagaaaatggaaggaggaactcggggcaaaacattaaattgtcaaaagatcaatctaatacaaattaaa

SEQ ID NO: 67705 - DNA, 1368 bp, Heterodera glycines; identical to SEQ ID NO: 39035
  unsure (1)..(1368): unsure at all n locations

SEQ ID NO: 67706 - DNA, 811 bp, Heterodera glycines
acgaaggcttcgacaatttgtacgacttggaattccttcggatgctcagcctgagggactgtcgatggatcgacgattgggtgctgagccgaattggcggaatgttcgccaacactttggaaatgttggacctgagcaactgtcacagaatatcggccaaaggtcagttcgagaatagtgatccgggaacccggtccgaatgcagcagcaacagttgctgtctgggattgttcaaaacccgggccctcgtgtgtgggtacacccccaaaacgtcgccggcttcgcggggacgtaacgtcgccgcaaaaaaaattaaataaaacttttttcaaaattgccataaaaatttaaaaaaaaacctaggtgttactgaaaaataaaatttgctgcatttcctgagaaaacaaaattttaagtatctaaaaaattcaaggccatctccccctgacaaccgttgatttccccctccgtccccaaaggactgctcggcctccgttcgctctccaaactgcgctttttgcgcttggacggactcggcaaaacggagggaatcgcaaagagtgcgcttttgctggaggaaacgctgcccaatttggtggtgattggcatcgactatgagcacgcgatggccgagatggaggcggagaagaagctgctcagcaacgaccgggtgctcatcgacgcgaaaggcaccaaattttcaaatgggacaaaaattggggaaaaaagcgtaaaactcggaagaattttggaaattgaatgtattaacgcagaagaagatgggtatcaaagttagcttttaatcccagcc

SEQ ID NO: 67707 - DNA, 1420 bp, Heterodera glycines
atgggttgccaagtaacaacagtggccaaatttgcaacaattagtcagttgtttaaagaatcagtgagcttataggaaatacgtaagctaaaaaacatatttaactgctaattgtaattttgaattgtcaaaaactctgtcgaatctttaaaattaaaataaaggttctattcatggttacataaaacccatttagtttcaataacctaacgagcaaaattttaaaattcaatttaaattgacaaaaaggtgacattaaaccgagttttaataaaggctatctcatccaatgaatctcctcaaacaaaaaaaaaaatttaaacgctttttaagcgaataggaaaattttttgaaaaaaagtctcgagtctcgggttttttgggtctcggtctcggggtttcggtctcggtatcggggtcgagtctcggtctcggggtcgagtctcggtctcgagtctcgggaaatttttggtctcgagcatcactactaaattcacagtacttttcaaggacataaaacatgcattaatgtactctgggcactgattaaccctatttaagtgtaataatgcatttgaaaaagtggatttcagcaattatttaattcagattaatagtcctaaagcctgctgggtcgtttcgtaaaaacttaccgattttcaagaaaaatccatcataacttttctaaaccctatcaaattaaataagcttggtatcatcatacggtagctcccggcttgctctatctattaccataaaaattgcagaaaatttcattgagttttcaaaaagtttgaccaaacatgtttaaaaaattgccataactttctgaaaacttaatgaaatattctgaactcgaaaaatctgtaaaattggcatttttacgaaatggcctagcaccgtcctaagtgccctacagtaatttttgtacaatataaaaaaaaaatcaaatcaattaaaattaataaatatttaaaataaaaattttcttttcagggttcaattcaacctcaaacaaagtcgatgataaaaattatgatggatttcttgctcgtttcccgcgcagcaattcgaatgtgttcattcacccaaaatatttgacaaatgaatttcttggcgaaagttattatgatttggcactgatcaaagtggcatttttggcccaattaaaaaaattaaattttatttcccgaaaatttgttcagattcccgatgaacatgttgaattcacgtcaaaactccctcccgtctgcttacattgtggttcaattgaacgattcaaaaatgggacaagctttgttgccggatggggaaaaactgatggttaaaataatgaaaaaataatatttaaaattaattaatattaaaatgtaatttatagggatgggatttttttgtatgaaaaatcgctagtaaataaa

SEQ ID NO: 67708 - DNA, 1396 bp, Heterodera glycines
atgaatgcaacgcctaacgatcaaatattcaaggtaagataaatatttataatataaaaaatacaaaaactaatttaatttaaaaagctctgttcgggcaaggatcaatgctggacagtgattatttatgcttttattgtgacctttttgactattggtggtgttttgtttaatttttctgttattttcattacaattcgaacaaagtaagattttttactcataaaaatatatttgtaattaaatttctggtgttattttctcttttcaggtcatttcgtggcaccgttaacattttgttcgcattttattcattgtgtgaaattgtccatttgggtggcaattttctgtcaattttctcagcattttctggccaatattttatgccgtataaaactctcattacttttgcttttgcccctataatttgcggcacttgcgctgtgattttgttgcttttcattggcattgaacgcctttccgctgtgcttttcccgtttaagtacataatgtttttcgctaattaataatttaattgttttttgattttaaggaaaattaatcaaaatagttttcttgccattgttttggtgttcaatatcattcaaatcattatgctaacaatcatttattcgcattgtgaagacacgcaacttgactcagttgaagtttttgccaattattatgaagttgccgttctattttatactgtccgttttttaaatattttcccaatattttttaaaataattacactgattaagagccaatgctctacttctggtctgtttgaagcaacaatggtaattgtgtgttcagtggttatttatgcattaattgcggtaacactttactgtcgcaaaggtcggtatttctaagaaaagaagaaaaaaattacactaattaaatgaaaaaaactgtttgaagatgaaaaaaaaagttaagtagtttttaaaattattttaatttaatgttaatagacaaaataaattttatttttaatattttaaagatacaaaacaacggaaaaatccattaagccagcattttttttaaatttaagtaaaattttttgttatcaaattttggtggggcatttacgaaaaatgaaaggttttgtgatactctggcatacaatacttaattaaatctagtaaagaaagaggccaaaaactgacgaaatattagtaaaaattaatcattaaagttgcggactaatactattgtgaaaataattaaacaatattttttttaattgttccttttttgtaaaaatactaaaaatgaaaaaaaatttaatttgtctttttttttgcattttcagaccaaagcaattacaactcggcccaattcaacaatagaatattccgttcacttttcacaattgtcgcagtga

SEQ ID NO: 67709 - DNA, 232 bp, Heterodera glycines
atgggtggacagcgacgcgctattcggtggacatcggatgggaccagcaaaattcatggtgaccaaaagcattcggtgccaatgtatatgttttcatttagcatgattcgactgataatcgacgaaccaaccgaactctgtgcgactcttttccaacaacatgctcgtaccatgttggaccaagttgacattatgctgctgctccatagacaggacggcgaggctacgcctg

SEQ ID NO: 67710 - DNA, 509 bp, Heterodera glycines
atgccccgcgggggcgaaaaggggccgaaaaccatcgaagaagtacacgaagaagcggagaaggaacagcaagtgaacgaaatggaacgtattgaggtgagggaaaacaatgaattaaattgaacatttaattactaaataaagagaaacgaatttaaataaatgatggaattttacactcatttttaaatggtaaaaatgcattttgaaaataattgtttctttcagcatgaaaggaagaaagaaaatgagaaaatgcaacaacagacgacacggaaaggcagccgaccgaattacggcggacggagttcggccgaccgtcgctcggcagcggcggcgaacggtcgaaaatgaacaaaataaaatattaaaaaagcaattttcaattcattgcttcagtcagctcactgctccccagcagtcgggcggaaagtcgaattgccgggctgtcgaagctgcgcgaagtggacagtttcgtcctcggaggtggcgaaatcccaacggaatga

SEQ ID NO: 67711 - DNA, 852 bp, Heterodera glycines
gtgctttgcgttggttggttggcgtgggtgactgtggtggttgggccgtttttgcgatattatggctggaaaaaagatgcgatttcgctatggggagcgcggccgtctgggttcaagtgcttgcttgcgcttgtgctcggcattgaacggtgatggctgctgctggggtgccacctttgtcgtggcctcagtttctccagcgattggcagctgtcgaaatgaataaacatgcagctcgtctgtgtgttaaagaaatttggcgagttaattgacttgtgtaaatgtggcctaaggcacaaatgctgtggggaactcagcactggggatgctgaacctaaagttggtggtggtgttggtatacgagtgagtggcgtattgccatggttgacaagccctatgagttcgtggatcggaactccttgcctggggaccagtgtgcttgcattcgaaaaaacacgagacataagcgcccgaaggcctttggcctgaggaagtgtcctaaccgggaaatccggagtgctcgtgtgagtgcctgtgcactgccctcggagctgtgtccagcggcgagatggttcttcccaagtccgggaagctcggatgcctggccagcgctgtgtcattaccacttgctcggtctccttcgctgcccatgcgcacgcttgcgctaaaccggaagtttgtttctgctgaaactatccgtctttacaagacggctgtattaagcggcgcttggcaacgctcgctagcagtaacctggttgatcctgcctgaactgattgtgtcatttcaaagattaagccatgcatgtgtaagttttaacctgccagacagggaaactgcgtacggctcatt

SEQ ID NO: 67712 - DNA, 696 bp, Heterodera glycines
atggcgcaacttccgctggaggacatcgcaacactgcccacgcagaagggcgtcttcaacgcaccgttcgacaacaaggccacctactacgtgcgggtacgtttggacgcgttccacatggcatgcggaataaagtttttaaattaaggtgatcaacctgggacgaagcgcatcggctacgccttcaagaccaccaaaccgaagcgcaagaagcaactcgtcatcgagtacaacatctgatggaagaacgcttcgtcagctcaacatggacatgataggatcccatcccaccgtcccaaaattgtcattttgtcccccataatataaattgttgtatctaaatgctctgtgcttcaattgaaatggttgtgtaggggggggggggatttgggtctgtttgaccggacagttagctctcgtagattcggtctgcttaatccttgtatatttgtgtaatgactagggctgtgatttttaggcaaaagcctaaaatttttgcgcacttcacacttcatacgcacagataagcacgaaaaacatattgcccttgtacaacattctaagaactgtcttttgtacgagttgccattgacccttgtatattcaggccaaaaattattgagataagattggcacaaaaatgactacaaaatgctgctgaaatttactcaaagaatttaaaggcgccaaaataaa

SEQ ID NO: 67713 - DNA, 870 bp, Heterodera glycines
  unsure (1)..(870): unsure at all n locations
atgggtaatattgtgttttgtgttnaaanaaaagaatgtgttttgtttgttagtatttatggtagattatgngnggattatagggtattttattngnngagggataaagtgangataagnnaatnagtnggngaagaatggnattggnattgggantangnatttantntgttngtgttnnnaanaaaananagntganaaangagatgggagggngggnggagaanagaaaaaagaatggtnggagnaaatnntaatggaattttgggtaagggatgttagtttaaaaatgttaatttgnnaataatttgttcttcctctttttttctaaataaatgaaacataatgtactgagtaaaagtgtccatttggttggttttctaaaaaatgttctcgacctatatgttcgaggtttcttgagtttcgtcatatccattgtccttcattttttaatttcgtttttaatatataatatttctttaatttattttttttagaagactcgagaaagagtatttgttcaattcaatcattttatttaaaattctcacatttttcatacaaacaaacgcatccaatctcaaaaattcttttttgaagtgtgtgtgtgtgtttgtgtgtgtgtgtgtgtgtgtgcccgctcactcaaggactatccaattgccaattccccatgaatgatttctttttgggcaatttgaccctggcactaaaaaatgccaatttttattccactaaagcttgttttgtgctctttccatcacattgttaagaaaaacctcctctttccggtggcaaaatgggccgaggggagggcatcgaatgagtctcacccccccctttcccctaaagtcggtgccttttaatgca

SEQ ID NO: 67714 - DNA, 1102 bp, Heterodera glycines
atgcaacgaaatgcaaagcgaccgcccatgaacggcacgggcggaccgtcgcgtgtgctgatcggcatttacattgaatcaatgggcaatttccaagcagcggacatggtactgatcagattgaaagaagcaaataatctattcggaaataatatgacaaaaaatcaacaaaaagccttttttcaaaagtcattatgcgagcagagagggcaattttggaagagtcgtgggtttgagtcacaccagtcgggtttctcggggttttcaacaatcttagccctaactaagtctcgaaaatctgtttgtctcatctgttaatacaatagcaagtttattatataaaaattttcaaaataaaatattcaacaaaaaaagttctaaccgtttttttgttttgtttaatgagatgaagaattttttataaaattgaacaaatttatcgagaatatcgaaattaacaaaataaaaagaaatccgattcaaataataaatttttaaatcttctaagatttaattataatgaatgcctctgcctcattaaactattactattacatttggagtaaaattttaaaaataataaacagagtttcgatgtggatttgtatctgtactcacattggcgggacccttcactgaaacacaacaacgacgattatgtgctgatgaccgacccgaaagttcgggaaagaatttggtgaataatttaattatttcttaaaaatttttaaaattaaatattttaaaaaaattattatttatttttttaataaaggcttcccgacctgtactttgcaaatgcgcggaccagcaaattccacgatgtgaccattcccaactttagtctgttcattgaccgggacgggaacattgcttattcaacgaggcataaaactgataaattgataaatgaccggaatatttagggcaatttaatcaaaaaaaaaaatggtcaaattttttatttaaaaattttaaatgagttttcaaatttcagagtaacactgaacgttgcatgcaacttggagctagtgaggagcaaaaaataataaataaatggccaataaaatccaatatctcaggcgaattatccgatggatag

SEQ ID NO: 67715 - DNA, 2018 bp, Heterodera glycines
atgcttatgtggccagccaagtgaatgtgagttggttcaaaatcggcgccacccgctacaacccggagattgggctgcccgagttcaaaattgtccagctgacgcccgagtcgtgtgacggctcctatatgtacgccatcatgtcgggcacgttcaaatatggtaacaaataaaattttgaaaattctttttcataattttgaatttcagataagttcagctgccttgaggcagtgattcatctgaacagacaaattggctaccacgtggtccaatcattcatccccaccgggcttattgtgatgatctcttgggtttgtgttagtcaattttattaatattgtaatttcgtatggctaattatattcaagtaaataattcataaaaaataattataaaagaataatgttacatcaggtagtttgtgagataaaatgcggaaattggataaaaaataaaaggcgaattcgagaaactttaaattaagcatttattccttaaataaattttgtctgggacaatttaaagaaaagcccaaaaaatatgagaaagcgataagcgagaggaggaacatcccctaatataaatgtctaaagtgattaagataaacaaatttcactctggcaaaataaaaaacttaatcaagttttaaattaaaacttttgaataaaaatatttcaggtgtctttttggattgatcgaaggtaattaattaattttttaatcattaaatttattttctttttagagcagttcctgcgcgggtgacactttcattcacaactcttctttcactttccacactcgtgggttttacaatattttcaataccgtaaatttaaatgtttacggtatatttaaaaagatattctacagtatattaaaaaaacacctttttagggaaatggcttacgcttcaacttgccacaggttgcctacgcaaaggctatcgacttttggtttggatgtgagtagcaatttcgaaatttgaactcaaaaattggaatataatttttaattttttttccttaaatttaaaattttttaattgggttaaattttaagtttttaaagcctctttaatttatggtgtatttttttaatggttttatcagaaagcatttaattttggaatttttttaaatattaaattttttaaatttaaaaacttatattaactttcgcgctaataatgaaatctcaacctctgtttttgatcagcttgcatgttcttcgtgtttctgtctctcgttgagtttgctgcagtgaattcgtacatgcgtgaggcggagaaatatgagcggttggccagttatagtgccaaaaaaggttttatttatttatttatttttaatttaaataaaaattaagagatgacaaatgaggaaggaaacccgtgggtttattccgagtaatatttttaatttatatttttaaatataaattaaaaaataaattttcaaatatttctaattcataaaatcttagatttttctgataccccatataattattaaatttattttcgcttactgaataaaatatatttgaaaaagcattttttacatcaatttttgccatttccacaaacattcagtgatgatgacttctcctcgaccagtcgatcgcccgttcttccttttccctcgtcacaccaaaaaaattcgaagaaaaagtcgggcaacaagtcgccaatattgagtgccaacaacaaaaacgattacaacaacaataataaaaaagatgagcaagaaaatgagacgaaggcaattggtgccaaattgcacaattggacgagcaatgccattgccattccgtcacgtttcggccgatgcgccgacggcggcgccgcaggggacaccaaacgcagcataacaacacacaatcagcagcaacagaacggaacaatgcgaatgatcaggcggggcatttcgccaagattattcagcaaattccccgcaaatagtccaagttttgcaaatgagaagcgagaaaataaccaccgatttttcgaataa

SEQ ID NO: 67716 - DNA, 175 bp, Heterodera glycines
atgcattctttcaagctttttgcatcgctctttcttgtactttgtgtggtaggttttaaattttttaaaaataattttttcccattttattgaattatcttttgttttttagatttcacttgtcatctgccaggacaagccagcagcagtaaaacgggggcatcttcttaattag

SEQ ID NO: 67717 - DNA, 195 bp, Heterodera glycines
ctgctgctggcttgtcctggcagatgacaagtgaaatctaaaaaacaaaagataattcaataaaatgggaaaaaattatttttaaaaaatttaaaacctaccacacaaagtacaagaaagagcgatgcaaaaagcttgaaagaatgcatttttttcgtaggtttgttaatgagaattgggtaattttgtggggag

SEQ ID NO: 67718 - DNA, 75 bp, Heterodera glycines; identical to SEQ ID NO: 54636

SEQ ID NO: 67719 - DNA, 189 bp, Heterodera glycines
atggaagaaatggtggtgaaatgggcatccgtcgtctttccagaattcggaattcgctataatggtgccgacataatggtggccaattttctgtcggttgtccgacggattacagtaaccccgccgataaagctgacacggttcttcctgaacactttcatgtacagcatgcggcaatcgtcgcgaatg

SEQ ID NO: 67720 - DNA, 632 bp, Heterodera glycines
atttgaatgagaatagaaagagccaggttcgatgaagttttggtaagccaaaaaaatatccaaatatttaaaaatctataaaaaatttaaaaatgacaattcatgcgagattttctggaaataagcttaattgggcctagttaagctgtaagacacccaccacttttgcacttaaaaaaatttcaaaaaatttgatcgtccataaataatttgtaattgatcagcggctcaccaaattttgcagagatacgtatcggagcactacaaatgcttactaatttttctagattttttaaacccgctgaaaaagttaagcctaaactttttcggcctgtttaaaaaggaattagaaatttttaaaatatttattcatctccctttttgataatataagagtcagagtgccttattcaacttgtaaataaattttggtgcgtttcagagcagtttctgaaaaaaatttatgaattaattttgcaaaaataaataaataatgaaccctcctccttaataattttcctgcgcccaaggtactcactcggccgcttcgcggcctcgtggctgtaaaaaaaatttggggcgatttgaaagagaatagaaagaacccaggtcgatgaagttttggtaagcca

SEQ ID NO: 67721 - DNA, 493 bp, Heterodera glycines
atgtcgttgaattcgcgtctcagcaaccacactggcgacgaagttgttgacaatgagagtcattcgccggcggtggcgacgccgccggtgccgaaaagcaaaaagcgaaccgccgcctcgctcaagcagaacgacagcggcaacaacaagtcacttagcacattgattgaggcggccaaaatgatggagggcggctcttcatcggaagagcatcaccaggacggagtcagcatgcccaactcgccggcggggagcagtggttgaagttttcaatacctcggataaaactgacaattttgacgatgactgaaccggattatgcaggattttttctcaaattcgcttgcttcaagcgaggattctctcccttattttatttgtttccgttatccaaattttccattttatgctgcatcataaccttgaccaagtacagactataacttaaaaattgctttctttgatatgaacattgtttagccaaaccattgaa

SEQ ID NO: 67722 - DNA, 210 bp, Heterodera glycines
gggatttcggtgctttactcaatggtcgacaaaacgacgcgctgcggagctccgatgaaagtttggcagcctacgcgaaggaagcgattgagggcattttggatgagacggatcggaatgtggcgaccgttcgacagaatttgccctccccttcccttgaggggggcgcttttcatttcgtcgatgccggtgtgcccgacaattcatcga

SEQ ID NO: 67723 - DNA, 1010 bp, Heterodera glycines
tttcgaaaaacaaaattgcaaaagaacaaaaacattctgtacgcataaaaccaaccaaaatcaatttatatttgtgaggcactgtaaacctcgttaccatgacttgacttgttcttgtgattggtgctccattcagtcgtattatgcgccgcgttgggggacgagtgtgtggggagagccgacattggtcaaaggctgtctgagcggaacaatgcttcgtcgtggggtgaagtcgcactgcgaaacggcggacggagagggaaaggtgagagagaaggaaaagtgcagagagtgacgagagaattggtggaacggaaccaaaaaaagaactgcttgaactgtcaggagcctttcacgtgtttctgtgacggaaaggattactgtaataagcgtccgtcgcgaaagacggaaatggagccgattcagttgtatgtggcactgatcaatcagctgctgatccgtctgtgtccctttagattcacttgcatttgtgaagggacccattgccgggagaagaagacgtgcacggggtaagcgaccaattggcggagaataaacagagaatggcactctttcccaagcgaactttgcaccttcgtgaccaatcaccgcagcaaagagagggaacgcggctgcgtcaattcgtccgtgcctttggtggagcgacggtcggctggcgcgtgtatgatgccaccgatcaccggcgcaatgcatcacacagtggcgaagcgggcggaggatctgctgaggacggagtcgtgcgtgtgtcagggcgacttttgcaacgcggtgagagagagataaagagaacagagagagaaaaaacattgttcaggaaaggcccaaacccgtgcctgaaaacagccgatgcactgcctttgcccaattcgaagtcggcgtttatcccccatgagttctgacgtttcttctcaattctttcagttgctaggccagaaaatgaagtccaagaaaacatcttgcacccggtgaattctgcttccgagcggaca

SEQ ID NO: 67724 - DNA, 109 bp, Heterodera glycines
atggcacatgccaacgttttagctttcgttgttttgccgtcggtcgtcgctttgccacgcgttggacagaaacgactcggacaaattgtttttgctcgtcgaaagaatt

SEQ ID NO: 67725 - DNA, 389 bp, Heterodera glycines
atgattcgtaagaggaagataaatcgaagcaacaaaaatgggctgaaaattcggcgtcgcgcggatgactcagagggggcggaggaggcgaaagaggacgccacggggccgcaacattcgccgtcctcttcggcggatgaggcggacgatggccagcaaatattggcaaatagtgcagaaggcgaacagcaaaaagagcagaaagacgaggaggacgaagaacggacagagccgcactccgtggcactgagttttgacgaaaaagggggtgagaagcaaaggacgacgaaccaaatggaagggcaattgaattttatttttcagaagtagccgcaacaattgtcacaggtcgtattcaagaggtcgtccatgtgttggccaatttcaaa

SEQ ID NO: 67726 - DNA, 268 bp, Heterodera glycines
atgattcgtaagagaaagataaatcgaagcaacaaaaatgggctgaaaattcggcgtcgcgcggatgactcagagggggcggaggaggcgaaagaggacgccacggggccgcaacattcgccgtcctcttcggcggatgaggcggacgatggccagcaaatattggcaaatagtgcagaaggcgaacagcaaaacgagcagaaagacgaggaggacgaagaacggacggaaccgcactccgtggcactgagttttgacgaaaaagggg

SEQ ID NO: 67727 - DNA, 1963 bp, Heterodera glycines
atgcttctcacttttcctttctgtcttctgttgatttttgctaaatcatccaattgccaaatgcaaaatttcaattgttttgcccaaaatgggcccaatcgccgcctctctcccgcccaattagcagacacagccttttggcatgagcaattccaaaagattgaactcatcaatagctcggacttcaaattgaaagagtttatttgcgagttgagccaaaagcagcgaatatttgaggcagtttttggaacattgccaagagtaagttaaccgcttaattaattaattaactaatgagtccaccaccactaattaggcccttgtccctccttccatggatggtgaatttgaattcatcaaaagtagaagagaaatgcttgtccacaatgatcccgctttgagtgaagtgctcaatggtttatttgtcactgcaatgaatgccaaacagaaattgcaattatttccgggtgaataaataacacttttaattaattaccattattaattattaatttgtttcctttttcgatgttgacgcttttctgcttgtcaaaacgatgcgaaagcatctgagttttgtgcttctgttcttggccaaacgttaccgaattcggctgagtgattcgaaagagcgaattgttttgacggaacaaagtctaaaggactttttagaagagtcattccaattaatgagccaagtaattaatatattttttcaaatatataaccaattcttccgaatcattagcccaaaaaatgtattagctgtgaaaattgtgcgaacgatcagacaaaaagcggaggaaagaattactcgagaagaaagcgattgctccaatttatttcaaaagcaattcaaattgattgggacggaaatgggctcttaaatcggtcgaaaagtaaatggcactaattaatttgggctttaaaaacccaaaacaaattaagactcaaatcgccgccgcaagcgaaagaaattaatgaaaattttcgagccgatcactctcgccattcttctgctttttctagtgattttcatcatcattttatttattctttgccacgctccgattatttcctttcgcaacggcacagcgtttggcggcggaacaaacgcagcgatcactgagcaatcagagcaaagggacataaaatgtaattaggaaaaacaatgattaaacacagtgccaaggcatttaaaaaccctaaaaaaaaagtcaaagaaaaaagcgaacggacggagagaaagggaaagcaattattaaatgctttcaaaaaaatatttttttaaggtttgaacgcattcaaagggatttcgcccgttgttgtggacaggcaaaaaggcgatgaacacgacgagggggaggagaacgagcagttggactgcgcaatttgcctcggccccattgattacggcaccgaagttaggccattgcccgtctgtaaggtgtgccatcttactgtaatacagtaacaaacaactaaatgccatttcaatcactaattttagcacaaattccacgacgaatgcattgaattatggtaataataataataattattatgttattggtcccccttttttaatagtgtgacataatttaggatccgaggcggacacaacgcgtgcccattttgtcgtcaagaaatattcaatttacaaatgatgtcaccgacattatttccacgtacaaaatttttggtttttcttgattaattaattaagcaaattgggtttaatggggaaaaatattcgctttttaacttttagaacaccggcagaacaatgatgggacaaatgaggcgacattaatagaaataacaaatggaaggacagaagaaaatgaagaaggccggagggaggaagaagaaggacgacgaacaacagcagaagagggaggagcagaaattgaccaagtgtaaaagtggaaatgttaattaaccgaaaataataataataata

SEQ ID NO: 67728 - DNA, 981 bp, Heterodera glycines
  unsure (1)..(981): unsure at all n locations
atggcaaatataactgctggagacacaattttcttgcatttcaattggaatgagaataaaaatgggtggtggtggggggaactttggaagtttttggcaaagaaatcatttaaattttcaaatgagaaaaaatggccgaattttaaggtaaaaatgacaaatcgacaacacgcttataacatgcgccaattgccatctcttgaaatttgattatttttaattatgccaaaattttcaatcgtctttctgatggttccgattttaaatttaaattattgggcggagattgcgtttaaataagcaaatggtttcaattttatgaccattgtcttcgaagcggtgccgacgaaagaaaatttaatgattttatattattatcaaaattaatatgatttttaaaattgtgatatgtttatttgcccttctctactggtaattagcttatttgttatttacttccttttcgtcttctttttttactcacaattcaaatttaataaaattaatttttattatttctttcaattaatttgttttatttcctttggcccaattattttcgcttcccatattattgtaacagtaaaggtcatttttataattgtgcaaaagcaattggtttccaagaaatgttgcaaattgttagtgaaaagtaaagaatgaaactcaaattaattttaatttgctgtataaaaaaggcagaattctaattattattcataaaagcaaaaacattttttatattttttcctaaaagaacaaaatttgcgattttttcctttctttaaatatttatttattttcttttttatcttattaagcacaaaaaagcattgaaaatgttgagattttttgccattcttttcattctttcggcaagtgccgcgccaagggcactgaacttcggcacaaatttggagaaaacgtcgccaattntcgccgtctcatcgattaagctgaaccaaaaagagccaccagttg

SEQ ID NO: 67729 - DNA, 60 bp, Heterodera glycines
agagcccatgaacagctgcatcggatgcaagtaccgccgttgctgtacgcctaacagttg

SEQ ID NO: 67730 - DNA, 500 bp, Heterodera glycines
atgccgcaagttgtacctgctgcggttgctcgtcgaaagcgaagcattttcggtaatttctttgcggggcttttccatcgcaacaatgagacttcgacggaaggtcgtcgcccgtcgaacggcacagagtcagcggaagaagcggaaaaggtaaaggaaaaggaggaggagaaggaggaggaggaaaaggaggaggagaagaaggagaaggaggaggaagaaaaggaggagaagaaggaggaggaggaaaaggaggaggaggaaaaggaggagaagaagaaggagaaggaggaggaagaaaaggaggagaagaaggaggaggaagaaaaggaggaggagaaggaggaggatgaggaaaaggaggaggaaaaggagaaggacaatgcgactgatcagtccgccgttgggcgcgagaagcgcagcccatttggcattttcatgaaatacaaaaagaacggaaagcaattgagcattggtcaacacgcaacaaattaaaagga

SEQ ID NO: 67731 - DNA, 711 bp, Heterodera glycines
atggaaattgggcaaaatgcgaattgccacacaattgaagagaatggcaccaagcaaatgcaaattgtcaattccgatggaaatccattaccaattccgcaaaatccgctgccgaacaaagtcaccggattccgaggcattcagatcaagtaaaatttcgattagattggaatttttcgtcatttctgattttcaggtacatcgatcaaaatgtcgtcacatttctccgccgttttcatcgtttttttgccgtttgttcaacggatttgtaccttaccacgggcaatggtcacattttggactttgttttgctcaacatttggccaatgtttcgccattcaatgcatgtgatgtttttgagttccatcgcttttcgtcgtctgcgccaattggccccgtcacttctcaacgattgtccatcacttcacactattttgtttgatggcgacattctccctgaatttccgcccgatgaaagtgccaatgcgtcggatggccaagcgcaaatggttgtttacgcctcgtccgaatggtatgcccaagtggctcagatgctttgtgaattctccggttggtcaatggtcgtcaacgatggaacagattaaagcggtgattatccctatttaatttgtttttctctaattttttttaatcccatttttaggcattccaatgcttcttctcctgttactttttacattgactttctga

SEQ ID NO: 67732 - DNA, 367 bp, Heterodera glycines
tgcaaaaccaaaaaagcaacaacagcacaacgactaccaagaactgattgattctttgactgtagcgtcaacattgctcccttcccaacccgaacagcatcctcccattattgcacaaacaatggatactcaacccatggactttgttgacacaatgtctgcaatgacgacatttcttccctcccagtctacaaccaactcggccccagttccaaaatctcagcagtcagaaactttggttgatgttttgtcggcagctgtcagctttctaccatcggaaggtgagaaaacaaaggagcaacagcatcaaacagatgatgatgtgtccaccgtaaaagcaaaccttgacgtaaaggaggaagattaa

SEQ ID NO: 67733 - DNA, 912 bp, Heterodera glycines
atggaaaaccgttcacctaaacgtccttccaactaccgtattgatcatattccctccaaaaagccccgccaaggcttagtcatcaatcaaattttgggtgtcgtccaacaaggaggaggagagacatcatcttcaaaagaagctccaaaggattacgtgcagaaattgggtagttctgttgaacatgtcgccaaattccactacaccaaaatgaaatctcgcttcagtatttcggatgttccttctaaccccgagaggcttttggctggaatatttcaacattgtattgatagtgctacaaaagacagccgtgaacatgaaatcgagccaactcaccttggatgtttgataagcagtcctcttttgtcggaaggagctataacaattcctactcgaaaaatctccgacaacactatcgacaccatcctcaatttgtttctgaaggtggctcaaagtaaacaacagaaaaacgtttcactgtggggtgatccgttcacggtgacaataacaacagtcgatcgctccggacttcaatttaaacgacgtgtcaaaggaggaacacgccgaaaaatagcttctgtccatcatcgcatcaatgatcaatgcctaatcaagattaacaatcataccggtgacaactattgcttgttttacgctttactagcaacaatgatcgccaaaaccagaggatggccacgatggcagtttggccgctacttgaataaccagcatggacaacagggacaactccatcatgatgcagttgagctcatgaagcaggtgaaagcaccaatggacttggatggctacgacgcagatactttcgtgcctctcattgttgatcactggaacaatatgcagcaacaacaccgctttgctgtgttcatcttttggctcgttgggacagtataa

SEQ ID NO: 67734 - DNA, 516 bp, Heterodera glycines
atgccaaaggaaagggaaaagaagtggcaaaagaaaaaggtaaaaaataacagtcaattaataataacaataattaattagttaattaattgtcttaaaaattaggcccaacaaagcctgaagaacaaattgctatttttgaggtattattttttgcttttgaagtttagatactttcattttttaggaaattgaaaagattttaactgcaattgaaaatgaaagaaaacgaacggactttcagaaaatcatgaaaccatttgaacagtttttgaagcaacaaattcaaggtgaagaaatcagggacggttaatcccgatttaaagttcccttcttaccccggtctcgacttttaaaaactcaaatcccgacccaagttataccttcaaaattcgcaatattaaacttaaaaaagccgaattttttaattttaacgaaaatatttttttaattggttatttttttaaattggctaaaatttttaaggttcctcaattttttttttaatttgtaaaa

SEQ ID NO: 67735 - DNA, 317 bp, Heterodera glycines
atgaaggaagatttgttgcaagtcgaattaattcctttggctgaagaaaaagccgaaaaatgtattgtaattaaaattttaaagtgatgcaatacaatcatttattaattaaataaactttttttccatttaaagcagaagcaatagaaacgggagaaatggacgaggaaatgccaattgaactgtcagtgtacgaattgggcatgtacagaagattcaagcacatggcactgctaataggcgacattggtagacaaatgtttactgtagagtgtacagtaaacctaagaaaagaattatttatttgtcctttttaa

SEQ ID NO: 67736 - DNA, 474 bp, Heterodera glycines
atgggtccgtacataaagtacgactttgtggaaggaaactgtgccgatttcacaaaatctttgcttaaattaatttcctggacgaaatcgccggaaatgaaaagcgatggcaccgaagggaaagaaaatggcaaatatccgccagaaaaagtaaaatatttaataacaaattaattgacagtaaaaaaacaaattgttgaggtcgattattcggaatggaacgtaattaaaagggaaggaaagcaaattgaacttgcggaagaagtaaaaacgtttaaaattaaattttgaaatttcatccctttttttcagcccattgttcacaaacaaattgaattggcgaaggtggattttctgcagaacccacgcttggtacaattggtgaaggacggaccagaaattataaaaggttttatgcgcgcagtcacacaaacggtgacagcaatcggaggcatggcaagaagaagaaactga

SEQ ID NO: 67737 - DNA, 56 bp, Heterodera glycines
actatcgggaagctattcccgaaggattcggtctccccataaatctgggcgcatcg

SEQ ID NO: 67738 - DNA, 646 bp, Heterodera glycines
atgtaccgggagggacgccgaaagattgcaatcgcacgcgaaattggcgtcacacattcatgcgtttccaaagtgatcagaaggtaagtgagtgatcggagatgaccacggaagagaaaagacggccaattgagacggattcccgcagatttgaagagaccgggatgttggagagcaaaaactcgcggaccgcctcttgcgcatgccccggcgacgcggaagggcacggtgagcgattaaaggcaaattgggaattggcatttgcattaagccagctttttatccgtacattttttgtccttccttctttgattaaattttcttccgtcccttcgatttttgcaaattttactgttttaatccatttttttaaaccaaataaatccccgcttagacccgcgcatttgtcggcacgcccgcttcgtccatttcgccgcttcgtcctcctccacccaattgccttcgtacgaaatgaataaaatggcacccaacagaaaaccaatcattcgaagcgatttgccgaagaagttcagcatcgaatggtttttgatcacttgaattgcttagtaattaataacttattaactcaattaatttggcttattaaacgttaaattctttttttaggattctcagtgatcattga

SEQ ID NO: 67739 - DNA, 103 bp, Heterodera glycines
atgtttggtcaaaaggtgtggtgagctaagttttgacttgttcaaatttaaaatttttttccaggacattaaatttggatgcctaacagttgaattagtttaa

SEQ ID NO: 67740 - DNA, 815 bp, Heterodera glycines
atgtcttctgacgaatcgacgacttcttctgccagtgttgtgagcgttcagctgcgtgaagtgcccatcaaagacttcaaggacgtgcttccggtgctgcagaaaacgctcaacgaattggaacatccgttcatcaagaaggccgaagaaataagcggaatggaacgtgagaaggtggagccagcccaatctcctgtttctttttttaatttacactgtttttcccggtttcagctcttctacatcacttcctctcttgtgctgctcgtgttgatgctctgccctggcaatatgcttctctctactcttatcagtgcgttttgaggagggagttccgttttgtgcccctctgttaaccaatcgcttccctttgtttaagctgtggcctacccaatgtacgcgagcttgttgaccctcaacactcaaaacacatgtgggttttccagctgtgctctccctcttcgagtacaatgtcaattccccaattttcagcggaatacacccagtggctcgtttattggtgcgtgttcgccgagttttgccagttcgactatctctttggctctatcaatgggccttctgctgctgtacgtgcctctgaagaccgtctttctgctctacttggcccttccgcaaacttatggcgctcacaacttgtacgtgaagcatatccgcaaagtgcttgccgtgacgaacgtattggacaagatgaagaagatgttctgatcgagcagataatgtatcactgtgtaatgtctaggatgattctttgttgtgattcctatattatgtgttatgtattgtatgtggagtaa

SEQ ID NO: 67741 - DNA, 668 bp, Heterodera glycines
atgcagctgaagcaggcactgaagcggggcgtttcgtccggcgacctgaaacaggtgagaaatgatgaatgatggcacaaagccaatggcattcggtaatagtaccgatgctacaaagtcgaaacttcaaatttttagagtctcgcattgttgctttttttttgaaaatcttccactacgaaaagttaaaaaatgtttcggcgagatttcatgcctattcaaaaattccgaaaataaatgtttaatgcctgtttaattaccgtttaatattgtgtgtacaggtcagaggcatcggcgcgtccggctccttcaaattgggcgacggcacgcagccaacgttggccaaggcgtcgccagcgaagaagaaaagtccggtcaaaaaggcgaagaaagcggcgcctccagcgcccgcggcggtgccaaaaaagacgagtccaaaagtgccagcaccagcggcggtcaaaaaagtggcagtgaaaaagccgacaccgaagaaggcgccgaaagccatcgcgcgcaaagtggccgcaccaccgccgccagcgccggcggcgaagaaagcgcccgtgccatcgtcgacggcgacaaagggcaaaaagaccaccgccaaaaaggcagtgactactgctaagctgccggcgagtccacctcccgccgcccctcctgct

SEQ ID NO: 67742 - DNA, 693 bp, Heterodera glycines
atgctgagccacctgaattcgaacttggaattatttggagaagagtcagtccacgcttttgatgattgggctgaccgatttaaggactatctgtcactaacagggaaaaattggaccgaagatgaaaaggtcactcgccttaagctggccctcaaggacacgccgagggaactattcaaagaactcaagtctaatcaaatcactacattcaccagcgctttggaagcactgagggccaaattggactcgcctcaaagacgagaagtggcgaagcggaccctttcagtttgccggcaacgtgaggacgaaactgttgcccaatttttgagacgtcttatgccattaattgactcaacaaatccttctctaacgggtgatttgcgcaaagaaaaaatttgtgaggaatttctgggcagattaagaccaaacatgagctttttgattcgtttggtcgggcttacgcaacccaaaaatttggaaatggtaaaggcccaagcagaggaacttgaggcacttcttctcagtactggaggcggtgttacgcaaatcacacaactcatcaattcaatgacggaacaacgcggaaatgaagaaccgaatgaacaaaacgaagaaaattcgaacaacaatggagcgacaatggtggggaattcagaaatgccacttcacatgacgcgcagtgctcgtacttag

SEQ ID NO: 67743 - DNA, 408 bp, Heterodera glycines
atgaatgtgaacaaaatgcgacaatttgtggtcagttcgcagaatgtcaaaacacaattgggtcatatcaggttcgtttttttggttcattaattaactcattaatgaattattatttcaaaatttcgtttttattaattaattaattaagtgtctgtgcaatgttggtttcattgcgagacctgacggccaaggctgcatcggtaaaaaaataaaataaaaaataatatcattttaattttctatttcatatttttgttgcgcaatgaatcaattttatttttttattttttttgttaatttcattaattaattatttatttggaaatcgtattccttaaaatacttttcaataccgtatttcataaaatacagtctcccacacaaattaggaccatccctcctata

SEQ ID NO: 67744 - DNA, 612 bp, Heterodera glycines
  unsure (1)..(612): unsure at all n locations
atggcaatcaaacaaagtttgaagcgcgtgctgaaggcagacagggagcgcaagaaggcggaggtgcgcaagcgattggaggaggcgggcagggccaaaaaggccaagaagggcttcctgacgccggagcggaagaaaaagctgcgcgtaagtgacggccaaagggtcgacgggcgaagggatcgcccgtaatggccttcagggccttttacagaagctgttgatgctgaaggccacggaggacctgaagttgcagcaacagcagcgtgcggaggagcgccaaaaagtgctgcacgaacgaattccccaagtgccggacaatttggaaaggatgaacgaaggtcaaaaaaaagaatgatcggagggggggggggttaaatgggagggaaacattgggaaatgaactgctgatcagagtggaaataaatgatcggaaagggtcaaaatgttgaactgatcagactcaaaagtaatgaacaaaggggaaaagagagagagagagatggggagaggagagagagagggagaaagaaaggggtgatcagacagtccaattgccaaatggccatgtccaccacagcccaattgcttgtacttggcgaaaangtttcg

SEQ ID NO: 67745 - DNA, 1493 bp, Heterodera glycines
atggacgcaattcttgcaaccgattggctccacaatgcgttcccagagcgaaagacaacaacaacaacaacaacaacaatttctagtgtgggagaagaattagacgatgccgtcaaagcagtgagttttacacaaaaataaatttaaaaaaaaataaataaatgaataaataaaatcaaggaagagcaaatcagttggcttaaaattatcgaagaggaggaggagcgaggaaatgaattgcaaactggtgaaatggaagtggaacgagcgaaaggtttggttgtttacaaaaaaaatgaaaaaaaaatttagagattgagccgccaaagcgacaacacttacagtccaagtgtagctgtaacgaaaagcaaaagagtgtcccgctgattgactttctctgccaacactacaaatgttctgttaaagagcttcacgttctgcttcagacgctgaacaaacgtcgcgaaatttcggaaatgttgcgctctcagcttcagttacgcaccaatcatctgcgtcctgcctggaaaaattttcgcgtccattgcaacgaactgacaattcatcctgctcaaactgcatatgccatgcgcggttatcttggcattacggttttttaatttaaatttatcagctcctcaattgtaagatatacattgtttttaggtccgtatttactactatgtgaagcatggcgtaaagctcgtttatcctcagcttccctgtgttcttcaatttggcggtggtgaccattgttctctgtttccgcttgagtgtctgagcgtcataaaagatgcttgattaatacgcatcgggtgttttatatgtgattaagtttgctgtgttattgttgttgttgttgttgttgttgtttttttttttaatttctcctagataaaaaatgttaattattcaaaattgtaccgcggtgtttaaattacagctgttgcctttcacaaaagagcagtttttgaaaattgcaaaaaatggcttcaattccgagtacgacccccaacgatttcatgcaatcatcatacgactacgtctccccaaaaaacgcactcttgcatgtcttttatttcgatcagcccgtgctgtgttgactggtgtgccttgtccagacagagcggtgcgcgaggcacaaaaaatcagacggagggtgcagcatgcgttgggctcccagctaggaatccacgagttacgtgttacaaattgttggttcttgcactttatcacatcgattgtccatgctgaactttttaccaacactggacccacacaggttccgcaacatcaaatatgatcctacaatttttcccgccatgcgttgtaaaatagtcattgacgacgacgacgatcacactttggtcacttgtctagcctatcattctggaaaaatcattttaacaggatctaaaaggcaggacaatttgaaccacgctttgcattcattcttagctgtcttaaataattgatttgttcatccaattgta

SEQ ID NO: 67746 - DNA, 403 bp, Heterodera glycines
atgttacgtaaacgacagacacaaaaattggcgggtggtaagacagctgaagacttgtatgaacgaacaaagaggcgattatttgaactggagaatcaacatgggtttgaattggaggttgtctggggatgtgaagtgaagcaacgccttcgagtagacccagaatttcggcggctgtataatgcctcatttgttccaagaccacttgatccaagagaggatgcactgcgtggtggtcgcactgaaccatttattcttcattacacatgcaactcggacgaggagataatcctcattgatatagttataaaataataattgagcaaaaaaaaattttaattatttattttcaggtaagcttgtatccatatgtgatgaaggcattctcgtttcctgttggtaa

SEQ ID NO: 67747 - DNA, 216 bp, Heterodera glycines
ttattaattttttcatcttcatcagtttttggtttaaaaatatatttgaacacttttttatactttgaaggacttttttttattaatacagaattttttgaaatttcctaaaatccgcaatcctgcgcaggatcctgcagattttaaatgcaggatttgcaggattgcaggatttgcaggattaatcctgccggatcctgtcctgtaaaaaatttt

SEQ ID NO: 67748 - DNA, 96 bp, Heterodera glycines
atgtgttatgtctcggctgtgtttctgcggctgtgttttggggtgcaccgggggggggggggatcatcacctaattttatgaaggggataagtcat

SEQ ID NO: 67749 - DNA, 229 bp, Heterodera glycines
atgggggtctgggtgagaaaagagtagggaatggtgaagaaggagaaattttttgagaaaaaaaaaattaaattatttattttcatttaaagcatttgttcatatgcataagtggtcaagtggctaaaccttctgattttattatttctcgcttgggtacaattccccactgggatagaatattcttcatattttctttaccattattttaattgaaattttaattaaa

SEQ ID NO: 67750 - DNA, 624 bp, Heterodera glycines
cagacaatggagacggaatatcatggacatttgggcacacacaaaaaacatcgagaaagacagcttcgcaatgggaaaatttgagggtaagcgaatggggggggggatttggacaatttgacaaacaacggcggacactcacagaaatattcggccgactcatccgattttacgagccaaaagcattgctgccgaaggacgtggtgtttgagctgcactgccgcgatttcatcaatcggcatgccatcagcgacaagcattacttaagggtgagtaggtaggcaatggcacggaaagaacggcaaaaaaaagttaaaaatttaaaatttaaggaaattggcaaaggattgtatttggacctgtgcgcatacggtgggtcattagcgagtacggtagtcactcgccgattgtacagaccacagttgtcgtcctaatacggtgtacagttgtcgctcatttgtggccactctccgccccctccacgccaatgtgaaaatgctcgaccgatcgacaacatcttattcgtacattgatctgttatggttgattcctcaaacactcaatgatttttaaacattttgtaatttgacagtgccaaacgggacagacgcaaattgctgaagg

SEQ ID NO: 67751 - DNA, 598 bp, Heterodera glycines
atggcatttatggcaattataatggatttttggtgcaatattagccgaatattttggtataatgagaaaaaaattcggcaacgaattgagcaattattaagcaaaattaaaggcaaaaaattagatgatatcgcaaaagcaatggtcaacatcaatgtggatgaagacgaaaatcaaaaaggcaaaaatgtaaaattaaatattatgtaaattaattttaattaattttaaaatataaaatttgaaaaaattcatttaccgggccagggttttgtctctcttttaaatttgtataaattatactaattttcaagttagtttgatttaaataaatcagactacaaaatttattttatttttcaatttttaaagtttttaatttgccaaaattagaaaaacaaaaataaaattagccaaattatttaaaaaaattttttattaatgaatgtcaatccgatttatgttcttttagttgaaagaattgttattgtgggagaacggacccgagaacatgtcaatttatagagcactaacaatctgcattaaaaatgccatctctgaattcaataaaaggttaattaagcaaaaagtgtaaaaa

SEQ ID NO: 67752 - DNA, 354 bp, Heterodera glycines
ggccgttcttagatcgtggagcgatttgtctggtttattccgataacgagcgagactctagcctactaaatagttggctcattgcttctgtgggcacaacttcttagagggattttcggcgctcagccgcacgaaattgagcaataacaggtctgtgatgcccttagatgcccggggctgcacgcgcgctacactggcaaaatccgcgtgcttgtccttccccgaaaggggttgttaaaccggtgaaaatttgccttgattgggatcggacattgctattattgtccgtgaacgaggaattccttgcaggggcgagtcctcaactcgctctgaatacgtccctgccctttgtac

SEQ ID NO: 67753 - DNA, 766 bp, Heterodera glycines
atggagaagcaatgcttggaatatttaggcacaattacattatttgccagagcaattcaagcaaaaatgaattttattgaacaaatgtcgaaacattgggcaaataaatcggtgaatggaattgccaaaaaatgggaacattttatttttaatcaaaatattgtattcgaattcgaacagtttgtacaaatcaaattgtattttttgcaaaatcagcttgatgaatacgcttttgagttaatattaataattcacaaattaattcattaaattacaattaattttatttgctttttacgtagttaaaaggtttttttaattaaaaatattattatttaagtaaattattaattttgtctaatctattttatttaatccaatttatttttattcaggcaatcaataaattttgttgaaaattttattcaaataattgacgaaaatgagacagacaaaatcaaaaattatgggaattattcacctcaatcaccaaatgatcaccaaacaacccaatttggcacatataattctgatgaattcaatgcaatttttgccacattggaaatgcatgaatgttcgatgctaattgcaaaaggagtgatcaattttgaaatgatcaaacaaataaaattggcccattatttaaacggtgaaacattttcaaatgcgggaaatccgccgcccaaaaaatgcttgtgtgttgatgctaaaattgagcagcaatatgtcaacaagctgcagaaaatgctgaatcagaaaaaattgg

SEQ ID NO: 67754 - DNA, 1092 bp, Heterodera glycines
cgtggagcaggtgcgagcactgcgcaatttgggttccattcagtcgggcgtcaaccgatgcaaactgatcgagacggacgacttcgaaacgctgtacaggtgcgagacagaggacatttgaggaaagtcgaggagagattccccgggactgaaatcacccgaccattttggcattctttgagactgtcgaaaatgtagctgaatctcatcatttttggaactgttgatcggttcagaaaatgataaaaccctgccttatcgatttatttgtcttggttttttgataataagcgaagattttatctgatcactcttactcctctctctctctctctgctgattggctcctcctctttcccttaatttcccttattttctttcactttttgctttttttattcagagactgcaccaacacggggtatgtgtgagaagaacaatttgccaagcgatttgttgttgtggcggaaaagcaaatgcctttttactccaactatttttttttgtgtgtttagcgctcgccccgggcgaccgctgaagcgaacgatcagcgacaatctgcgcaacttcgacagcaacacgcggcaacggcacagcgacgacgcacccgtgccgtgctcattctcaagccactgtaaagatgagttatcaaaacgacattctgaagacgacttttacgcgccgtccaaagcatcggccgaccgtttgctgtcctcattcattcccatccaacaccagcacatgttgcaccaatatctgaatgatcatcagacaacatttgatcagaatcgcaaccagcaacggcagaggcacgagacgagcacatcgagcaataacagcaacaccaccatcacagacaacaacaacaaaccacaaccagcacagcagcagcagcagaaccatcatcacatgttgctgagcattcagcaagcgattgttgcggctgctgcaatggcagcaacggtacaacaccaacaacagcaacaacaacagcttcggcaacagcagcagaacggcacaaacaaaagcaatgctattgttggggatgaacaacaacggcacatgccattgcaacagaacgtccaaatggaa

SEQ ID NO: 67755 - DNA, 1355 bp, Heterodera glycines
atgacgcggtggaagcggagagtaacagcacgagcaacgggtgaatggtgtggggaacagatagacagtttaggggtggggggggaaatgcagatcaggcgtgatcagcggatcaccaatgatgttagattggggactgactgatcagtaagacaggaagggaggaggaaggcgtgatcactgatcagacagacgtattcgtatgctgatacgataaagaaatggaaaaaaaatttgtaaaagatagtcagagaccaaacgatcagaaattgattgttgctaaactgagtgacgaaactgaaacaccgcaagtgtttagcaacagcgaaagcccaccgacgcaaagttcgcctccctcttccggcgatgggtactgctctttcaacagttccgactcttacagcaggtcaaattcggacagagttcggggggagggaatcattgttatcttttaataacaatttcagcgaccgacagcaacaccaccacatgctgaaccgtttgaatatggcggtggaccgcgtagagaaagtgttgacggaccaatgccaacactttcacggttggtgcgccaacggaaaacacacaaaaagcaaatccacaatttagcaattgtaaatgagctcaaattggcaagacaaagccaggaacggaccatgacgagagggcgggcggagaaacggcgatcggcaggtaaatacatttgtaatcctcatttttcttttttcaaaatcattgattttgtatatgatttttctcgtgttgttttttttctaaaaagtggtaaaatcccttttctgaatgatgtaaaactcataaatagctttagaggtggctattaaatgtatggcaattttacttttgttttcctattttttttgatgcgatacaaccatctcttagctccgtttccagaacatttctcacataaattcgttcagaactccttcaccaaagacacattagactgaatagaagacagcagatgaaaacaaattcagtaaccacaacaacagccaaaagcaaaccaacggaggaaaaagaaagggaagcgacggaaacggattcgaaatgatatttaatgccacaaaacaaatggaatgattttttcttttgagatgaagagatttaaatttccgttttgatgagtttggcgaaagagagaaacagaaaaagaaaaatgtacgaaaccaacacaaaatgatcattttcagagtgcacagaaatttaagttaacacaatgaaacaacacacataaaagaaatggcagatgagcaacagcagagaatgtcgtacaataataattaggtgtttttcaatgattgaaaagggacggatgagcaaaaataggttaa

SEQ ID NO: 67756 - DNA, 146 bp, Heterodera glycines
ttttgtggcattaaatatcatttcgaatccgtttccgtcgcttccctttctttttcctccgttggtttgcttttggctgttgttgtggttactgaatttgttttcatctgctgtcttctattcagtctaatgtgtctttggtgaag

SEQ ID NO: 67757 - DNA, 392 bp, Heterodera glycines
atgtcaaaatttccatccaatttgtctcaaggccgttttgttgctctaattgtccatccattgtcagttcgacgtcgacttgccgttgaatcaagcgcagtgtctgctgcaatatgccttcaagcgatggagcactctccgcgcggataacatcagcataatttgtgtgagtttggcccaatgctcacgacattccatcaaaaaattcaattgctggcattttcaggtcaaactcaacgccaacgaagtgccaaccgatcggaatattgttgtgaatgatgaacagagtctcaatgtgtgcgaagcgattgctgaacaaccgatggcaattcttgtcaccgacaatggcacacaacttttacgtacaaacgcagtccgtctccaataccttg

SEQ ID NO: 67758 - DNA, 168 bp, Heterodera glycines
actcattgtcagagactgcgccaacaattgccccaggatcgacccaaatctcaatccgttgactatggaaagtccccatctcctctggaccctaatccacgtttgaaatcgcctcctggcactgcaccgcttgcgcagtcagcgcgtaatttttggaactccgtccat

SEQ ID NO: 67759 - DNA, 418 bp, Heterodera glycines
atgcagaccggccataaaccattgtctgatgagggttcgtgtccctttacggaaaacttggatacagtattggaggaaatttgcaagcagaaaaacaaaacttcagtatgccaaactggagatgactggaaagcacgcgctaaaagtattattactaaagtgggtacgttgtcaatacctcctattgaagcgtatgttgataaaacccgtaaacaggtatgaattgcaaacaaaaccaatttagtgtattcttatatttctaatttaagcttggagctatgcgaatgttgcaacggcacttgctatagttaaaaaccgatacgcatgaaaactcttcaagaaaaagataaacttaaatctaatgaaagtttaaaaaactgcgcacaattctccaaattcttttcactcgacaagaaaa

SEQ ID NO: 67760 - DNA, 663 bp, Heterodera glycines
gttttcggggcagtccccctgaaccgatgcgcccagatttatggggagaccgaatccttcgggaatagcttccctatagtctgtactttaattctgcgttggatttttgctccccataaatgtttgagtaccccaaacggacacttgaaaaaatcgatttttttgttttcggggcagtccccccgaaccgatgcgcccagatttatggggagaccgaatccttcgggaatagcttccctatagtctgtactttaattctgcgttggatttttgctccccataaatgtttgagtaccccaaacggacacttgaaaaaatcgatttttttgttttcggggcagtccccccgaaccgatgcgcccagatttatggggagaccgaatccttcgggaatagcttccctatagcctgtactttaattctgcgttggatttttgctccccataattgtttgagtaccccaaacggacacttgaaaaaatcgatttttttgttttcggggcagtctccccgaaccgatgcgcccagatttatggggagaccgaatccttccggaatagcttccctatagcctgtactttaattctgcgttggatttttgctccccataattgtttgagtaccccaaacggacactcacttgaaaaaatcgatttttttgtt

SEQ ID NO: 67761 - DNA, 587 bp, Heterodera glycines
atgccgacgaattgccgccgccatcgtttgccgctgttgatgaagttgaagctgatccgccgcttcctccatatgtgtggacaatatttgccgttgttgtactgcttgttgtcgtactcggctgctgttgttgtttgctgtgtgccatgccaacacccactaagacggaaggtgccgaaaacgatgccaaacggtggccactgccgccagcagcagcagcggggaacaatggcagcgacaatggtggcactaccgtaccagcaggactttgttgcctgtgctgcagctgattatgttgatgatgatgctgaaatttgagggctggaaaataatttgaaaacaaaattttaactcgtaatatcaaaaacaggatggggatcagggctgcacgcaactggatttgcaattatggaaatccgtaatccgtaattacggcgattttttcagttacggaaatccgtaatccgtaattacgggggtccaaaaaccccgtaatttcccgtaatccacaatccgtaatccgtaatttttaaaaatcaatttttgtcagaattttagaaaaaattttttaaatagtgattaataaa

SEQ ID NO: 67762 - DNA, 180 bp, Heterodera glycines
atgcggcgagaccatgaagaagaagcaggtgctgcagcacatccaccggtgccgaaacgcgcactattcgtgcatggactgccaagtggtgttcgacaaaaacagttaccaagggcacaccaaatgcatcacggaggaccaaaagtacggaggcgcgagacatgtgccaaaagggacaag

SEQ ID NO: 67763 - DNA, 416 bp, Heterodera glycines
ggtgaacaaaagcaggacgcctgggtgtcgcaagtgcgtgccgccatccgtcaggtggacgagccgcggctgaagaatttgttgcgctccgtccaatgccacaccaacataccgcgcaaggaggccaaatttgtcaactttttgcaaaattcgttgcgcattcgggaccgcgcgttgtgtgtggacgcgtggaatgcaatcaaacgggcggcggacgcggaggcggcaaaagcgaaacggacaacggcggaagacgccgttgtaacaacggcgacggaggagaaggagacggcggaacacaacggcgacgacgcggacaaaatcgcaaccggacgaacggacaatgcatcggcgactacagaaaacatggagggacaagcggaggaggaaaacatggaggatgagacagcgaaaag

SEQ ID NO: 67764 - DNA, 571 bp, Heterodera glycines
atgacaaattctacccattttgtggttaaaatttcaaaaattaaggtaaactgaaggtccggcggtgccgataatcgccgccggaaaattttttggaaattgtaataaaatatggtaggaaaagttgcaaaattttcaaaaaatttaccgttttttcaaaaaaataaatcgcaaggcaaaaaaatgcaccaaaaagttcaagataaaagcttcaaaccaagttaaaaactcgttttcgtgcatattaggctatagcaagttagcaaaaaaggtaatattagagttgcaagggaccgggaattttgacaaaaaccgggaccgggacttaccgggaccagaaaagtcgggaccgggacctcgattttcgtccgggactgggaccaaccgggaattttcctaagtgaaattttttgaaaaaaaatttgaaaatttgagtgcactttgttacaaaaaattgcctatattcaaaaatgtacccataaaatttttaaattctcgtttgtggggagaaaaattcgaagaatttttccattatgcaattttgagtgtaattgttaacagaaataataaa

SEQ ID NO: 67765 - DNA, 320 bp, Heterodera glycines
atgtttttgactaacgtcatagcactgggtgaattctcctcccccttccctggtcagaagggtgcaccgtcagaagccccgagactcgctaatgagactttaaattctgttgattggcctacctccgcaccaaatgtcgatcgctttgctgtagctgactggtggcagtttggcattgatgccggatgtttgggtggtcattgtgagcagtgtggtgacaccgagtgtgacccgtgcgggcaccgcagtgcgatccaaccaaaaggacacccaaaggaaaatgaaatgcaccaacaaattgttttttgaatttgaataaa

SEQ ID NO: 67766 - DNA, 1347 bp, Heterodera glycines
aaaaaatggatttaaaattaattttattttaaatattttcagttattatttgttgcaattgtacattccgtcgacaatgttagtcatcgtttcatgggtaggatattgcaccttaattatttaatacttcatataataatcctcacaaaaagaaaaatttaccattttaaatatttttaaaaatttatttaataattgtttattatttaaatgaaaatgtataaaattatttagagtttataaattaataaaaatattttcttactttatatcttcgagaataaaatttattcaaattcaaaaaacaatttgttggtgcatttcattttcctttgggtgtccttttggttggatcgcactgcggtgcccgcacgggtcacactcggtgtcaccacactgctcacaatgaccacccaaacatccggcatcaatgccaaactgccaccagtcagctacagcaaagcgatcgacatttggtgcggaggtaggccaatcaacagaatttaaagtctcattagcgagtctcggggcttctgacggtgcacccttctgaccagggaagggggaggagaattcacccagtgctatgacgttagtcaaaaacatcaaaatgggtgttagtcaaaaaaccatcaaatgaaaagattttttcatataactttgctcaaaggcaacgaaattttaaaatcttgttgtcattcgttagcgctaagtgttttctattattctgcaaaatttcaaaaaaatttattaagtttcagaaaagttatgaccaaaaatgttcaagaaaacctggttttttgagtttctcaggtcataacttttttgaaacttgatgaatttttttgaaattttgcatgattattgaaaacacttagggctatcgaaaaatatcaagtttttaaaatttggtacattttaggccaagttgtgaataattttatgtcacaaattttccatttgatggtttttcgactaacgcccattttgatttttatgaaatcctctttggtttttcttacaaatttgtttgttttctttttttttggcaaaaaaccgcgaaaactgctattttcgcccacagcgactattataattttgaaaatttacaacgggaaaaaaggctttgaattccccgattttttttcatttttaaattctccaattatcaaatttcttaattgaaccccagcaaataatttcccaacaaaaaataataaattcttaaaaatttattattttttgggcctttcaatgactttattaagcatgtttggccttcattttctcggcactgcttgagttcgcttgtgtcacctatatttcgtcacggatgttttataaaag

SEQ ID NO: 67767 - DNA, 279 bp, Heterodera glycines
atgacttttttggtaagaaaaaataagatatttcttgaagtattgtataaatctgacaggaaattgtatctaaagtttgaaatgttgataattttttctagagagcgacatttggcgaaaatacggatcaggatcaggactacggactaggcatccatacggactacagacttacggactaaaaacccggaaaacccttactccgtataagtccgtatgcaggaaaaatacggacccgtatacggatcagggttttttgaaaagtttttaatcaataaa

SEQ ID NO: 67768 - DNA, 656 bp, Heterodera glycines
atgaaatctattcactgtaatcagcttaaaattgagtataaaattatttcgagagaattaaacagacaaattaaattgttttataatgagaaagaaaccaaagttgtgccaaagggaaattcctgtattcacagacatattcgaaataaattggggcagaatgcttccttgcctccacttgttagctccaatggagtcattgttcatgaaaaagcggataaatgcaattacacttccttgtggtactccggtgaaggtctcaaactttttagaaaatgcgctatcaattttaacactgaatgatcttccccttaaaaaattagctaaaaaatttaatactttgccacctatacctatttttttgattttgcttaaaaacaattctattggaactgaatcaaaagcttttgcaaagtcaatatatattgtatcaacatgttcatcatttggattgcagaataaagattaaaaaatagcattattagcaatacttccatctgcaacacaatgcattgcggtcaaaatgtgtcgtgggccaatgattgatgcggtgcaaaatggttcatatgctgtctcattgcttgctttgtaagctttattttgcaaaatggttcatatgctgtctcattgcttgctttgtaagctttatttgttaa

SEQ ID NO: 67769 - DNA, 367 bp, Heterodera glycines
atgtttgccaaattgctgctgttattattcgtctgtataattggcaaaaaaatttcattatgcgaacaaattttgtcgccaccaacacaagattattcggaatgcggaatttcggactttgacccgttcaatgaacaacgaagcgcggaggacacggaaattagccatgtaattaaggagggaggggggatcaattatcattagataattgaaataataataaaggcatattttaatatttgttgatttttaattaggtcgtaaaaggatacaccgttgatgatgaccgcgcattgccatggatggccacattgcaacgccttgagggtcttttctaataaaagcataaataattaggagcaataaa

SEQ ID NO: 67770 - DNA, 79 bp, Heterodera glycines
tcattttcagtctgtccgttgaatacgaccatacgtattcacggcagccgttgtagtttggcatcaattcacccgcccc

SEQ ID NO: 67771 - DNA, 59 bp, Heterodera glycines; identical to SEQ ID NO: 52422

SEQ ID NO: 67772 - DNA, 734 bp, Heterodera glycines
atgtgccaaaaatatccaactccaaaactaagtgaccaattaatggttggcaaaatgcgaatgatttcaatggaaaaatgcattgaatatactagcaaagatagcaacaaagaatgtaaaaaataaataaattatggaaaaatgaattaattatttcatttagtcactaatttgtctaatgtccttccttttgtgaacaacacccgtgctttgttaactgaatttaattcagcacatttgaaggacaaactttgcgtgatagctgaacccagcttggctgagaaggtgtatttggaaatacgccattactcaattaatcaataaaactcaaggattaaaacacattagtgaattaaatgtaaaaattctcgaaatgaatttcggaaaatgctcttctttttatgaataaaacactttcgctgcacaaagaatttattatcgaaaactcgaaagataaaatttgtgtgatacctgaacccagcttggcggaaaagttacaataaacatcattaacattacttaaatcacttaatcataatttttttttcagggagacagcggtggccctttgatgtttaaaactggcaaaaataataattgggcacaagtgggcgtcgctagcacatcgacgtgtaacccggaaaagcccaaaagcaccgacggtcttacaagtaattatttctataaaaaaatttgtatcattatataaattatttttagtccaaaaagtttag

SEQ ID NO: 67773 - DNA, 357 bp, Heterodera glycines
attaatgtcgaataaaaatgaaaaaaatattatgttcaaatttattaatattaaaaagcttaaaaactaatttggatatgaaaaaaaaacaaaataattatttacagggttggggaattgaactttagaagaagaaaaaagtatggaaggcacaaccaccaggccaccgacgctcacattggctttacattctttgaaaatgatattgaaaaggcaaaaaggaaaagcttcatatctcggccagaagcttcatttagcaaaaataaaaaaaaatttataatacaaagggggggtaatctacctaccctgaaagtttcattcggaagtcccatggtcacttgggtacctctcctttgt

SEQ ID NO: 67774 - DNA, 3154 bp, Heterodera glycines; identical to SEQ ID NO: 8351

SEQ ID NO: 67775 - DNA, 998 bp, Heterodera glycines
atgccagcagttcaaatgttctcgttgtacgcttcggtggcaattttgctcaatttcattcttcaactcacctgtttccttgcggttttcatttgggacattcaacgccaagaggtaaacaaaaacaccacggggaaaggggggggagaggacgcgcagatctgattgaaaaaatggccaaaaattttattagtcaagcgcctttgaacccgtcgagaaagagaaaaagtcatggtccataaaattgtctggctacatttaggggggggaggggtgaaattcctaaaaatgttggctaattttttttattttttacggctgaaaatgatgcctgtcattagctccaaaattctccttaatgtgtcctgcctaacttttggcgtctattttgtttaataaaaaaaattgttttctttcccagtccggccatcttgaactgtgcggtttttgtgtttcaccggtgccgttccaaccgacggacacggaaagtcggattgaacgatggatgcgcgattactatgcgccggccttgctctacaaattttcacgatgcgctgtggtaaaaattagaacaattttatgtaccccctggggagtttactttatttattaaccctcctcgaatggaggctttattttgggatttgggaaccacattttgggggtgcactccaattttttttgtttaaattaaaatttcaaaaagaaatatcttataaaaattttttattgtttgtccggcgaaatttacacaaaaaataaatatttgttattattattaaaactcactaacttttaagatttttttgtttgccatttggttttcactgtcttccgcaattatgaaccgcataagtgccggacttgatccaaaaattgcggtgcctgaggtacaaaaaaaaatgaggaaaggaaaagcatttaattgaaaatttaagataataataataattattattatttgttttttatttcattttgctaatatattatacaaa

SEQ ID NO: 67776 - DNA, 60 bp, Heterodera glycines; identical to SEQ ID NO: 52045

SEQ ID NO: 67777 - DNA, 154 bp, Heterodera glycines; identical to SEQ ID NO: 62241

SEQ ID NO: 67778 - DNA, 384 bp, Heterodera glycines; identical to SEQ ID NO: 66175

SEQ ID NO: 67779 - DNA, 1152 bp, Heterodera glycines
agcggtgtgtttgtgcttgctgctacgtccgtggccgtgatgagacgacgcggtagggcccgtgcttggcctagcacgtggcttaagactcaatgagtgtcagctcgggcaccgccagctttttctttttttcattatttttttacacttctgttgaagaatgaattctagtcttatcggtggatcactcggctcgtggatcgatgaagaacgcagccaactgcgataattagtgcgaactgcagaaaccttgaacacaaaacattcgaatgcacattgcgccattggagttacatccattggcacgcctggttcagggtcgttaccataaaatgcactgcttgtgcgttgcttcgtgggatcatgtacttgtacgtgttcttacgttacttgctcggctcggctgtggggttttggtgtgcaggcgcgaacttgtggttctaattcgcgttttacggaccgtaactcgggcgcaccaatgcttcgcatgctgtggcggagtgcctggattactggcattcctgctttgatttttcgacctgaactcagacgtgaacacccgctgaacttaagcatatcagtaagcggaggaaaagaaactaacgaggattcccgtagtaacggcgagtgaactgggaagagtccagcgctgaatcgcagctcctctggggttgcgaggtgtagcgtatagaccgtgagcatgggttggcccgcttgttcaagtttcccttgaccggggctccagagaaggtgcaagacctgtccaactggcggtgcctacccatctttacgtgtcttggagtcgggttgtttgggatcgcagcccaaatcaggtggtaaacttcatctaagactaaatacggccacgagtccgatagcgaacaagtaccgtgagggaaagttgcaaagcactttgaagagagagttaaagaggacgtgaaaccgatgaggtggaaacggacagagctggcgtatctggtctgcattcacccgtttgttgctgtacgttgggctgctagcctccagactggggtttgctgtccttctttctgttcagtggcgaatggggcatttgcaggcggagtgcgctgagatgctcggagtagctgcgtgagctcggtcttgaggccagcctttcggggtctggtaccc

SEQ ID NO: 67780 - DNA, 1423 bp, Heterodera glycines
atgtttttcattggtatcactgatctgttgatgataccaataagctcaatcatcactggatatttggccattaccggagcagttttctgtacagcgccgacattcatttatgtctgtggcgcttgtgcaataggtaaaaaataaataaatgtatttttatggcattgtgctgctaaaattgaatagtatcgacagttagcatatgtccagcataaattctcgacatttaaaataaaattaattgagtttttgtaggcctaacggctgttgagaacacggcacaaatatttttggcattgaatcgctgcattgatttggcatacggttatgcagcacgagtactgtttcatggcaaacgcatttatctgtggatgattttctgtgtcatctacggcatgtacttctgcatgtttacaatgccgatcattttctcaagcgtaatcggcacttggttcgtcaacccgcattttgcctacaacgatgacctaagcggcacaattgtatgagacaaaaagattacataattaggctaaagagtataattttctttcttatatttttgagcgattttgtacaagaagataaaaaataataattacgccatttttacagtatcgaagtgatttggcaaccatacacagttacatggtagtcactgtgctaaccggcacatatttggtctttgcgattgttctcctcaccaaaatgggctttaaatgtcagtcaaatggtttgatgaacgcaatcactaacaccaattcacaaatatcttcaatctcgcaaaaaaaggtagataattaaaaagtgattaatatttaatatatttcattgatttttatacaatttttaggttttcgtccaagtgtttttgatcagtatcatcaatgatgttgctgttacaatttgttctctgatgaattttttgccggtgggtaacactttgatcacacttggccaaatcacttggatgctttcattcggtaagcctttttataaagaaaaaatatttataaaaaacaatattattaatttaatatatttaatttttaatttcaataatcaaattttactcgatattctctgaaggtattccgccgttcatctatctgttgctgaacaaaacaattcgccaagaagtgattggcattttgcgcaaattgtgtagcaaattggtgccgaaaatcattagcaaaaaaattggcacaaaaactcaaatagcaattgccgtggtgaaagttgggccagcagaaaatgctaagcaaatgacaatcccttcgtcaacgagaaatgattaaataagaaacacttgaatattcaacccattttattatgatttgacacgggatttatatgtgccaaaaaccgaagtttttgaatctttcgattgatgaaatttcatttttaatgcatttttctaaataaa

SEQ ID NO: 67781 - DNA, 380 bp, Heterodera glycines
atgagctgtaagtgaaaaaccgtcctcatggattttgcgatgaccgagaattttggaaatttataatacaataaaaaaaaatttttttgactaaaacaaaaaagattaaaaaatgaattaatttaccttaattttatagatattttcctagactttattgcatattatttttacaattttggggactatgatcaatattttccaaaatgggttcactattaattaaattagtagatccattattattttagactgaattatattaaaatattgataaattaaattttcatgaacaagatttaagtgacgaaattttaatgtaaaaaaaatttaaacgaatataaaaagcataaaagcgaatctcagagatttacacggta

SEQ ID NO: 67782 - DNA, 56 bp, Heterodera glycines
atatattgtttgatagggccagacaagagaaggcaactgttggtaccaagtttgcg

SEQ ID NO: 67783 - DNA, 289 bp, Heterodera glycines
gtccaacgtaatgaggtggaacggcatggcctcccgttgacggacaaagagcacgagcagtgggaaacaatggccatcggtggtggtggtgctgatcagcaacagcagcaacagccgctgcaggaccatttggatcgactggcacgaagccgtgaagcgatggtaattgacggagagccgcagcaaatgatcagccatgacgagcatgggcagcccattggcatgacgacagtgcaggtgggggtcatcaacaaattcataattacaaattaaaaataagtaattttta

SEQ ID NO: 67784 - DNA, 329 bp, Heterodera glycines
atgtgtgcaggaaagataggcaggaaagatggatcagctaaaagtatgtggtggcatttggaaggattgcacatgaagagttcgtatgctgaaaaggaaatggagagcaaaaaaaggaaaaggtctgttctaaagggaacaaaggtttattgataatcttattattttacaggaattaattaagccattcattgtgccaaaaaaggatgccacaattgaagccgaagaacaaattgcccgaattatgatccgacaaaacaattattttctttttttttcaggataaggacctgaaagcgctttacgcaaaggcatatccgaatttgtag

SEQ ID NO: 67785 - DNA, 108 bp, Heterodera glycines
atgccaaccgcacttccaaatgcaggtcccaaattgcgtgatatgatgaaatatgctcctccgccttccacgacgccattggtcgccaccgctgacacactaatgcag

SEQ ID NO: 67786 - DNA, 476 bp, Heterodera glycines
gctaagctcggcctcatgctcggcgtgtaccttccgaccatccagcacattcttggcgtcaccatgttcatccgtttggcgtggatcgttggtgtcgctggcgtatcgcacacttttatgatgctcttcatttgctgtctttgtgtagctgcgtttttttaactcgattttttcacatgtccttcagacgttcctcacctgcattagtgtgtcagcggtggcgaccaatggcgtcgtggaaggcggaggagcatatttcatcatatcacgcaatttgggacctgcatttggaagtgcggttggcattctattctatctggccaacacagttgcaacttccatgtatttggttggaggaattgaaattcttctggtgaattcttccggtcaatccattgactttttatccgtaaattttcagttgtacctttatcccgggatgacaattggcggtaaaaatgcgcacacggacactg

SEQ ID NO: 67787 - DNA, 298 bp, Heterodera glycines
atggcctccaattaccaagggtttggttttacaccattatacgaaaaggaagaacccgcctcgttctatgtagacaaaaagaaaatcgaagaacgggttagtctctctaagccattcgcacacatttcattcattgtcgtcatttctgatacaggctaagctcggcgtcatgctcggcgtgtaccttccgaccatccagcacattcttggcgtcaccatgttcatccgtttggcgtggatcgtcggtgtcgctggcgtatcgcatacttttctgatgctcttcatttgctgcctttgt

SEQ ID NO: 67788 - DNA, 1688 bp, Heterodera glycines
atgaattgcccagaggatctgattgtgggtggaattcgaagggacgcccagggcgttcaaatccgacacgccgaggcttttcagacggtttttttggttgcttctgctggcgatgtttaccaacgattaattgtgagggctttctttttttaatgtattttggttgcgttcaacaattacttttctttcagcgctccaaaaatcacagaatggaaaagttcggcgtctcctttacccaggctcatgccggtgctattattgcggcatggcaacgaaatttcaccaaagtgagtgaaccaatcgacgaacacagccaattctaattgttcagagtatttacgaccacacattgaataaacctgcccagggaattcgcgtggtgcatccgctggcctcaacttccatccaggacatgttggagcagttcagcgaattccaattcttcgtcatcttcatcggctacgtgcttatggtttaaaacggagaatgtcctctaattgtattttggttctttactaacagattatttacgctggttggtcccaagtgcattggcaggggtggtggttttcggtcaagtcgagttgtctgttggccattatcggtgtgctggtgatcactttggcatcggttgccggcctcggcttgtccaccgccatgaatattcacttcaacgcggccaccacgcaaattgtgccttttcttacactcggacttggcatcgacgacatgtttcttctgctgcacaactacaacgatgtgctggaagctgtccgacaaaaagaggtggcggtgttgctcaaagagactggtgagtcggggaatgcctcgggggtttcccttcttttttcgggtcacttttcgtctttcatcctttttctcgcttttctttcacctttaggcatgtccgtgctgatcacttccatcaacaatatcctcgcctttctcaccggttgcattttgccaatccccgcgttgcgttctttctgtggtcaggtggccattctgctcacctccaacgtcctctgcattattcttctcttccccgcgttcattgcgttggatttgcgtcgacgtaaagcgggccatcgcgacatgagcttcgccgcccttttctgttgttgttgcaacagcagttgttttatcggtggcaaaaaaggcggtggcattgaaaatggaggccaaaagcatgccaaaatgatggagggcggggcattcaaaaagcgaaaggtttttattatttaaattattttgtgacagttttgctcgtaatgtgacgacgtaagcaaagaaaagaaatttaagtaaaacaataaaaaatgaaatgcaaaataccaattcattttctgtttttgatccaacttttgccattctttcaaattcaaaggttttccatttgtcagttggaggagtgcagcagtcgcaaccaattggtgaagaccgactccacggtgaccacccattcctccgaaattgacctgcaacagatgagtgcggctgtgttcggccctccctcgtccggcccactgatggcaaatgtcaactttggcccttcctcctcaccaccttcggcctctaacaataagccggtcacttcttcagcaacaaagtcgttgcacaaatggtacacattggtcgggtttctccacggctattacattccgttgctcaggcggccaattgctaag

SEQ ID NO: 67789 - DNA, 80 bp, Heterodera glycines
tctccatatttttcattgttaaagttctttcaatttcgttgagctaaatgaccattaaaattttgtattttattcctaaa

SEQ ID NO: 67790 - DNA, 1881 bp, Heterodera glycines
tgctaattgcactggctggtggaaattccatgtccaaatgaattaataattcatttcatttccaggtttatgcgcacttggcttcactctctccaatcctctttggaccgtgctgctaaaattggcatttttcctgacgacgatctcaagaaaatggcggctgacgcgttggcacgcaatttcacactttcagacgactttctattggctagaaagttgctttgttctgctggacaacggtttaactgcacggaaatggtatggtttagataaattttaaattataccaccgacgggaggagaaggaattgcacttttttttgtgcgttaatttaggcccgagactctcgggccgagagtcaatttttttaattctgaattactttcttcaatattatacagcgcggtgctaaattgattgaggacggacggatcaacccacgagggttttacaattatttgactgcttggttctaccaagacaatatgatgtaatgccatttaatactttttaattcaaattcttcgtctttttgtgcaggtattacgtgtcccaagcggcctttttcccgacgcctttgccttggcatttttctgccgctgatgaaagcgttgtgccgcccgccgatccgcttctctactcgcaaattcccttttacatgaatggcctcaccgatacgcagtcaattgtccaaatggtaactatttgagataaaataaaacctttgaagcttacaatttatgggttaccccacatttgcgcctatgtctaaaatcggattcaaacctaattttttcataccaggtagcctaaacagcattaaaattatgaaaacacagtattttggtttattaggagcattaattctcttgttcgaatctacgggtttaattggcttttgttagatcaaagaaatccgtgccatttgcgaccggtacagtgcggacggtcttcctgtttacccttccggcattccattcacattttgggagcagtacctgaagctgactttttatttggtgtccgcgattttggttcgtttttacacccattatattatttgacctacttaaattaatttagattattggagttgctgttttgttggtcatttcgattataattgtaattcccgccacaaatgtttttccaaatacccattttccaagttcaacccttgggcagctgcaatggtggcgataatcgttgttaccatgacggttgagttggccggcttcatgggcgtattcggcgtcaaaatgaacccaatttcggcagttacgcttatcactgcagttggcattggcgtcgaattcactgctcacgtcgtcttggcttttttgacctcgcttggctcgagggatgagcgtatggtcgcgtgcttggtatgtttttgttttgccagtccaaatttggtatttaatttctctgggcttaggaacacatgttcatccccgtcatccatggcggactgtccactttgctgggcattgtgatgttggcattctccgaattcgacttcgtcgtcaaatacttctttgtcgtgatgaccgcattggtcatcatcggcctcatcaatgggttggctttgctgcctgttttactttcactaattggaccaccgtgcgaggtttgcctgtctcttttttctttctttctgttattaattttcctctcagatcactcctgtaaatggtagcaatttgttgccgtgtccggcgtctgaacggtatcggcccgaagacagtccgaactgcttcaccaccccttcgtccacccatcatcaacagtcggacgagcaaaagagacgacgagggtgtaaacggatgttagcggtggacgactcatcgtcggcatcgtccactgaagacggtgctggt

SEQ ID NO: 67791 - DNA, 339 bp, Heterodera glycines
atggcaactttggacgctgttgaggaaccgcttgacctgatccgactcagccttaacgagcgtgtttatgtaaagctgcgccaggaacgcgaactccgcggccgactgcatgccttcgaccaacatttgaacatggtaactaataatgggaattaatagttcatcggagaaattatgtcccgaagggggggggggaggcgacgcagtgactaccaacagcaacaatccccaaacaaccttcagattttggccgatgtcgaagaaacggtaacaatcactgaaacggacgaagaaacattcgaggaaattcacaaaccaagcaaaagaacaattccaatg

SEQ ID NO: 67792 - DNA, 1385 bp, Heterodera glycines
ctgttttctttaaaaacggtgaaaaggttagcggaacgtgcggcaaaagcggtgaagggaattaaagaagaggaggaggaaaaagagagcaatgatgaggatgacgatgaagaggaaaaggacgaagagaaagcaacgacaaaaatgaccaaaatggagaaggaatttgatgacggactaaacgaagcaattgaggaagaaggtgggaaaagcgaacccgacaagttgctatggccgaattgtttttcagatgaacataaattgggcaccaaaagcgcgaaaaagccgaagttaacgccggagcaattagcaatgggcgaggaaatgatttactcgaaaaagcgggcacaggacttggaggactgggcctggaataggttatttggcattaaaatgtttggtacattgttgtacatttgatcaggtacacaagcaacgatgaagcattgccggaatggtttgtcagcgacgagaaacgccactgtcagttggagcccccggtagacaaagtgagtaactaattagcataagccattcagagagaagctttttgaatttctctaattgcatttcaactaaaggaacgcgttgacttttacgcgaagcgagaacaacgcgaattgaacacaaggccaataaaaaaagtggcggaagcaaaggcacgcaaaagacaacggcgaatacgacgcatggaaaaggcgaagaaaaaggcggagggaattgtggacaatgagcaaatggagcatggggagaaagtgcgcgaactgcgcaggtcgggccaagaaattggtgatgttggcaggaattaaataactgcaggctatacaagaaggcgggctcaaatgagaaacgcaaagtgacgtaccaagtggtcaccaaaggcaaacgaggctcaatgagccgaccggacggacattatcgactggtggacaaacgaatgaaaaaggtggctgaaggagtcacaccaaacaaaccggggggagcggggctctacggtccagggctatagtaaagtgcttaattccatgattccataataaatctttttctaaaagtaagtaaggagcggtagcggaggctgtcccaaataaagagaattgaatcatatgaaaattcgttttttatttcaggatatgcgtaaacagtcaaaaactggcactaagaggacaaataaggcaaaagctaacacttttggacgaaaaggcaaaatgagagaaaagagccagaatcccaaagaaaggatgaacagtgagagaaaggacggaccgaaacaaaagagaaaaaatggcaaaaacggtggcactcgtcggatgggcggagaaaagagaaaaagtggcaaacccaatggcactcggatgggcggagaaaggaaaagaaaacgataa

SEQ ID NO: 67793 - DNA, 105 bp, Heterodera glycines
catcctcatcattgctctctttttcctcctcctcttctttaattcccttcaccgcttttgccgcacgttccgctaaccttttcaccgtttttaaagaaaacagct

SEQ ID NO: 67794 - DNA, 504 bp, Heterodera glycines; identical to SEQ ID NO: 60631

SEQ ID NO: 67795 - DNA, 234 bp, Heterodera glycines
caaaatagtcagagtgatggacagttcgtcgacggacagaagccgagggatggacaacggcagaagagggaacggaaggggcggcttcggcagagcgaacagaggcggcggagggggcgcagcgggcggaagcggcgcattggcatttattgggggaggcggtggcggatttggcgagggccgaggcaggggtcgctttttccgaggcggaggaggcgcggggggagcacaaat

SEQ ID NO: 67796 - DNA, 341 bp, Heterodera glycines
  unsure (1)..(341): unsure at all n locations
taacgaatgcgcggaacgttcactgaacacatgcgatgagaacgcggactgtatcgatacgccccaggggtacagttgccaatgctttgccggctacgtcgacgtgtcctcaaatgcgcatttgcccccgggcagagtctgcacaggtagaaaagccaaacttggcatgatgtgattggcctgcacattgttcaattgcagtgcagacgagctgtcccaagcagaggactgatctgatatttctgatcgacggctcgggctcaattgggtcccaagtgagcgcagagaaacgccgaataataatttgtgattggtttcgctcaattaagnngtggacctgc

SEQ ID NO: 67797 - DNA, 505 bp, Heterodera glycines
caaaagttttttacaaccacttattgccaatataatttcttgcagatttaaagctatccattgcctgccggttctcggcacagcaaagcactaatagggtgtttgactcacttcaaaaaataattccttacacaaaagttttttacaaccacatattgccaatctaatttcttgcagattaaaagccatccattgcctgccggttctcggcacagcaaagcactaatagggtgtttgactcacttcaaaaaataattccttacacaaaagttttttacaaccacttattgccaatctaatttcttgcagatttaaagccatccattgcctgccggttctcggcacagcaaagcactaatacggtgtttgactcacttcaaaaaataattcattacccaaaagttttttacaaccacttattgccaatctaatttcttgcagatttaaagccatccattgcctgccggttctcggcacagcaaagcactaatagggtgtttgacac

SEQ ID NO: 67798 - DNA, 639 bp, Heterodera glycines
atgaggaagaagaagcgaaaggcgaagaaggaaaatggaagaaaaaggagggaagaaaaagagaaaaaagaagagaaggaggaggaagatgaagcgaaagaggaggatgaagaggaagaggaagatgaagagaaagatgaagagaaagaggaggaagaaagggatggtgatgaggtattggcacagtgatgggaatgcgaattagaggagatcatcgccagagaaaaggccaaccggcaaaagtcggcgcaatgttttccctgagggcacttcctaatttaagaattgtttttttgataagcatttattttttaggcacattatgagagatttgtttatgctatcgtatgacaatattctttttcctgtttaccacataattagagacaaaaacttgattaatttatatgtgtgggtgggaattgcggggggagggaatttggagctgttgagtaaccgctcgcgcaactgataggttttgattggatttgggggaaatccctcagcggagggcaaccttttgaggttactcaatgttaaattagcactcattgaggaggaataatatcagagagagagaggaaaagaggcgcaattcggacaaagcgacgcgggggcaaaaggaaaagggcaattaaa

SEQ ID NO: 67799 - DNA, 1127 bp, Heterodera glycines
atggccaaacaaaagcgcaacgagttcagaattgagcgccaaaattcgtatggccaacaaaattgtgggggagatgaagcaaagagaggggggagaggaagcggaagagaagggggaggagcagggaagtggggacagcggaagaacaaccgagagggcagcgaatacaacgacggggagcacgacaacgccgtggacgagcccaacgacgcgggcgcctcccgcatgggcggcaaccaaacaatggtcactgccacagagaggttatatgggggggggggggaaactctcgacacttcttaactcacgaacatgctctaaagtggtcacttttgcgtctctcgcattaaactctctccctctgttcagtgcccccatactttcgccaattggatgaccattcgctctctcacattgtcatccccgcggggcgtacgctgaaactttcttgtgcgttggttggctttaaaacggtgaataattttaattaattgcatttgtcattttgctgaaggcaaagccggcggtcagcccgaaccgcaagtcgtgtggagaaaaggggacgaagagattctgaggaacagcgagagcagaacgggctcactgttccagctgaagaagtggactttggagttggaagacgccacggaagtgagggaaaagggcaaaaggaaaaaaagagaaaaacaatggccaaaagaacgacagcggggaatacgcgtgcgaagtgttcaactccgccggactgatcgtccgccgcttccgcgtggaggtgcaggaccgaatccgttcccggcccattttggtgccgaatgtgctgctgaaccaaacggtggacgtcaacggcaccgtagactttgcgtgccaagtgatctccgatttggttcctcacattgtgtggataaaactgatcaaaaacgacggcacttttattcgatgggacaccaaacggcgccagtacaccttcaacttcatggacatgagcacacacaaagtgcatataaggggagcacaaattgaagagaaatggccaaattgcagagaacgaggatattccacgaaaaacagtcgaacaaatacacaatggaaattgccaatgtgaccatggaggaccagggcatttactc

SEQ ID NO: 67800 - DNA, 1183 bp, Heterodera glycines
  unsure (1)..(1183): unsure at all n locations
atggtcagatcagttcacgaaaatgtaccgaatgtggtttcattttcccaaatgacaactgttatgatgcgcaactccaacaatatatcaataatgagaatggggtaggacaaattcgccttgtaatcttcgaaaaggagcaagaataccgtattgtcttcaaggggagagggggtaatatttttttgttatctnaattaaaaaaaaacatttgaagaactgcagcgcaattcaatttatgtatcctgctagaacgaggacacttcaactatattggacgaattgcacagctcttcaaggttcctggatactgcattgactgtgaacggagagcagacgcgcgttaccatgcgattggttgcaaggcggcatgtcgtctttgttttcgattcgggggtggatacccgtgtcaacgagaacgggttttaatttgagcttatttttttcagttataaaatttttttagttgtctgatggtcagatcagttcacgaaaatgtaccgaatgtggtttcattttcccaaatgacaactgttatgaatatcatttggcgaatgatgcccctgctccaattgatgggcgcggacatagacaacggcgttcactttgtcaatggcgacgtttttgtcccacatgcggtcgtgttgcctattttggaatccatcaatgcccctcgatacgtcgtgctattgggccagttgattgctttcgttgcaaaggtccacatatgttggatgaaccttgctacatccaaccgattggtgttgcaccacctttaccaatgcttggtcctgttcacaacaacgacgacaacaacaacaacaacaacaacaacaacaacaacaacaacaacaacaatgaggatgaaaatgatattgatttcataatcaacaatctgggaggagaaggtgatgaagatgaagatgatgttgaaaacggggatgatattaatgatgatgatgatgatgatgagcgagatgaactgctaccacttcgtctttgcttcttcgatgccgaaacatcccaggagcgcccactacagcttaacaaccaagtcgcccataaacatgtacctttgctaatagttgctgaattcatttgtgaaccttgcattcgagctggaatcaacatcaacgatgggcaaggtcagcgcgcacccggttgcgtttgcctatgtggaaga

SEQ ID NO: 67801 - DNA, 200 bp, Heterodera glycines
agcttttccatctacaatctgtctggcacattgttggacgacgacgcaaaacggcaaaaggtattatgtatgtgaatcgagtaagaatgtattcatttgacgaaatcacgcggagaaaagtgccaatgaaagggcattttatgcggacatatattataatttaattaaattcacgatattgcgtctctgggtgtcattaa

SEQ ID NO: 67802 - DNA, 108 bp, Heterodera glycines
  unsure (1)..(108): unsure at all n locations
cattatgaacgctanaattatcagagtgccgaaaatcgcatgtgatctaagcctagcaaaaaaaggtgtaagtaaaaatcgtaactacgctcaaaaagcttctcaacc

SEQ ID NO: 67803 - DNA, 692 bp, Heterodera glycines
atgggacgaaaaagccgaggaaatggagagaatgaaactgatcaaaatttgcaagtgaaacaagaaagtacgataaattgtgaccaattagaacaattggaaacaaattttgaaaaattttttgacaatttttcaaatgaaattgataaaaagaaaagagaatttgtggaaaattttcaatgaaaaattggatggaaaaaggaaaaatgccaaaaaatattagcaaaacatttgggcatcataattagagattttagatgttaaaaatagggttgcgtccccgaccccaccccgaaccccgacatttttggccattttcggggaaaaccccgaccccgaaccccgacgcttccaaccccgacaaccccgaccccgaccctcaaccccgactcggggtcggggttaaatatacacccctaagaatggcatttttgtgggaaaaggcaaaaaagttataagaaatttgaattttgtctttgaaatgacaaaaaattttgaaattagaacatttcgccaattttaacaataaaattatctaaaaatgtaaatcgaaaaatgttcttcttcctgcatttgcatttttcaggttaatattacctatgaatttttctaatttagataaaatgtctgaaatatggtctttttataaaaaatcacaaacgtcggaaacggctttatgtcctttgtcataa

SEQ ID NO: 67804 - DNA, 1358 bp, Heterodera glycines
gtctttgataaagaaaaagctgacaatgagcccaagggaaaagacccaacatggtttctcgtcatattgcttccgattgtcgctctcgtaagtggatgagtcatttgttaattgctgtgcactttaacaccttttcagaattccattgtgtccatgcgtatcctctcaattatgtgccttctcggaaatgtgttgatgatcaccagtttgacactcattctctttgttggtgttggcgttttttttcaatttatttcttttcactttcagatgctgtcccaaattgtattcacggaaagagctcattccattccgtttgccctgccatccgcagaaggctttttcaaagcgtgtggtaccatcattgtctcttgcctcgctcagtcattggtacgatgtcataatgttgataaagtagtcacttatcttcggttgtttttaggtgcttcctatggagaacaaaatcaaaaaacccagtcaaatgttgggaccctttggcgttttgtccggtggtatcgctatttcgactatcgtttacgcaattgtcggttttctcggctatagtgcttatggagagagccttcgtgatagtgtcttggaccatcttgaatgtgttaggtaagtgtggagttttgtgcatcattgtatagcaaatttcttttttcagtaacgcaaaagagttgactgttttgacttatatcattcggattgccctctgtctgtccatcttcgcttcttttatgctccaaatgtttgttatcgtcggcgttttgtggcctctactcgaaaaacggatcgaaaaactttctcgtatttggaaaattggcattcaattcatctttcgggctattttggtctccgtatgccgtgcgttttgttttccaatttaatttctattcacacatttttagtggccatttcttattccatcaataatttggccgctatcattcgtttgattggcgttaccaccggttagtcgtactcaattttcattcccaccaattcatttcgcaatgttttttaggcactctcctcgccttcgttttgcctgccattttcgaccttctcaccttcgtccctctttttcgcagtcagaatcgccttcgcgaagcaaatgttcggcttggcataaacattggtattatcggtttcggatttgtcattcttgttggcggattggtggtgaatgtcattacgatggctaacaaagaggaagattggaagtgcgctgcaaatgctacgactagcggaaatgtcacggcgacaacgcaatcgtacaccacaccgatttaattatcttaatcgcatttgcttaatatatattgtatgtatgtatatgtgtaatgtattggcta

SEQ ID NO: 67805 - DNA, 292 bp, Heterodera glycines
gtcgggacttatgggtttaaagggggcttaacgcctaagtaaaaaagcaaaaattgggtgggaaagaaagagacgaatgaaacggaaaagcatcagaatggctaaaaaaacgccaaatttattagcagaaaatttaaaagccgccttcgttttctctcagatggccccacaaatttcgaattgaaacatcggcacaaccaaagcatcgatttgtcctcttcactttcgctgttttctatgcccaaaattccgtttaacaacagcagacaaatgcccatttgtgcgcagtgtt

SEQ ID NO: 67806 - DNA, 1137 bp, Heterodera glycines
taattaaatccattccttcgggggaccgtgccgggtgccgcggggtaagcagtgctggttcgtttcatcacggcaccgaaccttttggctagtcagcaatcgttgcttaacttgccagatcggacgggtgcgcatgattccactgttccaagcaccccaccaaaagcaaaacgatataaccaaaatataaggaaaaattttttaaaaaattttttctccatcttcctttttgatactaaagcatcagagtgctaaaattaagttgtaaataaaatttggtgcgctttagagcactttctgaaaaaaatatttatgaaacaaaaaaatcgattttttcaagtgtccgtttggggtactcaaacatttatggggagcaaaaatccaacgcagaattaaagtacaggctatagggaagctattcccgaaggattcggtctccccataaatctgggcgcatcggttcggggggactgccccgaaaacaaaaaaatcgattttttcaagtgtccgtttggggtactcaaacaattatggggagcaaaaatccaacgcagaattaaagtacaggctatagggaagctattcccgaaggattcggtctccccataaatctgggcgcatcggttcggggggactgccccgaaaacaaaaataaatcgattttttcaagtgtccgtttggggtactcaaacaattattgggagcaaaaatccaacgcagaattaaagtacaggctatagtgaagctattccggaaggattcggtctccccataaatctgggcgcatcggttcagggggactgccccgaaaacccaaaaaaaaattttttggataaaaattatttaaatgaactgactagataatatttaaaataggttatttctcttcctttcagtatccctgcaaagtttggtgcgcttctgatcagtttctgaaaaaaaagttaagcctaaactttttggcctgtttaaaaaggaattaaaaatttttaaaaattttattcatctccctttttgatagaaaaagcatcagagtgcctaaactaacatgtaaataaaatttggtgcgtttcagaaccctttctgaaaaaatatttaagaattaattttgcaaaaaataaataaaaacgaaagact

SEQ ID NO: 67807 - DNA, 272 bp, Heterodera glycines
ggaccacgcgcccctttcactttcatttgaaatcactccgccgatcattcacaaaagctcaaaaataatcccccgtaaagcgaacacaaaatgagaatgacccaagacgcaaatttgagcactttttgtgcccttttcactttccttctgattgttgaaggaactttcggcatttttggcattggcagcagtgacaatgacacaacgacgacgacgacacagggagggggagggacatcgacgacgacggcaaaaccaaagggaggagggac

SEQ ID NO: 67808 - DNA, 432 bp, Heterodera glycines
ttcaatcggctagtgctttaaagttttgtctttgaatttgcttttttgtccatttatttcaatcggctagtgctttaaagttttgtctttgactttgcttttttgtccatttatttcaatcggctagtgctttaaggttttgtctttgactttgcttttttgtccatttatttcaatcggctagtgctttaaggttttgtctttgactttgctttttttccatttattccaatcgaccacgttaattcattctctatacatttagtgtcttatttcatgaaattatatataatttaattttaaataaagaggcaaatttttacagaaaataaatagacgctgactaattagctaacatttataaagaaagtagaaatttgattaaatgcatatacaaaatattacttttttaaaatttgtataaagttccta

SEQ ID NO: 67809 - DNA, 993 bp, Heterodera glycines
  unsure (1)..(993): unsure at all n locations
atgtttcgaagaattctcagtaacgctaaacgacaacgaatttatgtggatgatttgatccgaaatgctaaaattgaaccgaataagaaaaactatggaattgacgagttgagacaaattcaagagtatttgaaccaagaatttcccggaaaatttttaattgcggcttttacaaaggtaaatttttaagattattttttccccaaatatatttaggaatgggggataaaaccaatatacaagggagatggaccaaaaaaatacattgtttgcgtttttcatgagaatgatcactgggatggtaagcgggtttttcaattagattattacaaaaaaaaatttaggattaaaaagcgtaaaacaatttttcaacataaaacattattattgtatatattgtgaacagacattccgagaaaaaattagacacacggtcaactgtgtaattaaatgtcagcgttgtggcggatggggtattattttagggacgggtaataataatttataaaaatttttaggtttaaattttccatgtgaaaaagaagggcgtgagcccattgaatgtttaaaatgtaatcgacttttctttagcgatttctgttttcaaaatcatctaaaattagcttgcaaattatacagaaggtgtacattatgtgatagcgaatacaacactcgtaacaaacatatttgcggtaaaatatttcttttaaaaatgtttttttcacatgtttaggaataaaattctgtaacttttgcaaagtaaaacacgccaaatcagagagttgttacatcaagaaaattaatattcccaagaatttaccaagatatcgtattgttagctatgatatagaatgttcagtaagcatcgaaaaaagctaatttacaaatttttaaattgaatttagacggataattctttttccgagggaaaattcgagcatanagttgtctttttatctgctcgattcacgtgcagcgattgtgacaatgaaa

SEQ ID NO: 67810 - DNA, 106 bp, Heterodera glycines
tgtccgtttggggtactcaaacatttattggggagcaaaaatccaacgcagaattaaagtacagactatagggaagctattcccgaaggattcggtctccccataa

SEQ ID NO: 67811 - DNA, 517 bp, Heterodera glycines
atgacaaattccaacctgggtgagcacacatttcagataagcttcctatcattatttcttagaaacaactaataatctgttgaacagttatttcaaaataaattcgaatatattagcttattatgcatcttcagtgtgcattctaaaataaaatcattttttgttctaattttatgatttatttgttttctgttgactaaatagtcggttcttatagcaaatattaatttatatttgcgtagcttcaaatgagcattctgccttcaatttcgaagggaagtgaatttttttataataaattgatagagagcaaaaagcacaattgtataatatacaaaaaatttatctatgcatttgttgaacgtttctaaacccgatcgaattttttaaacctttatatgaaaacatttattacaggaaatgacaaattccaacctgggagagcacacatttcagataagcttcctatcattatttctttagaacaactaataatctgttgaacagttatttcaaa

SEQ ID NO: 67812 - DNA, 595 bp, Heterodera glycines
aaattttttgtatattatacaattgtgctttttgctctctatcaatttattataaaaaaattcacttcccttcgaaattgaaggcagaatgctcatttgaagctacgcaaatataaattaatatttgctataagaaccgactatttagtcaacagaaaacaaataaatcataaaattagaacaaaaaatgattttattttagaatgcacactgaagatgcataataagctaatatattcgaatttattttgaaataactgttcaacagattattagttgtttctaagaaataatgataggaagcttatctgaaatgtgtgctcacccaggttggaatttgtcatttcctgcaataaatgttttcatataaaggttttaaaatttgatcgggtttaggaacattcaacaaatgcatagataaattttttgaatattatacaatcgtgctttttgctctctatcaatttattataaaaaaattcacttcccttcgaaattgaaggcagaatgctcatttgaagctacgcaaatataaattaatatttgctataagaaccgactatttagtcaacagaaacaaataaatcataaaatt

SEQ ID NO: 67813 - DNA, 860 bp, Heterodera glycines
atggccattttttttctctctccccagcgccgtgatgccccataccgtcgaccggatccagccacaaagaaagccgatcccaaaaaagttcccgctcctggggtcaagaaactcctcacggaggtgctttctgagatcaatacccttagcgatgcgttgaacaagcacgcggccgaattttctcgtttcttccacttcatcgtgaaacaggcccaaattggtgaacaggaagatgagaaggagagacaggcgagaaaagcggaagatgagaaggagagacaggcgagaaaagcggaagatgggaaagaaaaacaggcgaagaaagtggaagatgggaaagaaaaacaggcggagaaggcggaagagggggaaaagcaaccggagccggctaaagaggattaagcccggggggagttttctgtcgccgacagaaaaaaaaatcggcggtgatcattgatcaccaactttgttaactttacttttttgccgtattcataaatttttgtcttaatgagagccactttttgaaattaatctgagaaatcccttaaaagtggtcatccatggttctttccctggccccttaatccgtttttccccattttttcttgtcattgatgtccaccatttgccccatgcgctcttcaacatgctcatctgtgcgaccgccccctttttggatccgcgcccaagcccaagaagaacccgtataaaagaacgaaggaagagccactcgacagaattcaatttcccattttaactgccatccaacagttatcaaacgatctttttccaaacgatcaaacgatccaattttcatcacacatttcaatttttcacatttttcattgcgtttttga

SEQ ID NO: 67814 - DNA, 1138 bp, Heterodera glycines
ggcaggacaagaaaagaatgaagttgatgcctcatgaaactcggaattggttatgttttgtcgaaaatatccttacataatactcataaaaaatacaaataattcaacccacctattctatgaccacattctgaaaaaaatcccagaaatacgaggaaagatatgcttggtcacaataaaataaaaaatggctagtatgtaaaaatttgtggtcacaaataaaataaaaaatggctaatatgtaaaattggcgtccagaaatttttagactaatccgaagcaaagcacgaatgaattaaagaggcgaaagaattcacagtattgtttctaatagggaaatattgacaggatattcggctaaaaacgggtttgatcatttttagcgcatttttaggtatacatttgagacaattgggcaggacaagaaaagaatgaagttgatgcctcatgaaactcgtatgtaaaaatttgcggtcacaaataaaataaaaaatggctaatatgtaaaattggcgtccagaaatttttagactaatccgaagcaaagcacgaatgaattaaagaggcgaaagaattcacagtatcgtttctaatagggaaatattgacaggatattcggctaaaaacgggtttgatcatttttagcgcatttttaggtatacatttgagacaattgggcaggacaagaaaagaatgaagttgatgcctcatgaaactcggaattggttatgtttagtcgaaaatatccttacataatactcataaaaaatacaaataattcaacccacctattctatgaccacattctgaaaaaaatcccagaaatacgaggaaagatatgcttggtcacaataaaataaaaaatggctagtatgtaaaaatttgcggtcacaaataaaataaaaaatggctaatatgtaaaattggcgtccagaaatttttagactaatccgaagcaaagcacgaatgaattaaagaggcgaaagaattcacagtatcgtttctaatagggaaatattgacaggatattcggctaaaaacgggtttgatcatttttagcgcatttttaggtatacatttgagacaattgggcaggacaagaaaagaatgaagtggatgcctcatgaaaactcagaat

SEQ ID NO: 67815 - DNA, 378 bp, Heterodera glycines
  unsure (1)..(378): unsure at all n locations
atgtttattgttttgccatttgtacgagttgtcattgagtcgtctgcaaagggtattcggaaggacttttcgacactggactttttgacagtccgtataaaaaaatttttattttaaaataatttcatagttctatttaatttattttaatatttattttttaagatgacaatcctattaacttcatccagccagaattggcattttctcaacaaaaaatggatatcttatttatttgtcttgcttttatccgttcaagcaatgagaaacgtgctgttatttttgaattattatcatttatgcaaagctaatttgtaagaaatattttcaaaattgtaagaaggggtactaccttattaatcaaaaantataattaaa

SEQ ID NO: 67816 - DNA, 660 bp, Heterodera glycines
gttttcggggcagtccccctgaaccgatgcgcccagatttatggggagaccgaatccttccggaatagcttcactatagcctgtactttaattctgcgttggatttttgctccccataattgtttgagtaccccaaacggacacttgaaaaaatcgatttatttttgttttcggggcagtccccccgaaccgatgcgcccagatttatggggagaccgaatccttcgggaatagcttccctatagcctgtactttaattctgcgttggatttttgctccccataattgtttgagtaccccaaacggacacttgaaaaaatcgatttttttgttttcggggcagtccccccgaaccgatgcgcccagatttatggggagaccgaatccttcgggaatagcttccctatagcctgtactttaattctgcgttggatttttgctccccataattgtttgagtaccccaaacggacacttgaaaaaatcgatttttttgttttcggggcagtccccccgagccgatgcgcccagatttatggggagaccgaatccttcgggagtagcttccctatagcctgtactttaattctgcgttggatttttgctccccataattgtttgagtaccccaaacggacacttgaaaaaatcgatttttttgt

SEQ ID NO: 67817 - DNA, 577 bp, Heterodera glycines
atggcatttcaatctctgggactcaagccaccagcagcaattcaatctctgagactcaagccaccagcatttcaatctctgggactcaaccccccagcatttcaatctctgggactcaaatctccggcattccagacactgggactcaacccaccagcatttcaatgtcattccaatctctgggactcaccccaaccagcatttcaagctatgagactcaattctcaggctttccaatcgctgggactcaacccaccaacatttcaatctctgggactcaaatctccggcattccaaacactgggactcaacccaccaactttcattggcattccaatctctgggactcaacccaccagcatttcaatctctgggactcaacccaccagcatttcaatctcggtgactcaaatctccggcattccagacactgggactcaacccaccagcatttcaatctctgggactcaattctcaggctttccaatcactggaactcaaatctctggcattccaaacactgggactcaaatctccggcattccaaacactgggactcaaatctgcggcattctaa

SEQ ID NO: 67818 - DNA, 819 bp, Heterodera glycines
atggctttattgcgttttaatgcggctaaatcatcgcgtgggaaaatcctgctaacaaatgccgggtttgagtatgcatttgaggtccaacaaactaatgtcaaaaatctgatcagtgattttaaggctttatctaaagtcaaagatgggtgggaatattggcggtgcccttgccgttctccttattgtcctggtcgtgcgtgcgtccaaatcgaatggcatcaagaagctgatggagtacagtataaattgggcagggttacaaaagaacacaaccatccggctacatttggtgctgaattggtacaaataaattgcttctaagggtataagacaaagttggacagattcgagtatcagctgaaaggcttcgccaagaagcaaggagcgaatacccaacttcaagccgaaatattgtcagtgacgtccgttcgaatttgcctcttaaagttcgagttgcgtctgcaccaggcccttcttgcatgagatggacatataattatcaccgccgaaagcaacaaatggcggtcaaaaaaataaaatatagaaaaaaattatttttattgtttatttgaggaaggcgacgctgggttggatgctgttccaacccatgatattgtaatacccgatcagttggttgatcgagtcatctacaaccaaaatctcaaaggaagccgaatgattattttctgttcacaatttgggattaacaccctccgggcctacagagacgaagtggcagttgatggaacgtttgaagttgttagaaaagtcggctgtcagataaatgtcgatttagacgagtccacgtggttttga

SEQ ID NO: 67819 - DNA, 383 bp, Heterodera glycines; identical to SEQ ID NO: 51114

SEQ ID NO: 67820 - DNA, 375 bp, Heterodera glycines
atgtccggttacgtgccgaccgtggcgatgttcgccgtcgctctgctgctccactgcttcgcgctgtcccgcgtgttcatgatcgtccacttcaagctgaacacgcacaaggatatgtcacccttgctgatggcgctgatcctcaactggacattgttctgccttttggtcatcccctacgaggtgtacagcatcgccaactggcgacccacccaaggcatgtactgttctgcagcattcactctctattgtcgtccgttgttgggagaagtccgagaggcaagagtcccgtcccgatctcctaatcaggctccatctcgggactttttgatttcgggaatcagttcgagagtgaggaagacccactatttttga

SEQ ID NO: 67821 - DNA, 168 bp, Heterodera glycines
accaatcaatcctttttggattttgcccattgtttcgtccccccttagagttgtaccaccccggcttggtgctgtttgtcatcgctttgccatgccatctctttcttgccatgatccccgtctcggtgttctttctcactttcgaccgtatctgcatcatttactatg

SEQ ID NO: 67822 - DNA, 650 bp, Heterodera glycines
atggacgcaaataaatgcccaacagcaaacatgccgataatacggggaacttattacggcaccagaagtaattcaattagataaacaatattttaaccccggggcggcggcactcatttcgcgtcaccaatggcacaaaaatagaaaaatatacttaaaaattataaaaaaaaatgttgggctatctttggcagtgtcggcacgaaaagatacaaaaaaacggaaagcgaatcatatgatgtcacgaaatatatgcttgaaaactacggtaacaaaaaaaaatgaaaaattagttcagcagattataagctggccgcgcgaaagtcgaaattttcagagacccaaatatatgtgccattttcatcaaatttgtgggccctcggttttttttaaatttcaaaaattttcaattttagttagggtctattcccgaccctggtcatctgtggcatatcaaaatcagatgagagtgccaattaaatgaatgagtttctgtttctatgattttttaaaaatctattgtctttttctctttcctgacgagcgtatttctcgccgacattttttaaagcggagtaggacaaaacgtcgtcagccgaaacgtcgtcgaacgaatttttcgaccataacttttttctttctcaaccaaa

SEQ ID NO: 67823 - DNA, 65 bp, Heterodera glycines; identical to SEQ ID NO: 54797

SEQ ID NO: 67824 - DNA, 279 bp, Heterodera glycines
atggggaatgaaaaacaacagagtcaagaagtgaaaacagattcaaaaatggacagtgagaacgggggaagaacggacggaggaaaagcggatggaggaaaagcggatggaggaaaagcggatggaggaagaacggatggaggaagaacggaccaagttgtgtcggagccgcacagattgacacgcgtttttgagaagaaaagaccgtgaaataaacccaaaccgagaagagataatatgaaaatgcaatatgtacgccaacagaagacattgttgtaa

SEQ ID NO: 67825 - DNA, 1822 bp, Heterodera glycines
atgcccataaaacggaatttttgccttatttcacaaaagccaaatggagactggactttcaaatcggaatgccgtcggtcggacgcgtctgcccccgacggtggcacctcaaaaagtggaactgttgaacatcgaggactacaagaaggaccggacaatgtgagtttataaataaacagttgtcattgatttcatccggaattggcatgggcaagttagtaattgtacattatcctcattttaatcaaaatgcaaaactgttgggattttcagggtcgctgttaactaaggctgggaatttattatgtcgaatgctttgctgactcgaaattgttctaaaatgactaaaaaagttttctgcatttttttgaagcttctaacatgtattttattttacttttgtattttattttacttttctctttcgggataactttggagcttttgccctactggttacgaatacgaaacccatttcgattgccattaaatatttccgtgctgattgattcattagcgtcccgctgtccattttcccatagaacaactgttgacgaagagaccaaaataaaatagcagaagggggaaacagaaaacggaggtcaatcgaaaggacttcataaagattttaaagatttgacaaattagtcattcttacattaattagctcaaaaattcaagaagaaagggtattgtgtctttcgacaaatctcttctccattagcctttaaaatttcaattttccgatagttttgcgaaacgatcaatggtctctccagtcgatgattcctcgggatttcacattctcgagactgctcctttttcaataaatatttggtccttgcaggataaccgccattctctacgaggaggaccacacagttggcaatgccctcaaacacatcatttgccaaatgtgagtatatgagcgattgtgttggtcttccaaacattttttgcgaacattttgccaggcccggcgtcgagttttgcggttacaacgtgccccatccgttggaggacaaaatcctcgtccgtatccaaacggtcgaaggggtggccgcgggggatgtgctgctgcgtgggctggaagatttggcacgcatttttgacaccatcgagcgcaaattcaaagcggcacatcgtgcggcccatttcggtgtcagtgagcgcatggaggaggacagaaacgaatacgaggaagaggaggaggagatgaccatttgaacatgggcaaacgacgcaaatgccatcgagaaatattacggggagggggcgaaagtggtggcatatttaaggggggatagaacggcaaatacactctttcacaatgaccccatcaactgctctttatcgccttcggcaatttgcatgtctccaaatgtttgagttcgtctgtttccttttcccaattcgttgcttttgtctgtcgttcccccagatttccacctcggattccatttttcctttttaaagttttatgtacgttctttcttcatacacatttatttgcttgttggttttttttgtttgttttccatttcagttttatctgtcaactgattttttaaactttatatcaaatacaatcccaattttggtgtttcaaattatctttgtttacatattaattttgtacttttttgttttttgtcccattatttaattgcccctcaatttgccccattttcagtatccatttctttttctgttcaatgtcttcgtttttcatgcatcaccagcagaagcggtcgtcccaccaacaagcggccgccgtcactttggcggacattcgctggatggaaccgatggccgcgactga

SEQ ID NO: 67826 - DNA, 56 bp, Heterodera glycines; identical to SEQ ID NO: 52733

SEQ ID NO: 67827 - DNA, 168 bp, Heterodera glycines
atgcagcaaatttttgtggacaatttgcccggtttccctgacaacatccgaatttcgcgcagcgcagattcattttatgtggcgttacctttccatcgaagtgaacagaagccacacatttttgacagacttggcccatggcctttggcaaggaaattcattggcgaa

SEQ ID NO: 67828 - DNA, 424 bp, Heterodera glycines
  unsure (1)..(424): unsure at all n locations
atgtcgaaacggatggatatgcccccgctggngtcacaaacacttgcaaaggcgcgattctcatcgcaacatccgactggcaagatgtacacaaactatgaccggaaaatgggcagtgaaaatgcgtcattgaatcaggatttttttaaaacgagatacggtagtagtatagtttgtaatgttaagcttaattaattacaggatatctgattttggaaattttccaactgtttaacttttttaactttcagaaaattgaattgaccaatttagaaatagatatagtttcgaaaaaattttttcgaaatacgaaattaatatgacgcattttcagggcgcagtattaatatgtattaataggggtgggattcttctaggattcaattcaaaggatgtccttggttggatccgttctcatgaataa

SEQ ID NO: 67829 - DNA, 557 bp, Heterodera glycines
  unsure (1)..(557): unsure at all n locations
atgccaggctgcggtaacaaatattatgaccatgtgaagcattgtgccatggtatgccaatatcatataatttgtttatttatttatttttacaattttaggtcaatttctatganaatgaaccggacaaaaatcctaaagaagatcctccccaatgacgtcgtaattaatgaatatttttgtgcccaattttttgtcccattttncgcactctcgcacttttttgacggatgcatcacccgggcaagcaaaaactgtacgggaaaatgtgaaaattgattacaatgaaacctttccaattggccaaatgctattggggaaaaaggcccccaaaacacttttgaggggaccgaaatccgaaaaacccagtttaaattcccaaaaaacccaattttttccccccccccccaagggggaaaatttttcaaaaccccaaaaaaaatttttttataaaaatttttataaaaaaaaaatttttcgggtttttatttttgttgtataagggggccccttaaaaaaaacaacttttttttgggaaaaattatatttccaaaaaa

SEQ ID NO: 67830 - DNA, 63 bp, Heterodera glycines
gttccgtaagaagtgcggcctgttgtccgacttttccctctcccccacggaatgtgaacggtg

SEQ ID NO: 67831 - DNA, 63 bp, Heterodera glycines
atgagaaaaaagatgtttgatagggccagacaagagaaggcaactgttggtagcaagtttgcg

SEQ ID NO: 67832 - DNA, 63 bp, Heterodera glycines
atgaatggagggagtataaaagatgatgatgatgacgagttgacgacgaaagcgaccaaaacg

SEQ ID NO: 67833 - DNA, 1179 bp, Heterodera glycines
atggagcagcaggacggcctttggccactctcttccacggaccgatgccaaagccgagcgaattgcaatgccatcggagaaaacggcggactcgtagcattgagcggagaagagacagacgaatcgcagtgtacgacgccaaccgaaacactttcaccaattgtacgacgtaaaacgacggattcaaaagaaggcaccaaaatcagagaggaaaagagagcggtggaaggaacacatggaaatgtaaaagtgacggacggaattatgttggaaaaaaggggcacacaaagggcgacggagcggcaaaacgacgacgaaagggagacggacaacagagcaccgctggacagtccccgtagtcagaaccaacactgtacggatgtgctcatcccaacttcaaatcccattttcgccccgtgcgcccggcctttctttcacaacaaaatgccaatcttacgtccaaacaaaagaaatggaccatcactggatgagttacacttggccgatgggattggggccgaatgttttgctgatggaactcatggggaacggaggcgcacttctcggcatcaaattccatccgtttcaatggaaaaatcgaatctccccagcaacaaaaacacgtggcgcactccgtccagattgatctgcaatttcgaggaaagcattctcaacggacgcatcccagcaaatagtgttgtcagcgggtcgttgaaaaattaaatcaatgacagctgaacttcccttttagtttccgtctccaacttacggtcatcggtaacggagtgtctacggacaatcgcctttcattcccggcaagcaaacgcctgacattgccagtgcttacttacttcttcaacgatttgatgtctcaacattcgggacggtttccagtggcggttccgccttcgccgttgcatttggtgaaaaatgcctcgttggattggtccgactaaaacttttttccatttaggctcgctgcgagttggcggcggagacggtccccattccgaaacggtgcacactgcaaatagtgctcttacggtggttacttttcgtagttaccaaatgccactcatttccgtcggttcagtccgtgcggttcggtcgttaagctgttcatggtcgcggtgaatgtgctcgacatgccttccaattcgaggacggtgagcaaaatga

SEQ ID NO: 67834 - DNA, 296 bp, Heterodera glycines
atcatcgacaccaccgccaccaacaccaacgccaccactagcaccgaccccaccgccaccaacaccaccagcagcagcaccgctaccaccagcaccaccagcagcagcaccactaccaccagcaccaccagcaccagcaccaccaccagcaacaccacatgcaccatcagcatcaccagcaccaccaacaccagcagcaccatcaacaccaccaccaacaccagcaccaccaccaacaccagcagcagaaggcgaagaagcattggaaaatgcaacagacgaaggagcatcgacta

SEQ ID NO: 67835 - DNA, 561 bp, Heterodera glycines
  unsure (1)..(561): unsure at all n locations
atgccnaattcacaatttcattattattattttacatggatgccacctcatgggtgggttgtgtggggttgttcatgttgaatgtgcatgaatgaatgtgtgggatggcatattttatgtgtaagtgggcaaaatcagtggcacgggcaaaagctgcacataaaaaaaagaagcgccagcgcaatgaatgcggcgcagcgcagcgcaatgccatttttattttagcaaatgctaacaaaatgattaatttttaatgaataaaattgttgaggaaaagcattcattcatttccttctatcatcttcttatcctcaattcgatggaaaatttcgtaacatcaaaatgatttttaataatttttttgaattttaatcttttcaattcttctttacgttattttaaataagaatttatatacaattcattgaaatgctttttagtaattaagtggaataattaattaattgaagatttgatatgtttatttgagcgataagattaatcaaatattaattaattgaaaataatttcttttaattttagataagagtttaaaataaa

SEQ ID NO: 67836 - DNA, 71 bp, Heterodera glycines
aatcgaacgctaacggacgacctaatggaaaaaaatccccgaaggagagaatttaattaaatccattcctt

SEQ ID NO: 67837 - DNA, 89 bp, Heterodera glycines
cggacgaagcagcaaatttggaccgagcggaaaaattgctgacccggagggggaatgctaagaacttcaacagaatgggcgagaatgtg

SEQ ID NO: 67838 - DNA, 2246 bp, Heterodera glycines
atgatgatgaaagaagaagaagatgaagaagttgaaagagcaagaaatgagaacagagagccagccgagatcaagcttttgtttgagaccggaaggcaattggacagacgcttggggtacaatgtacctcgagcgaatgaagttgctgcagtttatgtacctggggctgacggtgaagtacctaatgccaagattgtggtgagagaacgtggaaaggaattgaagattttgaagagtacagattcaatggtgactccaatgacttacccactgttttatccgcgtggtacgcttggttggcaccctgaaatgaagcatagaaatagtaatagaagagtaacgagattacaatatgtttcctatacagtcgcaattagagaaagagagtttaacccaattttgtacggtggaaagctctttcaacagtattgtgttgatgaatatgttaagattgaaggagacagaatgaattggataaagtgtaatcagaaaaagattttggctgatgcatataagaatgttgataatatgttaatgagaagagcagaagaaagaggtttgccactgggtaggaaggtcattcttcctccgagtatgacaaacagtccgagatatgttgagaagcattttcaagatgcgatggctgttgttagacggtttggtaaaccagatatgtttttgactatgacatgtaacccgcaatgggaagagatttcagagaatttgtttcatgaacaaaagtcaagtgatagaccagatttggttgtcagagtttttaatttaaaagttaaagctattatgaatgagatagtcaagaaaaaggtttttggagaagtgattgcatggatgtatccggtagagaaccaaggacggggactaccgcacatccatttgcttttgacattggcggagcaagacaaattgattaatggtgaagatgttgaaaagaaaggaattagtgcgagaataccggacaaggaattagaagcagaactgtttgatttggtgaaaaggtttatgatccatggcccatgtggtaatttgaacccaaattgcccatgcatggaagagtttgttgacaaaaatggtatgaaaggaaggaaatgctctaagggataccctaaagcatttcaagaagagacagttgttcttgaaaatggattggctttgtatgcaagaccaaatgatggaagaacagttcaaatatttgcaaatggaagaagacatgaattagacaacagatgggttgtcccgcacaacctgtacctgttgaaaatgttcaagtgccacattaatcttgaaaaggttaatagtgttagttcagtaaagtatttgcataagtatgtgcataagccaccagacagggcaagactggaactagaagagagaaatgatcatgatgaagttaaagagttcattgatgcgcggtatgtttgcccgcaagaagcagtgtggagaatttttgaattgcctatgtatgatagaagccattgtataatgtccttgcctgtacacctacaaggtgaacatatttgttattttgacgagaatatggaagaagaagagattcgtgaaagaattgcgaatggttctgagttgatggcatattttgaattgaataagacaaatgttttggcaaaaactatgttttatcaccagatacctgaaaagttttgttttaagaaaggaaaatggacagagagaaagacatattttaacacaattggccgaatggtgaaggtgtcaccggctgagccggaacgataccacctgaggctgttgttgttaaatgtgaagggagcatgctcctatgatgatttgaaatcagtttttgatactaatggcaatgcaaaagtttgtgaaactttttcagccgcatgtttagaaagaggtttgattagaaatgatgaagagtggaaaagagcattagaagaagcagagagttttgagatgccatggaaattgagagcgttttttgcattgattttagtccattgcaatccggccaaaccggaagagctttggaatatgtttaaagactcattgtctgaagattttagaaggaattttagaaaagaagtagcttatgctaaagcttatagagaaattgcacttagcattattaaggctggaaaaacgcttgccgattttccaaccatggaacagataaatgttgatgatgatgttgaacaaatgtttgacctagccgaagaattggatttgggacaaagaaatttatgcttgat

SEQ ID NO: 67839 - DNA, 1653 bp, Heterodera glycines
atgccatggaaattgcgagagttttttgcattgattttagtccattgcaacccggccaaaccggaggagctttggaatatgtttaaagactctttgtctgaagatttttgtaggagttttagaaaagaattggcttatgctaaagcatataaagagattgcacttagcattatgaaggctggaaaaacgcttgccgattttccaaccatggaacagataaatgttgatgatgatgttgagcaagtatttgatttagccgaagaattggatttgggacagagaaattatgctttgatgtatgatgaacagaggaaaattagtgatgaaattttgcatagaatatggaattctgtaaatgaacctgcgttctactttcttagtggaccgggtggaacaggaaaaacacatgtgaataagacaattgtacatatgctgagaggtcagaagaagaaagtttgtacaatggcttttactggcatcgcagcaactttgctgcctgctgggagaacattgcacaatagatttggactgactttggatatgagtaattcgagtattagtccgagatcaagagtttggcaagaattgaaggaaacagatttgtttatttgtgatgaggcgcctatgataaataagcgcgcaatgagaactttggatgagaaattgaaagagataatgaataatggaattgcatttggtggcaaggttttgctctggacgggagactttcgtcaaacccttccgattcagaaacatgccacgagagctgagatggttagttcaaccataaagagaagcgagtactggaggttggctaaaagatataaattgacgaagaatatgagagctcttgcaacagagcaagaatttacgagagatttgttagagattggcagtggaaaatggaataatgaaaacgatgagataattttgcccgacaattgtattagcaatggtgatttagcagaagagatttttggtcaatgcattgtcttagaaaattggaatgaaatggccaaaagtgccattttagcaccgaagaatgttgatgttagtgaaatgaataataaagttttagaaatgttgtctggagaagaagttgtgtataccagtatagacttagctcaagatgagaatagacaaagagccgatgattatttggatgagtatttgaatgctttaaacccttcagggtttccgcggcataagttgagactgaagaaaaatgcaattgttttgttaatgcgtaatttgaatatagaaatgggcctttgtaatggtgcgagaatgaaagttgagcaaatgcaaccgaatttgattgtgtgtaagattttgactggagacaaggcaggtcagactgtgtacattcctcggatcacgctttgctgttctgaagattacccttttgacctgcataggcaccaattcccgttggtgttggcttttgcaatgacaattaacaaagcccaaggtcaaacccttgagcaagttggaattgatctgaggaaagatgtgtttagccatggacaattgtatgtggctctttcgagagcaagagcttggaataagttgagaattagattagatgatggcaacttagagagaaaggtgaagaatgtcgtgtacagagagttattagataacagtgattag

SEQ ID NO: 67840 - DNA, 795 bp, Heterodera glycines
atgcaacaagaactcatcaatcaggccaccgctgcaattgcgctttgtcataaaaagttcaggttcagtgggactcttcaagaggtttgtgtagatggtacgacatgtttcatctaattcaaacatcgacaatttagctcagcgcacagcgacttcttttggtttctcaggagcgccttgcgttgctcaaccgtcaaatggaccaattgaacgaacagcgaattttgaccaatttgtccgtccagcagttggacgatattccggaaagtgtggacttcgacaatgaggacgaactggagagtgtcactcctttggcgcgctgcactctctacattgacaagatagtgatcttttgactaattttcgaatcccggacgcgaattcgagcaaaaaactcgaaaactcaaaattcacttttatgttcatagctgtacaaaaatttgggtccgggattcgaaattaggtagtcaaaattgaatgtcggattcgggttacccgacacataaaacccccatgaacatgttttcacgactttatagaacaaaaaaatttttcctcaaaaaagggggcctaccatctatagtattaccgcaaaaattgtctttttttggtgaaaatctgttaacaaatcaacgaaatacaaaaaattttccggcgacgcctatcggcaccgccggacccccttcccccgcccgttcacctaaagttttttgaaaaaatgcgccgcaaaaaattgttaaaaatctgattttttgatactgacaaatcagtgcacagctattcattgtttctgga

SEQ ID NO: 67841 - DNA, 2757 bp, Heterodera glycines; identical to SEQ ID NO: 1106

SEQ ID NO: 67842 - DNA, 234 bp, Heterodera glycines
ggtgcaccaatatttgagtaaattgcgccaaaaatgctagtgctcgcctaattctaagcctctgccacgcgttcagcatcaaataagcatcatcgacaccgagcgcaagcaccaaaaagggcgtaacacaaagcagtgacccttttaattgggaaaatttaaaaaaaacgacaaaattaaaattaccgaaacgaaagccgagccaaaacattcagccaagggctgtgcctgttg

SEQ ID NO: 67843 - DNA, 387 bp, Heterodera glycines
gaacgggccaactccgtctggccaactccgtctgagccaactttgagttaatataactcttgaagttattgaccgaatcaaacaatcttgatatcattcgaaagctcttcacaggctctattagcctactaaaaagtacagaaaatttcgaactataaaaaaagatagaaataaaaaacttcgaaaattctgccttttttgcggttttaaactgacaacttttttgagagctgattaatcactgagaaatagcttataaatatcttctaaacatctagggctttcgaatgataccatgattgtgaagtttggccaacaaagaaaaaagttatagttttttgaacattgctgagacggagttggccagacggagttgacccctaccgt

SEQ ID NO: 67844 - DNA, 286 bp, Heterodera glycines
atgattgctcaatctgtgccgaacattggccattattatgatgaagaggaagtgatggaagacgaggaggaatattcatacgaagagattgacgaagaggaggaggaagaagaagaggaagtggagaaggaagagaagcgaacagtcgccgcaagggcactgccagcggcgcaattggcggagggcggcggacagaaccgcactgcccagggcaatgatcaactttgccatttggcggatgagtgccgcaggcaatttctgaatatattttaaggggcaattccca

SEQ ID NO: 67845 - DNA, 903 bp, Heterodera glycines
  unsure (1)..(903): unsure at all n locations
atgttaatgattcccgaggcggaatattgngctctacggagtgcgatgaatagtggtgattatctccaaaatgaaaaagcgagtttagacgcaaaaatttctcagaatttacaagaccccgacataagcgaggacctcaaggcgaagagacatgattggctctataaagaaaggcgtacggtaaaggggatacttgaaaatagaccacagaaggtagtgattgagaatcatgtaccaggtccaaatgttgcaccatatctgggcctcaataaccaatccaaaccacaggagaccgaagaaccacggaaaataattattcctaggaaaagacttaaagagcaaactcctgatcctgaatcagataatgatacacttgaggagttaactccggagccccaaacaacatccacactcaaaacacccgttccgatcaaaactattatacacccgacccttttaaacggtctttttaggtacgtgaaggaaaacaaagatttatttaaaattacggcggccggaaaggtacagtcgaacatgaatttgccgattgaaaacagtaattatagagatgttttgttgtatctcgcagggaagaaagatgaaacgccgcgcggtgcaaaatttctcaaagatcggttactgaaggatccaacagtaaaagacatggttgataaatcaaaggtcatgtggggacgtggaaggaaaaaggcaataaaatctataaaaacacccggcatagtgcgagagaagaaacccttcaaaccactaatatgggcaagactgtagagaaaattttatcgaaaatttattttaatttaaaatctccggcaagttttgctggaattcaaaaaattttaaatgaggccaaaaagattgacccgaaaattacgaccgatgacgtta

SEQ ID NO: 67846 - DNA, 707 bp, Heterodera glycines
atgggcgaggatgtggagcggcttgacatggtccaactgttcaacacaatgcgccaggagcagcggttggcccaagcgtttgcccaaatgggcctaagggtttggaatatttttttcaaaaaaatcccaatttttggcatttttccagcgcgactaccagcccattctgcacctgatggacttgtcggaggagaaaccgggcgcatacgcactggactatcgcgaggcgaacccggaatggctgaacaatctggacaaggacaaggtggacgaagggattggaacgggttcggaattggaaaaaaaatttcagaatgggggaaaacccatttttcgggtctcatttttttattctcattccgttgattgccataaataggaactgcccaggcccatatccagaaaaaaatttcggggagggcacccgaagagctttttttttttgctcttcgggccaacaaaaattttttgcaccagtgttatgttgaaattcttcagcgccggcgccaaaaaacaggaattattatcggttttgcgccgaaaaatcacaaattttccattttgggctcaaattttcaaaaaattatgatccaattggggccccggcggtgccgataggcgccgccgggaagaatttttggaaaattaaatgcaatatgataagaaaatgtgtaaaattttcagaaattttgcccttttttgcttga

SEQ ID NO: 67847 - DNA, 996 bp, Heterodera glycines
atggaaaatgaaaatgaaaagagcaaaatggtagcaacaaataaagaatttatagcagtgatagaaaaaataaaaagcaaaaaaacaattacagcgaaagataaaaaagctctgcaaaatttgtgtatattcaacaaattgtacataaagcataatggaacaattgaaggaattgcaacgaatttggagcaaaagatcagcgaacaaaagaagaagcagcctaagctaatggaaaaaatagaaaaaaagttacatcttaaaacaaaggaagaaaaacagttggaacaagtgaaaaacatccagcaaaaattgaagggcattgtggacaaaattcatggaattgaaaaaagttcaggaacggatttgtgggatattgcgaaagaattttgtgctgaggaagaaagtggaaaagaaaaaaaggtggatgaacaaaataaagaaataattgagacaaatgcatcatcatcatcatcattatcggagccgaagcaaaaaaagagcaaaacgaaaaaagaggggacggcggacggaggaaaaaagagaacacatttattgggtaaaattgaccaaatactacatcatgaagaaacggatgaagaaaagctgttaaatgaaataaatcaaattgtaacagacaattttatgaacgaatttgagaaagcaaaaaaggcgtatcagaatgaagcggatattaaagaagccgaggaaaaattggagcagataaagaaaatccttaaaattttgaacaatgaattatttacactaaataaaaaagaaagccaaattagcacagaattagaaagcattgaaacagaaatggaaaaagtgggaaagaaaattgcagatttggacaacgaaatcacaacgaacacagaaaaagcaaaaagacaggcgaaaatcatttgggaagagctcaaaaaaatgaaagagcatttcgccaagaaattggaggcaaacaattcaaatgttggagaaggcgccaaagaaaccgcttga

SEQ ID NO: 67848 - DNA, 635 bp, Heterodera glycines
  unsure (1)..(635): unsure at all n locations
atgaaggcacagtcggagttgcgcagaatcacttcttccgcctcattgcattggcccatcggttgcctnaataattccgagagtcagtcgattaattttcctatcgaactgaacaacggctgccccttttagatgttctccatattctttattctttatcccattttcttcccacgaaaaagtgattcttgaaaatccatggacactgctgcttaagacccctcccattagcaatgcccccaagggtttttcggattaatcatagaaatcaacccttaataaaacataaaattcatacttttagtgcaatgtttctcgcattgcgattttgcagtgcgaattgtgaataacccaaaaagtaacagcgaaaatgaaacgacggacgaattcatccgctgaattttaaaacaaaattatgggaaaatgaattatagttttacaaataatggaaatacctaacattcaagaataagtgtttggttatatcgattttggccttttataagaaaatttttgagggaaaagccacgtcaaaatgccctttctcttgacgtggtgccaaccgcagaaagagggcccctcacaccaaaggagaagctaatacattatggaaaagcaatgaatagtgaaataaa

SEQ ID NO: 67849 - DNA, 392 bp, Heterodera glycines
  unsure (1)..(392): unsure at all n locations
atgaattcgtccgtcgtttcattttcgctgttactttttgggttattcacaattcgcactgcaaaatcgcaatgcgagaaacattgcactaaaagtatgaattttatgttttattaagggttgatttctatgattaatccgaaaaacccttgggggcattgctaatgggaggggtcttaagcagcagtgtccatggattttcaagaatcactttttcgtgggaagaaaatgggataaagaataaagaatatggagaacatctaaaaggggcagccgttgttcagttcgataggaaaattaatcgactgactctcggaattattnaggcaaccgatgggccaatgcaatgaggcggaagaagtgattctgcgcaactccgactgtgccttcat

SEQ ID NO: 67850 - DNA, 678 bp, Heterodera glycines
atggctaccatgggtaggatggtggtagcatttctaaccaccaactcccgtcaaatgaccatgaactacgttcttattgacagggtaaaaaagagggtcatggtcatggttaaatgaccaccaacttcgtggttgtttgaccaaagttcgtggtagctcttgttgaccgaggtttaccaccaacttcatggttttttaaccattaccaccttcttattgaccgggccccgttctctagttttttccacataaaattgttccatattttgacggttgaacattttgaaaatttatcattaaaaaaatattttttttcttaaattagaatttttacaggcaaaaattgattgagtcatttcaaaaataattccatttccaccgtaaccccaattaaaattggtcacctaccgtttccgctctgttcgaatgcttcgatattttcatcattcagcgattcttccgtcctttccattcgttgcaattttgcgattctcgcctttagaaatcgtaattcgtcggttatttttcgtttagccatttataaatcttaatttgtaaccaatcttaaaaatggagggaaagtaaagttaaattagcatattacaaatagaccaatttattctctaaatgagtttactttaaatactgttaaaatttattgaacaaaaaatatagaga

SEQ ID NO: 67851 - DNA, 525 bp, Heterodera glycines
atgcatttaatttggttttgcatttttgccaattgcttcttacatcgaaacggtcacgaaacattcgccatggccacgctgatcgataattggacgaactgtagtgataaaaagcccaatttggagtgtgcattcccaaggcatcagccaaattggccggtggttcaatcgatagatgacgagttaatggcttaatgtaattaataaccattaattaatggcttaatctaattactgggtaattaatcccaaatccatagataaatctttaattaaaaaaaggaaagcttcacattattaattttcaattattaaggaatttaaaaacattttaatgtttaatttgtagaagcccgtctttaaaaaaagtctcgaggtcggaaataaccctaaaaataaccaaaaagttcggtgtcgggatttcaaacattgctgaaaacaatccttacattatacttgtagttatgttgacagactcaacattcgaaactctaatgaagaggtaaaatatcataatgaaataaa

SEQ ID NO: 67852 - DNA, 221 bp, Heterodera glycines
atgtacaataagcacttctctgtgcagcccatctacagaaatgtgccattgaatgtgccatcgcacagaacgtaaaaaatatttttttaaaatgaataaatttcttatttagcaatttttccaaccaccaaagagctgggtattggtcatttgactacgattatatgtaaattatatgtataatgaaaaagtgtttagttaattaattaatggaaccacca

SEQ ID NO: 67853 - DNA, 287 bp, Heterodera glycines
atggcacaaccatctgaagaagagccgtcgacatcagaagcaccggcgcgggacaacgacggacaaccatcatcaactccaacaccggtgacaccgctggaaatggacgtgccgtcggtggagatggtggacaccgatgtgcaaatccctttcacgcctgccgacgaagaccaacaaattcaccaatgccgtcacatccacggcacgctgtgacctcatgtcgacaccatcgacttcaaaggggcccgtggctttggtctcgatgggggaaaaaaattcaaccaaaa

SEQ ID NO: 67854 - DNA, 437 bp, Heterodera glycines
aaaatggtcaagtaaaaatcgtaattacgctcaaaaagcttctcaaacaattttaacgcttccaattccttctacaatcgcctttatacatcccattatgagcgctaaaattatcagagtgccgaaaatcgcatgtgatctaagcctagaaaaaaatggtctaagtaaaaatcgtaattacgctcaaaaagcttctcaaacaattttagcgcttccaattccttctacaatcgcctttatacatcccattatgagcgctaaaattatcagagtgccgaaaatcgcatgtgatctaagcctagaaaaaatggtgtaagtaaaaatcgtaattacgctcaaaaagcttctcaaacaattttagcgcttccaattccttctacaatcgcctttatacatcccattatgagcgctaaaattatcagagtgccgaaaatcgc

SEQ ID NO: 67855 - DNA, 938 bp, Heterodera glycines
atgaagcgaaccaacgcatcaaacatcactccacctcgcgccaaacgtgcaatgccacctgcactggacctggaccaaaacactgccacactcgaagagcaagaacgccaacgcaccctggtcttcattggcctcccggaaagcaatgccatccgcccatcggagcgtgttcaggaagacagggaagccatcacaaaaatcctggaccatcttgaagttgaggcccaaccaacggccgtctttcgactcggacgatacgacccgcagcgaacaacaccacgcccgctcaaggtggtcatgccaacacccacacaccaacatgtggtactcggaggatggaagcgcgagcgtgctcggctccgttcccaacagaacctgaaccgtctgttcgtccgtccggcgctgtccaaagaacaactcaaagaggaatacgaagcgcgtctccgaaaacgtcaacaaaacccagctccaccggcacctccaacccagctcccaaaaacgacaaatgaccagacacccgatgttgctaaaggaccaaaccagaacgaggccagtgaagacgtttccaaaccaccggatgtttttgaccaaaaaatcctcgcatgttatgcagcattaatatcattgccacccaccgacaaaattgttcaccaaattcaatcgctcaaaaaacaataccctcatctttttaataaatagttctgtcagacctccaaaatatttcctctaaacaaaaaaaaaaacattttcttccagtacttccaatttctcaacaaaattttttcctcaaaaaaaatttttttttctcgctggaggtctgactatatgcttctagaaattcaattgtcttttttcatctattcatttacctttcctcattttcatcaaaagtgtaagtggcatatgcccttcttttggttattttatttttgaataaa

SEQ ID NO: 67856 - DNA, 579 bp, Heterodera glycines
atgaagcgaaccaacgcatcaaacatcactccacctcgcgccaaacgtgcaatgccacctgcactggacctggaccaaaacactgccacactcgaagagcaagaacgccaacgcaccctggtcttcattggcctcccggaaagcaatgccatccgcccatcggagcgtgttcaggaagacagggaagccatcacaaaaatcctggaccatcttgaagttgaggcccaaccaacggccgtctttcgactcggacgatacgacccgcagcgaacaacaccacgcccgctcaaggtggtcatgccaacacccacacaccaacatgtggtactcggaggatggaagcgcgagcgtgctcggctccgttcccaacagaacctgaaccgtctgttcgtccgtccggcgctgtccaaagaacaactcaaagaggaatacgaagcgcgtctccgaaaacgtcaacaaaacccagctccaccggcacctccaacccagctcccaaaaacgacaaatgaccagacacccgatgttgctaaaggaccaaaccagaacgaggccagtgaagacgtttccaaaccaccggat

SEQ ID NO: 67857 - DNA, 306 bp, Heterodera glycines
atgtccaaatcagtgattgatgggataaagttgatactgagcacagctgagcattcggatgtccactttttggtggacaaaatcttctaccaaatttcataaaaacaaaaaatatttctcttctcaattagttttttgaatcaagccttaaatcagcaataagttacatctttttatattcttcataaatttatttagcaaatgaacataaattttcagagttttcccggagcgcctattggccctccggacgcttgctttgtaaattggtttttgacgagaattcgttctttctcagatttttaa

SEQ ID NO: 67858 - DNA, 1101 bp, Heterodera glycines
  unsure (1)..(1101): unsure at all n locations
atgccatggaaaattgtggcactaataaataagaaagatgaaagcactgacaatgagaaatggttgggctttttccttttgtgcgatgcttctgaagaaggtttgcttatcaaattatataatagaaatgtaattattttgtcataaaattggtgtaattaattattgaaaagacttaaacagtaattttttaacataaaattagaagtgattttttaaaggaaatgcgtgaaaatataaatttgattattatttaatttgctttaagatggaaattggagccgcaaatgttcggcaacacttcgaattgtctctcaaaagaacggtgtggatgattttaagaacgaattccctgtaaaaagaatttttaacaatgcaacgctgatttggggttggcactatttcatttcatttgtggtgagtggaaattaattagttaatttacattttaatattgtaatggtaaattaaggaattaatggacccaagcaaagggttgtacaacaaagacgaggacaacgtcaccttggccattgattttacatgtgaatagcgtaaacatttcgagaaggattgaaaagggaaaggaaggaaatcagcaggatgagaagagagtcttggagggcacaaaattttcttggtgcttaaattttatatttttttatgttttgtaaagtgttttggtttcataaagcaacatattacaatgatagggatggatttttatgtgctaaaaatcgagaaatatatatacctaaagagttgataaaaaggcagaaaaatttgctaaaatgcagaaaaatgccaaaatagttgccaaaaaattggaaaaaatgtcaataaatatgtgagttttccagaattgcccggattcatgatcagctaccctgaaaaccattcgaaatacgctttcatgattttggtaagaataatttttttgaaaatatgttcggatgcggggttcggaattggcagaaaaagaaagcctaattcttattcagaactctaaaacgcgccttgaaacgttttaaaaatttcgagaccagtaaaacacattactatcgtttaattttagctggcaaagaaaaattcnaaaataaa

SEQ ID NO: 67859 - DNA, 694 bp, Heterodera glycines
gaggagccaaccactttcatcagcatccgttccgttctcataaatggtccgtccgtcgtcccgttgccttttttatcctcccttttccatttgtgcctttgctcaggccaacgcttcttccaaccgctcagtgtccccgccgctctctgtccgtccgcgtcggcgccgccggtcgacccaatgggccctttgttggcactttcggctgccgacaatggccaaagccatccgaagcagcaaaaggtcagtggccatctcgcccattgcttttaaatgctaatttctcagcaggatgctccgctcgctcctcgcgtccctttcatttaccagcaatctctcgccgccgccgccaccgccgccgacggggaggacaatccgccgtggcttcgtggaaatccccagccgaagaacggactgcgcggttctaacgcgtggcaagaagcatttgaagggggaaaggcgaaggttgcaatcaaccaaaaaaaaaattcagtttccccttcccttttattgtttaggccaattttggagcgtcttttggaagtgaattgggagaggcgtggattgaggcgaacaaagcgacggcaaaagaaaggcatcggatggaattgatggcacaaattgaggagaatcgacaaaggaaaatgagagagagacagcgtgattgggagagagaggagaaagagcgcataaa

SEQ ID NO: 67860 - DNA, 273 bp, Heterodera glycines
ccccccaccaccgccgtatgacgccggcgccagtagtccatttgaacaaccacaccaacagcatcagtcaccatcgccctacggaatgatgtacagcggtggcaatgtgccgtcgccaccaccgccgtcctctccttaccaccaataccaacagcaggcgccgccgcaaatgtccccgccgttccaaccaccaattggggacccacaacagcaggttgggggcatgccaagccaagccaaccaagagaaaatcgatgcaaatgatgggattgg

SEQ ID NO: 67861 - DNA, 841 bp, Heterodera glycines
  unsure (1)..(841): unsure at all n locations
atgttantgcagcagggactcatgcaaatgctcatgaaaacagacttggancctatgaatgttagatgtgaattttgtgatgctttgcattttgttgaaaagaaaatgagtggccgaggtaattccttcaaggattgttgccactatggaaaagtttttgttcccgagattcctaagcaggattttcctgaggaattgaaggatttgtttattaaattttatgcgagacacgtgaatttttttgagaatattagacatttgaatagtagtgtgtcgtttgcttcaatgaatccggtgagatatagatcagggatgggccgaggtttcgcttttcgcatttcgcctttcgcattattcgcattttttggcgtttcgcatttcgctttttggcgcgaaaagcgacttttacacccctaagaattggattaaattcccataaaatttttcaaaattttacctataaattggctaattttcagtgaaaaactgtttataaatgatcaaaatttccaattatttccccggcggcgcctatcggcaccgccgcgcccacaaaactcctattttttcttagaaaatggcccaaaatcgcaaaatttggtaatttgatgaaaaactgttctcagcggcgcgccaaaactcttatttctcattagaaaaatgataaaaatcacaaaatttgatcattttttagtgaaaatctgtcaacaaattttaatcaaattttcaaaaattttcccggcggcgcctgccggcgccgcctgccccctcttcccaaaaagttttttggaaaaagcgcgcctcaaaaaagcgttttattgatttttaaattttgaataaa

SEQ ID NO: 67862 - DNA, 272 bp, Heterodera glycines
attttctaagaaaaaataggagttttgtgggcgcggcggtgccgataggcgccgccggggaaataattggaaattttgatcatttataaacagtttttcactgaaaattagccaatttataggtaaaattttgaaaaattttatgggaatttaatccaattcttaggggtgtaaaagtcgcttttcgcgccaaaaagcgaaatgcgaaacgccaaaaaatgcgaataatgcgaaaggcgaaatgcgaaaagcgaaacctcggcccatccctg

SEQ ID NO: 67863 - DNA, 1772 bp, Heterodera glycines
atggtttcattttttagaaaatttatcccaaactttgcacaaatagcatacccattaaacaaattaacccgaggaggagcaattgaatttgaatggggagagaacgaggaaaaagcaatgaatttgttaaaaaatcacttacttaagtcgccgagtcttcgggcgccaaattatgcactaccgttttacttattcacggatgcatcagctttggcttatggtggagcattaatgcaagccggaaatggagaaatgtttgcaatcgggtattggtctcgaaccttaactgacgtggaaagtcgtctcccccccacccatggtgagctagcagcaatagttcatgccgtgcataatttccgaccaattgtttatggaacagagcttgtaattctaacggatcatcgccctcttacttttcttttcaataaagcaagttcaaacccaaaattgaaccgttggcttatggccatacaagagtttgaaccgaaagtaatttatctcgagggacgagccaataaagttgctgatgcattgtcccgtgtccccattgcatggaatagtattgaggcacaatttaaggacgaaatacctcatttgctagcgatcgaagaagcaattgatagggaaaaattggaaagggagacgaaaagtgatcatttattatcaagagtgatcacaaaaataagggagaattggatagacccgattgaggaagaattattaccatattaccaatctcgagacagtctgtatatggaaggagggttaattaggaagcgaccaaacggattaattgttgtgccaaagacaatgcaaattcaaattttggaagttattcacaaagcacattttggtattgttcggagtaaggccaaagcgcggaagcatgtttggtggccaaaaattacggaagatatagaaaattttgttaaagaatgtgtaatttgtcaacggaatgcagcctctccaccaagaattgaccctgagcatcgttggcccgaatcgagatttccctttgaaagggtgcatgcagatttagcaggacctatttggggcgcgtattttttggtgatagttgacgcttattcaaaatttccttttgtgcatcaattaaattcaacaaattctttctccataataagtgttttctgcgaaatatttggcatctttgggtcaccccgtctttggtgacggataatggccctcaatttgtgtcagcagaaatggaagaatttttgtttgctgaaggggtaatacacaaaacatcggccccttaccaccctgccagtaatggggaggcggaaagatttgtgagaactgtgaaggatggactcaaaaagttgctggaggcgggaaataacctcaaaagggcccaatttatatttctacaggaataccgctcatccccgtgtcctacattagatgggaattgcccggcacaattgtttttaaaaagggaaatgcgcaccggcatggaccgaataaaaatgccgaaaatgaaagacactaatggggcagaccctcaagtgggggatgaaatgaggaatgttcaaaggaaaggcgcggagagtcgccacaattcaaagcgtaactttgagccaggggatgcggtgtgggcccaacaggcgggtgagaaaaacagatggggccctggagtactgcttgagccaataggcgaacggatgtggagaatggaattggaaggaggcggagagaagactgtgcatgtggaccagataaaagagcgaagaattgcgtccgctcgtcattga

SEQ ID NO: 67864 - DNA, 1033 bp, Heterodera glycines
atgtgccaaagcaatggtactacggttccgttggttcgctttataaaagaaaatataaaccagcaagaaattaagaaatttgtcaatgtatttattttttaaataatgggataaacgaaaagaaaatagaaatgaatttaaagaatgaataattacaataaaattctatacattgatcaaagattatatattattataacaaacattgaacaaagcattattaagaggaacaaaatacaaaataatatagcatcagcaaaataattatgaatttttaaaaaaatttaaatactataaataaacctaaaaagaatttattgctagcaacataatcagtatgcatcatgagtcactcagcacaaaacccaacttttaacccggacccgttatccgggcccagttttttgaaaatccattatcctttacccgacccggtaggtccgggtacccggataccaaaaataccctggtaataatggggcctgggtcaaattgttgatcaaagttgacggaaatttttttaaatataattaaatttaaaaacgaatgtttcggtgttcatgtggcttagtggttaatcttttggattcgatgcattcgttctcaggttcaatcctccttcctcattgctaactattttgtactttttaaatattttattgaaaactgttattatcatttacataaggaaagctccaaataactatccttattttaatagaattttataaaaatcttaaattttacaatatccccataagaaatttagaacaaattaaaaaacattctatttttcatgccttttcaaaagtataagcttttattctcttgaaaaaaaatttgaaaaaatggattttttaatacccggtttttccgggtacccgacccggtacccggtttcaaaactggtacccgacccggtacccggcatttcaatactcggtaatacccgggcccggtttttcccaaatacccggtaccgtgcaaccctaatttggaacaagagttttacttaattgaaatttccatttta

SEQ ID NO: 67865 - DNA, 846 bp, Heterodera glycines
atggtggccgaaatctacgcaataaccggcaacctcaggccaaatgaagaaattttgactgaatacactggcggacagaggagtcatgtttttgccagaaatgatgacatggagcagtttttccaagccttggacgaagtccgattcaaaaaaatcaaaaaataaaaatcctaaaatttccattttttcagaaaattaacccttgtgaaagctctaaggctgaacttttgaaaaagaatttgccatctccagcggcaaaacttcgtgatgacaaaaatcggactggcgttgaagtttgtttcaataataatttttctaaattcatttttttataaatatttttaattttttggttttttcagcttttgatactgccccaaaatgacagtaattcaccaaaaaattttgtaaaaaacagccaaaagacagagcaacaacaacaattagtcaacaaccgtgaacagttgccatttttaccaaagaatttgaagttggaatgcaacaacgttggaaaggtgacaaaaatttagattatgtcatgaaaaaaaaaacaaattttccgagaaaatttttattatttgggttttcttcactatgattcattatttttgttaaaaattttaagaaattaaatctgatttttataccaaaagaagcggttttgaagttgtttcggaaaatttaattttcctgaccaatcattgatgattgataattcaaaaatttaattattattttttaggttgacctgatgcttgtgttagacaccagtggctccatttaccattcattcccacagcaacgtcaaataggtgaatttaataagaatttttttatcgaaattaa

SEQ ID NO: 67866 - DNA, 699 bp, Heterodera glycines
atgccgttgtcgttgttggttgaagagcaagctcatgtgtcagcagcagctgaggctgctgccgaggcagcgagtgctgttgaccaaaagatgtcggcagcgccaaatgacactcccgccatcactgacacgaaaattgattttatgactgatgaacaaacagtggcggcagcgccgccgcctctattcagtgagattgaaccgacgcagcagcagcagcagaaacaacaacaggtttgctctaaattggtgtcggttatttaattttttatcaagaagattcaggggcgtacagcggaaatcatcgcaccgaaagtggagctgtccgccgaggacaatggtgatgatgatgatgatgatgatgatgatgatgatgatgagactggacaacaggtcaaacaggaggcggacaggaacggcatggatgcacatcattcaaattgtgcaaaagggccccttttgttcattgatgaacaggagaatgaggaggaggagagtgaggaagatgaggacatttcaacaacgcatcgaaggcaaggcatggactcatcatttgactacgaagacgacgacgatgatgatgacaatgacgatgatgatgatgatgacgatgaaatggaatcagtcagcggatgtgcggaatcggacaaatgtggtcactgtcaccacccgcatcagctaccacgaaatgctttggag

SEQ ID NO: 67867 - DNA, 650 bp, Heterodera glycines
atggcaaaagaaactgatgattggacaataaaagccgattggactcataaagtgcattagagccgcaaaattttaaatttaatctacttacaaagaatttatttgaaaaaacaaattaataataaataattatttttaagttcgaagatggcttggcagtcaatgataaatgggcaatgagcaatttattgggcatggcatctcaactaaattttacattccaattgggaccacttggtggaaaacgtggctacatggttcaactcttcatattggagacaacaatggtgttcggaatggtcaacaacagataaataattcagtgatcaacggatcccgtcgagttgggcgccgacacgtttgggcgccagcaccttttcagctataacttttttctttgtcgaccaaattaaacattgttggtatcattcaaaagccctaagtgtcctctattagtctgcaaaattttgaaaaatttcattaaggttcaaaaagttatggccagaagaattcaaaaaaccagattttccaacctttttggtcaaaaatgtgttcaaaattgacgaaatttttaaacttttgcaggctaatagagcatattaagagatttctcatgttaccaacaatgttttatttggttgagcaataaa

SEQ ID NO: 67868 - DNA, 1851 bp, Heterodera glycines
atgcaaagttggaaagcgctcaaacatcggacggcaaatatgtaaattaaattggcaaaaaaagtttagttaatctccttaattttagggatgttttggtcgttttggccacttcgattgcttatgcttattccgtctccgttttgattcttgcctttctgttgcaatggtcgtccagtccaatgactttctttgatgttcccccaatgctttttgtatttatttccttgggccgatggttagaaaacaaagcaaaagtgagtctctctttgaaatgttttaaactttttaaattttattggtttcagggcaaaacctcagaggcattaagcaaactgatgtcaatgcaggcgaaagtggccattttgatcacccgagacgagaaaacgggtcaaatcacttcggagcgcggaattgacactgaattagtgcagagaggcgatctgatcaaagttatggctggggagaaaatccctgtggacgggattgtcgtggagggcaaatcatcggctgacgaatcactgatcacgggcgagtcaatgcacgtcgtgaagaagccaggtgggccggggtggtggcagtggggcaatcagttggattataaaatttctttactataaaaatgacgggggaatgcgggtacattaggtcccacttcagtgttagacaaagttattaatcaaaatgggctatttttgagtgatattcaaaaataaacagatcactgttttgttgttgttgtttcttttgattaaccttaactcgcttcatgccaaataaacagaagaattttgtattcattcgaaagtctgtttttttcaaattgtaagcaaatgtctgtcaatttgacgcacagaaagagttaagagcctttcaaatttgcatttgcttagattctcccgtcatcggcggctccctcaaccagtccggtctgctcatcatccgtgccactcacgtgggccaggactcgactctctcccaaattgtccgactcgtcgaagaagcacagtcgtccaaagtctgtttctcccccccccccccttattcatctttttgctaaggctcctctccaacaaacagcggacaaagtcgccggttatttcgtcccatgcgtcgtcgtcctctcacttttcacttttgtcgtttggctttttgttggagtcttccacaagggacaaacgaaccataaaatggcgacgaatgcttctcatcttcagtctgtctgctctctttttctccctaccttctcacttttcccttagttctcttccccaatccatcgaagggataagcgtggagcaatgggaattcattttgcgcaaggcctttgaatatgcgatcactgtgctgtccatcgcctgtccgtgttcgcttggactggcaacaccaacggccattatggtgggcacgggagtcggagctcggaatggcattctcatcaaaggcggagagccattggagcaggcgcggaaggtaaattgtttaatgttatcggaaacagtcaaaagcatcaattcataatattttaatcccgaaaatacaaagtcccacccccttttggcctaccaattataaggacggttgtggtcaaccctcgcccccccccccccctccatatatatgctacgaatttatagtttggttatttaaacaattctttttatacagattagaacagtagtgtttgataaaacgggcacaatcactgaaggaaagccgcgagttgtcaagctgttcacaactttgcctccgagccaactttcgatccatcggttggcacttttgatgggcagtgccgagtcgaacagtgaacatcccatcggcggcgcaattgtccgttttgcccagaag

SEQ ID NO: 67869 - DNA, 445 bp, Heterodera glycines
atggtttgcggttcgtttgtcgcaatcgccatgaatgtgttgatcatttactgtgcactgcgcatttttaatcgcaaaaatcgcgacacaattcatgtgtatataatcagcatgacgatgggcgatctgattcttggttagcgaaaattgacaaaaaatattttaaaaatgcataaaatgtaaatattcgatgttttagataataagtcaaaatttactcactttccaaaaatttaaattattttaaaatttatttattgcttttcctctttaattacttctatttatttcaaaaaatctttgtttttcgcaatgaaaaataaaattcagagatatacataatgcctaattaattgattttaataaattatcatttttagtgatttgccaatttctcgagtcgatgaaccgcttgacacccgtccagttcatctccagctcttaa

SEQ ID NO: 67870 - DNA, 140 bp, Heterodera glycines
atgcatagaattattgctgcggttaaaaagctcgtagttggatctgtgctagccgtccggtgcacactttgtgtgttactggtttggttggcttttctgccggtctttcccccggcgttggcctttaccggtcggcgtcg

SEQ ID NO: 67871 - DNA, 634 bp, Heterodera glycines
atgaccggcctcataagagatcggtctcgttatttctcgtcactacctcctcgcgttgagagtgggtaatttgcgcgcctgctgccatccttagacgtagtggccatttctcaggccccttctccggagtcgaacccttatcctccgttacccgtcatcaccatggtagtcagatacactaccatcgaaagttgataaggcagacacttgaaagacacgtcgccggtacaagaccgtgcgatcagcttagttgttctgagtcaacactggacgcccggagggcgcttggttttgtggcgaacaaatgcgctccgctctggggagattggagctttggtgcatgtattagctctagaattaccacagttatccaagtaagaagtcaaggtcaagtaaattatagctggtgtaatgagccgtacgcagtttccctgtctggcaggttaaacttacacatgcatggcttaatctttgaaatgaacacatcagttcaggcaggatcaaccagatagctgctagcgagcgttgccaagcgccgctattacagccgtcttgtaaagacggatagtttcagcagaaacaactccgttcagcgcaagcgtgcgcatgggcagcgaaggagaccgagcaagtg

SEQ ID NO: 67872 - DNA, 78 bp, Heterodera glycines
aaggtcacatgtgtggacgtgtcgccggacgagaattggattgtcagcgcatgctatgaccgcacattcaaactgtgg

SEQ ID NO: 67873 - DNA, 706 bp, Heterodera glycines
atgtaccatcggaataaaggatattattccacgtattgtactttctgtggtgggcttatcaaaggtacgataacaccataatcagggtcatctcacaacaatacaataacaaataacttttttgacaaattcaacacatgtgctctctctaaagcatgagaggcacaatagtgtgcgtcacaaaataatacattttaaaaaacgttgacaaatttcacttctgtgtctcatggattaaagatggggtgaaaataaggaagggatgcgatacgaatggggaccggtaaattggacaccggaaaattggacaccagaaaaaaaattttgtttttttcggttgcgggattccgactcctgaaatgttgtgcaaagttttgaaaaattttgcggaagttattttcgaatttttatatccagtaaaaatttctttaagggcaccgaatacatattttccatatatttatacatttcagtccattttttatccaaatttcggcatttcatggaaatatttttttttggaaacaactcttaatttaaggaaagttttcgtccaatgtcacttcttatttgttcgttacttgtcttttttatttggcaattgtaattcgtctggcatggattaagggttaattaaggatttaatttcctaaaagattggcacatctcatttttgatagagaatttgcaatttttgaaaaataaa

SEQ ID NO: 67874 - DNA, 775 bp, Heterodera glycines
  unsure (1)..(775): unsure at all n locations
atggatgatttttacattgtactaccctcgaacacaccgggaccagggaacagtacatcaaaattcacagttcgactccccgagactctggaattgggcacaaattggtcagtagctctctcatcaattatttacccctactcattcaccgcactcggtataaacggtcaagagtttattaaagtatgggaaaacgacagcagtgtcccgactcaagtttatttaccggacatgaattttaaaaccgccgggggcctgggaaataaaattaacgaggcattcagccatcattacaaaatcaaaaaacaacgtggaaggagagaagccaaggctgaagataccaaagactcaaaaattgatgtcgcaaagagggccgcagaacgcgccgggagagacgtagaaagacattttaatcagatcaacaatatctcgaattccatccaaacccaactaaacacactacgagaaacaaatcctcacattttagaagagcctgatataaaaatttggtttgacaaaatggttgagatgggaaccgaaattcaaacatcccgaaatgaacttaagtcttttcaagaagaagtagataaagccaaaaacataacattggagcatgtggaaaagaatgacttgaaaaaagcaaagaaatcagccgacgtcgcaaagggaatcgccagacaggcaaagaccaaatatacatcaactctcgagggatataatgataaatcnggaaagggttttagcgggatagtgaataggcttaatgaggctttgg

SEQ ID NO: 67875 - DNA, 541 bp, Heterodera glycines
atgacgtcggcggttacctcggggtcagtttttcggccatttgtcccctttttccgtcgcccgtctgtccctttccccaaattttccctcattttgtccatattcccaaaggacgcgttgccccggtcggataagcccggactaaagagtctgcgcaccacacggacactgaaggagcgcatgtgcatcaccattgagccgggctgttactttattgactcggtcaatggggagatggaaattcattttgctttttttgaaatttcagttgctggacaaagcactcgccgactccgagctgtccaagcacataaatgccgaccgattgaacgaatttcgggggaccggaggggtgagaaaataattgaccctttaattgctcaataatttaaataattaggatgtccaattaatgccttttaaggttcgcattgaggacgatgtgatcatttgggagaagggcaacgagaatatgaacgcggatgtgccaagaacggtggaagagattgagcagtttatggccaaagcaaagggactttag

SEQ ID NO: 67876 - DNA, 615 bp, Heterodera glycines
gaataaatttatgcaatatattctttcttttaaagtcaaaaatgaacaataaatggcaaataaatcatttgctcatcaacggtttcatttcgcactgatcgacggacacaaatcactcaaaaagtgatcaattgtcagacggcggtcggttggcggggcggttaaatggcgacggcattcgtccaaaaaagggcaaaaaggcaaagggcggcggtgccgaaccattggacgaagaggggccaaaaggcactttaaatggcggcattcgtccaaaagggggccaaaagccgaagggcggcggtgccgaactgttggacgacgaaggaccaaaaaatggccgaaatttgaatgggttgaactgctgctcctcactgcccgactcttccgaattgctctcctccgatgccatttccgacgaattgttcggcgcctcactttgtccattgacaaaaatggcaattgtcaaaataaaagcagcaattaaaaatttgttggccattatttgcgataattaattaatgattttgacaattcggaagcacagtcaaattaaagttgaataatttcactgattcattcgctccttttatgtgctttcatttcccattcaaatca

SEQ ID NO: 67877 - DNA, 670 bp, Heterodera glycines
atggccaacaaatttttaattgctgcttttattttgacaattgccatttttgtcaatggacaaagtgaggcgccgaacaattcgtcggaaatggcatcggaggagagcaattcggaagagtcgggcagtgaggagcagcagttcaacccattcaaatttcggccattttttggtccttcgtcgtccaacagttcggcaccgccgcccttcggcttttggcccccttttggacgaatgccgccatttaaagtgccttttggcccctcttcgtccaatggttcggcaccgccgccctttgcctttttgcccttttttggacgaatgccgtcgccatttaaccgccccgccaaccgaccgccgtctgacaattgatcactttttgagtgatttgtgtccgtcgatcagtgcgaaatgaaaccgttgatgagcaaatgatttatttgccatttattgttcatttttgactttaaaagaaagaatatattgcataaatttattcaggcactaaccttccctaattatcatttttaaagaatttgaattatttttggctctccgtccccaacaaaacgtttctcgagatcaattttcggtctcagttctctagtcttggaaaattttgactctcgagcagccttatcacatcaacagtcccccttaattatctcta

SEQ ID NO: 67878 - DNA, 743 bp, Heterodera glycines
atgttcgcctccgcttgccgcttcgttctgccgcttttccttttcgcccttttggcacttcccccggccaatggcacgggacttcccatgcagaaaatggagtgctgccaacaacagcaaatgtgttgtgccgcaccaatgcaatgcacgccatcgtgcggagggtgcggacggcgccggcggagagaggcgagcgattggggggataactaacaattaacagttcgaatttttaggccgccgttcagccgctgctcagagggaaagaaacgccgtgcccacagacggagtggcaacagctgatggaaaatgtgggaaaaagtgctaaactcagcagctaacccggaaaaatgttaaggcaattgtgccactcgacgacgtccaatcggtgaactccgtccaaaaggcgctcctccgacgctttccggacaacaaatttttggtgatgtgcgcaatggcgggggagggacgcgcggaaggcaaagaagcgctgccaaatgaggtgagccgagggatttggaggatttaaacaaacaattgagcaacaattacaacaataataactcttgcctttccgtctcaaatccgtcgcttatttctaccgtatgcttaggtccacctcagctccagtggccacggctactgtaacgttgtcagcgaacgcatttggtgccaagcggccgcagtcgtcggctgatggcacttatttattattttttcttttatattatattgttttttga

SEQ ID NO: 67879 - DNA, 958 bp, Heterodera glycines
atggccaacaaatttttaattgctgcttttattttgacaatggccatttttgtcaatgggcaaagtgaggcgccgaacaattcgtcggaaatggcatcggaggagagcaattcggaagagtcgggcagtgaggagcagcagttcaacccattcaaatttcggccattttttggccacggcttttttggtccctcgtcgtccaacagttcggcaccgccgcccttcggcttttggcccccttttggacgaatgccgccatttaaagtgccttttggcccctcttcgtccaatggttcggcaccgccgccctttgcctttttgcccttttttggacaaatgccattgccatttaaccgccccgccaaccgaccgccgtctgacaattgatcactttttgagtgatttttgtccgtcgatcagtgcgaaatgaaacggatgatgatttacatttgctattcatttttgaatttaaaaagaatatgttgcataaatttattcaggcactaaccttccctaattatcattttaaattattctccttctccatctgggtttttagtaaaatttaaaaaaaaaatcgattctcgggggtcaattctcagtcacagctctcgagtctcggaaaaccttgactctcgagcaggccttatatcaaatccctaaaagaagttacaatttttgaatttactttttttcacgctcatttagtctcaaatatttttttttttcaaattttccagaatttcttcgaacgcgtttatcggacaatacggagccatctttcatttatttcaaaaatcctataatttgcaatttggccaacagtcgtaaaaaagaatagggattgttgtcgggggctttaataatgtagttgcagcacgcagcaaagacaatagcccaaagcaaacacaaaacactgccaaatgccgaagacagttatttatttcaaattaataaa

SEQ ID NO: 67880 - DNA, 1410 bp, Heterodera glycines
agatgaagcatcatcctcgaggaaatgaaccttttaaagtgaaaatctgccgctaatttctccgttttcactacgaaattcccttttcctccgcactttttgatttgtaaaattggcgacatctctccctccaaattagtttgttttcctcaattgcattaccctgtaattactttgtacgatgatgatcatcggggaccagtacggtttctatcagttggtgttgcggaagcacgcgtgcaggtgaaaggaatgcgatagtgtgacaagaagtgactttgaggcgggcggggggaaaggggataatgaggataatgaatgttggagcactgtttaatggtaatagtcaatcactttcattggcatggcttttgaagattgtttcgttcaccatccaatcgcttctccccctcagattgcgttacattctccaccagcttaatggcggtcagttgtcattggaagaccttaaacggaacatcgaatatgcggcgcttgtgctggagacggcgtacatggacgagacacggtgggactgtctcaaattgtgtcgataattccccgccctcggcgatttaccgtctgtctctaggcggatttgcgacgaggacgacgacttggcggaggtcacgccagaggcggtgccggacgaagtgcgcgaatggctgacggcgacattcactcgccaaacggtgcaatcgcggaaggaaaaaccaaaattcaaatcggtggccaatgccatacggacgggcatctttttcgaaaagtttgtccccacgggcaacagcagcagaaatcagtcagttcaattgatgcaattaattcactctgttcagaatttaccgtcggacgcagtccgttttggtcagtggggcgaaacggacagacatttttgaacattaaaaatcccaatttttgttttattttaggctcccattccccacgaatatttgccatttttgcgggtcagtttctcttcctttttggccattttccctcccactttagcaagtgaacaattggaacttcgactctttcgacctcaacgaggccaccaacggacactctctcaagtacatcggcttcgagctgttcaaccgttacgggttctttgagcggttcaaagtgcgttgggatttgacgttgacatgtcctcttcttcctcctctgtttcccctcctctttctcccttccttctcctctttctttcccctcctctttctcccttccttcctctccttctttcccctcctctttctcccttcctttctcctctttcttttcccctcctttttctcccttccttctcctccttcttttcccctcctctttctccctttcttccctctttctttcccctcctctttctccctttctctcctctttcttttcccctcccctttctccctt

SEQ ID NO: 67881 - DNA, 447 bp, Heterodera glycines
atggaagtcgaacagcggctcccacggtacattttggatgaaatttatttggcccgggaatcagcgggacaatggtccactgatcggctgcgagataagctccgttctattctcaagagaaaggaacaaatcgacactcttttgcccaaaaccgaccatgggccccgtcctaagccatccccacggcctcccggattcggttcttctttcaacccccagcctactctcactttccatactcaatcccgtactcagccccaacaaccccccgggtctaaaatccgtcccaaattgccctgtctcttctgcgattcccccgaccatttttccagtaattgtgacaaatttggcacccccgaaagtcgcttacaacgtttgcgctcccttaaccgttgcttcaaatgcctcaagaccggacatccggcacgccaatgtccctccccagcc

SEQ ID NO: 67882 - DNA, 424 bp, Heterodera glycines
atgaccatcagtgacggagatcgcagatacgatcagcaacggggaacagaagtaagtgatacagagcagatcccataagccggactttagaaagtggttatcagtaaaaattcctagcggtgatatcaatatctctcatttcattcctataatctcgcgatttcgttcacggattgagcctgggataagtcctactggaaagagcagctcgagctctacatgaaggtatggaaagaaaaaatagttatttctgggactttttcagaaatcagaattaattctccaatgtggcccaaattttaggcccccagccacagccccttgcttctcccagttttaagtcttggatttgtcaaataaattcaagacttcaaattaataatcaaaaattctcttataatttttttgaacccaattcaataaa

SEQ ID NO: 67883 - DNA, 50 bp, Heterodera glycines
atgtgcgacgaagaagttgctgctctcgtggtggacaatgggtccggaat

SEQ ID NO: 67884 - DNA, 784 bp, Heterodera glycines
atgggcatcacattgaaacatatgggagatgggatggataaacagaggagttggggactgttcatccacaaaattcttcctctgatcggcatccccaacatccacaagttgttcgttactttcgggtatgttttggccaacaatgactctttgggcatctcagtgatcaggattaaatagatcagtagggtggggaattagattacaaaaaaagcccgaaatatttaagaaaatattgatgaaatatctattttctatctatttcggtatttttggtacgtgtttttagaaaaacccttaacagaaatgaatttaaagacgaaaaacgcacttatacgaatctacctaaaaaatttctaaagggcctatgtaaaatttcaagaaaatttgaattttttacaagaaaaaagttttttctttttctctcattttggcgtattatttcaattgtacttggagcccaaaattgaatcgccatattttaaatacctaaaatttgcatccttagcaacaattattcccaatttttagtggcgctaaacgactgcgtggactgctcacaagcacttcagcagcttttctgatcgaatgcccaaatctccgatcaatttactatgattggtattgcaatggccatgatcgtcccgttgacgccaacgcaaaagtgcgggaatggcttctgtggccgcgcgcggatggccgtccgaaagtgttgtaccgctccttttgctacgatataagcgacgaatacaatcaggcaagcggcggaaaagcaaatccataa

SEQ ID NO: 67885 - DNA, 915 bp, Heterodera glycines
atgttcgccattgccgcctccgcttcttcccatgccagcaacaacagtgaatggcaggcattgagtgccaagtttggtcagcaaatcagtgaaattgaatcgaatgtgccgagtttggcattggcatttccaaagtgccttttgacggccctaaaggtaaaaccaattagaatttgtcactaattaattatgttgtacgatttaaggagaccactcccaacgtaatgtgcctggcaggaacagtgtgatttccatgcccggattgaccggctcacacaaacactgaatgatgagttgatgagtgactgaatagaatgaaatgattgtggtgagttcgttttggattttgtacagcaattagctgttgtatttctgtatttagaataaaataaataataaattgcaattgcaattgaatttttctaaatgttgaatatgaattttcttttatgagagtctttgtactttattccaattttggcacatttttgtcctcgttttctgtcctaaaattcaaccctttcatgacaagcacatcctgacaacaaaagaagccgcccccccccccccgttcatgttctttcttcccaatcgcatcatttttattctccacccaattcattcgcaattcattcttctgttatggctccataaagtcgcctgggaaagtgctaaaaacgcgatgaaaattggaagacgaagacgaagttgatgatgatgatgtgatgatcaaattcagcgatcggagcaatgagcggacgaatgaatgaatgacccgcgcgacacgccgaagagagtcaataaaaagggcggcgatggcaaaacaaacgaaggcattctcaggagaagaagcagcggaaaggacaattcaccagcaaagactcatttcagacaatcggacaatatgtatcaggg

SEQ ID NO: 67886 - DNA, 478 bp, Heterodera glycines
atggcatcagaatttgttcttgtgcctgatgaaatttatcgcggtctcacaaacagtgattcgggagacatcaacttggattttgttcagcgcgctttgcaaaggacaaaaagaaatgttagtaaatttaacagcaaaaaatgttcattataaccaggaattgtcccgttatctccacctgagagatgaacaccaaaataaaccagcaaaagtagaaattacaaaaggtctgaagacactgagaggcaacgaaagcgacgatgatgatgagcaaattattgatttggggcctgaaggacccaaacctccagcttcacttagtcgccaacgacaacgccgtcatcaccgttacaatgacgatgatgtagaaatgccaccagtcccaccttcaccaactcctcaagctggcactagggcccaaaaacggaagcaaatgaattttattcctcatgggaggagggggtcaaaagacaattaa

SEQ ID NO: 67887 - DNA, 1119 bp, Heterodera glycines
atgagcattaaccttcgtgacaaaaaatcccttatggaaaatattttgcccgctgtcgacatcagccacaccattaatggaattactgtgagcagcgaacgcattgccgtggcaagaacaattcctttcgacattgtcggcaagtgcaaggagtgcaaggcaaccgaatgcgagacggaatggtgtatctcaaaggagggtgtgacaatttggtgcactcgatttaaaatcagcccccgttttgtgccttttgatgtcatttacgagcttcccggttatacctttttcaaggtattttcaacaatttttcttaccacactacattttttaaatttgtagatccgtaacaagggccgagtctttaacgttgaccatggcagtcgcagcgatgcttgcactcagacgcccgcaccgatctaccacttaccgcctccaccacccccaccaaaactcccaaaaagaaaacaggaacagcaacaagcggacgccccggcgttcttttccgctctttcggcagcctctttgggagttgaatttggcgcaactaccgtcaatccttcagctcaacaaactcagccccaagagtcaaatttcgcttcttctatttcggcggcaacaacggggctcgactttgggcaaatgtcaactcaacaaccgacacatcagaaccgttccgaagcttctgatttcttttcgccaattgccgcagcgacaatggcaatggatgtggaacaaaagaaaaccaatccaaagccgagacagcagcaaaccgacgcctcgaatttctttggacctatttcagcggcaaccatgggaattggtgcagaacaacccaagccaaagatgatacaacagcaacaaggggtcgcctctgagtttgcttctgccatttccgccgcaacaatgggtatgagcaatgaacaacctaagcagcaacctccgatcgaaaaacagaaggaacagacagacgaagaaattctggatgaatttcttgagagtgtttcggctgcaactacctatttggatgtttcgcagaagaagaagccaaagaagaaaggaaagaaggaagcagaagatgaagaagcggcagcaattgcatcgatttcccgtaaacagtaa

SEQ ID NO: 67888 - DNA, 514 bp, Heterodera glycines
atgatgagggccacccgcgtacgcttcgccttcttgtccgtcgtgaggtgagtgtgaacgcacccccccccccccattttttcatttccttccttttggataatctttggcaattcagcgttcgtttgatcatcgattgccggccgggagtgccgggcgagagcgcccaattgtaacggtgggggagggggaggggaggggatgacaaacaaacaaataaataaaatcacaaatttttacaggcttcaacggaatttgtcggtggtagattgaccccaattgaggaggtggcaaattaaaaaaaatcaatttgtaaattaaaaatttttttatttctacaggcagacgaggccgttgagaattgagaagtgaagagaacaagagaagagaagaggagaagaaaatatgaaaagagaaaaggagcacaaaggaaaaatttttaaaagaaataatcagggatcattataagtttgtccatttatttaaataatttggtgaaggtcatttaaataaa

SEQ ID NO: 67889 - DNA, 108 bp, Heterodera glycines
atgtactccttgaaacgcaatcaagtggccacaatgttctggaataccgaaatgaaaaatcttcatcatgctccttcctttgaagcagccattgaaaagctcatagcg

SEQ ID NO: 67890 - DNA, 186 bp, Heterodera glycines
atgttcccacacctgaaaattcaaagtcacgaaatttgggagaaaatcgacgaccgcttcggcaaggaaaagaacgccggtgccggaaaaggacgaagacgcagcggaacagcacgcgacgccccacccgttcacttcgcctccgtcgtcgctgctgctcgctgtggtggtcaaactgccagccga

SEQ ID NO: 67891 - DNA, 960 bp, Heterodera glycines; identical to SEQ ID NO: 39284

SEQ ID NO: 67892 - DNA, 439 bp, Heterodera glycines
aaaatggtgtaagtaaaaatcgtaattacgctcaaaaagctcctcaaacaattttagcgcttccaattacttctacaatcgcctttatacatcccattatgagcgctaaaattatcagagtgccgaaaatcgcatgtgatctaagcctagcaaaaaatggtgtaagtaaaaatcgtaattacgctcaaaaagcttctcaaacaattttagcttatccaattccttctacaatcgcctttatacatcccattatgagcgctaaaattatcagagtgccgaaaatcgcatgtgatctacgcctagcaaaaaatggtgtaagtaaaaatcgtaattacgctcaaaaagcttctcaaccaattttagcgcttccaattccttctacaatcgcctttatacatcccattatgagcgctaaaattatcagagtgccgaaaatcgc

SEQ ID NO: 67893 - DNA, 720 bp, Heterodera glycines
ttaaaaaatttttttttcccaaaaaaaatttttttttttggggtttttggggggaggcccccccccaaacccagagggcccccaaattttttggggggaggcggaaaccttttgggaaaaaatctccccataaaagtgggtatttaaattttggggggggaattttgttccccaaaaatttttggaattcccccaaaggggcccctgaaaaaaatggtttttttgtttttgggggaagtccccccggaaacgatcgccccaatttatggggaaggcgaaatcttcccggaaaagttccctataacctgtactttaattttggcgtgggattttggctccccataatggtttgagtaccccaacggaccactgaaaaaaatcgatttatttttgttttcggggcagtccccccgaaccgatgcgcccagatttatggggagacgaatcctttcgggaatagcttccctatagcctgtactttaattctgcgttggatttttgctccccataattgtttgagtaccccaaacggacacttgaaaaaatcgatttttttgttttcggggcagtccccccgaaccgatgcgcccagatttatggggagaccgaatccttcgggaatagcttccctatagtctgtactttaattctgcgttggatttttgctccccataattgtttgagtaccccaaacggacacttgaaaaaatcgattttttt

SEQ ID NO: 67894 - DNA, 49 bp, Heterodera glycines; identical to SEQ ID NO: 60106

SEQ ID NO: 67895 - DNA, 885 bp, Heterodera glycines
  unsure (1)..(885): unsure at all n locations
ggttgtacgcgaccgggacctgatactgaaagaacgtacacntgagtacctacgtcccggttttgaccgggaccgggaaaagntctcggtttttccctgttttgccagccaaaaattcccggtttttcaacccgaaaagtactggtcccggtttttcttaaaatttccggtcccgtacaactgtaatttgttgtccatattttagctttttgtctatatttttcgtttttcgtctataatataatctatattttggtgtttttttttgtcaatataaatccgggccctataaataatctaaggataaattctcaaccgaaaacatcggtaaaattctatggtacggtccccgacgagttaaagtaataattatataattttttataatatttttatttttgggctttttctctgcgttgtttgcactacattgatcgaaatatcagtgcgttggtcaaatcagaagcctttttacaaattgaccaagatttgttgtgtgaaattctcaaaagagatgagctgagaagcagtgaaatcgaaatttggaatgcggtaaattaaatattttaaattacaattatttattttctaaaattaaggcactccgttggtccgacgaacagtgccgtcaaaaagtcatcgaatgttcagctgaaaatcgaggcaaaattcttgacccaatattgtccaacattcgttttccactcataccaaaagaggattttacagaaagcgttggtaatgaataatattttgatgattagagagtttgctatcttgaaaatgcttgagcctggcttggattccttgttggacctggacctgtaatggttccaagtctggattaagggcttttcataattataccgtatttcctcgaataaa

SEQ ID NO: 67896 - DNA, 523 bp, Heterodera glycines
ggcccgtttgtcgttcggtggacatgttggtccaaatgatcgaaaatgggatgaacgtcgcccggatgaacttcagtcacggggaccacgaagtgaggttttcactactgtttaattttgagaatttgaatttccgacggccaccgttttgtaaaattttcaatccaaaacttataaatgaacaacatcccgaactgtgattgctcagatcacttaaactacacttttatcgtgtagagcatggtcaatttgctgttgccgattttcaaaagtcgtaaacatgtttgagagattttagggtcgctgattatgaatatggcattcattttggcttaaacgattaaatttcgaaaaaatttgaattttctgcaggccaaaaattaatttttacaaaaaattacagtatcacggcggtaccatcaaaaatgtgcgtgaagcagctgccaaatgcaccaagaagtacaacgtggctattgcactggacacgaaggggcccgagattcggacgggacttttggcaggg

SEQ ID NO: 67897 - DNA, 549 bp, Heterodera glycines
atgcttggaaaaatcggatttttaaaaaaatatttatattttcatggtgacaagctcatcaaaaattgcgcaagatgcatttttcttattgtccgagaattcttcgacggattaggaagtcgtaaaagcgtaaacaaaacccaaaacaaccaccactacttggcacatcatcaaaaaactcatcaatcaaaaaacagtgcccatcagaaggggggggggggggggaaagtaaaaatggaaaaattcaccccgaaaaataaatttttttaaatgatttaaactttaataattgtgatcgggaacagtttttttttgctaaacaaattaaattaagatttaacaccggcgggctatttccgactttttgccgattatcccatttgagggccgtgtcggaaatcagaaattgtcggcattttgtttatgtttcagttatttaattatagtccgagtttcacacatttattttacaagtataatattcaaaaagaaaattttcagcattttttgtcagattttttccttgagaatttgttaagttacagttaa

SEQ ID NO: 67898 - DNA, 246 bp, Heterodera glycines
atgggaatgatgtggggaaactcagcggatttgcttggaaaaagtgccaatttgttcgcttcaccaatggcatatgacaatgctccggcatcacccgccggatttggccttccacatattgttttagtgattgataattattggattaatacttggagggtcccattttgtaatgggatctgctgtcgaaacaatatttagccgaaattaagagaagaaaatgggattaaaatgacctttcactga

SEQ ID NO: 67899 - DNA, 476 bp, Heterodera glycines
aaatataaaaacatttttggcacgaaacatacttatggatttgccttcgaaagttaatgtagagggtgcagaagtgccgtgccaaaatgaaaaggcgaaaatcggttttggatgttttggcacgaaaacaatggacactcgagagacaatgcgaatactgtaaccccccaaaaggcaggaaaaaccaagtccaaagttgtccattcattaaatctcgaagattttgacttaatggaaggtattgtctcgagagtttaatggaaaacattatgagatgtaaacattttattggaaatcggccaaaaaagaaaattggattaaaaaaaaggaaaaaacaattccaaggcgttgaaattttgtaaaattttttttttgccatgtaaaatggttctgatattttgggaattccatttatcaaattttaaattaatcaaaaaagtggagtgccaattttggtgaagttattttataataaa

SEQ ID NO: 67900 - DNA, 657 bp, Heterodera glycines
agtctttcgtttttatttattttttgcaaaattaattcttaaatattttttcagaaagggttctgaaacgcaccaaattttatttacatgttagtttaggcactctgatgctttttctatcaaaaagggagatgaataaaatttttaaaaatttttaattcctttttaaacaggccaaaaagtttaggcttaacttttttttcagaaactgatcagaagcgcaccaaactttgcagggatactgaaaggaagagaaataacctattttaaatattatctagtcagttcatttaaataatttttatccaaaaaatttttttttgggttttcggggcagtcccccctgaaccgatgcgcccagatttatggggagtccgaatccttccggaatagcttcactatagcctctactttaattttaccttggatttttgctccccataattgtttgagtaccccaaacggacacttgaaaaaatcgatttttttgttttcggggcagtccccccgaaccgatgcgcccagatttatggggagaccgaatccttcgggaatagcttccctatagtctgtactttaattctgcgttggatttttgctccccataattgtttgagtaccccaaacggacacttgaaaaaatcgatttttttattt

SEQ ID NO: 67901 - DNA, 710 bp, Heterodera glycines
atggctgaagaccgacaaataaaacttttaatggagaaaatggatgagaaattcgccgatatgaaagctgaactgaaagcggaaatttctgggaaattcgccgaaattgatgggaaattcgccgaaattcaggaccaaatccaggacttaaaagccgaaataaatcaaaaggtttactggaaggggaaaaattttagccattttgtattgcaaaaatggttctagtgctgaatacgcgtcccatggacttttacgcgtcccattaacttttaagcgtcccatgggtttttacgtatcccataattttttatgcgtcccatcaaattccaatttggacataggtgagaatttctgggcacaacttgggacgcgtattctgcactagaaccgaaaaaatatttattttgctagttttttaattccaataatttatcagatttttttggccgaaatttgtcctttaaatttgttaggcggccaaaatcagcattgaagtgcccgctcagggactcaccattcaacaggcgaccaaagcaggcctgttggacttggaaagcgggcaattaacgattatgtgtgacacggcgacaaacttgtcactggcgaaggctatcgaaattggcatgttggacccacactcgatgactgtgtgcgactcgagccatggtgaaaagcgagaactccacctcgataaggcgttgaatgaagga

SEQ ID NO: 67902 - DNA, 381 bp, Heterodera glycines
atgacttgcgcatacgctaaactccttggtccgtgtttcaagacgggtcgaacagatgaccggcttttacaccgagaacgcacaactgagagcccgagctggaccgaactggttgctggtacgtgtcgcacgcgaccgccaccgacccccagctcgagtcaacacggacccgaaaccattgcacaattcacccagagtaaacagcactcccccgatccgggtaccagaccccgaaaggctggcctcaagaccgagctcacgcagctactccgagcatctcagcgcactccgcctgcaaatgccccattcgccactgaacagaaggacgagcaaaccccggtctggaggctagcaggccaacgtacagcaacaaacgggtga

SEQ ID NO: 67903 - DNA, 683 bp, Heterodera glycines
  unsure (1)..(683): unsure at all n locations
gttctcgaatcctttttggattccgagttctcgtcagagaacctccgcttctggtgttgcatccaggacctcaaattctctcncaattgtcaagttaaaacaaaaggccaacacattttggacgagtttcttgctcccggtgcgccctgtcaggtcctttcctccgttttttgcttccttcggtcaattttttacattaggttaacgtcgactctagaacgcttgaagaaacattaggatgcttgagggagtcggaccaagcattgcgaaaccagaggttcgctttctcagtttcggaggaacacgtgttcacactgatgagcaaagactcgtacccacgttttctccgatccggcatttacaaggctgttttggacgctgccaaggcaaagggtggcagaaaacggatcattgacctgatcagagagctgtcagggagtgccgtaaacactaagaaagtgcctgccaaataccacaaaacatcgcgggggagtgccgatgtggacaatacacaacaactgtcgttgaacgccaacaacttccccaaacagtgctcctctgactcattgcctgtgaaagtgggcagcttgggcggcacttcgccatcactgcaactgccttcgtccggcacttctagcgccagttctcctgctcttcagacaaaggaaagcaataaaagatag

SEQ ID NO: 67904 - DNA, 632 bp, Heterodera glycines
atgtttaaaagccttccattagtggaggtaaattagaaaaaaatgcgaataaaatattgaaaacccccctttttaattctacaaattacagaaagatgaaattgatttccatttggatgatgatgacgaagaagaagacgatgatgatgacgaagaagaagacgatgctgatgatgatgatgatgaggaggaggaggaggaggaggaggataaaagaaggccgaaaaagaaagcatttggatttctgaaaaaaatgttcaaaaagaaacgccattaattcgaatggcacggggaaaagtgcaactcttttgctgcatttgtgtttttttttctgattgattggcctattagtgcaagtgcaaatgcaatttttttctcctgaaatgcataaagaaaatttattgttttaaaaaactcaattgaaatcggcaaaattgttgtatgaattcaaaaaaaaaagttttttaatttaaattaagcatgactcactgtcattaaattagcaattatattatgcaccattccgttaacatttgctgcctttgttgtttgttgtgtaaaaatgaaattgatactatttagctgaaatgatttatttattatgaaaatttacaaaaataatttacaataaa

SEQ ID NO: 67905 - DNA, 1465 bp, Heterodera glycines
atgcttctttcacagaatttggcatggtcctccattcactcgctgttcggcttcatcgcttttctgttgaccattttccaaccaatttcggcactcttccggtgccatcccgattcgtcctcccgtgtgctgttcaatgttttacacgcattcaccggatacattggatggctttgtgcatgtaataaaattttatatatttaatttaatttttaaattaaattatttttattaaataatctaatctttgaaattgtagtgacaatttaattttggtaaataaaatttcaatttttatttgtccgtattaacagaataattacataaaaattccaaaatataattggattttatagaatccataaaaataagaaggaaaaaactaatattcgcttaattatcagcaactgaaaaacggttttttttcatactttttagagtttcctaggagttcaggaaaaaatcctttactttatttttaattgtattttttgggcaattaaattaattatgaatttttcttcgtatttatgccatattttccaataattattttccagtaattgccatttgcattgcctgcgtacattttggtctgttcgcaaatacaagcgcagcaacagtgctgatcattgtgttccttgtactgcttggcattgttgcactgataatgcaaattgttgcctttcggaagggtcatcaacagcagcaggaacagcacggaacggtgggaggagggggggggggagaacattaattaaaaacaacaataattttaaaaatgaattaattaatataaatgcaaataatttaattatggtttaatattaatgagaatcattttcattgttgataaatatgaaaaaagaatttttgtgcattttttgataattgaattctaaattttttcccgtaatgcgcttatttataatttgaaattcacttaaaaaaatttgaggatgaatcttcaaattccaccctccccctaagtggaaataaaatcataaaattgttgcaaaatcgttctttgtgtgcttgtgcaactatggcttttgaactaataatttttttttgaaattttatgggttaaaaaggaatccaagagccgtcgaatggcactaacaaataagcacctttttggtcgcttatgaatgagcgaaattatgaagaattaaatttcataaatattttatggtaaaaaaaaaatttttttaatttttttagagccgtctaaactgtaataaaggcaaacaatattggcatcattaagttacccattcgattctctctatttacccataaaatttcaaaagatttaatccggtttaaaaacgatcctttatttacccttggcggactttaagaaatggcctcttcacgttttctgattaggacctagttttcaaaaaattcttttctcaattagataatttacatcgtcaatgtggaaagaaaggataaacaa

SEQ ID NO: 67906 - DNA, 504 bp, Heterodera glycines
atgcttatttctattccaaaaatgctcaaattgatcatggacaatcttaatctaacatttgatcattttataccggtttataacacattactgaaaagaactgagtgcattattgacccaaaaagagtgcttctcttgcctgccaaatgaatgtctgatgaaaattatctcctgaaatccctgataaaaaatatttaaatactccaatcgaatgctgctcttgtgctctacatgatgcaataaaaaaatcgctcagattccttctaggaacaatttctagcattctaaactttttctaaaatatttatacaattcttacgcaatatttcttaaacatattgccgaatgaatatttcttttagaatgtggcaacatttcctttagaatgtggccacaatttttctatgcaaattcagatgggcataactcttcagcaaattgagataaaaaatatttaaatactccaatcgaatgctgctcttgtgctctacatgatgcaataaa

SEQ ID NO: 67907 - DNA, 144 bp, Heterodera glycines; identical to SEQ ID NO: 57282

SEQ ID NO: 67908 - DNA, 113 bp, Heterodera glycines
tcgctttgcaatttcccgagggcctcacaatgttcgcctgcgtaatcgtcgacattctcgagaagcacaccggcgccgagttcatcattctcgcgcgacgtcacttatggaag

SEQ ID NO: 67909 - DNA, 1353 bp, Heterodera glycines
atggcttcgaatggcaaggcaacggaagcgtcgtcagaagaagtgcgttgttcgtcgggtgctgccgccgcgtccaccgcttcgtttgtgccgtcgtcggattcgccgcacaatcagccggggtcgcatgccatcgactggaagacgtacgccgctttgttatcctcgccatcgggcgccgatttgatggcagcgatgttttcttccgctgctgcgcttggaccgacgaaagcacacggagaggaggaggaggaagaaagcgaaagaggggagggacaagagaatgttggagaggaagagacgacgaggaagggacggacgacgaaacgaactgtgaaagacgaagagacggaagaagcggagggagaagagcgggagggaaagcggatggaactctaattgaactgtcattaactgaggagagggataatagatgattatttgtgaggagtgaccatgaccagccagtagaacacacttttgctttatttcctcagatatttttgtttaacaattctacttcattctctttattttctcggcattttaatttatgtgctctctttgaagcgggagattaagcgggcactgtccgctttcactattaatgacttgctctgatgattattttaattgtaagtaggcaaagaattgaccgtttcgtcgtccgttaattgcccgcggctgttgcattttcactttgtctacccaattgaaaaactaattatatgtataaattcttttctttactttgtgattctccttttacatattcctgttttcctaaatttacccattacattttatatttcgacatgaaaagattttgatggaatacgaacaccaacaaaaaatttgtcgcctttttagaaagttagctaattaaactttagtatcttagaaaatcgaatatcaaaatgtctttttttattaagtgtatgatgctcatattcacaatgctaaggataaaaatccgcatatacctagctgtagctatggtagctgcagatcgattaatctacggcttgaaacccgtattctcaactctgaatacgactggggatagttcgatccccagctacctatccaaaagatacggataagccactacttttccctttgttagtgtattctatgtctagtggtttgtgctttggacgaaaaagcgtctgtgggttcgaatcctttaggggctaatgtagtttgttagttttctaacaatatctatgcacctctaagaattgaaaaattttctcaaaaatgaattccctaaaatacattttttttcttgataaacttttgttaaaattttcttattcataaaaaattttaataattgcatttacaattgaa

SEQ ID NO: 67910 - DNA, 137 bp, Heterodera glycines
attccattttattttattttactttacatttcatattgttgtattttttgacattatttattttgattttttttttatgcgccacataagagcactaatgtgcctgtggtttgctcaataaatataattataataat

SEQ ID NO: 67911 - DNA, 407 bp, Heterodera glycines
tatttagaaaggcggggcttggtcccaaagaagcggagggctcgaagaaggaatggacgtcggagcagctgcgtgccggtgacgctatcatcggcttgcaaatgggctcaaacaaaggcgccaatcaaagcggggtatcgccacctaattttgagttgctaatcgcattttaaaaagatgattatgggaaacacgcgtcacatgtgaaaagaagggacagactgtgaaggaccggaattttgtgtaattacttcacttaaaagccttttgtttgtgatagtgctgaattgaccttaccacggataacacccttaatacattccttcttgccttgacacttttgcaattccatttaaaatccaagatgcatatttctaaattatcatagaataaattagtatgttttg

SEQ ID NO: 67912 - DNA, 1018 bp, Heterodera glycines
gacaggctccacatcgatggcctaagtgtactgtttccctatgaatatgtttatccggagcaacttttatacatggaacaactgaagaaagtgttggatgcgccagtaagcagttgggagtgttttcggtgctgtcctttgaatgggggagagatttgttttgagtcgataactgcgaatatgacatccattttgacattaaaactattggctaattaattataaagaaaatgtattttagggccattgtttgcttgaaatgccttccggaactggcaaaactgtttctctactggcgcttgtcgttgcttatatgagaaagtatccggtattttcacgatctcccatttaggctatttaaatttttacaggaaagactccacaagctgatttattgctcacggacaattcctgagatagagaaatgtgtcgaagagcttaaaaggctgtttcgctattataccaatgtcaccggagtgcgtttcacattttctcttttttaaattgttttctctaagtccgcccccgatttccttgccctcactctctccgctcgtaaaaatctgtgcatcaataaatccgtcgtcagttttcggtatggttcggccgtcgacggagcttgtcaacgtttgacggcgagttacgttcgggcgaaaaggcggctgaatccgaaccttccctgttgttcctttttcgaaaaatttgacgagaaaagggacatgactttgccgaagggtgtttacaatttggtgagttgattttctcatttctttcctaattgagtgctgatgcctaatcagtcagacttgcgggggtggggcaaagagcactgcatgtgtccgtatttcgtcgcgcggcacttggtaaatcgtgccgacatcatcgtctattcctaccattatctgttggacccgaaaatcgccgaattggtatcgcgtgaacttagaccccagtcttgcgttgtgttcgacgaggcgcataacatcgacaatgtgtgcatcgagtcgatgagtgtgac

SEQ ID NO: 67913 - DNA, 2022 bp, Heterodera glycines
atggaatatgtgaagcatcgaatgcgggtgaagaatgtgcaaatcgaaagtccggccgcctttctcagagacattaagtccagggtttttgtcgaccgtaagccgatgaggttgttctgtcgtgccttccttcatttccctcttttcattcatacgctgttttaggttttgctctgagcgattcgcctccctctcaaaaacgcttgagttgtccgacatttctgacttcagtgcccttgtcaaactcacgactttcgcgaccattgtcagcacatattccgtcgggttttctctcgtttttgagcctcctgaagatggaagttccgttggtgactacgccattcatctcaattgtatggacgcctcaatcgcaattcgacccgttttggaacgttttcagtcagtcgttatcacttcaggggtaattctattctttatccagctgtttttactttacacatttttacaattagactctttctccgttggatatgtacccaaaaattttggactttgaccccgttgtaaaggcgagcctttcgatgactttggcgcgccaatgcatttcaccaatgattatttcaaaaggtaatgcaaaattggacctgtctaacaaaacatgaagagatttgcttgttcaattgagtgttagacagaaatttaatggtctataaaaaattttaacaatctgtttttataatttttaaactttaatttctcctttttttaagaaaacattttaaaatttaaatgacaaatgagtttatgtttcttcgttttccaggaaatgaccaagtcgaaataacaagtcgttttgagagtcgggaagatccttcggtagtacgaaattatggcactttggttttggagttggcctcaattgttccggacggaattgttgtctttttcaccagttacgtatatatggaaaatgtggttgctgcgtggtacgaacaggtgaattcaccaaaaatcattgctttaaattgttttctctgtccagcgaatgatcgacgaattggtgaagctgaaacttttgttcatcgaaacaaccgatgcactcgaaacatcggtggcattggaaaaatacgtcgaagcgtgtgaaagcggacggggggcaattctcttctcagtggcgaggggaaaagtgtctgagggaattgacttttcacatcatttgggtaggggaacaattcgtttattcactcctttcgctttgctaacacaggaagagcagtcgtaatgcttggcattccgtatgtttacacggagagtcgaattctcagggcacggctcgaatatttacgcgaccaattcggaataaggtgctgggggaggggcagaaaggaaagaatttcgtatttaaaggcattttttattactccaaaattcaagtcttttccccaatgtttctctgttgtatagagaaaacgactttctcacttttgatgcaatgcgccacgctgcgcaatgtgtgggccgagcaattagaggaaaaaccgattacggactgattatcttcgccgacaaagtctggacggaatggagaagactttttaattttttttcggtttttagcgcttttgtcgaaatgacaaacgtggaaaattacccaaatggatccaggaacatctgacggacgcgcaaaccaatctgagtatcgaagaggctgttatggcagcaaaacgatggtttccgttgatggcacaaccattcacgaaagagcatcagttgggagtttcgctgctgtccaaagaattgctcgggagtaaacaagacgacatattgagcaagtttcgaggaagtgttgttactgaaatggactgaccttacaagcaggttgcaaattggccgtcattgatctatttataccatttttaatttgcatttttaccatttattgttttttgatcacacaaatttttacctggaaaataatcttcaaatggtatttcttaacttgtttttttttcatttaaatattgtatggattgtcctattgtctcatcttttcattagtaa

SEQ ID NO: 67914 - DNA, 1024 bp, Heterodera glycines
atggaaggacaacaaacggacagcggaaaaaacgcaatcgccgaacagcagcaaaaggacgaatggaagagacggccgaatccgtcacggagggcgcaaatgcattacgaagacaatgtgagggacacgctgaggacggcggggctttccgaacaatcggcggaggaaatttggcaggcgcttggcattctcgcgaggcaccaaataatggtattggtcaatcagggaagtgtttggttatgcaatttgaatggttaattcagccacttggcatgggacttggacttgtaaaacggcgagcgggaagaagacgcattgaaatggaggccaaaaacgaagggaaggcagaattttgaagtgacatggacacattaattattctttgtgacaaattgtataaaagtgtaattaaatggacccatcccggataagaaaaagacaattgccaccatcggttgccctgtcggtttattgtattgccttttgtttgtcttgtatgtttctttcgaattatatcttttaagccttttcaatgccgttcttccccaatttgcctctttttcggtgttcgcctcaattgcataggtttcgtcctgcgccgctttctctctcattccgccgtgccatttcactgagtgtcgtccatcggaagggccattcgcattggcaaaacaccaaagacgtaaaggcaaagaatgacgcgattcgcgcgagtgggctgaacgaaatgatgaagcagacgaggaaggcggtcaaagatgggtacgacccgaaaaccaacagacggctccagaagataatggaagtgagattctcgccaaagggaccaaattcaaagcgcgaaataaatctttcccatcgttccaggacatgaagaaacagtcgctgcctttggataaattccgcacttttttggaaaagttaaaggtgataaatcacgggctaatttattacgaaaaggaagggcaacaaaagaatgtttgaaagaccaaattggcatttttacgcccttttaccgacgaga

SEQ ID NO: 67915 - DNA, 593 bp, Heterodera glycines
atgcgcttcccggcctacacaattgcgaatggggaggaggacgaaggacaacagaagcaggcaaatggaagtggaaacaaaacacggaaaagcaatggacgaagacggaaaaatggacgaggaaatggtaaaaaaaacaaacaacaaaaacatcaatgacgtcaattaaattataagtgttagcactttcaaagggtagccgccctagacccttgggctttgggtgggtggagggggcttacccgcccgcggggcgacctattttaatgagttttcaggtcaagcggtgccgataagcgccgccagcacaaaatggatttttatacattttttagcaaatgttcatcgaaaatttggcaatattgcaattttatggaaattttggaccggtggcgaaaatttgaatataattttttgaagaattttttattgaaaagtcttaatatttttttactaaaaaacccactaagaaaataattttcaatttattagctccccgtagcgatcagaccaatgagaatgatcataatttcttccgaaactttcttaaaattctgaatcacaattcttccacaaaaaatgatctagattaa

SEQ ID NO: 67916 - DNA, 1097 bp, Heterodera glycines
cggaaaaagcacaaattgagggaaaaaatgaggtggaagtcacgagaacgcaactggggcagaacaaagccaaaaacgacactttacgaaaagaaagcgacgcacagcaaaagttggcttcagaattaaacgaagggtcgtccttctgcccagcaaaacaacaagtcagttggatagaagtgaatggaagcgaaattggacaaattgatggagagagagtaccgatttggaagccaatggaagagtttgaagaagaagagaaatgggaagagaggaggacacaatgcaaagagaacgatgagatggaccaattggagaagaaggcaacggatgtggtggaagaatggaacgcacgagtagggggaaaagtgggggaggaggagacggaagtcgaattgcattttgtgggcggagagcggacggaaagggaagcggcgacggaagtgtgttttggaagggattgggcgaacagacggacaaccgtacgagaaactgaagacggagtcggacggaaggccgaaagctctgtgcattttgagaaaagaaaaaatgagatgccgggaagagcgtcttactttcaaattcatcaacggatgaagatgggacggaaattggaagacgacgaatgcgacaaatcaatgccaaaagacacgatcattttggaacatatgaacatcacggaattggaatacagtggagggacaattggcagacgaggacaatgcgttcagacaagcataagcacacaaataaacagatgggcagcggatgaatggttcaaacaaattccgacgagggaggagttggaggaggaaaaggacgaaagagttaagacaaaggaggaagtgagacggaggagaaacagtcggatggatgagtcatccgagagagtgaccaaagttagaagcatccggcggaagagtggaacggaagaggacgacgaggaagggggaggaacaaaagggaatggagagggacaacctccccaactgtacagcgagtttgagacgattcatcacggcaaaacggaaggaagcattacgagaacacggcaccgacaaaaacggcaacagccgaagtcgccgtcacgcgtcaca

SEQ ID NO: 67917 - DNA, 189 bp, Heterodera glycines
atgcttgctggtaggaaactaagttgaagtgttttctaattttcaaaaaaaattccaggcctctacctatacttggaagggctgcagaaattggcaacttttcagtaccaactttttccagttcagtccccgttgaataactcattaggctttgacctgagcgcagggtggccagcagacttattgtag

SEQ ID NO: 67918 - DNA, 1074 bp, Heterodera glycines
atgagcaagtgcgcattgactctttatcaagtgacattttatcggaaggtgacaaaatttctgacatagcaaatgaagacgcccaacaaaacgacgaccttggtctgtttttatatgttgtcacgtgttttagtttaaaactgataaaaatcttaaggaccaagggccgggggacgaccatcaaaaaagatccgcggaccaggacggaagaccttaacaaatgatgttgggagaggagtcacccctttgtttgaagacagtccgtccggcaggggcgaaggtggcgttaacacgcgtcggattacggtgatttcggcgcttttatatgttacattgctaattaattcttaagcttcgaaacaagcatatttgtcaaatcgaaaaggccctttacaatgttttagaggattattcaaaacgtccttggccctcgaagaatcagagtctggattttcaattcataaatgaatttcaacatgttttcagctaagcaaacttggacccgttgcagtgaggggtgtgagtgtttgtctgctgctcaatgtcaacaaaatgcgcaggcttatattgccgtttcgaagtatgaccaagaatttactccaaagaagacaatgccacaaaaaatgaccaaaataaccaaaggctgtcatcataagcatgtttgcgcttccgcaggggcgcatcacagagtaaatgatcgctacgaccaacttttaaattccgctttacatttttcagattgattattatgacagcggtcaattcggcgatgccaactgcaaatattgtggtgctgttcttttggaaagcgaagccaatgcactaaacaagcaggggcgtgtgtcaccttgctgttccaatggccagtgtcacaccgagcaaatgaaggcagaattcgacgagttgcagaaccctccgcaattactgaaagatttggttgcggctccggatgaacgcattcgttttgagtttttggacaacacgatgccacttaacaacacctttgcgtttgcatctgtccatagtgagaaggcaccagcggagcaaatggctggcccgaatggataccgttaa

SEQ ID NO: 67919 - DNA, 2543 bp, Heterodera glycines
atgaattacggtcccccaccgcgaaagcgcgctcgccttggcttcaccattgacgaactgcttgagcttcaagatcaacagcagagcggaagcggaccttctcacccctcagcatcaccaacagcacttggaaacggactcgacgcatacgtgatgaaattggatgaggaagtcgaacatgctccacgtttcacaatgacaaaggtgaagtcaaagtttatgatcaaggatttaccagccgacccggaggctctgttgtcacaaatctttcagaaatgccttgatgaagcggtggatgagagcaagcagcatggacacacaccggatcgactcggttgcatgatcagcagtgagctgttgaatcctgacatttggacacccatccgtgaaattaccgacaacacaacggacgtgatcttgaatcgactactgagtactgcccaaagcaaaaagaagaatggagtgtcgccacaaaaaataaccaaaggctgtcatcataagcatgtttgcgcttccgcaggggcgcatcacagagtaaatgatcgctacgacaaacttttaaattccgctttacatttttcagattgattattatgacagcggtcaattcggcgatgccaactgcaaatattgtggtgctgttcttttggaaagcgaagccaatgcaataaacaagcaggggcgtgtgtcaccttgctgttccaatggccagtgtcacaccgagcaaatgaaggcagaattcgacgagttgcagaaccctccgcaattactgaaagatttggttgcggctccggatgaacgcattcgttttgagtttttggacaacacgatgccacttaacaacacctttgcgtttgcatctgtccatagtgagaaggcaccagcggagcaaatggctggccgaatggataccgttaaatacaacggtagaattcgttttgttttattttttaaatctattttaaggcgaattttcgttcatgctcagcgaccttatctctccgcaggggcgtcgtccaacgtttgctcaagtgtatacactgatgccggaggatgctttgaagttgcgtacggaaaatattacacaagccttgtcaaaaaacattcggaatgagattcttgcaaaactggagcttctgatgcgagaaaaccctctcggacaaacatttgtcactgcaggggctaaaattgaagaagcagctaaacaaaatgatggaatactgccacattttcaagtggctgtagcttttttacttttgtatttttggctattaagattgtccttctgacaaatcgtgatctgaaagtagacgcgcttcgtacccgtactgattgtaccattatcgaacgtgctgatgctccaactgctcagcaagtcgcagttatatgggttcaagaggatggtctagcgccagaagtaaatggtaatgtgttgatcaaacatttatgcttttatgtttaatttttgaggtttttggatttgtgacaaggcaggaaaaatgcgggaattgaagagtggaatgccgcagctcgacccttgctgttttcctttgttacacccgaggggcacatttgggtggcgttggtttatgaagaagacaggagcgcaggggcgcccggtaattattttttctcattaaaaaaatctaaaaaacagactgtgcctatgtcttcgcattctaatatgcaaacaggcgaagggggacaacaaaatattgatgattcggtgactgaatttgacaatgatgatatatgtgacaatgagcaaaggcgagaatttgagtctgacgtaaatatttttgctttatttttgcttcataattccctatttaagcctattttttcgacaactgattctgtcattgaacttgcttatgaaacatttccaagaaaacgtcaacttggcattaagaaagttgggccgcaggaaaacatttctgaacgtcaattttaccgataccgtttggcaattcgggaaaacagcaggggcgccttccattggctttggttttcacgccgtctcgcggaatatttcctcattgctgtgctcaatcggattgaacgcaatgaaatggaccatgttaaggcgattcagcaaaaaaagaactatcgccaaacacttgctcgcgattacatcaaggctattgagcaaggactccagcagcaggggcgtaatgcaaaattaggctccgtctttatgatgcctcatacttttgctggatcaagacagtactatcagcaaaaatacgcagatttaatgacagttgttcgtcatttgggaaacccaacctggtatgtacattataagcaaattattttttaaatatttatataaaaggttcgtaacgtttacgggtaatcccagctggcccgagttaaaagaagctctgcaagggcgccaacaatatacccatcgtgcggatattgtgtgtcgtattttcatggacaaggcttctgaatttgtccgtgatttgatcgaaaagaatgtgcttggaaaagtggctgggtggtgttatagtgttgaacaccaaaagcggggttaa

SEQ ID NO: 67920 - DNA, 477 bp, Heterodera glycines
  unsure (1)..(477): unsure at all n locations
agcaagaatattgctatcttgcctaggcgggattctgacttagaggcgttcagtcataatccctcagatggtagcttcgcaccattggtctatcgaccaagcacatgaaccaaatgtctgaacctgcggttcctctcgtactaagcaggattactatcatagcaacaggtctttagtagggtaaaactaacctgtctcacgacggtctaaacccagctcacgttccctattggtgggtgaacaatccaacgcttggcgaattctgcttcgcaatgataggaagagccgacatcgaaggatcaaaaagcgacgtcgctatggacgcttggccgccacaagccagttatccctgtggtaacttttctgacacctcttgctggaaactttacacattcaaaaggatcgataagccacgctttcgcggtccgtattcgtactganaatcaggatcaagtaagcatttgcctttttgctcta

SEQ ID NO: 67921 - DNA, 274 bp, Heterodera glycines
ggcccacctctgaccaatataaaacgggcacataaaggccgattttccgagtcaagccaaattgaagaaaatgatgaacaaattggacgttccaccaaacaattaaatatgactaatgaggacggagaacggcagccaattaggcgcagcaaattggctggcattggcattcttcacacggcacgcgcaaatcgattggaatgttgggcatcgatcaatcaatttaattaaataaaatattagattaatagaatgattcattaatatattttaa

SEQ ID NO: 67922 - DNA, 284 bp, Heterodera glycines
ctgaacgatgacattgcgcagctgttcccgaacacttttttggtcaacgaaagcgacaaacaacagacagtgatcgcggaggaacggttgaacagcttgaaggagtggttgagcaacgactgtcgcgtctccaggcaacaggtagggcgggtgcataacatcgcgtttttttcaaaaaaaaaagattgggtaacaggacgggacccgtattgtcatttgtccggaaaattttaattttagggccaggctccaattgacgaaacaaatttttaaatttgttaaca

SEQ ID NO: 67923 - DNA, 557 bp, Heterodera glycines
aatatcagctggatctgatggacagttacatcgacgccctaatgctttacgacgagggcaggtaaaatggggacaaaggacaaccaaaaaagaaacgaaaattatttcgaaatttacttggaaaaggataaacgggcggactgcgaggtgtcttttgcttttgcatttcagccaagtggagcagctgaagaagcgccaagtgcacgacccgcggcttcagtacgaatgccaactgttgcggaaccgcgccatgcacccggacaaaaaagggatggaactgagtgcggaagaccgtcagagactgctcgaaaccctttcggcaccaaagcaacggatggacgaagcgcagtgagtgaccgaatggaaattgggcggagaagggcaccattcgacccgaccaaaataaattgatgaattaagggtcgtactggacgaaatccgtgaggagtttccgcgggagctgaacgaaaacacacggatggccgcatttcgtacaaccaaagctaagacggacacgctcggccaagtcgatgaccgtctccagcccattgtgccgg

SEQ ID NO: 67924 - DNA, 198 bp, Heterodera glycines
atggcatcacgattgaacagacttttattggtagtttatattcaaatatttctcattgagaattacattcataaatgcagaatttatttgtctattaattttactcagtttgtagcctgtggccagtccaaattgggtcgtgccggaggatggcaattccttcagctggcaatgaatgacgaccaacggtgcacgaat

SEQ ID NO: 67925 - DNA, 387 bp, Heterodera glycines
ggcgcctctcggcaccgccggacccccttcttccccaaaagttttttggaataaacgcgccgcaaaaaattgatgtgaaaagtaaatctgaattcaaataatattcgatcatagtccaaaatgattaattctttgaaataagtgaagaaaatttgtttgaaaattttcattaatttaatttagctttaacttttggatttattaaataaaaaacaaaataaaatttaattttgtgccattttctcttgaaataaattaaaatttgaattttttaaaatttttttgaatttttaaaatttcctggttggtcccggttcccggtcccgaacaaaaatcgaggtcccggtcccggcttctctcaggtcccggcaagtcccggtcccggtt

SEQ ID NO: 67926 - DNA, 195 bp, Heterodera glycines
atgaacgtcgtacgcactctccccctgatcgtcctggccaccgccctgaccgcctgcgccggcaagcccgcacgcagcgatgcaccggcggccagcaccgtggttccggccaatgccgctgccgaagcccccgctgcagttgccgatggcggaacgatcgaccctgccgtggccgttccggcggcgcaggcgccg

SEQ ID NO: 67927 - DNA, 1032 bp, Heterodera glycines
atgacttatttcgagtatttaggttagttcttttaaacagagaatttgggtccaaatgtgtaaaaccatgtaaaattttgtaagtagttaggaggtcaaaaatttttcttcgtttttcaagagtagctaatttaaaaaattggagccgttggtcatagggaatatatggaagacaacattttctgaaagcaattcgagtaaaatatttttgacatttttcaattttaataatatgtgattttagttgcggattccacgattcaggggaatattctagaagtggacgaatataactaacataaatatttttccaaactgaaattttctttgatttaataacacggaaaagtaaacgcatacggtagtaggcgttacgggtaattttgcttatatgttcggaaaaagtaaatttattgtcaataagaatccctaagtcacgaatagtttcaacttcacaaattgcattatcattaattttatattgttccctggggttattctttccgaagtaaatgataaaagttttattaatagaaattttaatataccatttcttagaccaatcagagagaatatttaaagcatggtgcatagcaattctatcattttttgttttatgtacggaatataatttgacatcatccgcatataattttatagaaatttgtttaggaattaattcaggtaaatcattaatatatatcagaaacaaaagaggcccaagaacagaaccctggggaacgccagagctcattttatactcagaagagagagtattatcaacccgaaccctaaaggtacggtttgaaagaaagtcagatatccagtttaagattttacccctaataccgattctatgaaccttatataaaagtaaattatgggggataacatcaaatgctttcctaaaatctatatagacacaatcgatattcttattattataaataccatcataccaatttttaagggttgaaattaggtgtgttgtggttgatctgccctttataaatccaaattgatggtcggaga

SEQ ID NO: 67928 - DNA, 1690 bp, Heterodera glycines
  unsure (1)..(1690): unsure at all n locations
aatttttgcaaaaattttttctgaaaactttactgtaaataattattctctgatttttgatacttctttttcttctccaacaatnaacgaagtgaaatttaatatattcnntgtnggtaaagttcttaaaacttacctacnnagaaatacancatcaccggacggtattacctttagactgtaaaaaaattgttctctntcgtttactccttttgttactgaaattntcagactctcccttgatacaggaaagcttcccactatatggaaacaatcgattattatccccttgcataaacaaggggaaaaaagtaaccctatgaactataggcctattgccttaacttgttctttatgcaaaattatggaaaaatttattgtttgggctatttccgattttcttttaaagaacaatttattctccgaccatcaatttggatttataaagggcagatcaaccacaacacacctaatttcaacccttaaaaattggtatgatggtatttataataataagaatatcgattgtgtctatatagattttaggaaagcatttgatgttatcccccataatttacttttatataaggttcatagaatcggtattaggggtaaaatcttaaactggatatctgactttctttcaaaccgtacctttagggttcgggttgataatactctctcttctgagtataaaatgagctctggcgttccccagggttctgttcttgggcctcttttgtttctgatatatattaatgatttacctgaattaattcctaaacaaatttctataaaattatatgcggatgatgtcaaattatattccgtacataaaacaaaaaatgatagaattgctatgcaccatgctttaaatattctctctgattggtctaagaaatggtatattaaaatttctattaataaaacttttatcatttacttcggaaagaataaccccagggaacaatataaaattaatgataatgcaatttgtgaagttgaaactattcgtgacttagggattcttattgacaataaatttactttttccgaacatataagcaaaattacccgtaacgcctactaccgtatgcgtttacttttccgtgttattaaatcaaagaaaatttcagtttggaaaaatatttatgttagttatattcgtccacttctagaatattcccctgaatcgtggaatccgcaactaaaatcacatattattaaaattgaaaaatgtcaaaaatattttactcgaattgctttcagaaaatgttgtcttccatatattccctatgaccaacggctccaattttttaaattagctactcttgaaaaacgaagaaaaatttttgacctcctaactacttacaaaattttacatggttttacacatttggacccaaattctctgtttaaaagaactaacctaaatactcgaaataagtcatttttccggttaaatgttaaattacaatctaaaaaatcttccaaatcttttgttaacagatcagtcaaggcctggaatgcccttgataaaacgttaatgtctagctccttaaacacctttaaaaaattattagaattgactcttgattctgaaagcaccaatgtataaagaattattaacttttgaggcattttattgactttgacctcgattttattttcatataaatttttcgttatt

SEQ ID NO: 67929 - DNA, 1253 bp, Heterodera glycines
catttcaatcactgggactcaacccaccagcatttcaatcactgggactcaacccaccagcatttcaatcactgggactcaacccaacagcatttcaatcactgggactcaacccaccagcattgcaatcactgggactcaacccaccagcatttcaatcactgggactcaattctcctgcatttcaatcactgggactcaacccaccaacatttcaatcactgggactcaacccaccagcatttcaatcactgggactcaacccaccagcatttcaatcactgggactcaacccaccaacatttcaatcacttggactcaacccaccagcatttcaatcactgggactcaacccaccagcatttcaatcactgggactcaacccaccagcatttcaatcactgggactcaacccaccagcatttcaatcactgggactcaacccaccagcatttcaatcacttggactcaacccaacaacatttcaatcactgggactcaacccaccagcattccaatcactgggacaacccaccaacatttcaatcactgggactcaagccaccagcatttcaatcacttgggctcaacccaacagcatttcaatcactgggactcaacccaccagcatttcaatcacttgggctcaaccccccaacatttcaatcaatgggactcaaccgtacgggggccttcggccccactcaccaaatttttgcgtcaaaggtactcactcggccgcttcgcggcctcgtaactggggccttcggctccattccagtcaccaaaattcaatctcaccaattcttcgaaacccaataaccggaaatgaatgataaaaccgacagcggctcgaccgcttagcggcctcgcactcttcttttggcattttcttatggcataacagttcttccttgtttcttgactttttcttacgcacaacatttttcttctatacaaatttttcaaacaaattctcattcattcatttaaaatttcattaccatttacataagcaaaacaatatctttcatatcaaaaccaaatcaatttataacacacacaacaaagaaagaaaaagaaacattttaagacttttttacacaaaatgacaaaagaaaaaaatgtaaaacaaaaacatttcatttttcaaagcatttatacaacataacacaatgttaatattataggattttcttagtgaacaaactaaggggtgtcctctttcttttgttaaatatttatacaataaa

SEQ ID NO: 67930 - DNA, 830 bp, Heterodera glycines
caatcactggggactcaacccaccaacatttcaatcactgtctacacaacccaccagcatttcaatcactggggactcaacccaccataattccaatcactggcactcaacccaccaacatttcaatcactgggactctacccaccagcatttcaatcactgggactcaacccaccagcatttcaatcactgggactcaacccaccagcatttcaatcactgggactcaacccaacagcatttcaatcactgggactcaacccaccagcattgcaatcactgggactcaacccaccagcatttcaatcactgggactcaattctcctgcatttcaatcactgggactcaacccaccaacatttcaatcactgggactcaacccaccagcatttcaatcactgggactcaacccaccagcatttcaatcactgggactcaacccaccaacatttcaatcacttggactcaacccaccagcatttcaatcactgggactcaacccaccagcatttcaatcactgggactcaacccaccagcatttcaatcactgggactcaacccaccagcatttcaatcactgggactcaacccaccagcatttcaatcacttggactcaacccaacaacatttcaatcactgggactcaacccaccagcattccaatcactgggacaacccaccaacatttcaatcactgggactcaagccaccagcatttcaatcacttgggctcaacccaacagcatttcaatcactgggactcaacccaccagcatttcaatcacttgggctcaaccccccaacatttcaatcaatgggactcaacc

SEQ ID NO: 67931 - DNA, 95 bp, Heterodera glycines
cgcaaaaacttcaggtgaaaagactgaaattggtcggatttgtgcaaaacatccatgtttcgaatcccgaacccgaattcggacaaatttcttga

SEQ ID NO: 67932 - DNA, 572 bp, Heterodera glycines
atgagccgtaataggtcatcaaggagcactttcagcagcagaggcggagggtcggatgaggaagtgcataatcacttggacaggaaccgaagcataaaacaggaattaactgtcgtgaaaaataatcagaaaatgcaaaacgaggctcacaaaggatcattagagtaaagatttaatatcaataaattgatataaaaaacgataaatttagggtaaatgtaaggatctagagtttatactagagcccagtaataactggaaaacggaatatttaaaatacactcaaaagcctaaaatgcaatgcagcatagcacggattgctgttgtcgtgggttcgattcccagccgctttcttggcttagtagaaataacgattaattaattattcggcatttctcgagctacttggaatccgtagcttcaaatttaaatcaagattttataacacataatttttcaggatgcttcgagaaagttatgaccgtatgtgcaattccaaaggaacaagagcagccaaacagacgcccatgattgatttttatgattattataaagacatgaaggcacgtgtg

SEQ ID NO: 67933 - DNA, 1021 bp, Heterodera glycines
atggatgcgcgagtgagtcaacagtgagcttcactgccgtgcatatttatgcgcatattttggccactttttgtgcatgtttttgaaagccctggtcattaattaattttataattgttattcgaattcagtggcttaatgagagggtaaatcttggctgcgtgttgccaagccaagaagaagccaccgtttatgtacaagcccaacaagtttttgactttatcgacaaaaacgcatcaaaattcgagcttctatccccggaacaatattctgattttcgcttgagtaaattgatacctaattcacttccttaaaaaaacctattttaggaattattagtgctgtgtcaatggcaaaaaacatcgccctgctagactcaataaatcgtattaaaaataatttacatataaatgaaaatcgattaattttttagaaaaaattcatggaaaaagcatcaatgcgcttgaaaacgcaataattgaactgcgacactccgtcatacaattgaacgtcggtggcatcatgccagattacgaacggactaacaatccacgcaggtgctaaaagtaaaatatttaaatgaactgcaaaatcaatcaaatatttaaatatatttttgcattcattaagcaaaagtagaatgaatgatcatgtatagttttacattttttaaagatagtatctggcgaagcaaacacatttccgttttcaaaaattttaggtgcattttgaacgaaattaccacagcgaacgaggatgttcgcgaagcacttttcgagatgatcttgatgatcgaattagatgccttaaaattggtctgaaagtttttccattatatactactaactgaacacccaacaaacaggtttccattggcacgttatgtgccaatgtttcgcattcaggtgacaaaaaagagactttagatgagctgtccgagcttggcactttgggcatcaacataactacttcaatgcggttatacagcgaaaaaaaattagtaattaacatggaaaataaa

SEQ ID NO: 67934 - DNA, 385 bp, Heterodera glycines
atgcccaatggcttcggttttgccccgtcaccggcaaatttcattgagccgggcaaaaggccaatgagctcaatgagtccgatggtcatattcgaccaggaaaatggaaaggtaaaagcaaaaacaagcaactgctaaatggattaattaattaagtaattaattaatttgtcagttaaaatttgttatcggcgcttcgggcggctcaaaaatcatttcggccatggcgaagcccgtgatccgcgtgctgtgcttcaacgagacaataaaagaagcgatcgacgcgccgacgcttcacaaccaattcacaccagacataacgcaatttgaggagacagtgccaaaggcagagaaaaaggggaaacgaaaaaattaaaaacaaaaa

SEQ ID NO: 67935 - DNA, 508 bp, Heterodera glycines
atgtcggctattatatgtattaaagcacacgaaattgaaaaagctgattttcctattcatttggtaagttcgaaaaaatgttacgttagattttaaagttataaaaacttcttaaaaaatgtacaatgtgtgaaattttttaaattttcgacaaatttctattaaggtatttttatgtcattctgtcaactacggaatgaacaggaaaaacggctttttaatttggttaattttaatttcattggcattttctgcgccagttttgacaaataaaaaaataagtgccgacgtactcgcattacccaaacattcgagatcggtcgagattctattgattttcaaaaatatccgctttttttatcgggtttttgtttttttctagactatattttaagacaataaatttaaaagaaataattttaataaggaaaaaatttcttaaattgtaaaaaaaaatatttgtaatttgcagataaggtttggcttccaaaatcagaatctttattag

SEQ ID NO: 67936 - DNA, 1188 bp, Heterodera glycines
aattattacactcgcaaggctcgccggcgacacaacgaggagcaacagcaacaacagcaacaggtatcgttcaacaacggcaacaacaacaacagttgcatcgcaactggtgctgctgctgttgctgttgctggtggtggtctcctcagcgcaacaaatgccaacggcggccacaacatcggcggcggcgccggcaacaatttgagcgcctttttggtgccaactccgtccgctgctgctgctgctgcgattgctgcaggcatccaacagcaacaacaactacaacagaagcataataaacaggccaataatttgttggccgacattcaggttctaatgatggtggtggtggtgaatgggtttttttgttggcacatttaaaaaaattttttttttccaatcagtcacgaaatagggaaaacttaaattgtcagcaatttgttgccaaaaagaggggttgggtggtaaaaaatttggcgctatgtatgttaaaaagtgaacaattttgaattttatcaaaaagtaaaaacaaaagcaccatttttggcttttgcaaaattttttaaatttttgttctagttcgggttagggcttagaaattggtgaaaatagatgtcgtattcgtgattagcgacctctaaaaccttggataacaaattttcaaaaattgtgcaaaccaaaaggggggtccccccttttgtttttactttttgataaaattcaaaattgttcacttttaacatagcgccaaaattttatgaaaaaaaaaaatttttttttttgacttaccgatttttcccgggggggggtaataaaatttcatcatacagtttttttttgtgcatcatcaacaaaatttactctctgtcacccctttgtaaggacatttccatggttccctcgtgttcgtcgaccgctgtcgctgcttcgattgtcgctgcaacacaacaacagcaacaccccatgggtgttggaggagtacaacagcaacaacagttcatgcacgacgtgcagcagcagcaacacggcacaaacatggaggcagcagcagcaacgcaacacctccacaaccacggcaacagccaccacaacagacggacaattgcctacccgaaaaacagtgccaccgccaaacacaaaagtgccgcggtacgcgcaaaggcccaacaaatcctggcggcacaagcg

SEQ ID NO: 67937 - DNA, 4218 bp, Heterodera glycines
caagcccaggcggcccagcaacagttgggactggtggacgatgaccaggaatgtgatgacgaaaacaacgactacatcatacggaatggcgaagtgttcaactaccggtaccgcattgagtccagcattggcaaaggctcgtttggccaagtgaccaaagcgtacgacatggtggaggaggagatggtggccatcaaaatcatcaagaacaagaaggcattctatgaccaggtgggggaaggggggagggggaatgggaaaaatgtcaacaattatctgaatgtgtgtccatgctttgtccgtgtcatttcggcacggaaccgaaaaaaaaattttttttttttgaaaatatggacttttttaaacttatcaaaaacaagaaaaaacaacaacaacaacaactgaatgttgtcggtgtgtgatttgtccgtatcattttgacatggcgcacgaaattgaaaagaaaattttttttttttttttgaattttggagttttttgaaacagtaagaaaatatttaaaaaaatttagtagaaaaaagctcaatgtaaagaacctagaaaacaatttaaaaaaaattcagaccgggaaaacgtgggggcaactggggttactcccccgaaaaattttaaaaaattcaaatttttttgcgatttttcaattcgaagatttttgaaaaaattaaaaaaataggggcaagcaaaaaaaaaacctaaattttatttgaaagggctcctcactaaactcagcttaaatttaatcctccatcaaaaaaaaaataaataaaaaaattgctaatttccatttccttacggtttcgtttttgtccaggcccaaattgaaatccgtctgctggaactgatgaacagccacaactccgagggtcgctattatgtggtgcagttgcgcaaccattttgtgtggcgccgccatctttgccttgtgttcgaactgctctcatacaatttgtgagaaatttcaaaaaaaatattttcaattttttttattatattttaatttaaaaaaaattaatttaattaagcatattcacagtttttcaattgtttccaggtatgatttgttgcgcaacacaaatttccacggagtgtcgttgaatttgacgcgcaaatttgggcaacaattggccgccactttgctgttcctctcccaacccgacctgaacattatccactggtggaattaaaattatttaaaaattatttaaattatattttcagcgatttaaaaccggaaaatgtgctgctctgcaatccaaaacgttcaacaattaaagtaattattgctcatcaatgcataattaagcaccaattacttaatttattcatttttttacaaatttctgatattacagtattctctctctctctcttcaaggattactatatttatatactgtattttcttatagataatcgactttggctcctcgtgtcagtacgacagtcgcatttaccattacatacagtcgcgtttctaccgttcccctgaagtgttgctgggcatttcctacgacacacaaattgacatgtggtcgttgggtccgtgaatgaattcaaaaaagaaaaactaattttatttaaaatatttgaaaattattaaaaatatatacatgattagtcgttacataaaaacgggcgctttttctacaaaaaaatattgctaaaatggtcgttgattgtgagagttttggatgcttttttcaaaagaattcgaaagcttgatccaaaataaacttttggttttttcttttctagaaaaacaaaaaaaaatgtgctttttcttgttaagcgcatcggttttcataaaatattccaaatttcaaattgttttacaattttaactgcctgaatttatggactttggtgtgagaaatagtggacaaattttgttgagttttgtctacttaaaaaactcataaaacatagataagattttgatagctcattttaaaatgaaaagttaggcctttcgaatgatatattaaattcaataaaattaattatataaaaacgaaaaaaactaatgcaacgacctgttaaaatgttttccccattttcaggctgcattttggtggaaatgcacaccggcgaaccgctgttcccaggccattccgagtttgatcaaatgatgaaaattgttgaggtgctcggcatgccgtcaagccaaatactgaattccgcctcaaaagccaacaaattctttgaattggatgaaagtaaaatccttaaaattaaatatcaataaaaaaaatagtttttttaaatgtatacatggctcagttggtagtaacgtgtgcttgcacgttcttagttccttggttcaattccttaatggtgccggatgattaaatttcaaaacttgtctgatttcggtgacgacaaatggaattcctcgttactgacggcactttttaattttatttcactttttttttctatgccattcatcccttctcgtgaaaattctggaaatcttaatggattttcttaacaaatcacaataaatcaatcccttcacgatgacaacagacaccaaaatgacgcaaaatccgtcattttttgtcgaaaaatttcacttaaattttataaaattaaattggagaaaacatcttggaactgataagcaaaaaagtttcctgcctcctgctgttggtactttccacgaaaagttttttctggatgcgggcctgggttttccggtcattattctgttcccgcaatcgctctattttttggagtgccaatttgaacgatttatctgggcgggcactccaatcattggcttcttttagggccgattgattcaaataaacaccgttaacttttttttgaaatcagatggccaatggcgctgcaagaaggcgcgtgacacaaagtcctacatggcgcctggttcacttcggttgtccgacgtgttgggcgtgtacacgggaggaccgttcgggcggcgacagggcgagcaaggccacaccgtggaggactacatgaaatttaaggtgggaggattccttcccctcgtatcgtttccaccctccgaaaaaaaaaattataatttctaaatttgtaaaaatcttaaaatttttataagaaattgcaagaaaatgttttttaaagcgatttgctcaaaatttttatgatggatagatactatgtttttgaaaatttctccaaaaattgctaaagatatcttatagaaaaatttctatgatttttaaaatttctaacaataagtttgaaaaaataattatttacatattataattagggatgggattcttaggtttttacttattttttctgcggctttaactcgacgagaaatgcacgaaaaacacattttttgttcggaaaactttcgttttcacgcccctatccgaccctagaaatacactcctaagaatcgacccaaaaattttcaaaaaaatacacccctgagaatcgacccttaaatcctgaaaatttctaaatgtacttcatttctaactgtaatcagtaaataaaattgtttgacttaattttaactaatttacatagagaaaacagtaattttgataaattcacccctacatttgaaatttttttgcccctattttcgcccctatttcttgaattttttgcctctatttaggtccctattttggactttttcgcccctaaaaatcccatccctaattataataaagctcattttttgatagggagcatgattttaaaaaagtctcctacctgggtttaatgaatatgccgtaattttaagtcccttctatgagtaattaacagcaatttaagtaattaaaaacttgaggaaaacaaacatttacactgtattttttctctttatatttttatttatacatttttaaatgccgcatttttgcacaggatctgatccagcgcatgttggagttggacccggccaagcggttgcatccgtactacgcggtgcggcacccattcctgcgcaagacgaaccctggcgatgatcaacaacaccagcagctacaacaaaatgttgttggaacagcgagcggcggagttgcggcgcaacaacaacaacagccgaaccgctcgcactcgtcggtggccatttccgccgcgtgccaacaaccccagcaacaacagcacccatcttcctcatcagcatttcacaatcatcatgcacaacagcagcagcaccagactatgccaccaactttt

SEQ ID NO: 67938 - DNA, 285 bp, Heterodera glycines
atgggtgctgttgttgctggggttgttggcacgcggcggaaatggccaccgacgagtgcgagcggttcggctgttgttgttgttgcgccgcaactccgccgctcgctgttccaacaacattttgttgtagctgctggtgttgttgatcatcgccagggttcgtcttgcgcaggaatgggtgccgcaccgcgtagtacggatgcaaccgcttggccgggtccaactccaacatgcgctggatcagatcctgtgcaaaaatgcggcatttaaaaatgtataaataaa

SEQ ID NO: 67939 - DNA, 1112 bp, Heterodera glycines
ggcacacgtgtggctttggacatgaccacgctgaccataatgcgccaacttccgcgcgaggtggacccgttggtgtacaaaatgagccacgaagaccctggcaatgtgagctatgccgaaattggaggtctctccgagcaaatcagagaactgagagaggtaagacaatttgagagcgaaaatcgaattgaaatttgtgggaggaatctgttggaccacaccttaaggttgttgaactgccgctgatcaatccggagttgttcaaacgcgtcggcataacaccgcccaagggctgtcttttgtacggaccgccgggcaccggaaaaacacttttggccaggcacagcgaatttaattagcgaattggcaaaatccgtttcctcagggcggtcgcttcgcagctcaactgtaactttctcaaggtcgtctcgtcggcgattgtggacaaatacattggagagtcggcacgaatgatccgcgaaatgttcaattacgcccgtgacaaccagccgtgcatcgtttttatggacgaaattgacgccatcggttaaatttgttatatattaaatttttttgatttgtcttattaaaaggcggacgtcgtttttcggaggggacttcggccgaccgcgaaatccaacgcactttgatggagttgctgaatcagatggacgggttcgactcgcttggcaaagtcaaaatcatcatggccaccaatcgacccgacacggtcccacgattttcttttccatgaaacttgcaactcttcacataatatgttcagcttgacccggcactgctccgtccgggccgattagacagaaaaatcgaaattggactgcccaatggacagagtcgtcttgaggttttttctgtgtcctaacggtactgagcttttcccttacccaggtgctgaagatccatgccaccaaagtgctgaaaaaagaagaaatcgattacgaagcggtggtcaaattgtccgagggattctcaggggcagacctgcgcaatgtgtgcacggaagctggactgaatgcgatccgaaaggagagggacggcgtggtacaggaggacttcatgaaggcagtccgtaaagttgcggacgccaaaaa

SEQ ID NO: 67940 - DNA, 66 bp, Heterodera glycines
atggctcttcaagacgcttatgccaatgcaatggatgctttttgtggcaccacggggccattttgg

SEQ ID NO: 67941 - DNA, 478 bp, Heterodera glycines
ctattggtggtttagggttcgaagtcagcaggaattggacaatcttcgcgatcagttgggtcgtccgatcggtgttttggactctctcgtcttaccacaggtaaatcagaaataacaaataaacgaaggggaaatgaacacaatctgacatatttggtctgctagagcaatacccgggtgcttggggaaggtttccccagccaaaaaacattttgaattaaaaacgatttcaaattttattgaaattgtaatataaaaaagtttttttttcgtttgagatatgggtaaatgtgttgctttcccgggagagcaatactgggtttaaaaattgtttatttcagccaatgcatgaactttttgtggacgcatttttgactgaaatacgcaaaaacccgagagttacggacgtcgatttggatgaattggaaccgtgcttcagctgttcacaaacaattgcgcaagtaaaattggtgaaacg

SEQ ID NO: 67942 - DNA, 1737 bp, Heterodera glycines; identical to SEQ ID NO: 8402

SEQ ID NO: 67943 - DNA, 3356 bp, Heterodera glycines
gtggactttcgcaaattgtcccgctccggtcggcccaaatacagcgcgtccacctcattgttggcacaagcggctgctgcaagcagtagcagcagcagtaccaccacctgcagtaatgggcccgctgctgctgcacaacctacaccaacaaaaacaacagcaaaaactgtgccgacaaggacggcagatgaatgttcatcgacggcatgcacttcgtccgccagttgtgccggcggcggtgactcggccggcacctcgtctggcggtgctgaaacggcgacggcgcccaatcggacaacgtcaaatgccgcttcgagcagttccgtgcgggaagtgaagtaccaccagaggcccggcttccggcgccagacacggctccaggactcaattaagaccgaggtgggcgctgaggaggcggcgctgagttgggccatttgggaaatggtcgagactcattctcgagcgctgtcttgggtgttttttttaatttgttgaaaaaaagacgaaaaattttaaaattctaaaaaactttcatagatcactgatctgcacaatcggttggccaaaaatgtgctcaggacatccaaagtggtcgagaattacctccaatactatgatcaccggtcagtcagatattgtgattgtgtgtgcattgatcagacacaaaattagtgattaatggaacccacagtaatgcttaaagatagatacagtatagcaaacggagaaactcattatagaagagatcatcagcaggataatgttatcagtgatcgaaaatgtctaaatctttttctaaagagtgatttttttttatataagtgatcaaaagattattgattaatggatggaaccacagtagtgcgcagagagagagatagagatacagtaggaatcggtcagagtcattagaaattatcaaaaatgttaaaatctttttcggttcagctatttttttaaattatcgataaaaaatataatgaggtttaatagagtaattaatgattgattaactgtaattaacgaaaaaaacaatgatcagagggaggctgatattaatcatgattattagtcataatgaaggagtcattagggagcagttcgtccctctcctccaccatccgataaaaacttaaaaatcgaaatttcttatagtttgtttttccagtaaaaatatttttaaatcttcaaaagcctctttttaaagcaatttttagtttcgaaaattttaaggaaatctatttttaaaagattttttctaaaaaaaaaactaagaaattttgaaaatgaacgaaaaaaattccaatttttaaaaatttttcgtcaggggaaacttaaagaatatctccattagatgatcattcactaatttagtgtgtgattagcacaaattttccaggatactttttgacgctttcctcgtccaattgggcagtgccaccgacccgttccatggccaaccaaatccgtggatttcggacaccgtcgacttttgggaccacgacaaaatgtacgcggatgtgtccgcgcggcgcctcaaactgtgggaggaatcgttggaggagctgctgaccgatccgctgggccgtgaaacgttgcagaaattcctggacaaagtcggtgttttggcctcaaagcaaaaaaaaaattttcggaaaccccacaaaaattcacgaaaatcaaaagaaaaatttttggaaaacagcgaaatttagccaagccccatagacctgtggaatcgaatgattgcattttttacgcattctctggcactttttggcgccgaaattattatgcattccggcaattatttgtaatttattttttaatttaagaaatgcggaaaatttttatttattaaaaagtttaaaaaaatgtaggggtttcgctcgagtttcacaagaaatctccagaaaatgggttcaaccttatcgagtcgtatcattggattcttgcaattttatatatatttttaatttttaccaggaatactcgggtgaaaatttgcgcttttggatggaggtaaaaacccatttaatcaaaaatgcatatgctaattaattcattaatatttaattacccaaaaggcaaattctcgccaatttttctaggtgcaacggttacgcaaatgcagctgtcgttgtaagtttttgtctaaaaattaataagattcgccgcagggtcgtctcatgaattccgccaagggggcaaaattaaaaaaatatatatatttttaattttaccaattttgggtttgataaattaaaaaaaattatatgccgtattaaaaatgacttggtacggaaatggccccaacccgatttaggcatttggcattttggcgaaacttgcgccaaattggtattattcgatcggaaccgctcagttgggcgccggcacgtttgggcgccagcatgtttttagctataactttttttttatcaaccgaatccaacattgttgatatcattggaaagctcgctctaagtgtccttctattagcctgcaaaattttaaaaaatttagtttaggttcaaaaaagttatggccagaagaattcaaaaaaccaaattttccaacttttttggccataaattggttcaaaattaacaaatttttttggaattttgcaggctattagagcatctgaagagctctcgaatgataccaagattattggattaggatttcaaagaaaaaagttatagtggaaaaacatgtgctggcgcccaacgcctgcgcgcccaactgagttttagaccgcattcgatagctctaaatgtgcaatattaaaatattagcctgcaaaagttcaaaaaagttcgtcaattttctgaaaatttatggccattagaggtcggtcaaaagtcttggggttttcaaacatttgtggtaatatgtagcttttttgaaatttaatgaaatttttttttgaaattttatagcacctaatagagaatatttagggctatcgaatgatatcaagaaaataaaaataatatggttgcttatgagcaaaattagatcaaaaaaaaatttttttttattttgatggttctcccatcgaaaatttgaattttacgcaaaatttacgccccaaaatttgcacagttgtgcccgtgttggtcaccaaaatttacaacgaattcatcgatgccaatgccacctcacccgtgaacattgactgcaaagtgatggagattacggaggagaatctgcgcaacaacccaaatcgatggtcatttgacgacgcggccgatcacattttttgcctgatgaaaaatgattcgtatcagcgctttttgcgatcagaaatgtaccgggaaatggtaagtgtttgttaggtgatctgatct

SEQ ID NO: 67944 - DNA, 56 bp, Heterodera glycines; identical to SEQ ID NO: 67782

SEQ ID NO: 67945 - DNA, 436 bp, Heterodera glycines
aaaatggtgtaagtaaaaatcgtaattacgctcaaaaagcttctcaaacaattttagcgcttccaattccttctacaatcgcctttatacatcccattatgaacgctaaaattatcagagtgccgaaaatcgcatgtgatctaagcctagaaaaaaatggtgtaagtaaaatcgtaattacgctcaaaaagcttttcaaacaattttagcgcttccaattccttctacaatcgcctttatacatcccattatgagcgctaaaattatcagagtgccgaaaatcgcatgtgatctaagcctagaaaaaatggtgtaagtaaaatcgtaattacgctcaaaaagctcctcaaacaattttagcgcttccaattccttctacaatcgcctttatacatcccattatgaacgctaaaattatcagagtgccgaaaatcgc

SEQ ID NO: 67946 - DNA, 372 bp, Heterodera glycines
tatacatcccattatgagcgctaaaattatcagagtgccgaaaatcgcatgtgatctaagcctagaaaaaaatggtgtaagtaaaatcgtaattacgctcaaaaagcttttcaaacaattttagcgcttccaattccttctacaatcgcctttatacatcccattatgagcgctaaaattatcagagtgccgaaaatcgcatgtgatctaagcctagaaaaaaatggtgtaagtaaaatcgtaattacgctcaaaaagcttttcaaacaattttagcgcttccaattccttctacaatcgcctttatacatcccattatgaacgctaaaattatcagagtgccgaaaatcgcatgtgatctaagcctagaaa

SEQ ID NO: 67947 - DNA, 131 bp, Heterodera glycines
atggataacagagacgaacggggccattcgtattgctacgtgagaggtgaaattcttggaccgtatcaagacggactactgcgaaagcatttggcaagaatgtcttcattaatcaagaacgaaagtcagag

SEQ ID NO: 67948 - DNA, 134 bp, Heterodera glycines
gcagatttaaagctatccattgcctgccggttctcggcacagcaaagcactaatacggtgtttgactcacttcaaaaaataattccatacccaaaagttttttacaaccacatattaccaatctaatttcttgc

SEQ ID NO: 67949 - DNA, 256 bp, Heterodera glycines
ttttcagctctcttactggggcgacgggacgttcaaattgtcgcatcgcttcactgcttgaattccgatggaaacgaaccttgcaaacattggaagaccttataaatatataatactcttaaatacaccagataacatatttcttgctatttagcttcttccttctattttatttttcgtgtcattatgtattgaagcgctttgacttattgcttcaatggatgtaaaactcttaaataaagctgttgacagcccc

SEQ ID NO: 67950 - DNA, 4194 bp, Heterodera glycines
tgcaaaatgtccgtccgtccccctttagacgtgacggtttcccctgtgatccggaaagtgtgtgcatctccggcggtgcgtccgagtccattcgcaacgtgctcaagctgttcgtccggcccaacatcggcacgggtggccaaaaggccggcattctggtgcccattccgcagtacccactttactcgggtaagcctacattgttcgacaaatttacatgggtttcatcgccgattttttaaatgggaatcccggatttttatgaaaaaatttattttatttactttttttttgctttaattttttggcactatatgcaaagtgacagattttgaaaattttttcaaaagggggggacccttttgttttgcaaaattttttttgtgatagtcataaaaatttattctctggggtttttggggtccccgatcacgaatccttcaattattttgatcaattccgatttcctaatctaaatttgaacaaaaaaatcataattttaaaaattcaaaatttcgatttttattcgagttcgggttagggattagaaattagtcaaaatacatgtcagattcgtgattagcgacctaagtcctcctccccgtacgttttctctccgaaaatttaaaaattttcaaaaaaagtttactaaaaatttctaacaacaagaaaatttcacgaaaaaatcctttaaaagtttttttgcgatttttaatggaaataaaaaaacatttttaattcattagaaaaatttgaattaattttttcataagaaagcaccggacctcgatttcttccgctttgatccccgatttttgctggcttttgttccgctttattgccagcatttgaatggatggatcctgacaaaaatacggtctcaaattatttggcccgggccaaaattttctgttcgctcgtccgaagcgattctgcttaaatttgtttatgcaaatctttaaacatgcaacaaatgttcagcatcgattgaggagtacaacctgggccaggtgggctattacctggacgaagaaaacaattgggcgctggacatggacgaattggaacgggcattgaaggaggttggttagttggaaaaacaattcaatttttttttgtccattttttaaattttgggctaacggctgaaaattaaacagactgaggatttttgtatgtgttttcccacataaaaattttaacacgttttttggcccaaaaagtttgcaaaaaaataaatttggtttatttattcttattcgtccaagcttggtatttgtccgacggtagtttaaattattcgttgtcctcctaaattggcactaattcgcctcgcccgtacgtaaatttcaacattttcaaaacacaacaaatccgatttgccatcattttgcacgcattttcccccttgtatacacagagtgagcacgatgtgaaggcgattgtggtgatcaatccgggcaacccaaccgggcaggtgctgagccgagccaacattgaaagcatcatccaatttgcgcacaaacaccgactgtacatcttcgctgacgaagtgagctgatcacatgagaccaggcccgtacccagaaaaaaaattttggggaggccactcgaagaactttttttcttttcttttttttgttgctttccgggccaaaaatttttttgtgttatttttcaaaatttcaagcgtagcggcgaaaaagcaggagtttgtagcgattttgcgccaaaaatgacaaatttttgcccgttttgtggtcaaattttcaaaaaataaatggtccaatggaggccggccggaaaaagtttttgctaaagaaaatgtacaatttccaaaattttgtccattttttcttgaaaatttttttctcatccaaattttatgtatatcaaaagtcccatcggcggacggtttttcgaaatttcaatcaaatcattcaaaaaaaatattagaaattgtttataaggaaattttaaaaagaaaaaatttttaaaaagaaagtcttggaaaggaaatttagcaattttgaagcaagagatttttggtttcattttcacaatttatttatacaaaaattgttttctgtttgtataaatattaaattgctccataatttaaataaaaaattaaatatttttccataacccttaaggtgtaccaagaaaatgtgtacgcggagggtgccgaatttcacagcttccgcaaagtgatgttcgaaatgggtgcgccatttgacaagtgagtggtggtattatgaaattttatttgaattttattaaattttaaacgatttttcagactcgagttggccagcttctactcctgttccaagggttacatgggcgagtgcggactgcgcggtggttacgtccagtttgacaacattgacccgacggtgtacgtccatttcaaggcaatcacttttttatttgaaaaaaaattgaggcgctatttttgaaaaattgagacaaaaaaatcgaacttttaatttttctgccaaaaattttttgaaaaaaaaaatttcgtcgggaaacgaatgggtaaggggggcgaactgtcctttttttaaaaatccgtatggaaaattaaggttactccacatttgtgccgatgtccaaaatcgggttcaaacttacattttttcaatccctgatagcctaaacagctttgaagaacgattgaaagtgattgtatgagataatttgatcgtcagcaaatttatgaaaaaataattaattttcaaacagcagaattattgttcctaataaaccaaaacaacaaaaaaattttgcaatttttttttgtgtaatattctaagatttttttgcaaaaatttaaggttgaaaatttaaaaaaaaaattcggaggggaaacgaccgaaaccttctcaaaatttgcaaattttcggaccgaaattttttgccattttctttttgcagaaaatgatctccgccaaactgtgctccaccgtcctgggacaggtggccatggactgtgtggttgaccatccgaagccgggcgacccgtcctacgaccagtggcttaaggtaattactttcaatgcacttttccaacagactgcatttgacacaggacgaattcatttgtcagccattttaatttgcaaaaattccttcccattcgccctataaaattgtaaagtttttaaaaaaaatatatcagaaaatgcgttaattattaattttccattttcacccaaaccgaaccaaaaactcggagcatgtcgttccccccccccccccctccccgaaaaattaaaaaaattttcgattttcataaaaaaaaatacaggaatttcttagtaagaaagtttcaagaaaaaaattttttttattttttgaaattttatgaactaataagtttttcaaaaaaaatcgctgaaatttctttcaaaaaatttttttcttgaaatttttttattaagaaattcctaagaattttttaatgaaattaaaaaaaaccaaaattttcggctctttgccctgaccataaaactgatcagaaaaaagtgctcgagaggaaaaaaccagcaaaaaaaaaattctttttaatctattttcccttttttaattctcatgggttcggatccgcccggcagataatggatttaaaaaactttatggttttagagtgattttgacactggcagagttgtttgtttgttttttttggataatattattttcctaaaatagcaaagtaataataataataattggatttgtcctctcattttcaggaaaaaacggctgtgctcgactcgttgcacaagcgtgcacagctggtcaccaaggcgtacaaccaagtggagggtgtgcactgtcaacaggtgcagggcgccatgtatgcatttccacgctttttgctgcccgacaaagcaattgcggaggcaaaggtgcggtggttgtggtgaaaatggtggtggagatgcgaacggcacggcacggcacaatactccccctcccatatcaaatcccctggatcgcccgaaaaaaaaattgtccaaaaaattctatgattgacagatttttttttaaattttttcgtgggggtggtggtggaagcaagcaaacaattcaatggagtgtgtgaatcagaaagacttttttcaggccagcggagtgcagcccgactttttctacgtgaagcagctgcttgaggaaactggg

SEQ ID NO: 67951 - DNA, 442 bp, Heterodera glycines
aaaatggtgtaagtaaaaatcgtaattacgctcaaaaagcttctcaaacaattttagcgcatccaattccttctacaatcgcctttatacatcccattatgaacgctaaaattatcagagtgccgaaaatcgcatgtgatctaagcctagcaaaaaatggtgtaagtaaaaatcgtaattacgctcaaaaagctcctcaaacaattttagcgcttccaattccttctacaatcgcctttatacatcccattatgagcgctaaaattatcagagtgccgaaaatcgcatgtgatctaagcctagcaaaaaatggtgtaagtaaaaatcgtaattacgctcaaaaagcttctcaaccaattttagcgcatccaatcaattccttctacaatcgcctttatacatcccattatgagcgctaaattatcagagtgccgaaaatcgc

SEQ ID NO: 67952 - DNA, 1086 bp, Heterodera glycines
atggacattaaatatggactaaaaaagcccgaaatatggactaaaaaggacaaaaatggccaaatatggaccaaaatatggataaaaaatgccaaaatatatgttgtaaacccccaaaaatcccaaaaaaggtgtgcatatttaatatttgcttaaataaacctaaaaagtacaataaacaaccaaaaaatggggtttaaaacttaaaaatgcatattttttattgttgttcgttgtatcaaaaacacctccaagtttgccaaatttcgaaaaaattctcattaaaaaaaagaaatgttcgcaaaaaaatgacgaaaatatttattgaaaatgccaaaatgacgacgaaaactcaaatttttcgtgttttgtggggtgtaatttttaaaaatttccaaaaagttgatctttaggggtgtatttttcgtttttttttcatttttcttgtgaaaatttccaaaaaatggccaaaatatggactaaaaacccaaaaatggcgaaatatggatttattcccgaaaacccccaaaatatggatttatatggactaaaaaccttcaccaaatcaaaaaattttaacgtagaaatgctatttttaagcccctttcttcatagcatatgcgcagaaaaaatatgttaatccatataatttacaaccctatttataaatttttgaatagattcttgttggagacctgacatttcactatgtttcccagaccatccacgtctttcccaaagagtaagcggccttttgcgtcctttctattggacttttcatttgaataaataaatggcaattaactaattaattaaatcccttaggctttttgctttcctggcatattttttaagaaattttttggagagttcgtgaaacctaaacccaaatccttcgaaatgaaaaagcgaacaccgtggcattcattgaatttttccatttttttcagtattgaacaggaccaaattgtgccaagcttctgtggtcggctcgaaccggacaatgtcgtccagcgacaaactgcagcagcaaaaggtgctcaccgtggacacgatcaaccccaacgttatcaccatggtcaatga

SEQ ID NO: 67953 - DNA, 48 bp, Heterodera glycines
atgattcatatcggtcaaatgacgaagacgacgagcggacggaaaacg

SEQ ID NO: 67954 - DNA, 656 bp, Heterodera glycines
  unsure (1)..(656): unsure at all n locations
ttacatcgatcactccgtcatcgcttttcttcgttcaaatcaccaaattttcgacaaaagaggcaccaatttacatttgtggcttccttattcaaacaccacgaatggccaaccaatttgggatgtttttgcccgtgaaatttggccaattttttcggcaaacattcaccacttacgctttccccatggtgatcatttggaccatttgcttcgtcgcacttcgccgacaattctcaccgatctcgaccaattgaattcaatctattccggtgctttgttgcccgctgcgtttggtgatggttttgatgggccaatttcaacaatttctgctggccaagcattgtccaaatggttgcactctccgagaaaagatggccaacccaagcgattgcgttgcgataattacaacgcacaatggaacactgattggatcaacaatttcaaggaggtgtggccataattcgacaaatgattgatttttgttttcaaattgtttagcattttctccgtgccaatgccatttcttcggtcagttaccaaattcatttttctgttcatgtgccatcaatggaaatggtgccatttgaattggtgaacgaatgcacaaaggaaaagctgacattggccaaagcaaatgaaaatgaattggacaaana

SEQ ID NO: 67955 - DNA, 842 bp, Heterodera glycines
atggccaccgaaacagcaactttcgctgcgctgaaagcttttgccaattggttatgtccatcatcgccacttccgtacaacagcgatctgttgccattgaaaaaacttaagtttttatgcacgaagaaagttgctcttgcgtttattgcacaacttaaaaaagtaagcaattaatggatttaccataccttaaatagggggcgggggtgacgaccggagccccgacttttgcgcctctgtccaaaatcggagtcaaagttgattttatttaaagcactgatagcctaaacagcattaaaattatgaaaagatcactactgtcttttgattattaggaacattaattatgttgtttaaaaatttaatgattttttcaaaaattcattgacgatcaaatgatcggatacaatcactttcaatcgcttatttaaagctgtttaggcttccattgattttaaaaaacttaatttggacaaaggcacaaagaatttgtcctttttttgaagaaaaaaaaacttggccactctggcttgtacataatgtttattaattatgcttttgaaccttttgccaatgattcatcactttgtcaaataattaattagttaaataatgttaatcgaaatttaaaggacaatcggcgaatgtattcattgaacaccattcttaaagaattgacataattagcaaattctttttgtttattcccaaaaatcgcttttaaaaaaaatacaaaaattgttttccagcacaaattcatcctcaaaacattcattcatttgtgtgaattgtttttggcaaaacaaccttttcttcttctgttgctgctcacttacaattag

SEQ ID NO: 67956 - DNA, 397 bp, Heterodera glycines
  unsure (1)..(397): unsure at all n locations
atgaaccgacggtaataaattngaaaagtcacacaaattcatcattatttagctaacaataaactgttttccataatttcagttggatttgcaacgacgtttggatggacattttcccctgttttgaccatgcccaacttggcctcaaattggcacttctttcgtcacgtttcaatgcgttggtggacaaacatttcgatggcaaaagcgaattgacaatttggagaccaatcgcaattcgtcgcaaggacaaaggacctgaaccgaaactgtctgtacaaatggatagaaaatttgacaaatttgtggaatttccattgcccgaccgtccgttgcccagcaaaatccgttttaaatggcttcggattgagtaattcggaatcagagatttatggca

SEQ ID NO: 67957 - DNA, 463 bp, Heterodera glycines
atgacgactcaacaacgaatatttgggaatcagctgctttttctttgcatttttcttattggagttgtttttttcctcttttctgctgctgttgcaaatggtgctcatttagttgactcaagtgagttgctctctttttaaagtgatttaatcgaaatttcaatttaaatccgtttgttggaatgggtcacaagacaaattggcatatttttggccaaagaaaatgccaaaaaatagtcaataaaaggcgcccatttccgattaaaaaatcataattaggcgttgatcaaattggtcgtgtacagcacaatcataacggcgacataaacatacgcagagggattgaacgcttcaacgacaatcggatggcacaaaatggtaaagaaaaatggcgaaaatacgaataatgttcaaaattgggccaaattctttcggggagagcaatgaagaattaaataataaa

SEQ ID NO: 67958 - DNA, 1499 bp, Heterodera glycines
  unsure (1)..(1499): unsure at all n locations
aggctcgtcacaacatcagtccgcttcatgtagccgccaaatggggtcgtgttaagctggtcgaactgttgttggaccgtggcgcgatcattgactgtcggacgcgcgacctgctcacaccgctgcactgcgcggcgcgtagcggtaaatgttaccaagataaatgtgtaataaatgtttttaccaggaattgatagtaatgttattatgactcagagatataacaccaccgaaattcgatttccaacatttttgggtcggaattcgatgtccgaattttttgaagaatctgaatttcgatttttcgtgtcggaattttcaaattcgaaatcattggagcctgtgtgtttcggtttccaacactttaggcatctaaattacatccctggtataatccgggccctaaccagagggaaatagggatccctctgccactttcttcccccgaaataatttttaaaaaaattcaaaaaattaaggaaactttgagaatttgtgtaaaccaatcaaaaaaatttcgctctataaatttttcaccatcgccgcatttcgacaccgtattttttctgatatattttcttaaaattttgacccaatggtcctcaaaatagagctatttttgcctgaatttgtgattccgattacaacaacattcaggccatgacacggttgtggagctgttgctggaacgtggtgcgccaatttctgccaaaacaaaaaatggacttgccccgctgcacatggccgcgcagggtgaccacgtggactgtgcaaggtgggcacaaaaattaaaataattatttggcactttaacaatttactggaatccgatgcttacagtttaattgagccgattttttaaatcttttttgttttcaaaagtcatgaaatatttttaagaggattacggaaacaaattgaaatcacacaaatacttaaaaaatatttaaattatttttagtccaaacaaaatcgagcattcaaattttcgactttttgttcgaattcgagcccgggattcagtatttgtctaggatgcctgattcttgataatcgacccataaaagtcctcggaaatatatgttttgactttcgaaataatttttttttttcgtaggtccactaaaatttgttttttaataattttataataaatgcgatatagaacttattttttgttgctatgtatgtaatttatctactaataagcatggcttgtgtgttttaatcgcaccaaattttcaaaaaaataataatttccctgactgctacaaatgcaccaatcgcactataatttcttaaataaaatttataaaaattttcaaacaaatcccttaatgagccgaactttttggtacaaacacaaaatacataaattgtgaaaattggttatttgttttttttactaagaatgttgaattccgaaattccggagctttttttttgcccaanaattccgnattttttgttgaaaatagaactctttccccatgcattta

SEQ ID NO: 67959 - DNA, 4167 bp, Heterodera glycines
ttgttgtatgtagctagagctctaggctacatatgtagtgcacaaaacggacgccaaagaaagcccaagaaatcgaatcacctgctgctcattgtcagagcagcagatggggaaggaatttcagtttgcggatatagcggaggcacggcggcggcggcggtggacggatgaaagtgaattccccaaaaaagtcctttcactcgcccattatttcccccccctagggggtcaaaaatggtgacaaaagaaaggcatggcgaaaacaaaacaaaaaaatgcatatattcccgcgcggtggcgatgccccggggcgatatgactttcaccgctgcgcggcggcagcgtcgcttttttttttgttgttgtttgctgtggtgggtgaaatccgcgtttggtttggtgcgccggattttgacgccgccgccaaataatccatctacacacactaatgtgatgggtttggggttggatttgttggggttggagcagagcagccagcagctaaatgacgacgttggcggcggcggacgggcgcagaggcacttttactttcccgttttggttgggtgtaccttcacccgtaaaaaactttttttttccctgaaattcgtgagaaattaatgaggcatttattgaaggcagaaaatgagcgagaaattttgcatataataaggatagaaaattgtaaaaaaaaagactaaaaaaagttggagaagcggagggtgaaaaaagttaaaatttttctgttgaaaactaaagctctcggacaatccatcagtggacaataatccgtcagcataatttgtatttgcaaatgccatatttttatgtaaaaaaaatttataacatttcttactttttttcgcaaaattttgttaatagtttaaaaaaaatttgctgacgggattgtccactaactaattgattgtccagtgatggattgttcggacacccaaaatataggatggctattcctgaaaaatcagcgcttaatttcggcattacattttcttaactgttcacgaagtgttttcaaaaacggaagcagattttttaaaaatttagtcaaatgaattagttttatcatgtttaaaacaatgttttatcctcaattttcattgatttaaattgatcaaatatgtttatttttcgtttttcaggaattattttttgttttaaaaaatggaaacaaaattttttttgatgattttgtatgaaagtgatgtgtgtcgaaaaatgatgaggcgattggggcgaatatatccggaacaatatggtggcgggggagaagaaaatttctcaaccaataaatttgtttccgaaaattaatccacaaattttgattggattttggcatcactttttgattggaatgacccaaataaatttattgtttcaattcttttttattttatgcaaaaaaagaaaaaagtccacaaaagggagtaatccacttactctgcggacgtgtcatagattaaatcgtcctcgagtaatatggattaaaaattaaacaaaaaaagaaatcacaacaaaattaaatataagaatgaggtcaatgattaataaaaaccaaatcactatataaaatatataatatcttgaattaaagagataattcacttttccggtcattttatacgttaaggagtttaattttagttttaaattgatttaaagaatttattttaatgatttctttatccagctgattccacaattttgtagccctccccgcaaagggaataaattttttgcctaatttatattttgtgttaaacctataaaaggggacattaaagcgttcagaaggtttgaaaataatgggactttcatggccgaataaaatttaatttaaatacctttttaaataaaataaataaatttataaaattatccctatccatttttgttaaatttggagcgcgaacgctaatccataaaatttttatatgcccaaactcagtaagatttctttgtgccactgattatgttccttaatcaatgcattcaattagtatctacaatatttttttttctgccttttgcaatgccattgatcaaattcgattcttcttttttatgagtgccagcccatctgttcaaatagacacttcctttgattcaaccgagaaatgttggttaaggttgtcacaattttggtcgaacatggggccaatgtgaatgcacagtcggtgaacggcttcaccccgttgtacatggcggcccaggagaaccatgaggtggtggtgcgctacctgctcgcccacggagccaaccaggcattggccacagaggtgggcaatattttgaagaaaataatagcattttataatttaattaaatgggaatgttactgtttgtcggcatttagcaccacaaatccagagaaaaattttcaatggaaaatttagacaacttttaagcggaataaaatttaaaatgattttgccaacaaatattgttttcagtaactcatcattagggagcgattcgttttttaggtacaaaaaaaaaacacgaaatagacacctaaaaaggcagaaaaatcgctaaataggcaaataaaaattaaaccctttttatttatcaaaacagataaagcttaatcaaaaaatttaacatgattatatttcaattttaaatgaaattgttgaagattttaaagttttttttttcgaataaggacacattttaaaccaaaaatttttatcaagaaaaaacaaatattttcgggaatcaaatttttgagaaaatttttcaatacttagaagcattttttattgtttttttttgttaaggatttttccggaaatcctgaaaataggcgcccaaaatggcgaattaattttttgggtgtatgtgccacccttttcaactgctgctgctgctgctgctggacacgggccaaatccaccaccgtaatctctctctaattaccctttttttcaccataggatggcttcacaccgttggccgttgcgctgcagcagggccatgaccgtattgtggcgctgttgctggagaacgacaacaccagcaaggtgaagctgcccgcgctgcacattgcggccaaaaaggacgatgtgcggtccgccacgctgctgctggaaagcgagcagaacccgaacgtgacgtcgaagagcggcttcaccccgctgcacattgcggtatttaggagacaaaataatggaattaattttttttaatggatttaaagtgattaaaatgatgcaattagagagacaaacattatgaagcaaaatatgtatttttgctttataaagtttctttacataactattttttgatttttttttttaccaaaatcacacaaattaatggaattaatttagcaattaattttaaaaatgaatttaaatttattaaattaatataaatttgagagggaatatttatgcgaatgatttaaatttatataaataaattgatttttatacattttttattcacatatgaataagcccaaaatgacacaaaataatggaaataatttagcaattaattttaaaaaatgaatttaaaattagtgagggaatttatgaagaaaaattttttgtttacataaatatctctgattttttacacaatttttaaattatcatatagaaaaagccgaaaatcacacaaaatatggaattaatttaaaaaatagttgattaaaatattgtaactatttaaggaattttatgaagaaaaatttttgtttcaaatttacataaatatctctgattttttcttacatttttaaattacatctagaaaaagcccaaaatcacacaaaataatggaactaatttagcaattaattttaataaaaacggatttaatgcattaaagagcgaattttatggaaaaaattttgtatatatatataaatactcggtttcttttatacaattttttttttattaaacatgagaagcaaaaaaatgacattcttctataattatatgataattatatttttcataaaacaaattatactttttaaaaaatcaacttatttatcatcttctaaaaacatttaatccctatttttttacaatttaaatgattaattacaaaaaaatattgaaggcgcattatgggaacgagaacattggccagctgctgatcgaaaagggtgccaatgtgaactttcag

SEQ ID NO: 67960 - DNA, 1116 bp, Heterodera glycines
atggtgaagcaggaacagaagcaactggtgatgaacagaccggacattggtgaagggggacgaaacaattgaaaattatttaatttaaaaaagctaaaataaaaaaaaatatttttcaatttttagttaagcagtattattgtattgtaaaaaattttccaaaaataaccatcttttttagtttacataatagaaaaattccttaatttaccttaaaatattgctttttacccatgattttataatttaattaccattaatagaaaaattaaatttgaaaataaaattgttaaaattaaaaaatatcaaatcatttatttaaaatttaaaatcattaaaaaaaatttttagccttttgcgaagggtcaatcagtgcattttttgtaagcggtaagtcattatcatgaattaattatttaaattaactttaattatttaaattaaagcaaatgtcagcgtaagaggggcgaatgcatcggcaacaattctcgaaagcagtgaacaacaatgtgccaaatattgtgcagacaacagggacaatcggggcagaacattattgtgtaagttctgaatattattttttaattaatttctatgggtaattttttaattttcttttttaattattttttttttgattaaaataatttatcatagttcatagattaaaaaatttaattggctaaagcaaaattttaaatcagcactattttattattgaacaaaataataaaagtttaatttaattttaattttgttttttaatttaatagaaaaaagaaatataaattatttaaatttttaaaatttttttaggtggttccgcactttacgaaagtgacacgcgtcagtgcaaattgtaccgtaaatccaggcaaatttttagcaaaataattttgtcacaatttttaaataatttaaatttaagtgcacctgatggcgaattgaaacgctttgcagagaatggacggcgatattatgaaaaattttgtttgcccggtaagcaaaaataataattaataattttttgaaataattttgttctaagatgacgtgccaatggattgcgcattcacacattttgcccgtgtggatgaccacattttgaaggggtaa

SEQ ID NO: 67961 - DNA, 489 bp, Heterodera glycines
atgtcggaaatcggaattccgaccccaaaaaggtcgaaatcggaattccgactcccaaaaaggtcggtaatcgcaattccgaccccaaaaatgtcggaaatcggaattccgaagtccaaaattttttcggaaatagcaattacgaccccaaaaatgtcggaaatcggaattccgaccccaaaaatgtcggaaatcggaattccgaccccaaaaaggtcggaaatcgcaattccgaccccaaaaatgtcggaaatcggaattccgactcccaaaaaggtcggaaatcggaattccgaagtccaaaattttttcggaaatagcaattacgaccccaaaaatgtcggaaatcggaattccgactcccaaaaaggtcggaaatcggaattccgaagtccaaaattttttcggaaatcgcaattacgaccccaaaaatgtcggaaatcgcaattccgaccccaaaaatatcggaaatcggaattccgaccctaa

SEQ ID NO: 67962 - DNA, 771 bp, Heterodera glycines
atgatttgtcaccagttgtggtgtccaagatacggtaggtaatcaactggtgctaagtcgttataaaaaaaaaccaccaaaatgaaaagtttcaacaaaaaattacccataaatttgctcaaaagcaagcaaaatttaattcttgaaatcattcgatagtcctaacaattttctatatcttgaaaaattttgttatggttcaaaaaagttatggcagaaaatgttcgggcaaccagtttatgaattcttctagccataacttttttgtaccttaaggaattttacagactaatatcgttgtatctccggttttcgcttggtctcggaaaatttcggtcttgaataacctaatggagatttttgatttaaaaaagaatatgtatgttcgaaataagtactgttactacaatccaaggacgtacttgaagctaagggacatttatttcgcataacctcaaataaccagacccattagcagatagctatggccatccgattacatccgaagcggttggcgagataaagcaaattgtcattaaaatgattttgtttgcgaaagtggcaatttataggcaggaattgaaggtgaaagtgatcctgtataggcaggaattggaggcgaaagatgccaataatattaatgcaattggaatccaaaatgaagacataattggcacgtccaacattttgcgtcaccgatttaaagaaattcagtatttatcaaaagtttacaacgggaacgaggtgcatttgtactggatgttcttatga

SEQ ID NO: 67963 - DNA, 655 bp, Heterodera glycines
taattaaatccattccttcgggggaccgtgccgggtgccgcggggtaagcagtgctggttcgtttcatcacggcaccgaaccttttggctagtcagcaatcgttgcttaacttgccagatcggacgggtgcgcatgattccactgttccaagcaccccaccaaaagcaaaacgatataaccaaaatataaggaaaaattttttaaaaaattttttctccatcttcctttttgatactaaagcatcagagtgctaaaattaagttgtaaataaaatttggtgcgctttagagcactttctgaaaaaaatatttatgaaacaaaaaaatcgattttttcaagtgtccgtttggggtactcaaacaattatggggagcaaaaatccaacgcagaattaaagtacaggctatagggaagctattcccgaaggattcggtctccccataaatctgggcgcatcggttcggggggactgccccgaaaacaaaaaaatcgattttttccagtgtccgtttggggaactcaaacaattatggggagcaaaaatccaacgcagaattaaaagacagggtatagggaaactattcccgaaagattcggtctccccctaaaactgggggcatcggttcggggggaatgccccccaaacaaaaaaaa

SEQ ID NO: 67964 - DNA, 328 bp, Heterodera glycines
agccaaactcgcccagaaagaaatcccagaaaaattagggtcgtcgcttcttatcccgaaaatgtggttggaattcatgtgagtgttgagcagaaaaagagatagacgttttttcaaaattttcagagccaaactcgcccagaaagaaaatccagaaaaattagggtcgtcgctactattccgaaaatgtggttggagttcatgtgagtgttgagcagaaaaagagatagacgttttttcaaaattttcagagccaaactcgcccagaaagaaaatccagaaaaattagggtcgtcgctactattccgaaaatgtggttggaattcat

SEQ ID NO: 67965 - DNA, 742 bp, Heterodera glycines
ccattgcgcaactcaccagtaatgagcagcagccatcgcgagaccggcagaagtccaagaagtgtgctgatgcgccagtacgaaatgctgctgcaaaactcgaacgacaacagcggattccgtgcctggttcgacaacaacggcgctagtttaaaagagtacaattttgaaaattttttcaacttttttttggtcaaaatttttttttgtttaaaaagtcctgaaaccaaatacccgggggttttaaaggtcgctgattacaaatatgacaattatttgggcctattaagcaaatttggcgctagttataaagtgatagattttgtattttatcaaaaaccataggggggagacttttgttttgttaatttttttttggataaaaatcgtgaatatacattttattccccatatttgtgatgttttgacttattattcatcaatatgtgtgaatgatttaataataatttgttgcatctaagtagaatggaaagcgtttgattctaacatgcattctccagcgcctcacaatccctattcgcatacagatactgtgggcttaacgatgacaaaagtaaaatctgatcacgtattccggatcagcgtcacaaagatacccttagagacattttttcgagtgattctgtggtaaaaaattttttcaaatcaataatcctgtgctcccccttaagtcccaaatccaaaaattacttttatttttataacttttttcaaaaaagca

SEQ ID NO: 67966 - DNA, 640 bp, Heterodera glycines
atgttgatggatgcctgggggatcctcccaggcggggatcgattggccgttccactgaaatggctcccgactgatccgactgcccctttgactggctctccattgccttttaagcgcccctcgggatgggaggagtttatcggagtaataaatgtgcgtgggaaaataaaatgccatttccggtccaggccttacaataccgaaacccaacgggcacctgaggatcctcctttataagctattccttacttttgcatgcttcttaaggctatgattggaggaatgtgcgcaaacttcacattttcgggcgatgaacacttgattaagagggaaattgaaaaaatttctgaatttgtgaaagatatcacgggcaatgcaactcaatggataagagcggaactcgtaagtagcaattaaaattattatgcaattatagctgggattaaaaatgacaaaatagcttaattttttttacgatttcatatattgaattgatgcgtcaattacaggaaaactcctggccactggaaataattcggcatgtcaagatcgggataaagaatccagtcatcgacccatattcgtacaattataccgcaaatctgatcgatgacattgttttcgcacgtgggcctttcgg

SEQ ID NO: 67967 - DNA, 2430 bp, Heterodera glycines
atgatccagcatgatcactacgagaaggaaaccattcgcaaacgtttggaccgtcttcatgagctgtgggaccgactgttcgccatgctggagaacaagggcatcaaactgcagcagacgctgaaactgctccaatttgtgcgcaaatgtgacgagatgctctactggatcaaggataaggtgaggggggaattgatcaatccaaggcttgatcaagaactgatcagattatggttgattgggttaaaaaattgattatacagaactcatgacatttccacagtgattaggttaagacttgattagaaatgactgatcagttttggcttgaccgttcaccgggggcttgatgaattgcgctaattctgatcagacacaatgaccaattaatttaatttcacaaaaaaaacatatcgataagtacactttttgatagaatatttgccaaatattaagactaatttatttgctaagttcagattcaattcgtttccacggacgacctgggcgccgacctcgaacatgtggaggtgatgcagcgcaaatttgacgagtttctaaaggagttgaaaagtcatgaggtatacgattgcctgcgcctttttaaggcatttttttatttttgtaaatttttaaaaatatttcagtcccgggtcttggacataaaccacgaggcaaatgcactcattgacgaaggccatccggaacaacagcaaatccatggcaaacgggacgaagtgaacgaggcatggcacaagctgggcacactgacatcaacaaggtgggggaagagagtgcacgacgtccccccgcccttcgaataagaaaattttaaaaaaatttcaaaactaaaaatagaaaatgaagaaaaatatgccaaaaatgcaaaagatcaaataaatttgatttttttgaatatgcgaaaataatttcaaaaggattacgaattgtatttttagctggacgtctttttatttccatatttttgtaatattttagtttttgtccatttttccgtacttgaaatccatattcggcattttcacaaaaaattcgaaaaatagacccttcaaaatggaaatttttcaattttttggaaataggcccctaaataggggactcaattatggaattcgaattaatcgtgtattaaaatgacttttttcattcatacaaattaccagggcttccttttttatgtaagaaaaatcgcgaaatatgtaaataaaatattataaaaatgctaaaatatgtatgaaatatgtacaaaaaccaagaaatatgtatgaaaatatgtaaataaaatttttttaatgtttattttttggaaaaatttctcgtaaaggggtcaaataggctcaaaatgccataacaatgacctaaataggcttagaaatcaccttttcatatcttaaaaattaatttttggtatctcacatttggaaaaaactgattttttggggtacattatcaaatttttttttaaaatttttacaaaaacttctataaattctcaaaaccccaattaaatatgtacaaaaaaatgaaaatatgtacgaaaaattgcgaaatatgtatgaaaagtccaaaatatatataaaaatatgtaaatatgtaataaatgccggtccctagtatcagccagcaaaaaattaatagagatattcctcaaattttcataataccaagcaatttaacatttatatggaactgttgttttagtttttaaagcggcaaaacttaattaaaaattccaaaaattaaaatgcatcgcttaaatttggcttaccagtcgaaaaaagccatgcgtaagtgccaacaatgatgtaggttttattgattctgacaaattgcattgagatgtaaattacggcggaaattgaatcgaacaaacttatgataagcacttggagaaacgactaaatattatttataagttaaattaaatttttttttgtaatagaattaaatgttattacaatggaaagccattttattagcaaattttcaagtaaaacttttttttgttcttcggtccctaaaatttttccaattgtattgttcaaaaataacatttattgagttttttaccaaaaattaattatttattcatttcgatcaggaggtggttggaatcacccgtttctacccccccccccccccccgctgattacgggcctgatgactttggcatttttcaaaaatatttatttaaggggagaagcgctgttcggtgcccagcaaattcagcgcttttaccgcgatatcgacgaaacattggcatggatgggcgagaaagagcttacgctggccaccgacgactttgggcgcgatctgaacaatgtgcaggcactgcagcgaaagcacgagggcaccgagcgcgacttggccgcattggagtcgaaggtggcacggcacggggaaatttga

SEQ ID NO: 67968 - DNA, 1571 bp, Heterodera glycines
gggcgaagcgttgttcggtgcccagcaaattcaacgcttttaccgcgatattgacgaaacgttggcatggatgggcgagaaagagcttacgttggccaccgacgactttgggcgcgatctgaataatgtgcaagcactgcagcgcaagcacgagggcaccgagcgcgacttggccgcattggagtcgaaggtggcacggcacggggaaatttgatcagtgacgatcagaacattgttaacttgaggacgtctgatcagtgcgatgagaaaatgattagtgcattattcagttagggatggtctgatccatacatggacaaggagggggggttagaaatttctaccaaaaaaaatatcccccacccccccccccctcagaggccaaaattttaacgaaatgcaattcaaaatcataaaaattttgggtttttggcacaaaattttgattatttttttcaatttcgtaaaaatttcccatctttaccagtgctttttaggttttggccgaaaattttacgaaattgcctcggacccccgtacgatttacgaaattgaccccccccccccttgtccacgtatgcgtatgttctgataggcacaatgatcagaaacatgatcaatgatgagctgttcagaataagtctctctgtattatataggaacggggaaggcaataaaatcacaaaagatggcactaaatgttttaggaaagggcaaagtaatttaatataattttcctacttttacccaagatggacaaactcggcacggagacgaaccacttgtgccaactgtacccggaaaagtcggaggacattgccgcgaaggtggacgaggcacgtggccggtgggaggcgctaaagctgagcgcagagcagcgcaagcggggccttgaccggtcgtacaacaggcaccgcttcatggccgactaccgcgagttggtcgagtggaccaagggcattcaggtgatcgggcacagtccgtgccaaatttgatttttactctggtattgtggtttttgaataaaaatggtataatgtaaattatctgttgagctgaatatttggcatacacaatgcatttttgtgatttggtttctggcaaagaaatcttttcacagatttacttaatctttaaatttttccggctgcgcttatcttttctgccattcaaatccttccattttcgaagaaattttgaaaaaatacccaggaaattttctgagatgaagaaaaataaacgtgttgagatgaattatggtgatgaatataaaaaatgtgagtattataaatgagttttttagttttcgaattagtttttttcaaaatttagagctgaaatttaaaatcatgttttaccttataaaatcaaacactttggttttaagaggatttataagcgttttccttatttattgtaattaatcattgttggtctaaatatatgaaatgttcatcttaaatttttccccatttggctatcgcacacctaagatttgtcgcatcggtaattttatcggtactttcctgttttgaggccacacccaaaaatttaaaaaaatcaacaaaagg

SEQ ID NO: 67969 - DNA, 325 bp, Heterodera glycines
atgtgtggaagaggtacaacagtgattagaagaggttcaacagtgattagaagaggtacaacagcgattagaagagtgattaaaagaggtacaacagcgattagaagagtgattaaaagaggtacaacagcgattagaagagtgattaaaagaggtacaacagcgattagaagagtgattaaaagaggtacaacagtaaatagaagaggtacaacagcgattagaagagtgattaaaagaggtacaacagtaaatagaagaggtacaacagtgattaaaaaaggtacaacaatgattagaagaggtacaacagtgatcagaagag

SEQ ID NO: 67970 - DNA, 1112 bp, Heterodera glycines
atggacacgcttttgaacgagttgagactgcagcaccgaatggagcaacaacagaaggacagccaaactcagcaaattgagcagcagcagcaacaaatgatcgtccaacaacagcagcagcaactaatagctgctgtacaggttagtaaccacgaacaaatgaatgtacatttcattctctcgtcgttcccctttcaaattttcaattatttagccgttttccttttttagccgtctcagtttattttcactgtttgttttaggcacaacttgccacaacgcaccaaaatgttgccgcgcaacagtcgcagccattccaacaacaacaccaagtagataaaacacgtttgcgttgtttgtttttagttcaatttaacgctttaggcgttggttgctgcgcttgccaacaatcagcttgatctgatgatcaatgagatacaaacgcagtattcccgacaactcagtgcccaacaacttctcgctcaactgtctcgaatgaactttctcggcattcctccacaggacatctccacgctgcaaaacattgcgtccgggtccgcattaagcgaaatagtccgccagatgagtccggtgactgcggctgccgctgcacttcacagtccgctgtcctccgctggtgttcaaaatcccccgccaggcccttcccccgtacaacaccaaatgtcgacgactgtcagcaattgcagcggtcccattggtgtgcagaattttctcaacaatttggagtcgtttaacaatggcccaagcgcttgttctgctaccactaggattagtacgccaaccaccattagtgccaatttgtccgctgttgcggtggaagttggccatacgacgagcaatctcggggtcttttggctcttatttggttttaaactgcttagtccgttaagaataacacgacaaccagccccaccagcagtggtcatcgtcgcccggttggtcagcctgcttcgctttccctgcggcaagtcagtcagaacttcgcctgcccgtcctcttccggagtcacttccaccactgttccaactccgtcctcatcttccaacggcatttcttcgtctcaactcacgcgagaatcaaccgttgcggaa

SEQ ID NO: 67971 - DNA, 615 bp, Heterodera glycines
atgtgccatgaggcaaaaaataatgtcgaaacatcaaaggaggagccgcaatatgaacttaaacaggtaaactaagaataatgaaagaaagaaaagaactgaaaagtttttataaaaagaaaaaataatttaatggacggacttttctaagcctttcttttaatttgggcccatttcagcgacttttaagatctaaagcctacccaatatggcttttttagtgcaagagtccatattctactaataatcataagtgtttttatagcctttaataactaatgattagtcatccaaaactacgagagacggtaaaaaccccaattccttggacttttaagacatttttttaaatataatattttaattattttaaataaaaaaatcagattgagtttaacgcgggtcaaattggcggcacttcggtgtccagccgtctctaccaaatccatcgtcataccgtgaaaaaagccgggctttctgtgcccgacgacaatttgccggccggagcaggcgacacgggcattgccgaagtgttggagaagcatggtgaggaaaactgagtcgaaattgatctcatttgctttccagcctccttttgataccaggggaaataaa

SEQ ID NO: 67972 - DNA, 1387 bp, Heterodera glycines
atggagaaaattaagaacaatattggcgactctttcgtttggatttcggtggacgaaacaacagacaaaatgggaagagcggtggccaatttgctgattggaaaattggatggacaaaaatggcacaccccacatttgatttccgtcaaatgcttggagaaagttgatagcgcggcaattgctcggttcgtcaacgaaggactcggtggaagtatgtgaaagattaagcttttttaggattacgcatttaggtggtcaactcgttcgacccaactgatgcatcatgcataagagaaagtcagtcgtgcttcactttgtcaacatggcaagacctcgcgtacattcacaccaactttggcaatttatgccctgccattgcaaaattggagtcacatggactgtcgataaacgaatcgatggaaatttttgcggacgttcacaaccaattggacaaagcagccggcgagaaagcagaaataatcagccaaaaaatctctttcattgtctcaaaaaatccctcatttgatcaaattgccaaattttgccaaatcctttccggaaaaagtgttgattgcgatgttccgcccactttaattccgttctacaaattcgcgcccctgacttcttgcgatgttgaacggactttctctatttacaaaacttttttattcggtaatctgatgcgtttttttgcctcaaaatttggaaagtacctcatttgcaactgcaatcagtgaataaaaattatttttgctcaatttttggctaaaaattatgtcactacttcggactatttgtcactatttcttcactattttggcatttttactcactattttagttaactatttcgagatttttcgtcactaaaagttgcggccctattcatcactaatttttcactcagacccccattcttaccagtgcttgtttttcccggttcctggttgccctaccgggacctgagattttcaaaacccgggaccgggacctctgaggaccgggaattcccggtcccgatgcactctagtgtaaattaatttaaaaaattttattcctcataattttacaggttgtttttgcaatttcaaatcaaaaatttctcaaggttttcggcagtgaagctcacagttgacccactcgcgcacccattcagatttggatttaattttaggcaatcaatttttttccgaagggatattcaaatcggaaaatatttgacgaaaaatggcaaaatatgcaaaaaatctgaaaatatgcacaaaaaatggcaaaatatgcaaaaaattctaaaaatatgcacaaaaaatggcaaaataagcaaaaaatctgaaaatatgcacaaaaaatggcaaaatatgcagaaaaacccaaatatgcaaataaa

SEQ ID NO: 67973 - DNA, 342 bp, Heterodera glycines
atgcctttgtttgttttcccccctttgtcgtcgtcgtccatcaacggcaccgctaattcccccgtttcctccgccttggccgaccaattccatcgccaattcgtttcgggccaacaaattgcgtcgatcaccgccatcccagcaaatgcatgtctgttcgtttcgatcattgacactgttgctgacgatggaggacaaatggcgagggcggacgaaaacggcacaaaaacaacggcaaaaggggaaaagcatcgcattgaaggcactttgttccgccaacactttgccatcagtggaggcaaaaaccatttggtgaatacgaatggtggcacggggcattga

SEQ ID NO: 67974 - DNA, 1094 bp, Heterodera glycines
atgctgcaacaaaacagaggccactgccgactcgtcaaaagactcctcttcggccgacggccttttgtccgattggcacttacgcttttctgccttctcctgctgaccgttttggcacttttggtggaatttccgtcgaaatgggccctcatttttaatggccatgggtcggacgggtgatttttttaaatttggggttcggatttagtgtgtctcaagccaattgattttattcaaatttgtcaattccatttcaaaactggacgcttttcaacggaatggccaaaaagagaattacaaaatgggaaacgaaaagcatttcctcaacttttatgaccaacagaaattgccaccgaatttttcctaagtttatcgctctttcgatcaatattttctaattttgtggattttcttagcaagttttcgtcctatgccaactccgatggccttggcgatgatggcaatggtttggcggtgccgcctaaatgttgccaatgtgccgatggttggcgcgggcattttgtgccggcggagacggaggcacgcgttttccaatcggtgcgcagggagcacatcgaattgctggccaaactgaacgaagcgcaggcgaaaatggacgcaatcgaagcgaaaatgggcgagaaaggtgcgatttttttttttggcttttttgtgcctctttaaaatccaattaaaaactcaaaagtttccctaacgtatttaacaaaatcacaaccaattgtaaaatttttattttccataattcgtccatcttgcaaatcgcaccacaaatttaaatttctaaaataatgatttttctagcggcgctttttggcattgccaattcgaggccaatgagctgcaaatttaaacattttcacaaattttcacattttttaattaaaaaaaatatttcatttcttccccttttcttccttcaaaatgtgcccttttcagaggccgaacttgccaaattggagctgcgagtggaggagttgaagttgttgcagagagagtacagcgacagtcgcgctgtacgcgttcaattgccacactctccgccaaagagaggcgaacactttcgagaggactga

SEQ ID NO: 67975 - DNA, 473 bp, Heterodera glycines
attccttgcacgcaattcgcgcatctcaaacaacacaacgaaacggtaaaacacaaagcaaaattggaacggaacaatggaggacaacagcagcaatttttgacaacaccaaacaatgttccaaaccaatttaaccttgatttgtgtgaagcctttgtctcagcaaagattcctttcaaaaattggagaatgaaaaattcaaaatttttttggaaaaatattgtaaacgggaaatgccccatcgttacaaacttcaaaaaaattacttgcggctgacttttgacaaggtcattcaaaaaacaaaaacagtaattaattttagaaaatatattggcgactctttctttggatttcggtggacgaaacgacagacaaaatgggaagaacggtggccaattgctgattggaaaattggatggacaaaaatcgcacaacccacatttgatttccgtcaaatgcttggagaaagttga

SEQ ID NO: 67976 - DNA, 862 bp, Heterodera glycines
atgaatacttttaataatcaacaaaacgcgtcagcagacaacaacaacaacaacaacaacaacaacaacaacaacaacaacaacaacaacaacaacaacaacaacaacaacaacaacaacaacaacaacaacaacaacaacaacaacaacaacaacaacaacaacaacaacaacaacaacaacaacaacaacaacaacaacaacaacaacaacaacaacaacaacaacaacaacaacaacaacaacaacaacaacaacaatgaggatgaaaatgatattgatttcataatcaacaatctgggaggagaaggtgatgaagatgaagatgatgttgaaaacggggatgatattaatgatgatgatgatgatgagcgagatgaactgctaccacttcgtctttgcttcttcgatgccgaaacatcccaggagcgcccactacagctcaacaaccaagtcgcccataaacatgtacctttgctaatagttgctgaattcatttgtgaaccttgcattcgagctggaatcaacatcaacgatgggcaaggtcagcgcgcacccggttgcgtttgcctatgtggaagagtgagaggtcaacagatgcgtcaatggatgtcaccaccttttgtaaatgctcctggggataatactcctcagccggaaggagctcctgtattcaacaaccgtcgtttattttttcattcttttgataacgaagcttctgaccccgtagaccaatttctcgactttcttatccatcatggatcaagaaaagcacacaccatttgtatcgctcataaacgaggaaaatacgactttcatctggtactcgaagcactacatcgtcggagttacccaccaaaac

SEQ ID NO: 67977 - DNA, 441 bp, Heterodera glycines
atgcaccaccatccaccgaatcatgaaaaagctatcaatctgtcaatccttacggtgtccgggccgggtgagtttccccgtgttgagtcaaattaagccgcaggctccactcctggtggtgcccttccgtcaattcctttaagtttcagctttgcaaccatacttccccccggaaccggaagacggtcgtttccgggaagctccccaccagggcgaataaatccgccggcggatcgctagttggcatcgtttacggtcagaactagggcggtatctgatcgccttcgaacctctgactttcgttcttgattaatgaagacattcttgccaaatgctttcgctgtagtccgtcttgctacggtccaagaatttcacctctcacgtagcaatacgaatggccccgtttgtctctgttaaccattatctcggtcagcaaaacca

SEQ ID NO: 67978 - DNA, 117 bp, Heterodera glycines
atggtgatgacgggtaccgaggataagagttcgactccggagaaggggcttgagaaatggccactacgtctaaggatggcagcaggcgcgcaaattacccactctcaacgcgaggag

SEQ ID NO: 67979 - DNA, 540 bp, Heterodera glycines
atgcgatttccaagtacaatcttggaaaaaagtacagttaaacttttccaagcacaaaagccgaaatccaagtatgtacttggcattcaagtacgaatccgagccctgaactattataatgcgaaaaatactaatattttaataataaatttaataaatcagatttaagcaattgtttaattcatattcattcattatggattcatataatcactgattatttttaatcattttttggcaatttattaattaaagaattggccatccagaaacaaaaagtcacaaaatgaacgtttattcggcccaaacttattacaacaacgcatcgccagcagaagtgaaaaaggcaatccactggaattggattttgttcatcgccttttgctcggcatacaaaatgacaatttgtgggcaatcgaagcgaggcgaattcaaaattttgtaatttttgtgaaagcgccatattatccagttgcaaaaaagttattgccagatatgcacaaaaaagcgactttggaaaacttttacggacaagtttaa

SEQ ID NO: 67980 - DNA, 181 bp, Heterodera glycines
atgggtcaaaatatgaagctaattttaaagcagaagtcaatcgaatcaatggaaaattggcagcagaacagaactcattatacggagataattgacgaaagctcagagcaacagaacaataattatggacaggggcgatcaaaacgccaattggcaaattgtaaaatatgcggacgacaat

SEQ ID NO: 67981 - DNA, 864 bp, Heterodera glycines
atgggtcaaaatatgaagctaattttaaagcagaagtcaatcgaatcaagggaaaatgggcagcagaacagaacccattatacggagataatggacgaaagctcagagcaacagaacaataattatggacaagggcgatcaaaacgccaattggcaaattgtaaaatatgcggacgacaatgtcagtacattttctacggtgtcaaaagctgtgaaagtgagcagatttgtttcaaaaatgagaaaatgcaataaaatttttaattgatttttttattattatattaatttaccagattaaatattaattaaattggaattgtcggatattgaaattaatttttgccaaaatcaattaaaatatttattttcataggtatggtaaaatgccgcggctgtcgcttggacaaatgccttgtggccggcatggacccgactcttatcaatgtgccaccctcggacaagttcaagcagttcttgaccgaattagagaagcgcaaattgagcgcaatgctgactcattcggaaaagaattaaaaaacaaaattatttgacaattgttttaagtttttgttttgaaaaactaagtttaacttaaaaacaaaaaaataatttttctatattttttgatagataattttttacccattctttattcagttatttatatttatttggctttatcaattatttattcttatttactagtattttattgcttaaacggcacttattgatcgcattttttggcaatgcttctccatagccttttctttttatgtttacgttcttttactcataaacaattcatgacaaaaaaacttcggccaatttttgttgaaatatttggcgaagaatgggcaa

SEQ ID NO: 67982 - DNA, 930 bp, Heterodera glycines
atgcatattgaaaaaattttccccgaaattcttatgattttaattttattcataagtttttcggactcggcaccacccaaaaataaatctgctgaaactgtcgacgcgtcaagttcagatgattattgaataaaaaattaatttaattaaattctttaattataattttcaaaacaatttcacaatttgttactgaaaactccgcgcacaatataaattatgttgtgtaatttgcttacgaatacacactgccaaaaaaacattttttgtaaaatttcatttatctattatttttatcataaaaaatagattaacttaaggaaaatatacggtaactgattatacggtcgacatcggaaaacaattaagcagatttcaaacggagaagttaattaaacaagcaaaacaatggataaaaaatgtgcaaaatgggcttaaagaagactttgatcaaaggtaatgtcggttgaaacagcgattgattttttgttaaaatttattattacatttgtccaagaatttcaacttttgggatattttgagccattttgaaattcttatttagggaaatttttttttgttgaaatccaaattaaattctgcttcattcctatttaggcttttcatccaagttgtccaattacgttttttccgtcgccatttcctcgaacatattttgagcaagcgtacaacgctcaaacagtaaatcattatttattataattttaatgtatatattttataaatcaaaattacacgataatcttgtccaattttaaaatagtgcttaaaattaattttaatacaaaaaatattttgcttttttatatttcattttatatttttgttgaacttttagacctttacatagatgttgggatcgaggaatgacaaaataaatttgactcttaaactaataatttaaataaa

SEQ ID NO: 67983 - DNA, 638 bp, Heterodera glycines
tttttcagtgtccgtttgggggtactcaaacaattatgcttttgcgaaaatccaacgcagaattaaagtacaggctatagggtagctattcccgaaggattcggtctccccataaatctgggcgcatcggttcggggggactgccccgaaaacaaaaaaatcgattttttcaagtgtccgtttggggtactcaaacaattatggggagcaaaaatccaacgcagaattaaagtacagactatcgggaagctattcccgaaggattcggtctccccataaatctgggcgcatcggttcagggggactgccccgaaaaccccaaaaaaaattttttggataaaaattatttaaatgaactgactagataatatttaaaataggttatttctcttcctttcagtatccctgcaaagtttggtgcgcttctgatcagtttctgaaaaaaaagttaagcctaaactttttggcctgtttaaaaaggaattaaaaatttttaaaaattttattcatctccctttttgatagaaaaagcatcagagtgcctaaactaacatgtaaataaaatttggtgcgtttcagagcattttctggaaaaaatatttatgaattaattatgcaaaaaataaacaaataatgaa

SEQ ID NO: 67984 - DNA, 381 bp, Heterodera glycines
agcaagaatattgctatcttgcctaggcgggattctgacttagaggcgttcagtcataatccctcagatggtagcttcgcaccattggtctatcgaccaagcacatgaaccaaatgtctgaacctgcggttcctctcgtactaagcaggattactatcatagcaacaggtctttagtagggtaaaactaacctgtctcacgacggtctaaacccagctcacgttccctattggtgggtgaacaatccaacgcttggcgaattctgcttcgcaatgataggaagagccgacatcgaaggatcaaaaagcgacgtcgctatggacgcttggccgccacaagccagttatccctgtggtaacttttctgacacctcttgctgga

SEQ ID NO: 67985 - DNA, 647 bp, Heterodera glycines
atgaatgcatcagtctggaaaataggtctttttgaaaaattaaaagatggcaaaatggcggagtgccgcgaatgcaaagcaaatggaagagccaaatatgaatttggcctgccagacttcagcaccaaatcgctcaaaaatcatcttttttcaacaatccatgcaaattcggaattgatatttttgaacaaggccatcccaatgttggactacaaatactgatttaattttgttggatgataaaaagttcataaaattttccataaaattttggtttagaacaaagaaaagaaattacgcaattttttttatatttataaatgcatttttaaaatttgaaaaaagcccggtcccgtacgggcgcccggtcaaaattttggaccgggcccgggacgcccggtaaaacgggctttttttgaacgggcggcccgccccggtcaattttcgaagcccggtcccggtcccggtactttcaaaattccggtctctagtaaataacattggatagagagagaaataacgcattaataagagggtgctgaaattcagtaccggtcatacaaaagcatttttgatgaagaagaatagagaaaaaaagcaaattcaacagagagtgttataggaaaagatttaaggacatcgagaga

SEQ ID NO: 67986 - DNA, 94 bp, Heterodera glycines
attttatggaaaattttatgaactttttatcatccaacaaaattaaatcagtatttgtagtccaacattgggatggccttgttcaaaaatatca

SEQ ID NO: 67987 - DNA, 713 bp, Heterodera glycines
atgatgagacccgtacaaaacaaagcaattgtaatagaccggaaaaagatccgtcgtccaccaaaaaatcaatgcaatctaaaaattgctcgagctttaacaaaaggtgaaattatcaaaaagcttaatgttttctttagaaaaacattttttttctattttttcaggtaataataagaaaaaacaattggacgaaggcccttacgttgacgcagcaatttattctcccgaaatgctcgaaaaattagaaaaacaggctggcaaaaaagtttatgtgaccaaaaaatacgatttggcagcacacgccagaacggtagaagaagcaaaacaaaatttgattttatacgacaaaaaaattgaccaattgagaaaaatggaggccaaatttgccgctttaacttatcaaaacaattctgaagaacaaacggaacagcagaggcatcacattttaaaattaattaaactaattccatgatggttgactcgaaaacctaaaaatttaatttgagaaaatttcggaatcgggatttttgagaaaaacctaaacctgatggacatgattgcaccctataaaaaaattattaaaggattacggaccagaaaggggatttcgacaaggtttcgcatgggagtgaacaggcggtgcaaaatttgaggacaaaatttcctgacagagatttatggaccatttataagaaaaaagaaaaaataaa

SEQ ID NO: 67988 - DNA, 1852 bp, Heterodera glycines
atgagaaactctcgaaaatttaggctaattgtgaaaaaggaaaagtcaagagaactaattgattataaaattgagaatcaaggtaacaaacaaaatgataagaaaaataaatttttaatttcacagctcggataagtgatgaagacttgggcaaactcaaaaagcttgcaaatatcaggtaaatttaaaaaaaattttaattttgattaagccgtttatcaagacaaatccaaaaatacccaaattgttcataaaaaaaattgactttatttagacaagggaagcctcaaaatctttgcttaattaatttttttaattttttttataatctttcattcattttgggccaactaaaatgcgataggaattcgtttttaaaaaatacatttttattatcaatttccaaaatttttaaataaaatgataaaagataaaataaaaatacctattaaaaattttaattttgaagaataagaggcgacgaagcgcatcattcattttatgacgaagaaatttatagagaaattggcgctggtaaaaaaactaaaaaaataacattttgattttgcgaatttaatttagaaataagcgatgatgaaattcatgaaatattgtctgattatgaccgaaattcaaggtcaatttttgaaattcataaaacaattttattaaattatacccacatttagattaagcattccaagaaacgaagaacgaatcattgaacaaaattttaagccttcaccaaactcaaaagaattggaaaatttgcaagacaaaagaaaaagaggtttaatggaattttttattttttttataaaagtaaatttttttcgccaaatcttttttccgtaagccaaatatttttaagctttttgattatttttacttggaatatttcaattctacacctaaaaaccagaggccgggacgggttcgttggtattgagataggcttttttctcaaactcaacaaattctcaatgaaatatttaaaaaaaaattctcaaaaatacctctcattttaacattgcttggcaaaagcgagcccgttccgatctctactaaaaacacatctaaaacaaataaaaccaattttcattaagcgcgtggcaaaaatttatcggagccatcaggacaaaatcgtatgaaacaaatattcaattctgctgatcaccacgacccattagagccgagctcgtcaaattatgaccaagatgatttttcatttgactttggacgagcctggcaaagtccttcccctaacaaccctcgtgtatttaaatcagaagcaagaacggcaccatcttcgccaattacgcacttcatgccaagcacttcaaacagttcaccaatttcaccaagaaggtcctcctggcaaggtccgccagtgtataatgatgggcgagggtccaattccgctgctagctcggcgccgtcatcaccaacaatgccaaaatcgtcggcaacaagtccaagcagttctccgaatacaaagatgcgaaaaacaaagaaaagtgaattagtgggctttttaaaatgaactttaaaaactaattgggaaaagggctacagtgattaattacaaaaattggtacctattaaaatacattttaatatattttcatacctcggccaaggattcttgacttttattaattaattacaaattaaataaacctttctaggcctttcattcaataaattgtttggacgcaagtcctccggcgacagcgaaaagcagttgactgaagaagattatgggggatggcgaagatacaaagaatgcgagttgggcatacaaaatgccatcacaacgatcagaagccgattggaccaatgggatgccgag

SEQ ID NO: 67989 - DNA, 355 bp, Heterodera glycines
atgatcgcaaatgtaaaattttttcctttaattatttttgtgtatcaaacgctgatcaatttaatcgctgaaagtggcgaaattaactcatgcagaacatcaaatgtgtcgtcgccgtcgaaaagcccccgaaggacattggcacaattatttcgagaagaaaatggtaaaaatataaaaaaattcgaaaaataaataaaaaacaatgaaaaatttataaaaaagtttagaaataaatgataaaatatttttaagaatcaagtcagagagaaaatgaggacaagaagatgaaaggcaaaatgtgcaaaagtgattcatcaactcaaagttaaaaatataaatacagaataataaa

SEQ ID NO: 67990 - DNA, 4663 bp, Heterodera glycines
  unsure (1)..(4663): unsure at all n locations
atggacccaactctggtggaagctgaacaaagtgaggaactaagccaattcatccaatcgctttacaaagccgtgaatttcttcaacagcagctgaaggagaaagaagaaaaaaattgtcacatggaaacggtaatttcttacacaaatacagtaacttcttcaatttttaaatcattttaggaaagcggcgcaaatgtaaatgatgaagatgaaaatgaaaatggccaatttgaaaagataaaacaaggtcagttcatagacagtggctaaattatttggcatttcggtcaattttttattaaaaaaagtaacggaatatgtttttgaaatgattagggttggcactttagcattatcactattttttaatcgaatagtaaatttaatataacaattatttaacctacttttaagaaaaaacatgaatttaacttcctttcacgcagaaattatttgttaaattagaaaaaatttggaaatttacttttattctaggagtttaaggctgatggattctctggtacatccattaatcatctggtaaaaactaaaaacccattgttttcagaaattggatcagtgattcagctgttgcgtacaatgccacacttcgaaatgttagagccaactgatcaagtaaaattccaattatgctttaacatttaataatttaattaaatttaaaatttattttttaccttttaggtgattcttttgagttttgttacaattcctttgattgcaatgaatgcccgttttaatccattaaaaacgaactcagaaattatcacaaataacaacaaatttaacccattattccatgcggccactgttaaaacgtaaacaatttttataattttccttatttttataatttttttatgtatgattttgttaaatttaaaaataattctctctaaatcattttttcatattttatttttaaattcagattacaactttcggaggaagaattttttttggtctgcgcattgacatcgtcaaattcaggcaacaattaaataattgaaaacgaattacaaaataaaaattagttttttttgacaaattttgggttatttttacaataaatcgtgacaatgttctaattgttcagcagttactgctggtctctctgctgctggtcgtcgcactttgcaacatttgtccgaacattactccaatctgttgatgcaccatttgtgcaccaactgcggcaacatggcgggggcatttcgtcatgccgaattagtccatctgaccgaatcggtgtttttaaatgcggaacagcttaccgaatattatcggcaagaaattacaaattgttttctgggcaaaatttgaaccagtcaaacaaactttagaatatattgaccgaatatttattaaacatttttaagccgtatatttgtatattcttattagtaataaaaattaatgtttcctttaattggtttattttaaatttccttcgagaaaaaaagaatttttttttaactttttggtgccttttttcatgcctttttcagtatttttgaaaattttgcaagttttcttatcatatttccggaccacagtatacctggtttttgaaattttaacactatcatttttgtctaacattggtttcagattccatccggcggtagacaaagaaagatcctttcttggatttttacaatctatgacattttttcaaatgcgtccaattgctttgcaaaagcttcgaaaaatatttcttttacggttctttttatattaatggttaaggttcgagtctcctctacgtcacataaatattttaattataaaataatgattttcaaaatggtatttttaagttttggtccaaggcatagattcttggtatggataaccttaaaaatcttcaaacaataaaattaaattaatcatacaatttttgattacaaaaacatttgttgattaaacagatggtttccaataataaacaatttttgctataaattgttttcgacacaaaaatattttatcaggacataaaaaatcgtaaaaacggttagtgaggtccataaattgacgatgatgaatcaagtccgtcgactaatttaataaagcaaacaattagccatttgcacaattttctgccgtttactatttgtcttttacaatgatggttagaaagagcattttcttcattaaataaattttagggaaatgaaaaaaatattttatcctttaaatttaattgcataaccaatttaataataaaaattattgatttagcaatattatgattttatttataataataatttgtataattaacttttgcccagtaacaggattttgggtttgtttcttaatttttcaaattaattctattttatttaaagttaatccctgattattggacaacaatttatcggaatgggcacattgagcctggaagatccaatgagcaatttattacctttccaaattccaaacatatgtacattggatattggtaggagaaatattttgaaataaattctaaataaaatatattttaaatttttatttatttattttttaaattatctctgaatttttatttaataaaaattccaaaaatcaaaaaaaaattactatatcaggaaaattcgagaacatgctaatgaaaattcctcaatcaaacaaattttttgaaaaaaaaaaaattataataaatccaaagcatattatttatgataataatattcataattcaaaaaatgaaaatatggaaattaattgaataataaattaacctttttttcattttaggataagctccgagaaaaattatcatgaagcgtatggcagtgtgtattcggatggggttgatgagcgtggcacacaatactgtggcacatttgcggatgcttatcaaaataaaagtgtaaaaatttgtggcagtttccgggttttatccaacaaacggaatgccacgttaaatccgtaatgatagaaaatatgtttacaattattaggaattatatttctaggcaaatatctaacattctatttttatgcccttgatacgctcagaaaaagacaaaaacgaagtttttacctgtcgcattttttttttgcacatttcgctattttgggtgcctatttatgggattttcggaaaattccttaaaaaaagaagtaaaaccccaagaatcgaccctaaaaattcagaaaaacaccctaaaaactgaaaactttttaaaaaattgatgacagaaagtttcatttaaaattgtccttattctaatattttttgataattaaaataacttcgtttacaaatcaaatataacaaaattgcttttttagctattcaaataacgtcttttactttaatttgaaaatattccaatattcttaatactttttattttgtgaaattcattaatttttacttttggttttaaattttttatagataatgccaaaatcctttttgtctgttttgttgtgaaaaagagtatattaaattttcgctaagaatcatggacaagaaaaatatattcgataatattgctatgtcaagtattttaataaattttttgctttgtaaattatgtttttacattagctgcctattcataatataaaatttattgcaaatatttgtattttttccaattttgaaaaaaacccttaagttttatcaaaagcccatgttaatatttaaaagatatcataaattattataataaatctttttttagatttgagtttgtgccgatatctgacacaataaaaaacccagaaaaagccgttgaatatttggattggcaaattgcgcgatatcggacaaattcgagtgaaaaatgggttatcgggtgctcaaatgttcttaagagaatggcatattttccacataacggaggtcaattaaaaaaggtaaaccctatttattaaaaatgctttatttatattgcttttatccaatataaactacaaaaaaaattattttaatctcactaaattaaatttctttaaacaaatcaaaaaaaaaaaatttaataataaaaaatatatttttgattaaatatactttatattttttatgttaacaagattcctatattttataatattttcaatattatgccatttataattttatatttttaattattatttttttctaaaggttgatttcaaagaaaatgtgcgcactattttggagaacaatgtgcaagtgttgcaacgttcagccgcatttgatccacgggatttgtatgagcaagtgccaactgttgcacagattgcggcatcaacacgacggacaactgccaaaaaattgacaacaaaaacgatgccaaaaacgacgaggattacgatgaaaactgtgagtgcgcgcataatttggaatttttttccacgaattaggcattctcgagcaattaatgagatttattaaattatttttgaagacttctacaacaaccgaaactccagcagaacatgagcaagattatgataatttggctggagcaggaattgaatgggatgcaaatgtggaagcaaagccacgtaaaaatatgaaaattaaaaaataaataaatattttttaagcttccgactcttcacaaaaattagaaggtggcgccgttcttagcgtcgctgacaacgaattnaatattgcaaaacaaaaataa

SEQ ID NO: 67991 - DNA, 1339 bp, Heterodera glycines
atgtcgtagtgagtaaggttgttgatcggtctgcagcaacccctttgctttggtgaatgctttttcaatttgtatttaaatattttggcatttttgataaatatctttccgttccttactaatcatatggtcaggtcattcgaaaactttaaatgtttagaagttatttctaaactattgactgccattagacaatgacaattattaaagagttgtaatcgaaaattgcaaaaagtcaaaatttttgaaatttttcttaataattttttttacagctcagaaaatctttttgatttttgtaaggcgaatagagcatgtgaagtttcgaatgataccaagaatgttagatttgagcgagaaagaaaaaagttagaacccaaaaactcgggctggcgcaaaaacgattgcgcgaaaatctggtccaaatttttgcatggttttaggtcagctttgaaatcttagggagaattttgtgggccggcatcgctgacatgaacaatttttcggatttttaatgaattttgttaagaaaaaggcttttgctggagaaaaaaaaaatttaaaaaatagcatccgtcaagctttgctttggcaattatgatcgcatcatgccttttcattctgttttgattggactgctcagaaattgtgttgaagtgatttgagaaagattgcaaaggcgttttttggaaatgataaaacttttttcatcttggcttttttgtttatttttgtataattagtttaaaataatatttttgccggtttttcactattaaaaacattagcgtcggtaagagcaatgaaagtgacgcaacaaaaaattttaaaaaaagtattttaatataaaaaggatccggaaagaataatagtctaacttaaataatcaatcttataaattaatatttaaccagaattattattttttattcaaaaataccatatttttgataattctaaaaacagctaagaaaaattgtaaaactaaaactatttagtgaaactccgtttttggttgtgccattgaaaactaattgtttgactttgatttgcttcacttgtacattctgtttcaaaattacagacccagggaaattttgtgtttcatctggcttggaatagggaaatttttttacaaacttttagaggtctggacggagtatggagtatatgtctaagatgcttccccgaagatcaaaaaaactatatgccatatttgaatttcaaattttataatattatccacttttgaagctcggcgccaatatttgggttttgaaatagcatcttattttataactttgaccaaatttaatattttgggattttaaatgaaaaa

SEQ ID NO: 67992 - DNA, 982 bp, Heterodera glycines
tgtccatttgacggatggcggcggaggattcaaagaagtgcaaattcaaactttggcacaatgccatgccaacaatggatcaaaagaaaccgcaaataagccttacggaattgaatttcgtatgcctcgggaaggcggaaattgtgacgatgggtgaaaaaactccaaaataattaatgcaaataattatattttcaattaatagcctcctcgtctgttacccggcacttcttcaacgaggcaataatcatttggagaaaagcagaaattttaaagttacaagaaaatttatagttgaagctaaaatggtaaattttgggtagctaattaataaattacctaattaattctccccaggacaattcgcttggaaaagaatgtgtgcaaaatatggcaaagaatggccgcgaaaatggcacaataatttggcgtggaattaaactgcgcacaatgccaaagcaaaataaccaaaacaatggaagaattattattttggaaacatcaatttccttaaataaacagttaatgttactaagtattttaagcaaaagtaccaaatttttttgtattttaattttacattttataaaattaaatttgtattaaaataattttttaaatattttaagatataatttgagtgcaggacaacacaaattttctgtactttttgctttgaatcaaactgctgacaatgagccattcactcgcttttcatcggtggaaaatggtgaaaaattattatatattttaaattggcattctcggctttcccaaaatgccattctcagacttcggtggccgtgccatgcaaaatgatttccttcgttcaaatggtccgtcttttttgtcggattatgccgacctttggcttcttggacttgacatgctgccgatggcacaccaaacagaagagcaaacagaacagctgaagatggagctgttcatcagccgcagctccaaatgcctcattgaagcatgg

SEQ ID NO: 67993 - DNA, 294 bp, Heterodera glycines
atgccactcagacggaaaatcaatgctgcggtgaaaaagtaaattcaataataccgtatcactaggtttggtacggtcattcaagaaacgatttaagtgccaatatatgtcaaaatgttcaaattcaagatggcctacacgatgaaactgaatgagtcgtgtgcaattcttggcaaaaagttcgattgttcatttgcgtggcttttggagcggtacaaactgtcggacaaatacgcaatcaaagcgaacactgaggtaaaatacacaattaaattttaataattcatcaaaata

SEQ ID NO: 67994 - DNA, 327 bp, Heterodera glycines
atggagaaaaagctggagtggaacgggattcccgccttttccccgttaaaatcccgtcaaatttccctgttgccagaccggtgtaattactttttatgtgttttatacattttttcacaagcaattcaaaaaacaaattttcaaaagtttatttatttttttctaaggcattcttgcatttgctttaaaaataagctttctcatcatgagttttttttatgctattaaattttcagttatctttatttgaatctttttttgtttaccaattcaaaaatgtcgcacaatccgaaagaagcaaataaagaaatggaaaaagcgatgtaa

SEQ ID NO: 67995 - DNA, 968 bp, Heterodera glycines
tgattagaagagatacaacagtgattagaagtagtacaacagtgattagaagaggttcaacagtgattagaagtagtacaacagtgattagaagaggtacaacagtgattagaagagatacaacaatgattagaagaggtacagcagtgattagaagaggttcaacagtgattagaagtagtacaacagtgattagaagaggttcaacagtgattagaagtagtacaacagtgattagaagaggtacaacagtgattagaagagatacaacagtgattagaagtagtacaaatttgattagaaggggtacaacagtgatgagaagaggtacaacagtgattagaagaggtacagcagttattagagaggcacaacagtaaatagaagaggtacaacagtaattagaagaggtacaacagtgattagaagtagtacaaatttgattagaaggggtacaacagtgattaattagtaaattcattaaattaaaatgaaaatattttttaacaaatttaattaaaaaaaatacatgaaattctatcaattaaaaaaataattaatttaaacttataaaatgtattcatcaaaaaaaaaattaatttaaatataattttttatttattaactcaacaaaatattttaaattaattaaaatcattgaaaataacgtaaaaatgcacagaaaaattatgttacaccgtccggactcgaactttgccccccccccaaaaatgatgcctcagaatccccaatcacacagggattctgaggtcttaacgatgtcaaaagtaaaatctgatcacatattcatgatcagcgtcataaaatagccctaataacatgtttctggaagatttttggtgaaaaaatttttccactcaaaaatcctggtcacccccctttggtcccgaaccccaaaatcacttttattttggtatcattttttaaaaatgtgataaaaatatgaa

SEQ ID NO: 67996 - DNA, 157 bp, Heterodera glycines
aatgcttcgcactatttctttgttcaaagtgtaaaatgtgccgtggctctttcgaatttggcactttccgttggcccatcggacaattcgtcgtccaattggcccccctctctgccgcccccaaatattgtcggaatccgacgcattcgaatggaag

SEQ ID NO: 67997 - DNA, 49 bp, Heterodera glycines; identical to SEQ ID NO: 51181

SEQ ID NO: 67998 - DNA, 49 bp, Heterodera glycines
ggaagctactcccgaaggattcggtctccccataaatctcggcgcatcg

SEQ ID NO: 67999 - DNA, 2384 bp, Heterodera glycines
atgtgcccggaagagcgggaccttgtcattgagaaaggtgctcaaaaatttataaaaaattttctgtttttttgaaaattttataaatttgaaaaaattacgcgtgattaaccgcgatcatttgaaataattaaaaaccctcaaagtatgtagcgacttttacctcagaatttgtttcttttttgcaaaaattctaagaattaattaaattttttacgtaaaatttcttttatatatttcatcattttttgtgtttttcaggactaaaaacgtgcaacagcgcgttggacgagctgtccaagaaggtcatcgaagtgtttggcaaactgtgcacggacaaacaccaaatggagttgaaccaatcgccgcacacatgcgcacgcattttggccgccacttacaaactgttggcagcagctgaaaatgacggtgggttggtcttcaacgacggggggggggagacagaaaaatggtttttttaaaaatgaaaatgagtgatttcttggaaaacaaaagcattttatgacggcacaagcttgaattcccttgatttttttaaaaatatgaccccaatgtcaaaaagttttgtcattttgagccaaaaattatacatttttaaaaaatttggcccaccccaaaagtatgtcatttgagccaaaatctttttttcctccgtcggcatttgtctttgaactactccttatttaatttactatatgccctattcataaacagataagtgtgagcttgcgcagcaacaaaaaatggcggacgaacgaatgcccggccacgagagcattcgcgaagcgggccaacccgtctccgccggcgactccaccgcgctttacttggccgagctgtgccatgccattggcagtgccaaagaaattcacatttccaagtgcattttttgttttactctacagcgtactcatataaacatttcgccaaatcaatcatttttaattgaaaattttgaaaaagagttttttgttagaaaaaaaacaaagcaaatcgcttaattcccccaaaaattttcaggcacatttttgtgccccgtgaattcctctaccaaaacttggaacggcatctgaagacgtcgctggtccggcatttacgtttcgcaacagcgacgacaacgtccgggacggcaccgaacgtaggaggcggcgccgggccggcgatggcacagaatgacagcaacacaaccaccgccaattgtcctatgtcaccgcatcctcggcgcccgtccgaaatgctggcatttctctgtgcccaaatgcacgcgctgcaggacttggacacattttgtgggttatttttatttcacactttttcaaataatttgccggaaaacaaaggcgtttgccgggtttttgtggggtccgtgccgcattttgactcatggtggaaaaaattggcacccctacacattttgtagtggcctatgacattgtgtgtctgttccgcgacgcgatgctccaacaatcgcagcgggaggacgcccatgggcaggagacattggccgaagtgtactcaaaatggtgagacgagaggtcctccctataaatggattttgattcaattagtatcgagaactgacgtattttcgtctcgtcgtaagccatgagaatttgggggccaaatttttcgactttttaaaatcaaccctcagtaaaaaactcccagtcccggactctacttacaatcacaacccacaagggtggtttttcagtttctttcattgaattttttctttgtgtctcgtcataatgtggtctcgagaagcggtacttgttggatttcctctgccattgcagcattacaatgccatgcgacgctgcactcttccacattatgccaaaaaaatcacgtgccattttataggtatttggaggtgctgttgcgcaaggcgagcaccggacagttgctgtactcggaccatttgcaagcatttgtgaccagtgaacagccgcagcaacagcagacgagtgccgccaccggcgccggtgcattgttcgccgaaagttacacggacccgcgggaattgcgcgcgcttgcccaactgatcggcccttacggcatcaaggcgatggaggagcggctggtgtggcaaattgcaagccaaatcacggagctgttcaagctggtcagggagaacagggagacactgcacgcggcacgcgtcaactttgacaagccggcaaaactgcgagaagtgcgttctcaatgctctttttttggctttctctttctctcactttctctctctctccttttgctctcatcagtttttcagcgatttgactgatcgccgcagttatacaacacccaaaaatttaaaaaagttttaaaattaaatttaaacttttttgtgcaataaa

SEQ ID NO: 68000 - DNA, 76 bp, Heterodera glycines
atgactggaaagggatttggtcggctttatatgtactcggataaacttgaagaacggaggatgggaatttgggatg

SEQ ID NO: 68001 - DNA, 309 bp, Heterodera glycines
atgtctgacaatccgaaggaagcggagaaagaaatggaaaaagcaatgtaacaattaaattttgaatttccatgttaatcattttgctgtttcagcttcatcgctgccgactgttggttggaagtgttcggtttgcttccacgctttcaacttggactgggaattgcgatgattagccaccgttttgaccgccgcgtggatgaacatttcaaaacgcgcaaatggacattgggacgaattgtaattcaacgcaaaattggagagaacggcgcaaaggaaatggaaattgtcaattccaatggaaaatga

SEQ ID NO: 68002 - DNA, 482 bp, Heterodera glycines
atgcaacgagcaatcaaatattttattgactattacgccataaacgacattactcaactgtatgctctgttaaaatcggaaatcgactcacacccgtccaattatttcccaaatcctctgctatcagtctcctgtgtccatattgtgaacaccgagttcgaaaaccaaccggtgatagtggaaggaacgcttgatttgatagacgagctgctcttttcgacatgctaccccaagacgaggcagggagtcggctggtaagtgagggattaatgtcaattatttaatattttttgttcaggagcgaacctctgtatgtggaactgacagatctaatggtttgtccgggcgatttgccaatatgtctgtcacacttcggacaacggaaggaacgacgacccagcttgatggtcgacgaactggattggcacgacagcgacgacgacgccgcagacgaagcctggtgaaagtgttatgtgaattca

SEQ ID NO: 68003 - DNA, 911 bp, Heterodera glycines
tctcccctttttggatagaaaaagcatcagagtgcttaaactaacatgtaaataaaatttggtgcgtttcagagcattttctgaaaaaatatttatgaaataaaaaaatcgatttttttcaagtgtccgtttgggggtactcaaacaattatggggagcaaaaaatccaacgcagaattaaagtacagactatagggaagctattcccgaaggattcggtctccccataaatctgggcgcatcggttcggggggactgccccgaaaacaaaaaaatcgattttttcaagtgtccgtttggggtactcaaacaattatggggagcaaaaatccaacgcagaattaaagtacaggctatagggaagctattccggaaggattcggtctccccataaatctgggcgcatcggttcggggggactgccccgaaaacaaaaaaatcgattttttcaagtgtccgtttggggtactcaaacaattatggggagcaaaactccaacgcagaattaaagtacagactatagggaagctattcccgaaggattcggtctccccataaatctgggcgcatcggttcagggggactgccccgaaaacccaaaaaaaaattttttggataaaaattatttaaatgaactgactagataatatttaaaataggttatttctcttcctttcagtatccctgcaaagtttggtgcgcttctgatcagtttctgaaaaaaaagttaagcctaaactttttggcctgtttaaaaaggaattaaaaatttttaaaaatttattcatctccctttttgatagaaaaagcatcagagtgcctaaactagcatgtaaataaaatttggtgcgtttcagagcatttctgaaaaaaatatttatgaattaattatgcaaaaataaataaaaatt

SEQ ID NO: 68004 - DNA, 378 bp, Heterodera glycines
atgggacgaacgaacgaaatgaatgggcaaaaaacggcgaagaaaaaagaaaaaaaagaaaagggaaatgagacgtcaaaaagggcacagaaaaaggcaaatggacggcaggaagaaaaacgacaaaaggctcagaaggaggaaaaggaaggagaagaggaggaggaacaacgagaaaacatggaagaggagaggggggagacaagtcaaatggacgtcaacgaatgcacaaccgcaacatttgaggcaagtggaaaaaaacgaaaaatcgaagatttaacagtctttgattttgaaatcatatgacaattctgtggcagattcggaaatagtacctccgattttcctgctgaagtaaagttggctagaatgagacca

SEQ ID NO: 68005 - DNA, 928 bp, Heterodera glycines
atgcgtttcatcgctttggacgcatacgaaaaatctgggttgctcgtcgtcctcctggctttgcttttgtcgagtttgaggatgcacgagacgctgaagatgctgtgcgtgcactcgacggaacgtatgtgatttcctaaatagcagtcgctcaattgtgtttaggaggatttgtggcgtcaaggcccgcgtagagctttctcatgggagcggaagagggggcggacgcggttttcgaggcggagggggacgttatgacggtaaaggccgtaatcttccgaaaacttcaaatttgtttctctcagaccgttatggtcgtgatcgttatgaccgtgatcgcgaccgtcgttatcgttcaaggtattaatgaaattaattcgttgaagcttttttcgaaacttgaacattgcgcggatgagtggtcgaagtttataaacttcaatttgtcaaatttagcttttcttcatcaaccatcccatcttgttgcccttctcctcaattctccctcaaactccatcttccaatctcaaccctcacataatgccatccaccccatctcttctcattgtcagtcttggcaccctcttccttcgcaacaagaggaacaaaaaaattcatccatccacccaaacattttatggtttttccttaaacttggatggaaaaatgccgaaatagtttaaaacccttccaaaatcactcttcttccattcctccaagaaaattttctaccaattcaatcttttcaggtcgcgttctcgcactcctcgccgttcccgaagccgctctcctccgcttcgcgagcgcagccgatctccgagctacagccgtcgttctcgctctcgttaaagtaaattggcaaaactagtcacagtatagccctttattgtttcagggaaagaaatgctcgatgatgctatcagaatga

SEQ ID NO: 68006 - DNA, 1630 bp, Heterodera glycines
taggaaatcacatacgttccgtcgagtgcacgcacagcatcttcagcgtctcgtgcatcctcaaactcgacaaaagcaaagccaggaggacgacgagcaacccagatttttcgtatgcgtccaaagcgatgaaacgcatcgtccaactataaaattaaaattcaattataaaaacaatatctagcttgtgcgtccaatacgactcaatcggaattacagcctatttttgttttagtttgatatatacagtttcagtcaataaataaactttactagcggattggacgcctaaaagacattggatgcgtaattggaatgagtaaaaacctcttcagaagttgcatcctcaggtaaaccaccaacataaatcttaactgttttttgaaaaattattgtagaaaaacctaaaaccttcgcatcgagatattcatttcttcgagaagacattattcatcaacaaataaaataatacgtagtaaaaatggcaacttgtgcctttctgttatatgtaaaagctatgaaaagatggaaaccgcgaaaataggtttttacgagtcttcctttatctcctctcttacttctctctttcttctccattctctttccctcctctctctctctccctcacttcatttctccctcactccctttctcttaatctcatctctctctctctccctctccccctctctcttaacctcttatctctctctcttcctttctcttttcgcattccactttcagtctctcaatcattttctctcttactcttcatcttttcctttctcaatccattctcttagtctctctttctctctcctctctcccccccccctctcactcattctctctctttatctctctctctctctcttaatctcatctctctcttccctttttctctcctcactgcacctcttaacaacgcccaaaaaaactcggttttcgtgcgtcaaattaattactttctttaattaatctactaggtattttaatttaattttaaatttttagtatacgaaagatggagacacaaaattcgtccaagagctttgatgattctgacgtaaaaatggaggaagttaaagaacagttggatgaaaaggtttgcttggattgaggattgtttcagcaataaataatttagacgaagcctgagttcgacaaattcctaaatgagatcgaaaatgaagtccaaaagcaagtttttcaagaaaaggtaatttgttaatttctttttgctatttcaaattagagaaattaaaggcggcaccgacagcaaaacgtgaaggggccttggtaaagtcggctgcgttaggggaccaccgccacagaatgaccgaaaaagaggaagacgagcaactgctgcaacagagcgttcgaagcgacgacagtccgttcatcttcgagaattccccacctttcatcaaaaacggggaaatgcgcgactaccaagtccgtggactgaattggttgattcaattggaacacaaccgaatcaacggcattttggcggacgaaatggggtaaaatgcttttgcttcctctaattttatgacctttccaatgcgttaagtcttggcaaaacccttcagacgatcgccgttcttggatttttgaagttttacag

SEQ ID NO: 68007 - DNA, 685 bp, Heterodera glycines
atgtctaaaagagagaatcaccccgaaaaggaaagggaagaaaaccgcgccaaatttctccgctcgctcatcgatgatgcccatttaattttggcacatggaaacccaaaaatcatcgaccatcgcgtgagtaacagcagcatgcctttttatcagttcttaatttttatagatttcacattctgaccgttgcgagtccttttggataagggccggttttctccctctgtacgagagtttgcccgtttgggaaatggaaaaagtgccgtccattcgaaaagtgaagttcaccggcgatgacaggtccaaataattaactttatttccatcaaatattattttttaataatgtccaacaaaacagacgccgtcttggcgaactttcctttacaatgcgcgacaaacatggcgatgcaagtgcggacgaaaagcccaatgaaaagggtaactttatccgaattgcggggcgtatttctcccttaccattttttcagctattcgattgggatgacccgggcagactcgaggcaccagcgtttcccccgttttttgacgttgcggatgcattgataatgtcgcccatggtttataatattctcacctactcagagccattgtgacaatgctcagccttcgaataagggtcgggtaagtccaattcattcgcactattcatttttgtgta

SEQ ID NO: 68008 - DNA, 392 bp, Heterodera glycines
atgctttatcaaattgagttgccatttgcctcagtaattatggactcatcaatcagcagaaatgacgacgtttttgcgtacaaacggttctccaaatttttcttcaaaattgagtcgtttgtgtctccgttcaccattttctacgcggactttgccaaatatgaaaagggcgaacacgttcagttggaagtgtttcgccagggcaaagtgcccgagatgatggacagcaaggaattcacggtggaacaggtcggaagcaagctctaattgagactacttataaaaaatcccaattaaggctttaatttgtacaaaattatttttaattgtcgtccgttccttgcaataatttcaaatttcaggtttcctataccagcaaagatgggacaccg

SEQ ID NO: 68009 - DNA, 828 bp, Heterodera glycines
taattaaatccattcctcgggggaccgtgccgggtgccgcggggtaagcagtgctggttcgtttcatcacggcaccgaaccttttggctagtcagcaatcgttgcttaacttgccagatcggacgggtgcgcatgattccactgttccaagcaccccaccaaaagcaaaacgatataaccaaaatataaggaaaaatttttaaaaaaattttttctctgcttcctttttgatactaaagcatcagagtgctaaaattaagttgtaaataaaatttggtgcgctttagagcactttctgaaaaaaatatttatgaaacaaaaaaatcgattttttcaagtgtccgtttggggtactcaaacaattatggggagcaaaaatccaacgcagaattaaagtacaggctatagggaagctattcccgaaggattcggtctccccataaatctgggcgcatcggttcggggggactgccccgaaaacaaaaataaatcgattttttcaagtgtccgtttggggtactcaaacaattatggggagcaaaaatccaacgcagaattaaagtacaggctatagggaagctattccggaaggattcggtctccccataaatctgggcgcatcggttcggggggactgccccgaaaacaaaaaaatcgattttttcaagtgtccgtttggggtactcaaacaattatggggagcaaaaatccaacgcagaattaaagtacaggctatagggaagctattccggaaggattcggtctccccataaatctgggcgcatcggttcggggggactgccccgaaaacaaaaaaatcgatttttt

SEQ ID NO: 68010 - DNA, 304 bp, Heterodera glycines; identical to SEQ ID NO: 53844

SEQ ID NO: 68011 - DNA, 220 bp, Heterodera glycines
caaaaaaagagatagccattttctgggatagagtataaatataaaaatcctctgtgaaataaaatggcgattgtgcacagccctccgtctcatacgcaagcgcttttgtgaggtataaaatttctcaaaaaaagagatagacatttttctgggatagagtataaatttaaaaattccctcaaaaataaaaggtctattgcgcaccgccctccctatcatg

SEQ ID NO: 68012 - DNA, 133 bp, Heterodera glycines
aatcatatatcatcattttgacaaaaattgcctaaggacaaaacgccaaaaaaccccactaatttaaaaattttgccgagattttcccttgtaaaaactgaagagccgatctcgagttaaaaagcattttgac

SEQ ID NO: 68013 - DNA, 784 bp, Heterodera glycines
atgaaaaaaattggagagaagataaaaaagggcggtgaccatacaattaagtatagcgaagaacagaaattacaattggaaattgaggaagatgacgacaatttggtaaaagatgacgattctatgggcgatgacgacgacaacatagatgataatgacggcaatatggatgataacgatgaagatgatttaggcatagatatggatgcaataattagagaattggagatggaagagggaaaggatggagaagacgaaggtttagggctagattatgacgaaggtgactttgagcattctggagatgatgatgtagaggaggaggatgcaccaaaagcaaaggcattcgttgtttttattttaaattttaaacaaatttattaagaaagcgagagcacctccaaaaaccaaaatcaataaaacaacttcaaaggtgaaatatgaaaagcctaaatttttattcattaatttccagatagcggccaagaaaggcaaaaagaaggttttggaaagtgaagacgatgacgaaattgacctagagggttctgatgatgatcctgtagagaaggaagatgaacctaaaccaaaggcattcgttgtttttattttaaattttaaacaaatttattaagaaatcgagagctcctccaaaaaccaaaaccaataaaacaacttcaaaggtgaactatgaaaatcctaaatttttattaattttttccagatagcggctaagaaaggcaaaaagatggtttcggaaagtgaagatgactttcgagaggattga

SEQ ID NO: 68014 - DNA, 727 bp, Heterodera glycines
atgctggaaccaccaattgtgtttattgatggcaatgttgacgcaacgaaaagaattgaatttggcagctatttcaagctggatatatcgccgaaattggatgaaaattcggaaattgtttatcgagtgaatgtttattgcgctgacaataaccattttgagttcaaaacgtacaccaagtccttagcaaatgtagtgataaattccaattacaaagtttttacaccaattgggagcgaaaagatgaagcccgacataaaaggacaactatgcaaaaaatacaaaatcaacgtatggcctatatacgagaaatgggtagactacccaaaagaaatgtcaaaagaaaaatcaaaatgggaaaatttagtatcaaaaaaatggggaaatttggtaatgatttttaatttgctttatgaaataactgaaaaacaaaatttagctccggcaaaccgagttcgtagtagacaatggagttgcaattaaaaaagacacaacatataaacaagtcaaatttccaagttacttcaatttaaccattgacccactgttggaccatgaggcagacccaatttattatgtaaaagtaaaatgcagtcgcgaagattcgtctacattcaagacttttacgcacggaaacacgcaaattgtattgaatgagaaaacctgtacaaaatttgacatatcagtgagcaaactggacaaagaagttgaatttttggaggtataa

SEQ ID NO: 68015 - DNA, 1178 bp, Heterodera glycines
gagaccattcgtcgggtccgtctcctctccaccgccgattgccttcgagcggacaaatcgacaatggcaaactcgttggaagttcgtgtgccattcctggacaagcagttcctggcactggcaatgggaattgcaccacaacacaaatgcccgaaaattgagccgggcaaaacggtgcggcccatggaaaaatggattttgcgcaaggcatttgaggacaaagttggcaaaatgcgatttttgaatttcctataaattaaattaaatatttaattttatttttgaatatttgttaaaaatatcgaaaaattaattggataattaagtttattaactatttataaaatgtttcaatttttttattattatttaaggaagacccttttctgcccgatgagatcctttggcgtcagaaggagcaattttcggacggagttggctatggatggattgatgaactgatcggccattgttcggcacagatcagtgacgaagaggtaaaggaggactgattttttgaaccgtcccattttattgctaaattattttggtgttttttaaattagattatttctgaatgaaataaaactttagacataggtaataattagggattcctttttttaggcaaatgcctaaaatttttgcgcacttgatacgctcagataagcacgaaaaaagagttttctgcttaaactatttactaatttcatttacaattggaatataaccaaaattaagttgtttgtttgttttttttacgtgtttttccacctaaaaagggctaataaaaaaaatttctgccattttagtgcctatttgagcatttttaatgcctattttgtgatttggttaatctttgaaaagattacagttattaatctttgaaaagattacagttaaaatgatatattttttatagatggcaaatgcgtcgtccattttcccgcacaacactccaacaacgaaagaggcatttttcatgcgcaaaatcttccaccagcacttcccgagcaaatccgcggcacagacagtgctcaaatgggtgccaaaatggcaaaacaatgaagacccatcgggaagggcaaatgcaatgcacgaacagacaaaaacggaggaacaattggacaacacggaagagggggagaagaagaagaaggggcagaagaacatgaacg

SEQ ID NO: 68016 - DNA, 752 bp, Heterodera glycines
atgcccttttgggtatggtatttagtggaccatcccagtaggggtaaaaacaacatttttactaaaatttttgagagaaagagatgggttaattagcccacaaccaaaatcagtgctttattgttatggtcaatttaatgatagtattcctgtactacaaaaaataggagtgcatgtgcacaaaggacctcctagggacgaattgctgacctctctaaagaaccctctcttattaattctagatgaccttttaacaataattgatgagaaaagcctatctgaattattcattaaaaaagctcatcatcttaatatgggtgtgattttcataacccaaaatttatttgaaaaaaagatgaaggtagcccgaattaattcacaatatattgttttaatgtctgctccgaatgctgcacttcaaatacgtaatttgggcgttcaactgtttcctaaaaatcttacatttttcctaagtgcctataaagatgcaaccgcatcaccgtatggatatttattcttggatttacacccagcttcgagccctttgctgagaatacggacaaaaatatttaaagaagatgaagaaaaagcattgtatattcaaaatgattagtttacctaaaaatgttattcaaaacttggattttttaaagaaattgacaaaaacaaaatcttttaaaaagagacaacaaatatttaaagaggctactagtgagcaaattggattattaattgaaattagttataatata

SEQ ID NO: 68017 - DNA, 570 bp, Heterodera glycines
atggagaataaatttattctcgttccctcagacttgtacaaaaatttactaaagccagacgccggggaaattaatgttgataatgctaaaaataaattgtcatcacttttgaagcagcgaaaattggacgctacttcaaaaaatttactttacaaccaggaattgaggcgtttcttgaaactaaggaaggaagttgaagataaaccggtaaaggttgagctttcagatggctcattaatggtgtttaaaccaaaacagcgtgaaagagatagcaaaattcctactcaaattgttaatgacgaaggattggatgaaacaggctctattccaacacttgaagacccttacactactgctgaagagagtgatgctgagtcaacaacatcaacaccaaagacgagaccactgataagaccaatgcgtgtaggaacaactaaatttcgtcaaaagcaaaagtcttttgtagtcaagaaaaaaggaaaaattatgtcaattataaataatgatcctgagaaaattggggttggctctagaggacatatactgagagctgatggacggcatatttaa

SEQ ID NO: 68018 - DNA, 790 bp, Heterodera glycines; identical to SEQ ID NO: 39453

SEQ ID NO: 68019 - DNA, 787 bp, Heterodera glycines
  unsure (1)..(787): unsure at all n locations
atgtctgccgttgatgggcacacaaagtgccaaactcctactgtttttgggtcagtttgtccgccncaaagtttgccatatttttctcctctaatttatttgcaaatagaaattggttcttttttttacaattttgatcagtcattgatcagaggaatttagcaccgtccatttctttgtacattacattcccccacccgaaatcatttttaggaattatatgaagaattaattactaagtttttcttgaaattttcttagagaaatttccttttctaataattttttttgaaacatttttgtgcctctcttatcaaatgagtggtggaaaatggcacaacatatttttcaaaaaattgttttttttcagcggcactcagttggactcggccacccgtcggctggaccagatgattgaccaggcccggtaccggcacagtcagcaccggaacaagttcaaggaggccatcgactacttggaccacatctttgaggacttccagcgtgaagcggccgactcggcggcacggccgacaacaaacggcggtggcggcaaaaaggaaaaagcagcagcggcggcgacgacgacgacatcggcacaacagaaacaccaacagcaactgcaacaacatgctcaagcagtgcaggatcactcaccggccggtggtgccgtcgtcattgagccggtccaagcgacgtttcgccagggcagcgtcaagtcggccaaggaggcgtttgagaaggtggctgctgccatcgcgtccgacaagcagaacagccgagtgag

SEQ ID NO: 68020 - DNA, 634 bp, Heterodera glycines
atgccggtgacgagaatgataagagatgccgaggttggaggggataagatgatcagagaagctggccagagggtcggcgagaatgctctcggaatgtggaagatgacgaggtgattaagagggaggggggagagtatgatcaaaagcttctacaacagagaatcttaaccgattcttttatcaaataagatttaagaaaattctaaaaaatttctacaaatttcattaaaaattcaaaaattttcttcggctgtgtgataaaaagctaattttctcaaatgtgctaatcgaacgacatacatttaaacaaacaactcaaatttcaaaatttatgcaaaaagtggtcagtcgctggcggtaaaaatcataaaaaatataataatttttccagtaaaacttttttttaaaataatttatttaaacccctaaaattttggcggtctgttaaaaaaaaggatcgtcgacaaaaagttttgaaaaatgaattaattaagaaaattacatagaagtggacccaacacccaaaaaaaattgttgcaaaattatgaccgaactcttaaggaatcgaacccgcaagacaatcaaaatgatgaaaagttttgggttaaaaaaatacgatttttttgcaaataaa

SEQ ID NO: 68021 - DNA, 259 bp, Heterodera glycines
atgtccacagcaccgaacgacagcatagaggaggaagaggaggacggctcggacagtgccgccgccaccaccgcaacaccggcgagtgttggctcgtcatcgttgtcgtcgccgacagccggcggcgccgccgccggtgtctcctccaatttgttcgccagcagcagcataaccacggcggcagcggcggtggccaacagtgagagcaatgacggtggtggtgttgcatcatcggaggagcataacaataacaacaacg

SEQ ID NO: 68022 - DNA, 129 bp, Heterodera glycines
atggcacttttcttcaccggataccctgctgatgttgctggtgctgttagttcatcaggcaacagacgaaatgttaaatacattgattatgggccgcttattcgacaatcccggaaaaaccaaaaccgt

SEQ ID NO: 68023 - DNA, 199 bp, Heterodera glycines
aacgggcgcgaagctcccgtctgaggccgcgaagcggccttaatagcccaacaaatttataaacgggcgcgaagcgcccgtctgaggtctcgaagctgcgttaatagcccaacaaatttagaaacgggcgcgaagcgcccgtataagcccaacaaaattaaaaaaacgggcgcgaagcgcccgttcgaggccgcgaagc

SEQ ID NO: 68024 - DNA, 232 bp, Heterodera glycines
atgaaaactttatttctattttctctgttatttttctcttcatatgaaaacccaattcgcaaacaacgagctgttcgcaatgaacgggcaatagctgggttagcacaattggcagcatcacttgcggccgtgaaagcatttattgccgcaaatgcagctttaacggcttctacagccgtagctttggcagcacttggaaccgatatctaccttgctattgagctcgtgagat

SEQ ID NO: 68025 - DNA, 451 bp, Heterodera glycines
tatcagtacgcatttcatagccttcaaaaacagtcatcgttttgcttttcgttgtcctcttatcgggttctaatcggtctgaaaattgatttcgattttttgtttgcttaaactacaaaacttgccttgttgtggttgaacatgacataattgaagcaaaattaaaaaaaaactttgaaatacattctataatatttataagtgggttggtaaaaaatattcaaataaaatcgtaaaaattctacataaaaacggtgtttttcttttcatttcccgctattttcctctttttgccagccgtccgcctctcttgttattgccagccgtccgcctctcttgttattgccagccgtccgcctctcttgttattgccagccgtccgcctctcttgttattgccagccgcccatttctcttgttattgccgtccgcccatttctcttgttattgcc

SEQ ID NO: 68026 - DNA, 1356 bp, Heterodera glycines
agtttgagcgatcggctgcaatttgtggctctggcgaaacgtcgccaatctttaagtgattcttttttccatattaaagctgataatttccatatttcaggcaagtgactttccgtgagcaggtaaaactgctaacctagactgatcgaagtcattttgaattcaattaaaaagttaaactgatcgcattaaaattcaaaattttagtatgaaaatcaatgtgtgcacaaaattaaaataaataaaatatatttaatagcaccttaaaataaccttttaaaaaaatttacttttcaaatatttgatttatttgtcaatcggcttatttgttaaggcaaacatcatcacaagttatttggatggttcacaaatttatggaagcactgaagtggacgctttggacttgcgagacttatttaggtcgtaaatttacattttttcaatgaaaaatgatttttatttaatttattcattttagtgatcatggcttactccgctttgacattgtcagcagtgcgcagaagccatatttgccatttgaaagggtaaaattcttccggcaaagtttccccgaaaaattttgcattttatgcaggactcagcaatggactgtcgtcgaaatttctccgttgaaaacccaatacggtgctttttgtcgggtgattttcgtgccaatgaacaggcgagaaaaaaacattcataatttaataaaacataatatttttggcatgtttttttggattctttgctttataatgttcattagaatccggaaatttcaattttgaatagagtagagcgggaccgggacctgttacggaaaaaacgggacaacttgtacctaagttccggttttgaccgggactagtccaggttttttcctgggtttcccagccagaaattttcgattttgtcccggttttgcccaaaattcccggtcccgctctactctaattttgagggatgaaaaattctttaaaaaaaaaactaaatgcctttagtctattatagttatttttgtcagaatgaattaaataataaaaaatctgaatcctttgaaagcggatccagtggattcccgcacagaaattaaaattttttcacatacgtacttcttcttataatttttgcaaattttcacaaatttgtaaattttgttagctcggtctgacagcgatgcacacgatttggttgcgtgaacacaatcgaattgcgacaaaattattggagcttaatccggactgggatggagaaaggatttatcaggaagtaagtaaaacaattaaaaaaaaacaaattaagatttttaaattttatttattaaaggctcgcaaaattgtgggcgcaatgttacag

SEQ ID NO: 68027 - DNA, 367 bp, Heterodera glycines
atgttgctaacaaaaaagacggaaaagcctgaaaaggtgtgggatcagcagtgcaatctcgagaaaagttcggccctgtccattggcatcgatgaccacaactcgcggttggtttgattattttacaatcaaatttttaaacattcttttgagattttttagcaaaaaattcattttgatttttttgtgagaaaaaaatatttaattttaaattaaaagtaaattctgtaagaattgcattcaaaaaattcccaataatgccgttttactttttttttagtcgtgccgaacgtgtgctctatattgtttccgtgttgacccttctttttgtgcttactgaattggtcggcggatatttggcgcacag

SEQ ID NO: 68028 - DNA, 71 bp, Heterodera glycines
acacttttattttgcttctgtgctattccgatcattgttggagaaatgtgcacacaaagaacgcatcacat

SEQ ID NO: 68029 - DNA, 65 bp, Heterodera glycines; identical to SEQ ID NO: 56492

SEQ ID NO: 68030 - DNA, 59 bp, Heterodera glycines; identical to SEQ ID NO: 52421

SEQ ID NO: 68031 - DNA, 59 bp, Heterodera glycines; identical to SEQ ID NO: 52421

SEQ ID NO: 68032 - DNA, 59 bp, Heterodera glycines; identical to SEQ ID NO: 52421

SEQ ID NO: 68033 - DNA, 59 bp, Heterodera glycines; identical to SEQ ID NO: 61858

SEQ ID NO: 68034 - DNA, 59 bp, Heterodera glycines; identical to SEQ ID NO: 52422

SEQ ID NO: 68035 - DNA, 564 bp, Heterodera glycines
atgaacttccgtggtgcaacggaagcatatgccattgttcattcactgccatttgccaaactttcacatcaggttgtcaaacttaacatccatatgcctaatcaacaaccgattgtgtacagggcttttcagctggtgagcaaagctcaacaaatccagcaaggcgaactgccagagacgcaatgttctgcctattggaaacaatggcaaaatgaatggaagcatgatccgaagctcaaggacatgctttttgaaaaagtccctgagcattttatatgggcaaaggacaaatggaacaaaaggaaatataacctaacaaagagaccaccaatcggtcgaattgttcctgtacccccatcggacccggaaaggttcgcgctctattcacttatgcgtcactttcctggagacccagaccatcttaagatggttaatgggttgctttgtacctcattcactgaggctgcaataatgcatggtcttcttgaagacgacaaaatttgggacaaaactctggcggaggcagctctgtcgcgctggccagatcagatgagatggctcttt

SEQ ID NO: 68036 - DNA, 154 bp, Heterodera glycines
tgattgcacgtaattgccgaaaaaattcgagaccaatttccgaatgttgaccgactaattgcaagacgaaagccgtctttgtcaaagcgccttaccgagtcaaaaaatttggaaatgtatctcatatgcaatttcaaccaataaatttgaagaa

SEQ ID NO: 68037 - DNA, 568 bp, Heterodera glycines
  unsure (1)..(568): unsure at all n locations
atgaaagaaatgctancatggtcagtagctgatggtataaacccgctggagaaatttattgattggatattagaatttaaattttctaatactgttgcttttggtcattacgcaggttttgatagtaacatggattttcttaattaagattatttaggaagatatgattcacatttcgtgcttaacgaattaacaagaagagggtataagccgaaaattatgataactgacttaaaaatttatcaaataaaattaaataaactcgtttttcgtgatttctggctacttagccaaaacagactaagtgttttaccaaaaacattaggacttaatacgcctgcaaaactttttttcccacataaatacaataagccagaaaatttcggtaaggaagaggattaatattgaatgcaaaaatttttagggtgcaaattaaaccacttgccatgtattgacgactatggtcctaacaatatgaaagaggatgagtatgaccatttcatgaaatggtatgaacataatagagatactaaatttgagctcggtaaaagaaactaaaaagtattga

SEQ ID NO: 68038 - DNA, 340 bp, Heterodera glycines
atgaaagtacttgcttatatgatttttgcattgaattttgcaattagtttgcaaatgattccttcaacgcgtcgttcaaagccgggctctttattacatagcgaacaatctgcttttgtgaaatacaaacaaagttctattaataaaggtaaaaaaggcttttttcatgaattatattaatttttagtttcttgttaagcagctaatgtgtttaatccaaatttagtaaaatttatcaatttttgtaccttttgacatgttttggcattttgtccatcataattaaaccatttaatctaaattgattcaatatataaatactctctaatcttcctttgaa

SEQ ID NO: 68039 - DNA, 450 bp, Heterodera glycines
  unsure (1)..(450): unsure at all n locations
agacttgatgatccaacgtactcatttcataaatatattgaaataaaaaagaaaaaaattgtcgagaacatcaaacagaagaaagaggtcggtcataaaaatttggaaataaattataaaaaaattaatttttaaatttagacatttgcattgcacaaacgccgcccaataccgttagaaggacgtatcgtaatcgtagtggatgacggtatagcgaccgggctctcggcggaagcggcacttgtacaactgcgagacaaaaaagctgctgttgtgatgttggcatcaccggtctgcccactgagtactgtcggtaagaatcttgtgacaattttgcgctacagtaaattcaaataccgtatttccttanatcgagcccatacgtatctagaanagtctcaagaaaaagagtanatttcttttttanaaggctggcgggatacaaaaaag

SEQ ID NO: 68040 - DNA, 445 bp, Heterodera glycines
atgagcagttctgagctgaaggaggtcatccgtttcgcgttccttctgcgctaccagcaagtcgtccaaactcagatcagtgttcttcagcagtgagtccatggcagaacaaaacatttgcaattccaatgttttcattgccttaaggtcgtcttcggtggccaacgagggaagcgaaaatgaagcggagaaaatccaaatcaaattgtcgcacaacgacatcatccgagcgttccacgacttgaagaatgtatcgatggcgccattttccgagtcagtggtgacggaagaagtcgtcgatgtggattgatgcgttgacaatgagttctgctgataatgtgatcatatgcgttacaatataatcgcctcctcccaattcgtttaatgtatgtataaagtatgatatgatatgtagtacacaacccattgttcttttgtgttttga

SEQ ID NO: 68041 - DNA, 828 bp, Heterodera glycines
taattaaatccattccttcgggggaccgtgccgggtgccgcggggtaagcagtgctggttcgtttcatcacggcaccgaaccttttggctagtcagcaatcgttgcttaacttgccagatcggacgggtgcgcatgattccactgttccaagcaccccaccaaaagcaaaacgatataaccaaaatataaggaaaaatttttaaaaaaatttttctccatctccctttttgatagaaaaagcatcagagtgcctaaactaacatgtaaataaaatttggtgcgctttagagcactttctgaaaaatatttatgaaacaaaaaaatcgattttttcaagtgtccgtttggggtactcaaacatttatggggagcaaaaatccaacgcagaattaaagtacaggctatagggaagctactcccgaaggattcggtctccccataaatctgggcgcatcggttcggggggactgccccgaaaacaaaaaaatcgattttttcaagtgtccgtttggggtactcaaacaattatggggagcaaaaatccaacgcagaattaaagtacaggctatagggaagctattcccgaaggattcggtctccccataaatctgggcgcatcggttcggggggactgccccgaaaacaaaaaaatcgattttttcaagtgtccgtttggggtactcaaacaattatggggagcaaaaatccaacgcagaattaaagtacaggctatagggaagctattcccgaaggattcggtctccccataaatctgggcgcatcggttcggggggactgccccgaaaacaaaaataaatcgatttttt

SEQ ID NO: 68042 - DNA, 129 bp, Heterodera glycines
  unsure (1)..(129): unsure at all n locations
atgaccaattcaaacactgaatacactccgatggcgcaattaaacgacgaccgattcgaacaccgaataattttccaaagcaaaagcagcaaatggcttggactgttcatgaaatgcattttaatgatn

SEQ ID NO: 68043 - DNA, 248 bp, Heterodera glycines
atggattctgtgacgattgaaaaatgggcaaagaaaattggcagcaaagaaaatacttcaaaaagtaaacttttaaagactttggttttattatttaatttaaatatttttagggcggaatcattatacaattgctgaaaaaatggaaacattgaaaaaaataatttaaaaaaaaaatcccaccctcactgactgtgaaatgtcaaaaatattggatattccacgaagttctttacaccatatcaaaa

SEQ ID NO: 68044 - DNA, 49 bp, Heterodera glycines; identical to SEQ ID NO: 51181

SEQ ID NO: 68045 - DNA, 1133 bp, Heterodera glycines
taattaaatccattccttcgggggaccgtgccgggtgccgcggggtaagcagtgctggttcgtttcatcacggcaccgaaccttttggctagtcagcaatcgttgcttaacttgccagatcggacgggtgtgcatgattccactgttccaagcaccccaccaaaagcaaaacgatataaccaaaatataaggaaaaatttttaaaaaattttttctccatcttcctttttgatactaaagcatcagagtgctaaaattaacttgtaaataaaatttggtgcgctttagagcactttctgaaaaaatatttatgaaataaaaaaatcgatttattcaagtgtccgtttggggtactcaaacaattatggggagggagcaaaaatccaacgcagaattaaagtacaggctatagggaagctattccggaaggattcggtctccccataaatctgggcgcatcggttcggggggactgccccgaaaacaaaaaaatcgattttttcaagtgtccgtttggggtactcaaacaattatggggagcaaaaatccaacgcagaattaaagtacaagctatagggaagctattcccgaaggattcggtctccccataaatctgggcgcatcggttcggggggactgccccgaaaacaaaaaaatcgattttttcaagtgtccgtttggggtactcaaacaattatggggagcaaaaatccaacgcagaattaaagtacaggctatagggaagctattccggaaggattcggtctccccataaatctgggcgcatcggttcagggggactgccccgaaaacccaaaaaaaaattttttggataaaaattatttaaatgaactgactagataatatttaaaataggttatttctcttcctttcagtatccctgcaaagtttggtgcgcttctgatcagtttctgaaaaaaaagttaagcctaaactttttggcctgtttaaaaaggaattaaaaatttttaaaaattttattcatctccctttttgatagaaaaagcatcagagtgcctaaactaacatgtaaataaaatttggtgcgtttcagaaccctttctgaaaaaatatttaagaattaattatgcaaaaaataaagaaataatgaa

SEQ ID NO: 68046 - DNA, 488 bp, Heterodera glycines
atggcacgaaattccgagttccgacatttttggggtcggaattccgatttccgacttccgaaaaatttttgggtctcggaattccgatttccgaaatttttgataaaaagtcggaaatttggggtcggaattccgatttccaaaaggcctcggaatgccacccctgatacgtaccttgggattactgttctctctaaaggcgattgacaaccttgaacaattaccgtatatgctctaattatcacccccaccccctaaagatattttggatttcgtctgtatacttctagcactatgggtacgccccaggtgtcgtcataacgccaaatagcgtaattggcagtaattttttgagcgctaattcaaaatttacactggaaaatgcctatttttgtattttttttttttattttgatcagccataactcgcttggaccacttattaaaaccaaaatgctaaaacatttcatttttctattggtaataaa

SEQ ID NO: 68047 - DNA, 945 bp, Heterodera glycines
atgaatgacgaacaaattgcgcaactgtttgaggttgatgattggtcatttaagaattggaaaaagataagcggaattactgaaacaccaaccgttggagagaaaggtggcacaaaaatgggcaatttagtgaatattatgtgcctaagggcctttacaaataaattttttattttatttcacccccaaaacggcaaaaaaatttctacaatttctgctttttcgcccctgcgctgaaatttttttgaaataatatggagaagaaaataatctggcccgaagagcaaaaaaataaaaaaaggctgccctccccgaatttttttttcttctggatacgggcctgaaataatgtcattaaattttaatctcttgaatgcgcctttcggcaccgcaggatgcatattaattcaaatttgtgaaaaccaaatacagaccaaatctaacaaatacataccaaatttaaaccagtcaatcaacaaagtttaaaataaatacaaatttattcaatttcctttcaccacattttttgagcagtttctgaagagattagcaacatcattgaacctctctcacttgtcaatttggaagacagatcttctccgatagatacttttgaacagttcgattttggggctgtccatgggaaggcttccgctgctgttaatcaccagattaacctatcaagtataattcctaaaaatgaattcgaaaatgagtataaatatattcaatatttttagtttcaattgcatgattttgaattaagacgtgggattgaatttctcaaaacatattaaattcattttcccacggtgataactagggatgcgatttttaggcacaaaaaatcgcgaaataggcacctaaaaaggcagaaaaaaatcgcaaaataggcactaaataggcacaaaaaagcccgaataggcacaaaaataggcaaataaa

SEQ ID NO: 68048 - DNA, 811 bp, Heterodera glycines
atgaaaataaatgaattggttaagtaattctcaatgtaaaataagattatataaattacataacttttagtttttaaagagattaaatttataaatatttttattagaaacaataataaagtcaattctacaattaagtaaaaatgctcaaattaaaaaaaatgctgcaataataaattataatgtagcttaaagaagacatgtgtattaaaataaataaaaaaataaaatgttattaaaaatttattccatagaattagttcaattaattattttatattttaaaataaatctttggttttataaattttttaataacatatcttttttgttgtgaatgagtcgttgaccattggatcaaattgtctacgactcggcccacaacaaaaaggaacttttagtttttttctatgaactgagcactcacgcgctattcataatgctaacgatctgcagataaatttctagcgcagataagttccatattcataatgctaaggattaaaatccgtattcataatgttgctctcttcacaaaaaaatccgtatcttcagctgcagatacccttggtattcataatgctaaggatagggtagcggctgcctagctgcagctaaaattccctatcctcatcgaggtgaggatagttgcgatggaaatgtcaattaaaatcacaaaaaattataaattgaaaaattgtactaaataatacctctaaaaatttgttggtttaaattttatgatgattgaacaaaaattcaaagttcgaaattttcgacctttatagttcggggttaggggttggtttaa

SEQ ID NO: 68049 - DNA, 530 bp, Heterodera glycines
atgatgcctcagaatccccaatcacacagggattctgaggtcttgacgatgtcaaaagtaaaatctgatcacgtattcgtgatcagcggcccaaataacccctaaagacatatttttggaagatttttgtgagaaaaatttttccactcaaaaaccatgtgctcccccctttggtcccgaaccccaaaatcacttttatttttgtatctttttttaaaaatgtgataaaaatgtaaaataaaatttatattatagagaaaaaaattgtggatttttgtagtattttacttttctcaaatttcttttcagaaggcagttacgaatttttttctgaaaaatctaaaatttccagaatttctggaataacatttttcatattgatgttagaaaacctaaataaatcccataaaattctcctgatttttctctatttttaaagctttgttgtatgaaaattgacttaccctgaggttagttatgaattttcaaatattaggccaaaatcccgagggccaaaaaattgccaaaaa

SEQ ID NO: 68050 - DNA, 778 bp, Heterodera glycines
atgagaacactaatggacaattactatcttttattaatattattatttttattaattatttttaatgatgggcaaccatcaaaaaaacgtccaccaaagggtaaaagcataataactgataaccaaaaattggaggccgaaaatataaagagtattttttttatttcatttttcaattttttaaaaattaattgctcagatgacgctcatagatggtcaaatcggagtgaaaacacgaaaataatccgtgccatgtttccaaatgtgccaaatgaagcaaaaaagttggatatggaaggcgactttattcgaattgacggcaaagtttatcccgctaaaggtattttattaatttgtcgagataatgccaatgaatgattgacagacatgaggaggtcgaaaaatgccgaaaattaagaaacttaaaacattttttagaaaatttggtcatggaaagtttgtatcacgattttaaggaaattttcactgaaaacttgagtcatttgaaaatttataacaaaaatattttgaaatttaatagaatttttttttattaatgctttgttattgacttaaaaataatttttgaaattgttttttttaatttagtcatcaatttattttcacattgaatttttgagttttataaaataattaactttataatctggcatattaattaataatccaaattttaattaaaaaatatattatatgtatataaaatgttttagattttttggaatcatttaatgagaatggcaaagacagaactgaa

SEQ ID NO: 68051 - DNA, 753 bp, Heterodera glycines
atggatgagttgaacttccattatgctgattctgactgctacaggtccgaactggcggagctgtacacttattcggaaatggacgaattttcactgaattacgagtgttttatacgatatatgcgcgagaaaaaggttatatattctttaatttaaatattattattaatttaacgacagaaagaacccatttggcatgacttgccgaccaaggaaaagagcgaaactctgcagaaccttgtcgaatctttcgaaaattctgattctgaacaaagactggaagctgctcggatagttctttatattttacaggcaattatttatttacatgcacaattttaattatcatttccaactagaaaatttgttgttttcgctttttagggtgcatatggcgatttcgctgacgttgaagttaaagattttgaccgctggtctaccgaaggtataaagttactaaagaaccccatatggaagcgaaataaaataacggaaccttcctgttctccttttgcaaagctcacttccattttcagaattcaccactgaaacttacagtgttttcatttgatttgcaatgaaaacaaccctaaatttcaagtttcagcgaccacagaggaggaaaatggtggaaaaggtctcgacgcagcgtccaaatggtttggtgatcacgggacgggcggattcgagcaggactgtttggtccgtggtgcactgaatgcttaccacgtgtacgagcacgggctgttccaa

SEQ ID NO: 68052 - DNA, 518 bp, Heterodera glycines
gtctcaaacatttggaaaagtcatttagagaactcatgaaattcaccaattccgtcaatgaatcggctgcaaagttcgaaaaaggaaacaattcaaaagcaaaaaactctgctgggttgtatgacgacgaaaaaggtaaaattgaatttaaagaaaaggaaaaatgaatgaaataatattttatagacaaattaacggtttttaaaaatatgcgtgaaagcctagaaaagttcgcttaattattaaaatttccaaagattgtcctgaatatcccactggtcggcatttgtctaatgaatgattaatcactattaatttagaattaatcaaaataacaaaagccctggtcaaccaaaactggcaattgggaagaagccgaagcacgagcataattggacgatttgccacgggaaattgtaggacaaatgctcatttatgtataatcaattggaccaaaagtgggcacagacaataacctattttggcgttttgccaatttatttaaaaaatgcaataaa

SEQ ID NO: 68053 - DNA, 360 bp, Heterodera glycines
atgcggaataaaaaagacgtgaaccgattaattgagccaatccgttcgataaaattcagtgaaaaggtattattaattacaaataattattttgccaaattatacacgtattgtgtaaaataattgtttaagtatgaaaatttcattgtgatcatttgcaccggcacacaattcaatgccgaaacattttgccaatttgtcgggacgcgacttcgctacgaactgctcgaatttgtggagaatccgttgtcaaattgggtggacttttgccatgtgtatccaaaattgatcacttccgcgcaatgtttggccgaaacggggccaaaaaagtgggcagataaaggaattaaaattaattaa

SEQ ID NO: 68054 - DNA, 195 bp, Heterodera glycines
atgttttcattaattttcttttttatttttgctacaatttctcacttaaatggaaatgatgatgaactttgggacataaatttaagctgcaaaccttttattaaggttttcatctccgaatttctcttttatttttaaattcagagtttagcagccaagtactcggatttggttagatgtgctgtggaaaacaat

SEQ ID NO: 68055 - DNA, 669 bp, Heterodera glycines
atgaagagtgatctactgatcaagttactgtacggctttttgatcttaataagttatggtatgtaggatgcttttttcagaattattgactcacaaaaatattgaaaaatgtctaatttaagataaatgtcattgaataagaaagagggaaaaaatgctacaatgctgataaagaaacataattttttgattggttttaaaaatgttttatcatgactgtacaaaaaaaaggaaggcaatcactgattttctaagggtttttgaaagcaattaaggtgttcttaaaaaattactcaaaaaaattaataatttagaacgcctggtatctttttttgaatgcatcctgttgtgactgagcctacatctcagtcacaacacatccatccaattgctttgcatttaaaaatttttcctcttcatgagctttcgaatgatccaagattaacattttggtttgcaaaaatttaaaactttttttttgaaaaaaaacttttttaatgctccctttttacgccaacgatacataaagatttttcgttttttcacctcacattaattttttttaaattatttcctgtgacttttgtgcttccaatcaattttaaacatatcgcagaaacatgtgggcaattgtgcagatcattggtcccacaaaaaaaaaggaataaa

SEQ ID NO: 68056 - DNA, 1680 bp, Heterodera glycines
  unsure (1)..(1680): unsure at all n locations
caattgggaacatcacaaatctgagaaagcaccacagcaggaagtggaggaccagcagcaagagcccgttgaacagaagcacaaaattgatgacaaaaaagtggagacgcacgggggcattgagcgcaaggaaggactgtcgtgagtggcgccggtttcggtggtgtccaacaatttctcgacacttttctagtttagtggctccgatgcaaacccatgagggtggaggaccctctgatttcaaatttgttcagttatatttaattaagcataaaccaaagggtccctccccttttgggttttctgaaaaaaacgtcccactaaattagaaaagtgccaatttctcttttcatgcgtaatcttcagctacttcgccgttctggtcaacttcctcaaatccatcattggcgccggtgtcctttcacttccgatggcattcaaagatgccggcatttgggtgtgttcagcaattttcgccatcctttctaatgattcgttcatctttagggtgcgttggttctgctcaacgtcgccgccatcctcaattgttactgtatgatgcaactcgtggagaccactcagttccattacaaacggtgcgtttcgccataatgagaaatttttttaccttttgcgtctcccttcagcctcaacgtcacttacctcagctacggcaacttggcgaaagaagcgtgcaagtacagctttccgtggatgcgaaagtttaaacttatggccaagtcagtcccatccattcgaatccgaattcacaatttgttttatggccatctcttttttcaggagacttgtcaatgggtccgttcttttgctcgagtttggcttctgcagcacttactatctgttaatctccacaaacttgagagaggtgttcaacttcttgacggtttcggacacatcaatcaaagtttggcttgtgctcatttacgtccctatggtcttcatggtaacttttgcctcattttgtatttgagactgaaatgacacaaaaattaagactntcatccgttccatgcgcattttgtccttcttcagtttggctgggaatgtgctgatgttcatgagtttgttctacatactctatgtgcgtttattcaatttttggaatgcaaatttggtgtaatttttgcctcatcttcaggcattggcctaccgactgctcagtgaggaggaaaagccagaaattcacgcaatcggcagcttttccgggatgttactcgcttcgagcacaatgattttttcctacgaagctcaaactttggtgtgtcgtccattgtttttactgaccatttcgcttttcgtcaggtccttccgctggagaagaaattgaagaaacctcagcaaatgttgggtttgtctggcattctgtctgtcggcatttccatctccacgcttatttacgccagtttgggctttctcggatactacgcctacggttcttgcgtaaagggcgctatcactcagaatttgggagaaactaggtgagtgagtggcaaagaatggctgacaactgtttgagtacgttcggctgttcatctcctttccttgcctttcagaatgagtgccgtggtcaaattggctctctctgtgtccatttgctcttccttccttctgcaaatgtacgtcatcgtcgatggtacggtattccaattggtagaaatg

SEQ ID NO: 68057 - DNA, 56 bp, Heterodera glycines; identical to SEQ ID NO: 62810

SEQ ID NO: 68058 - DNA, 887 bp, Heterodera glycines
atgggacggagaattcgattgggacattttgtgatcatgtttttgacaaaaaatcaaataattggggattccctaatttcgtttcgtttgcggtaagtgccaattcaaacaaatattttaatttgacattcgtggaccagccaatattgaagttcatttatttatttgtctgatgtaaagaaatcaaaaaaaaaaataaattataattatgaatgtaatttttaggtttttatcttttttaaaaatatatccctaagaaatgaaaatttctcgaaattcatttcttaaatttatttatttactttcttgacaagaattttgatttaaaaaaattatgattttctaatttatgatttggcctaattttgttgctttttaaaaaaaatttcgattttacacccccctaaatttgaaagtttttagcaaaatttttagcacctattttggggggtttttagaacctaaaaactacatttttggcagtttttagcacctaaaatcattttccttttgtgcgatgctccaaaagaaggtccaaattaaatgctaataaaaaaaagtaattaattgccattaagaccaaaattggagatggaggacagaataaacaatttataattttttgttgatgattgaaactaacctaatttttattcactttattatttcaaaaaatagaaattttaagtaaaattatatttgagattgttttagaaaaaagaatatgtgcatttgcattttttgcacattgtcattttgggcgagtgtcggcatttatccgtcgttacaccaaaaagcccacaataaagaaactgtaacaaaaattgtctttatccatctctttctttgtaactaaattctacaacgattttttatgctttaataaa

SEQ ID NO: 68059 - DNA, 776 bp, Heterodera glycines
atgccgacactttgctcaaatcggaggaatttttacaaattgaccaaaaaacattgtgcgaaattttgtcgcgtgacgaattgcaaatcaatggagaaatttcaatttggaacgctgtaattattttacaaataaattaaaactctaaattttattattaatttatttattttttaaattaaccattatttcctatttatttttcggcactccgttgggccgatgcaaaatgccatcaaaatggaattgaatgctcggcaaagaatcgtcgtgccgttctcggcccagcactgttcaaaattcgctttccgcttttctcaattgaagaattttcgaacaaaattggtaaaataactaatatcaaattattaattaaaattttttcaataattttaatttttatccatttattttagttaaaggggggggggtgacaaaaaggataagaaccaatatttacagttcccttcggtgttttgtcaaaagatgaagtgatcgccgtttaccagttcaaatcccttccaaattgtcatgggatttccgacggatttttcccaatgccatttccgactaatggacggatttccgatcggaaaaaaggcacacttttaattgacattgaaaaagtgtcggaatttgcactagagaaagttggaagcagtcggtacagcaaaaaagtgtacataaatggacttccatggagaataatggcgaaaataaaaacgaaaattggaagcactgacaataatgagaaatggttgggcattttcatttga

SEQ ID NO: 68060 - DNA, 1472 bp, Heterodera glycines
  unsure (1)..(1472): unsure at all n locations
gacgaaggtgctgaagaagtggaggcaaaaacattgccaatggctgaagaagcgggcgaaacgatagaagagaatgagtcggaagagagttcggaggaatgatgcgacttttcgttttccttaccattttatattgcataaagcgttnaacaattaatttgaaaagctactgttttgcagccttttactgttcgagttaaatacggattgcttacatatttgggatacaagttttaaatatagattctttggcgttatgattggttttttctgagaatgtgaatgaaattacctagccaaaatttttcgttgactgattttgtaataaaaagaaaacaatcaagtggtttttgctcacattccaattctttcttttagtttgccccgttgaatttttattctcatttattggcagtggtcaattgccttacaattagagccgaatattagccgtttgattgaataacattcggagttattttgatgatttttgacccaataattgctcggatgcaattggccactgaaaattagattcgttttttccatttccagtggtttatgcagtcatctgaccttattattgaggaaccagcaacgaaaaaggcaaaaatcatctgtgaactgccgaactccgaggcatcagaaaacgtcactttttgttctattggttgctcattttcttgctgactcttttccgtttaggcaccaaagagtaacggagaacaaatggcggccatcgacaccaatttgtactctcggcagatgtaagcagcaacaaatgcctttgatataattgcttattgtggtttttcctgtttagttatgcgcttggacattccgccatggaacacttgcgcaaggcgtcggttctcgtcagtggcctcggctccgtgggcgtggaggtggcgaagaatctgatccttggtgccgccattctttgattttactttgcatgactaaacaatcgccgcttttcaggcggtgttcgctcggtgactcttcacgncncnnnngcgttggcgttcngngntttgtcggcgcctttctncgcccnggnnngcgncgtgggnncgnnccgtgccnnngtttgcttcgncnnnttggcggngctcnncgnccctgtgnnctgtgccttgtctgtggnnnttctgtcggnggntttcgtcnnncnnttcgncgtcngcnnncgcttccttccttttcccttctcgcctnnttccgtcgttctttcngttggtcgttctcnccgncgcgtccttttccnctcngntggnngtgnncggttggntgcgcnnccntcgcnnnntgttcntctcggccgncgcgcgcggnctgttctcttntgcctttgtggncttgggcgncgnnttcgttgtgnncgnttccgncggggngncgtgcnnngnggtggnnnttggnntnnttnntttnnttgcgnnttgnntggttccgnttttcnggtgctcgtt

SEQ ID NO: 68061 - DNA, 88 bp, Heterodera glycines
ggaggaccggacattttttataatttgtggacccaaatcgcggaattgtacccaataagcacataaatctcctttatttggtattcaa

SEQ ID NO: 68062 - DNA, 345 bp, Heterodera glycines
atgtatctgttgtacctttttaatcacttttgtacctcttttatcaaatttgtacctcttctaatcactgttgtgcctcttctaatcattgttgtacctcttctaatcattgttgcacctcttctaatcactgttgtacctcttctaatcactgttgtacctcttcatatcactgttgtacctcttctaatcactgttgtacctcttctaatcactgttctatttcttctaatcattgttgtacctcttctaatcactgttgtacctcttctaatcattgttgtacctcttctaatcacttttgtacctcttctaatcactgttgtacctcttctaatctctgtt

SEQ ID NO: 68063 - DNA, 963 bp, Heterodera glycines
tgcccgtccctgtgggcaagttcattcctttcccttccctttgcctttggccagatgccgtgacctcccctcccccttcagcttattttcaggtcgttttcttgcccactcgcgtttacttccttttgtgtttgtttgggcgccaatttcgcatttgggagcaaagggattccatggcatacttcgaatattactttccgctgatgacttttctgcaactgatgtgttacatgggctggctgaaaatggccgaatctttgctcaaccctttgggggaggacgacgaggactttgagagttcgtttcgcaatacgtacgctgaacagcgacgaaaaacaattcgacgctttttcaggcggttatataatcgaccgaaatttggccgttgggatgacaatggtggacgaattctatggccaactgcccacccaaaagccggacaaattcggcaaggagggcgaagtgccgtcagcgtacacagagttagcgggggtcagtcattggcactttgccaactcaatggaaatggcatttcggctcagaatgagtcccaacatcaactggtcggatctgccaaattggctgctgagaacaatccaagtgttttggaaggacggcggaacgccaaacgccgccgacaaatagtgggagagattaaaaacaaaatattttaaaaaaatttgtaaaggcgaacggaagcgcagcagcattttcgggaggtttctgcaaagggcgagcggcgatcgaattggcacggacgacgcgggacggaagcggcacaatcggtcgctgttcggcacacgacggcgatcggcgacaacggcgggcccaataagtgccgaagagggaaaagaaaaaatggtaaaggcatttaggaaaaagtaaaacgaaattgaaaaatgagaccgaaactaactttgaatgaaaagtcgtggaagcagcgcaaatcgaaatcaatcgctt

SEQ ID NO: 68064 - DNA, 346 bp, Heterodera glycines
atgtgcaaggcagtcagaccattgaagaaacagtgccaaatattgtcgaaacaacaccggacacggaaaatgccattaatgaccattcaatgtcaaatgtcaccgaaacttcggacattgaaaatgccattaatgtccattcaataccaaatgtcatcgaaactttggacactgaaaatgcccataatttccattcaatgcaaaatgtcagcgaaaacaatggacaatgaaaatgccattatttacaataaaaatgaaaatgtaattcaaaaataacaaaataatattttgtttatggtatttcgttctactgaatatttactctttactgcttgtaaataataaa

SEQ ID NO: 68065 - DNA, 697 bp, Heterodera glycines
atggaatgggccgctgccttcctacagctggagggcccgttcatggagcacttcaatcgtgttgctgacagaaaaagcaacagctgcttcatctatttttttgtagacgcttaaccacacagtgcagcgccactccgactcaaaaagtcgctggaccgacatggtcaccaccagtgaccagggcagctgcatatcgcatacccagcgcaaatttggtaaggatttcggtataaagaattggtggacgtacgtgaaaaagaacgtacgcgctacaccctttgccgcttaacccttttccccacctatcggtacatttacatgggtacccccgtaaatgtaccgataggtggggaaaagggtgaaaaactgaaatattaaaaacttttttccagttcgcccaaatttgcggatggtccttacagacttcatgttgaacaactgcggccgggccgctgctgtgcagcaacgctgggacgaactggcagatgtggcccatcgagtgcgctccggcgttgactattgtacttccacggagaaaccgaagaaggaggtaaaatgcttttcaaaattattcacaaaattaaaaaaaaaactttttttttgttaagccaccggttgccggctacgacttcgtgccggcaacaaaggcggaggaaatgtacaagcgccatggccttgcgcaggcactgctttgcat

SEQ ID NO: 68066 - DNA, 334 bp, Heterodera glycines
atgcattcatcggttgacgacggccagggcacggttcgacttgtttggggactacgaacgcacattgtgccgtacataaaacgactccaaattgttgaggaggaggaaaagagactgttggaggacagaacagtgagacggaaacaaactgttgctactgcttcatgacatgatcggaaagagattacgatgaagattttgacagcatgcttttttgtttttatttttttatttttaggattttgttgaagtttggatctcttcgtttggtgctaaatttgtattttcatgccccataaattttacgactaaaatcatttaaaacaacaataaa

SEQ ID NO: 68067 - DNA, 303 bp, Heterodera glycines
ctgtttctgagtgccaccattgccgtcagctttatcatttggttgcattcctttgaacatgatgctgattccaatggggaccaatttgagctggtgaattcgtgcactcgtgaacggttgacaggccgaataattggggaggatgatcaatttttgattgaacggtgtccaatcgttggcaaaagtgcggaccacccggacgaatggggccgagaagaagcatggaagacgaagggcgaaggaagaagcaaaatgctcacttttggcacgcctttctttgaatggaacaacaccttttcatag

SEQ ID NO: 68068 - DNA, 944 bp, Heterodera glycines
atgggtggacaaacaatcggaggaaattcaggcaatttaaaggacaaaaaagccaaaataagcaacaaaataaatttgcagaagaaatacgtcgagtttgagcaggaaagggaacgggcgaaggccgagggcgaagcggcgcacgaagaagcggtgagaaagttcagcgaagcggcgaaaaaggcggacaagtgagaaaatgagaaaaaagaacgacggaaaagcaaaacacgaatgcttaagggaactgaccgaaatcgcgaacaaccccaatttgtcggcaaatgataaggcggaaatgatcaacagaaaagtgcagtcactgcccaaaaaagtgagggacgaaataggaggagcaatgggcggaggcggaggaggtcaatagcagcggaagaagtgaagaggaagaggaagtaataggaaggagagggagaggagaggagcgaagaaagagtgatgggacaaaaaggaggaggaacgagaagaaaaggaagaggagagtgagagaagataagagaaagagaggagagtgaggaagtgaaagaatgagaaaaatgggtggaggagaggataagaagagagatgagagaaggggagaggagagtgagagaagatgagagaaagagaggagagtgaggaagtgagagaagaagagagatgggaggagagtgagaagaaatgacctgacttctctgattgagaaaggatgagcaaactttaacgaaatgcattgtgctttaaatttaaatgataaagctacttcaaacaatttgtgactaatttttaagaatagttttctatttgaataataaaattttattttaagaaaataaagggtaaataattttgcgtaacaatgtcgactctataaaaaaacacactgaaaaggcccattcgagaaaatacaataattaacggaattaaagcttttttatggcaataaa

SEQ ID NO: 68069 - DNA, 467 bp, Heterodera glycines
atgcacgaaaaatttcgcagtgttttcacaaggtgggcgataaattttttattgaattcttctatattgcaggtgattgttgtctgataagtgatgacatttctttcccaatttcatttttcagttgcgctgcaaaccgtgccgaggcaccaaagggcgccacgcgtgtcaatgatggaaatgagaatgtgtgatgacaaaaactaattgatgaagaacataacgaaaccgatgatgaagaatgagaatggttagacatggccaactttagcataaaacttgtgaattatttatggaattaattacaaaatttaatgtcttatcatgcgtacgagatgtatatatgtgtacatatagaattattatgagtccaaatacccacgactagagaagcgagaaccgaaccaatcccgaaactcgatacccagaccctgacttaagtccgaaagacaacctggagattgcaa

SEQ ID NO: 68070 - DNA, 957 bp, Heterodera glycines
atgtgcgcgtttcatgtgaagcaagcgataaatcgccgaattcaatcaatgggatttatgcaattgtacagctcaaaagaaccaaatggacttgagtttcagcgccttgttcgcaaaattggggctctacaattctgtcctcccaactatttagcccgttcgcttcaactcatgcgccatctcatcacacactctccattggaaactttacaacagggcgcattgagtgaacttctcgattactgcgtaaataaatgtaaaactacttagacaacaccaaatatacagaacaacacatggatcaacaacagaatagggctgcacttttttgcactttttgacgttgttcggcatcgaaccatcaaccatgctgagtcttaccacggacgacagcaacgcttttaccagcctggtttcttgctcggccgatggatagcgagttttcaggtacttgtttgtctctaacttttgtatcgtaaatgataggaactaagtcatgctgaagaagaaaccgcagtggccgttgatgaaggaagacaattgccagctcgcccgcttgaattaactcttgaattggacagaggaattgcctcagcgaaggcggatattttggcttttttgaacacggattactgcaatgatgaatttgttgaagccatgtctaattattatggaagaattggacatttggttggcttcaatccgccgtcaaaccgtaatgaagctgaagaaatgataattgaagaagatgcaaggcttttgcttgaacaaagtttggatgaaaatgggctgcatgttgatcaatactttgaagaaatgggtttgaatgaagtgcaagatgaaaactcgcctgatgttaattcagaggatggagaagtggatatcatgaattaattcatatgaatttttatttaacttttatatttgaagatgcttaaattttacattgttattaaa

SEQ ID NO: 68071 - DNA, 583 bp, Heterodera glycines
atgtttttgcttaaattatcaatactttttgcacattatttcattaatgtgcaattagccgaggaacaaaaatgtggggaatattcaatcggagaacttgtaaaaagaactaaatacagatcatataaaaacaggaagcagccaaaggaggttaaaacaagcggaaatgatgactttagcggctcttttggagaggtaaatttgcgacaatgcccaagccccgaaatgatcaattagtcctaattagtacagaatccaatgtttcacattaaccgtcattagggatggttaaatttcactaattgccatgattggccaaatattgtccaatcagctttttcccttctctctgttcactttgtttgactttggttttcctaagatttcggttggatttatcgtctatgagaaccaaaagcaatgtgtggcggttaaattctttaaaaacgaaaaggacgaaaaggaaacggacgaaagcggcaatttgaaattgcacacgaaggcaatcgaagtggccaaacgcattacgaaatgcctggaggaaaaggaacgacggcatctgatcgaaatgatcgacgcgtaa

SEQ ID NO: 68072 - DNA, 1311 bp, Heterodera glycines
atgataattcatgaagcatttgttgacaagctccgccaggaaaacggcaaagaaacgttggaattggtaaagcatattttgggttttaataaaaaatatttcctttattcttatatcaattataaattggctcattttttaggaagatcgggagcgatttatgacagaaatgagaaatttgtacgactatgaaagcttcagcaaaagttacattatgaaaatgctgaacaagtcgtcaaatattacgtcaatcgaccaatttgacgccaaaacgtgggagaggaacaacaatttggtcgaaattgtgctcgaattttggcaacgatacccaaagacggcacttttggtgacggtaaaaattatcaaaaatgaatgtttttaagaaaatctttttacgtggttggccattcacaaaaagtgcaaatttggtcctttacaaaaaagtgcaaaaatcaaaaatctgttttttcctataattttttaatcgattttttaaattagataaataatattcttctaaaagtttttttgtatctcgtataaaaataaaaaaaattactaaatattaaataattgattactaaaattttaaagcttaaatggcgcctttaaattttacaaaataaagcctaagcataggcctaggcccaagcaatttagcttgagttgaagtggatacatttcaacataaatatttccatttttatatattttatttaagttcatttttacttttatcccatttgtaattacacttctatgtatataaaaaattcaaagtaatctggctaatgattttatttaattaggtaaattaaattatttttattcgagatccaagaaaaacttttagaagaatatgtattaagcatcaatttaattaaattttaacattaaaaaatcataggaaaaatcagacttttgattttgattttgtgaagcgtccaaattgcatttttgtgaaatgacctagaaccatcttttcagaatatgctgcacccgacttggcaacagcgactgacggccaaaggcattttggactttgtcgccggaaagtgttacctgcgcgagttcaaatgggcacgaaaggcaaaaaacttgcgcctttttaattactttaaatttggcgaattgaaacaaatgatagtgcgaaaacagcgaatggttcgagttcaattttggaagaaaaatcgaaagcaaatgcaagagaaatttgggaatttgaaaagaaaagtggccgaaataatggagcagcagcagaaggaaatggccgagataagcaaaatgagcacgaactgtgaaaacgaatga

SEQ ID NO: 68073 - DNA, 200 bp, Heterodera glycines
aaggtcatccaggacagccaggaggccaaggaccgcccggacctcttggcgcgcccggtcagcccggccagcctggaacctctggccagcctggacagcccggagcaccgggacatcccggcaaggacagcggctactgtccgtgcccgccccgctcttccgtgttggcagtcaaaaagaagatggcggcagccaagaaa

SEQ ID NO: 68074 - DNA, 645 bp, Heterodera glycines
gtcatccaggacagccaggaggccaaggaccgcccggacctcttggcgcgcccggtcagcccggccagcctggaacctctggccagcctggacagcccggagcaccgggacatcccggcaaggacagcggctactgtccgtgcccgccccgctcttccgtgttggcagtcaaaaagaagatggcggcagccaagaaagcataagcgacaagcgcagggagaagagaaccgaaagacaaaggaccgacgcgaaagcgaagctgaagatgatcataattgggtggaagttgttgtcggaatttgtgttcaccagcgcatttcccacacgaataaagggcattcactaattgctgttttttgcatttttgaaaatgccgaaatcgcattggtcaactttttatttaattcggcacttttcattttaactcattaaattaattgcaaataatttttattagcctagaattaatcttttcttttattcgcttacaactaattgttgagatacattccataaattgagaaatgctaagtagtttaatccattttgttgttgtatttggcactttgcattttaacatggccaactaattatcatttggctattgtacctaatattcgtttaaatagttcctttttaaataaa

SEQ ID NO: 68075 - DNA, 3238 bp, Heterodera glycines
ctgagagccacagagatccttttctcatcctccctttgcttttgcttgtccaaaccagcgatttccccgcgagggtttcggaaggaataattaatttttgtgtggttccgccgcgtcccacgtcccacccgtcgctgaagcaaactcaaagttcacgaagcgtccgtcacaatttgtcgctgtgttctcaagcgtaccattccgccgtcctatcactttccctccggcgcaatttgccccattcatctgctgctgctgctgctgctgctgatgttcccattccttttcattgtccgtccgtctgtctcccgctaatgatcggccaatgattgatcgggccaaaagaggttccgcttctccccccgcccccccaccgcttttccctcgcttcttcgcctccctttttaccttccttttcttctttccttctgcttactgatgctgtcaaaaagggtgtccaacgtggaaaatgggaacgactcgacccgacccgacaccccaacccaattcaattccatttccaatttttcttttcttttcgctttgccccccccccccccgctcccctcgcgcgacttccgttgtccattatttttatttattgtctttttggccacagaaacaataaaaatttctaacaacttttttgcgccatttattgtgaccccgtgggggccaaacaatgggaataatacgtggacggagcgggcgcagcagagtcgagcagcacaatcgggaacaaaaacaacagcagcagcagaagcaacgcccaccgccccccagcggaagacagaaaccgcaactgatcagcagcagaagaagtgcggccgttgacccgcaaaccccattattctcatcattctcctccgcctgtcccattccctccacaaattggccccatttttgttgcttttggtgtccaacaattggccaatatgttcagcctttgctgttggctccgcttctcacttctcccgccgctgattttgccgcttgtttttggcccggcattggccagcggtggtggcccaaattcttcgcagagacatccatcgcatcatcaacagcagcagctgcacagtgaaccgcttcaactccttcactcatcagctgaaacggtggtgaacatgagcagcactaacggacaacgggcggcagacgccgccacacttggcaaaagtgggccggaagggccgccccctggcaaatggttgggctgcgaagacgcgccggacgaatggcgaagacgaacctgcattaaagtaggacgaagcaagcacacatagaggagtgactcattcataaaaatcctattcaattctggcacaaaacgaaaattcagttgcgacagattgaccgcaaggcacggcaagcgttgacccgtcgcgtcaagcagatggtctcgccaccgtcgatgcccggctcgccggcgtggttgaagccactcccggtcccagtgaaccatcggggccaaatcgcgtcgcatccctttgagtgcatgacccttcgctgcctttgccccttcttcaaagtgattggattaaaacaaaaataggtaaatttaattcccaattcctccaagggcaaaatgcgtcgtgatggcctttgttatttgcccagcggaaagccgctttcgatggcctaccgtaaggagtaccgtatgctcagtgatgaggaacggcgccgtttccatgtcgcaatgaatgagctgaaacgccaaggcatttatcgctttttcggcactcagcaccgccgggtggccaccggtggggcccactcgggacccgcttttttgccgtggcaccgcgaatttgtgaagcgcttagagattgccctgcgtttgctcgacccgtcgctggcggtgccctattgggactcgggtggaaagcacaatttcaaaaattaaattaacaaaaaaaaaattgtttatttcccggcattaagtgatggacaattatttgccggacccgcgcgactcaatttttttctcgccaatgtttgccggcgacacggacccgaacggatatgtggtcaacggaccgtttgccttttggcgaacattggagggacgggcagccattctgaggtttaaaattggggcattaaaaaaacatttttaattggcaccatttaaaaacaaattaattaattttacaccgtttttagggatttgggaaaggacgcgcagcttttcaccgaaagacagctcttagcggtggcaaacgagcgcaacatttggaacgttctctcctacaccgtccccttccgcggctgtcccattccgacaaattttgacgcgttggaatattcgcacacaaacgttgtatgattttttaaaattatttttaaattattaaatgcaactttttttttagcatttttgggttggtggcgatttggccacgcccgaactgtcggcaaatgacccaatcttttacatggtaattaatcattttttgacaaaattttcacccaatttatttagcaccattcttttgtcgaccttatttttgaaatttggcgtcagatgcaacaatcgcggcaagaacaaaaaacaaaaatatttttaagtgtaattaatttattaattagtttttcatttttagttctgaaagagaaaacatttacaccgcaagtaattctattgtaatttttgaaaattagcttaagaaaaacagatttgaaaagctgtgccaatgaatttcatttctcccattcgctgatggcaccgttcaacacactgacaaacattgacggtcagtggaagcgaaattaatgagagagtccagcagaatttggggggaggaagggtcgtaggaattagcttggaaatgattcgaaaaatcgaaaatttaaaaaaaaaattattttcattaattacagaatattcgagttttattttatttattttttatcttgtaaattaaaaactctctgtttccaattaaaggtctttcaaatgcgtacactgatcagctgtaccgttatgccctgcggccggtgtgcactcgcaaaaggcccacctgcgactcgaggcatattagcccccctcacccattaatcaagactaattgccatctcaatttatttattttgggtatttattctgcgatctcgaccacggcgtgccccattgtgtgtcaaaggtcaaattgggcggcaattgccgcgggtttgagggcaaagatgcctgtttcaatgggctgtgtctgtttgggctgtgccaaccgggcccaac

SEQ ID NO: 68076 - DNA, 1049 bp, Heterodera glycines
atggccgaatgtgaagaacgtgtgacgaaaatgttggaagacaaattggtaaaaaaaaagccaataaataagtagttggacggaattaaaatttttattttagaagcagataaaagcattggacagaaagcgaaatcaaacagtttttgaacagtaacagccggggttagatgatgaaacggaaaaggcggtcacattgaggaaatgaattgagaatgccaattgataaattcatctgattgttttcactgcccacatttttagcgcggcaaaaagcttggcggtgggcgtttggatggcgatgctctcgtgtgcggtcggagccactgtgaccgcgcgggagattttgcctgctcccttgcggccactcggcgcacgcccgcccctcgtccgccttcgccccctactcgctgggccacaagggcccgccacgaccctcgggtgaggaattaattgactataagcgaatgggaaaagcgagcagcagagagtgtctctcaccaaacacacactatttcttactatttcttccactgagtgggaaccaaatatatggaaaaggccaaaaagcattatttttaaaaatacatttatggagatgtttctcaaaaaacgcattttgcgttgaagagatgataaaaaaaattcgtaaaaacaaatacaattattttatgctttttacatgtgttatgtgaaatattgaccagttaatcccataaactttccggcggcttctatcggcaccgtcggcccccaaaaactcctaatttctctaaaaaattgtctcgcgcaaaaattttattttttgggcaaattctgttaacaaatttcacaattttcaaaaatttttctagcggcgtctaacggcaccaccgcccatccttttctatttcccaaaagtttttttgaaaaagcgcgtcgcaaaaaaaaccggttatgaaaagcaaaaaaaaaaaagtcgccaaattatgtcaattttgtgtttgttatttaccattaattctgcaacattattttagtgcttttagttttaatatccggataataaa

SEQ ID NO: 68077 - DNA, 1540 bp, Heterodera glycines
atggttgcacactccgacaaccgatggacagccaaagcgattcttgttgcgatttttataatgagtccgacgaagagtaatgagtcaacaattgcaaagaggtcggaataagtccatttaaatgctatactcggggtcccagatcaataatattcatttcgtttctcgaccggccaaatttttcatcggctttctctccaatggcagtgccgctgcgtcgagtgaaactaaataccaccggttcatttttgcgacaattaacattattttccgtcttctagtgacggaaaagtgaattgttgtcgtaaaaatgggctaaatttcacggataaaaacatcccaaatcggcgagacgtcgaacttcgccctttttcaagtgcagcagttaagtataaatgaacccacttttgttttttacattaagcggtggtcgtggcggagagtttttcttttttttgttattcatcaatgaaagtgggagagaaatgaattaaaatcaattcgcttaaaagaattcatgctttcctaaattttgatgctgatcaataggacaaagaaatttttttatttttgaaaaatgataaaaatatgcatttacacaaaatattaaaaacctccaaaaaagtacgtactaaatatgtaaatattttttcttttataaaaaaaaattcttcgatttggtgttttggcatataaaaacatatcgcacatatttttgctaagaaaaatacaaaaaattgaagaaaaaacacaaataagatctttgacttaattgcggcaacaattgcattggtggtatgctgctaaaatgaccgtctttaagaaaagtgccaacatgtaaaatgcttttttaattgttggaggcgactcggaaaaaccattttcacacttttgacagaataatatcaatgtgcctgaagcggaatgatttgttgttaatatgtaaatgctttcaattctaaattagtaatttcaaatcgctcaaagcaaaattagttgggcaacccaatgtccttgcggactccaactgttggtccccaactcgtaatttcccactgaaatgttttcacaatgacagtgtcgctgaagttccacagagtttgttcaatattcaaaaacaggcaatttgctaaataaattaattgaaaatattgcctgaggaaacgacacacaaaatgccaaaaggctgctaaaagtgcagctgaacgggacaaacggtgaacacggcacaatcgctcgagaattcgtgccaactttttgtggaagacaaatcgtgggaagtgccatagttacgtgccggcacaatttcaacgcggcacaaagttggagaatatcggaaaaagatggaataaattcagaaaaaaatttattccgtaataccttgaaaatgggaccaaaaattttttccaaaaatttaaaaaaaaaatttctagcaaaaacaaattgttcgcaattctgtcaaatccgagaaacgaccaaattcaacattctggcattttgttacttttattagctgataggcaactttaatcggaataaa

SEQ ID NO: 68078 - DNA, 2654 bp, Heterodera glycines
atgcggactgaaactgagattattaaaaaagtagaaatagaaatggaaggaacaaacaaaacccaaaaagaagttaagaatgttagtgaaccaaaattaacaggaaacatcaaaattgagaaggaaatagtcgaaaatctcccaaaaagtttggaaaatgaaattgtggccgaccaaggcgaaagcttggaaattgaggatgaaaatttggaggaaaataatggaatgagttatgaaaatgaggaagagtttgaaatttatgatgtggataggaggaaaaggacaacagtaacaactccggacgcaaggtggataaagaaagttgaaggaagcaaattacgaaaaaagggcggacaagaaaataagaatatgaatacacgagttaattatgcattataccggctaaatgaagagagaaagcgtcaatatgaccatatatttactcaagcttgtgaaaactcaaattttcaacttcaattggcaaaagcaattttgcaaataagcccaaatgaaggagtcagacggatttttgatagagacgatttggtcgctcgatggaagggtcaaacattagaggtcggattttgtgtaccgattattcccgaaaaaatcatttgggacaagaaaatcggagctgattgttacgaacagacacccatttttgctgaaaacacaaccttttttgtgcaagccggcactagggaattaagcatcttggggagaagaattgagtgcggaaaaattgaagaccttgaaaatgtccaaaatgctacacaaaaagaaatcatacataaattaaataaaaatttagaaaaaattcgtccaaaatatagaaatatgcaaaaccctttaatattaaaatcgggagcacttttcgagtctgaaaccataagaattgaagagacaatgttggaatacagaagaaaagcgaacaatttaccatcatccgccttacgattaattcaaagaccaaatttaactgatgtcattaaattaatcaaagatgaagcaactgaaaaattggatgttgtcctagggaaaacgggaagttggcttgaaatgatgagggacatccccaaaaaagcaaaagaggcggttaattatttaaagggcatttcatatgcattaattattatcccattatttatacttatcgcaatagttatatatattgtagtgaaatattggacagtaatttcagcaggctttcgagcgggtacatttttggcaaggattattcggagcattattggtctaaaaaggaaaagaacacaaattgtggctgtgccaacagcaccggatttggactcaattgatgaagatgcatatgttttggactatttgccaccacgaagagtggcagtaatcacaaatgatccaagaaggcttccctcaattcgtgtacattttaatggtttattaacatccgcattggtggactcatgcgcaagtgtatcatactgtcgtgaatcaacagcccgaaaagcgggattaaaaattagcgaattgagtgagagaaattcaaatttaacagcagcaaatgattcacaaatacaaattttgggaaaaacaaatgcaaagataagaatagaagatcaaaccacgggaaaaactggtgaatgggaattaactttacttgtttctcctgacaagcactgtcccggacctttacttttgggattaccattattatctgacttaaaaggaattattgcttttggagaacggaaagtacgattgggagaaatatggactaatattgtatcggttatcgatgcgcatgttcctaaaacaattaaagtcacaatggaaaaaaccgaaatatttgagccaagaactgagaatgttacaaccctggacataagaaaggaagatcgattaagcgtcattggaaaagtcggacttggatttaacggccgacgtatggccgagaattgcataagaagtgcggaaaagagcattttgcagtcagagatcattcaacctgaaggaatgaggaaacaaattccagtccggaacgaattggaggcaaaagaaacagaagaagagttggagcgaagaaaacgcttcgcagcaaaaacaccggcaactcaagggcagtttgccaattgtgtttgggaggaaacagcacaaaatacaaaagaggagaaaatgaagaaaattgagaacagcatttgccaaaaaataaaccaaattcaacaacaaatgacaaaggcttttggaggattaaaggaattagccaaagaaatggatgaactgacgaaaatcgccaaaaaagaaatggaaaaagcggaagaatttcatccgaattcgaaccgatttgccaacacaaatacgtcgacttggcgacaacatgacgagttccgctaccgtaatcgtgggacggtcggcagatgggtcaacaacagccgtggacgcgggcgacagcgcccataccaccacaattggcgcgggaatgaaggatgggccagaaatgatcattcacaatcagaaccatcaacaagtggcgcatttaaccgtttaccaaagatcaatttaaagatgattcgaataaataccgaccatagaatagtgatgatggttaatatttaatatttaaaaaaaaataataataataataagaaaacaattttattaatcaaaaaattattaaa

SEQ ID NO: 68079 - DNA, 375 bp, Heterodera glycines
atgcacgcgttttgcgctcgagctatttatcatcgggcttgtcaatccaaagcgaaacaacaaagatggtgttttgaacaaataaagggcataggttattttgaagaagtgtcaaagaacatgcagcaataagcctgcaaaatctaataagtggaaaatacatgagtatagaatttattttcagaaagtgtccacagacttttggaaaaatatatttgcaatttatcaacaattttgagaagtgagttagaaatgataaacttcacgattcaaaccaatttttgttgctctaattaaccgggataaaaacattcgaatcaattaaatagcttctgagataataaggtttatcataaaatttcaattaaaaataaa

SEQ ID NO: 68080 - DNA, 335 bp, Heterodera glycines
aggtcatagtcaaatttgaaaaatttgtacgcgatgaaacacgcaattttgacgccaaattggtggccctgcgcattgaaaatgctctaaaaactggcgaaaatttggacgactcttcgcttggcgcaggcgcaaacagcagtaccgacgatgttgtgaccacaaattgcgatgttagtcaccacgtaaatgtgcatcatctttttgcccatttcacttaaaatttttaaaaattaaggaaaaaaaatgaaaatttcattttttagagctctcctaaagctgtgaccggaaacgctgacaatgaggcagaaacgctttttgaagagcaatttcag

SEQ ID NO: 68081 - DNA, 483 bp, Heterodera glycines
aaacaaaaaaatcgattttttcaagtgtccgtttggggtactcaaacatttatggggagcaaaaatccaacgcagaattaaagtacaggctatagggaagctattcccgaaggattcggtctccccataaatctgggcgcatcggttcggggggactgccccgaaaacaaaaaaatcgattttttcaagtgtccgtttggggtactcaaacaattatggggagcaaaaatccaacgcagaattaaagtacaggctatagggaagctattcccgaaggattcgtttccccataaatctgggcgcatcggttcggggggactgccccgaaaacaaaaaaaatcgattttttcaagtgtccgtttggggtactcaaacaattatggggagcaaaaatccaacgcagaattaaagtacaggctatagggaagctattcccgaaggattcggtctccccataaatctgggcgcatcggttcgggggga

SEQ ID NO: 68082 - DNA, 657 bp, Heterodera glycines
gttttcggggcagtccccccgaaccgatgcgcccagatttatggggaaacgaatccttcgggaatagcttccctatagcctgtactttaattctgcgttggatttttgctccccataattgtttgagtaccccaaacggacacttgaaaaaatcgatttttttgttttcggggcagtccccccgaaccgatgcgcccagatttatggggagaccgaatccttcgggaatagcttccctatagcctgtactttaattctgcgttggatttttgctccccataaatgtttgagtaccccaaacggacacttgaaaaaatcgatttttttgttttcggggcagtccccccgaaccgatgcgcccagatttatggggagaccgaatccttcgggagtagcttccctatagcctgtactttaattctgcgttggatttttgctccccataattgtttgagtaccccaaacggacacttgaaaaaatcgatttatttttgttttcggggcagtccccccgaaccgatgcgcccagatttatggggagaccgaatccttcgggaatagcttccctatagcctgtactttaattctgcgttggatttttgctccccataattgtttgagtaccccaaacggacacttgaaaaaatcgattttttt

SEQ ID NO: 68083 - DNA, 571 bp, Heterodera glycines
atggattttgcaacggggccaacgaagaaattctgcgagatctgtcggagctggattgacttatttgaggataaaattcaagtggaaaagttgatgagtaagccggagtgttttgatttaaaataattaattaattttttttaaacaaaaatgtcatctaaaagcattgtaaaaaaataaaaataagtttatgagcattggaatattattttccattttttaaaccttagatatgaaaatttgtataaataattattaattctttcctataagcccttgaattctaaaatatcttcttatctaattcaatattaattaattaactaattaattaattgcccattttcaaatattagtgcacaagcgttgcttcgtttgcgcaatttgcgactgtccgcttgagccgggcaactgttcccgagatgacgggatcatctactgccaattcatgtgcaacgaccgtgtgccagtgtggttttgttctgcccatatgatgttgggatcgggcgaaaaatgccaattgttgaaggaaaaatggatgaaggaaaatgaggaaaagcaggaaatatga

SEQ ID NO: 68084 - DNA, 4207 bp, Heterodera glycines
gaggcgggaattcgaagaccccttattttgatcattgggaaaaataatttatgacatgtattttttttaaattttccgcgccgggcagaaaaaagcaggaatttatagtcattttgtgaaattttcaattttatttatatttttcaaggtattttttttttaaattttccgcgccgggcagaaaaaagcaggaatttatagtcattttgtgaaattttcaattttatttatatttttcaagatgcacctttgccatgtgccgatcagagttatacaacaaaaaattcgtcgtctgcttggcaaggcacacattgggctgatttattccaaacgcatcaatctgttgttggacgaactttcgaaccttgtgaatttatttttttgaattttaattaaattttttttaaatttttttagcctttcggcgctaaaatcccattgaaaccactcggcagtcggctcattcagaaagaagtgtttacagtgcacaccggctcttcccctgatgggccaatgtgctttttggaagtagcttatttaaaaaaaattttttttttaccaatttcctaacaaaattccatgaaaattttcatcaatttggttgggatgtaattacgattcataaataaccgaataaaaaaaaataaactaaaaccgaggaataaggtacagaaaatctggtagtcccaaatttttaagtttgtacggtagatacaaaaatcaataaccatttttttgtacgatacttacaaaaatagaattaatttcaaaaaaggtttgtgatgatgcgctgattttgcgtgatgctaatggtgttgtgcaagaacggtggtggtatgagaggcttgtgaacatgacatattcaccggtgtgtttctacgttttttgggtctccataaaaatataattaataaattggaaaatttaattagaaaacgcgagtgctttgcttatggcgtcgtcatgatgaccaagtttacatgcataaattccatacaaaaaaggtgaatgaatatctgggattaaaaaataaataattatgtatatgtatcaaacataattaaaatttaagtgccgtcatttgtacaacagtatgaaaacagcaatggaacgggcagcatcaagaggcaaaaaaaaaaaaactaataataataattgaatttatgacaattgaataagtgtatgatgttaggtcgtttcatattttatgacgttagtcagaaatcgtcaaatgaaaaaaattttgttattcataaactttgctcgattttcaaaggtgtatttttttaaattcccaaaaagtcgatcctcatgggtaatttttcgtttttattacatttttcttcaaaaatttgccaaaatgaccaaaataagccctaaactcctcaaaatggcaaaatatgcatttatatgcactaaaaccctttaacaaattaaaaattttttacgtagaaatagtgtttttttgagatccttttttcatcacatatgcgcagaaaaaatatgcaaaggcatacaatttatagccctaattacattatttaaattgacaatatagctaaaattatttaattaatttgaaggaaaagtgcaagtggctggccgagagttgggcggcgaatttccaatccatgacgtggaacgaaatgaaggtggtctgctcaaagttcgcattgatggcatcgcattgcaatttgtgaattcgcaggcacaaaattttaaaaaccccaattttttttaaattttaaatttaggaatttattgaactaagcaacatcaaaaaatgtaacactatcggtaaattggagggacaatattaattttaaaaattttgaaatattttaaggcggcaacattttcatcctggaagaatttagtaaaatattttaattaatattgaaatattttaattgaaattaaacagatcgtgccaacaatcagcttatacagcgccgatacatttcttcggtggtcagttttatttattccttttttaattcaaaaactttgtatttatgggttaaaattcttataaaattatattataaaacaaatcttacttgtaaaaataaatctaaaaataaaataaagaatgacttttcaaaatttaatgattcaactttttctaatgattaaaaaaaatttataactttaaaaaattttttttaatgattcgaaaattttatttttttaatgattaaaattatttcttttttctattttatttgcattttttttaaaaattcgatatattttccaataaacaattttttgtgccgattttgtcacttttttttttgttgccaatgttttttaattggaagtgttgtgccaccagtgtttgtgttgcttaaggcagcctcaatttcatggtcacttcatcgtgttttttctgtgcaccaaactctggacgaggagtgcaatgaacagcttcgtgaaaagctggacaacaatgtttgtgttctgtttgttgttgttgtgtgtggtgtctttgtcagggatgtaaattcaattcaaaaagcctttttatggtccaacaaaatttaaaatttcaaaaaaatgatttattaaaatttaatagtttctgtagtttgcccccactttttttttgctttcatttataagtaactataaatgatttaaacgctagaaaattagtaaaaattcattagaaggttttcaacagcagctgtctttcccatgcagttgtaaaaaattttagttttttccttttccttcgaattcgggttagagtcgagattgtcaaaactaaaagtcatattcatccgaaaaacccagatatgtatttgacaacttttcagaattaaaatttttttgctgaaaatgggaagtgggcaaaaaatgaatgataaaaatgtttacttatataactttttatcctaataaatacacatccctgaccttttttatacaatatactcatatatttttttcaatttctgttcaggtaactctttatcgctctccacaagaccctaatgagtctaggataatccttcctatgaaggccccacaaattgatggtaattagtctaaattgtttaaaaaatcgatacttttttttattaattatcctgtcaatttagaatgtttgtgtggttcgtattctgaaaatgacgaaactgcatcagtttttgaaaggccaaggtcgaacacactttcagacctccgaattcatcgagaaccaaaatacaaaggaccaattctatttccaatgatttaaattttgggtggagcaaaaaaaaatttgcaattttcttataattaagacaataagaaaaacaggacttcatttcaaaaatgcgaaaaccgtaaaaattagtattaaaaattgaagccctgtccctgacaggggtgtgcgaaaaccaaaaaaaataattttcgaaaacgaaacgaaaatatttatttttcacgaaaacgaaacacgaaacgaaaatttaaaatttcaaaactcgaaaacgaaacgaaaattttttacggacgaaaacgaaactcaaaaagtgacgaaaaaaggggacgacacgaaaacgacacgaaatttcgcacacccctggtccctgacgaaaaaaaataaatggctctgttcgtcgcagtttacaagataataaaataaatgtaatgcatttttctataatcatccaaattaaacattcatggtatcatttgatagcccaaagagttctctattggtttaccaagatttaaaaaaaattaccttaagatccaaaaacttatggtcaaaaatgctcagaaagtttttttttttttgaattttctgatcataacttttttaaaagataacgaaattctttgaaatttttgtgaatcctgtagactgcaatagagccaaaaataataattacataaccttcttttctgctgtgtgctttaagtgctttaattacacatttattattatattatttttgttttggcactcattttatgcttatacaaatatttttgtacttatatttttgctgtcgttgtgatccattgtttgttgtgcttatcaataaatttctatctaaattttttgaattttataaaattacaaaaaacaaccattaaactttttgaaattaggttcatttaacaaatttaggccgatcaaatttgctattctgtgctatgcgttttttcatttgcagcggcacatcgtcacagcatattaacacatcaaaaa

SEQ ID NO: 68085 - DNA, 668 bp, Heterodera glycines
atgccaccaccacaaccaccaccattgtcattcactatggacgcgcctccaccagtgccaaaaaggccaagccttccaacaaccgataaaaagccgtcattgactgctgcttctgtgaattttaaaattttatttattcaaaaataattattttattgaatttaaggaaattttaccaaattctacaacgcctgagctgctgtgcgaaaatgatcaagctcaaattcagaaaaatgttcacaaaatttcagtgaaggatcaacaactgtttaaagatgaattggcaaacaaaaaggcgattattataaaatattattatttttatttttaaaatttaataaataaattaaattgaaattttttgaggaagcgccaaaaatccaagtgcctcaacatttgaatttgaactcacttgaagcaatgttgccttctacatcttttgttgatgaacaaattccaccgagaaatttcttgttctatgatttaatagggccatgtaaattaatttctaatttttacaaattaacacaatgccagatttatttcgcgcatttttaagcgccaaatcattcgtcaaatgtgttatggcaacagatgccgttgtgggaaaccgcctttctggacatggttgcacaggagagggacaaaattggagtaatttgaaatga

SEQ ID NO: 68086 - DNA, 583 bp, Heterodera glycines
atggcggacagtgaacgcaaatccgaggctgagttggccaaggcgaaagaagaacttcgccagttgaaactccaagcagccaaagaggcggaggaacagaaaagggagttggaggaggcgcagcgaatggagagggaattgaaagagcgagtgaatcggaagttggccaaactgagggcattggaagagatttgatggaaaagttgggcattttactttgattacttacacttttgattttactgtacttacatttttttatatttccttaaaaattctgaaaaacagtgaattgcaattgaaattcaaaataatatttatttgtattagattcgtgttttaaattggttttacaaatacagaaacatgcataaatatccgtttggtaatgcaaaaggcgtcacccgcagctccgctcgttcgaatgcgaatcctccaagtgcagcgaccgaatggttccaccgcaaattcggcgctgccattcaactttcggagcgaaagaaaaagtaaagtcggcttacaatcaacaaaatcaaattggtttttaattttagcgaatgcgaacgcaaacaaaaaaagcaaa

SEQ ID NO: 68087 - DNA, 794 bp, Heterodera glycines
  unsure (1)..(794): unsure at all n locations
ctgctggcaactcactcagattttttccgtgctttattttttggtccaaatgcagatgaaaacccaaaaattgtgatcgatgacgagggtgaaaatgccgtggcaaattttgaacggacaatttcaatgctgagttcacccgatgcagaattggatggtaaataaaatcggaacattcatttattatattttaatgaactaattgaatgtaagaaaaaatgaccatgtttttgggttagagttggataatctcttccagttttggttttttgggttttaaaagcccgaaaatctttttgcatttaccaaaattttgattgaaatgcaatcaatgcaaaatgcaaaaaataagatcttaaatgactttttctaaactaaaaattcatgaaaaatcaaaaaaaaattgagtaaggaaaattttcattttatgcttttctaagattaaaaaaataaaataataattattaaaaaaataaataaatttcagatgactatgtggaaaatgttcttctgttggccaaccgttttctgtttgattccattgagaatcgttgcgtcaattttcttatgaacgatagccaaaagccgaaaattttcaagtttcgattggctaatcagtgtgccatcattggcatgaaggtgaaaaattggactaataaaataaagtcaagaaaagaacggcagctaatcaaacacgcttcccccctcatttcggccattttttanataggagaaaattccattanatcaaaaattgcaaagattcctgccaatttgtcataatgtataaaata

SEQ ID NO: 68088 - DNA, 729 bp, Heterodera glycines
atggcaaaggacggcggagggagcagcggaaattggagcagtacggcacggtcatcgtcagaagaagccgaaaagggagaaaaggaagacgaagaagaaaaagaagaagcaatgggtgaagaagaaaggcaaagagaaaaaggaaaaagggaaggacaaaaagaaatgggaaaagcaatgggaaacggaagccaaacggagcaaattgggacaacagaaatgggaacagcagcagaaggacagacggagcaaaactgtgagagcagcgacgcacaacgccatgccaatgttgcggtgttcgttttgggtgcgtatgccacaacccccgctagtcaaacataatacccggggtttaatttgatcattctgatcattcctgcactaatcagggtctcctggctgatcagcattccattccaattttggcttttcctgtcgttgatcataattcgatttcccctcaatgccttcattctcagtccctttcctgattgattgattatttcgctgttcctctctcactctctctgctgatcactgatcagtcccttccaattccaatcccttttcagtcatcgtttttattgtggtcggtgtgctgttgacggcgtttttgtgctgtcgtcaacttgtcacgcctttaccccctgacaatcgctgctcataaaagacaaattctcggccaatttctggcaaaaagaacagaaaaaagtcatgggataaattaaa

SEQ ID NO: 68089 - DNA, 276 bp, Heterodera glycines
ccattgaaacggcacttttaatttatcccatgacttttttctgttctttttgccagaaattggccgagaatttgtcttttatgagcagcgattgtcagggggtaaaggcgtgacaagttgacgacagcacaaaaacgccgtcaacagcacaccgaccacaataaaaacgatgactgaaaagggattggaattggaagggactgatcagtgatcagcagagagagtgagagaggaacagcgaaataatcaatcaatcaggaaagggactgagaatga

SEQ ID NO: 68090 - DNA, 1080 bp, Heterodera glycines
attaatgcggatgactgttcccatgacgggtctctgtctgtggagaatgtgctttgggccaacacggtgttagcaagcggtacagccattggactggtggtgtacaccgggcgggagacgaggtgagagaaccaaccgatcgaccacttattttttgtacactttttcgctaacattttttggttacatgctgccgataacatttacaatattattcaggtcggtgatgaacacgacattgcccgacagtaaagttggcctgctcgatcgtgaggtgaggcaaatttgcgaggaaaaaagttttagttgaacaaagggcttacaattagctaggggcacaaactgaattgtgtctccaggtccagaaaagaaatacaaaaggttacccgccaaggtttcagaaaacggcagaattttgaaaaaaaaccaggctaggacacggctttaagagtcttactcggaaaatatttctaactaacaaaacgtcttgttttaatcagactccggatcctgatgaattcctctaatccggaagaattaaaacccccaaaaaaaccacaccaaaattgtcatcctttgtcgttaaatgaggtgccttccccctcctgaacaggtgaacaacttgaccaaaattttgttcctgttcgtgctcactttgtccgctgtgatggtgctgatgaagggtcctgaccatctgtggtaccgttatctgatgcgctttgtgctcctcttctcctacatcatcccgatttcgttgcgcgtcaacttggacatcggccaaactgttctactcgtggcaaattgggcgggacaaggccatcgcggagacggttaccattttattttgttgaaaattccgggtttttatggtcgagcgatataattaatgccaagtatccttgtatttggtaattatgtcgatcattattcgaaaaatgttcaattcgtattccgaattttcttaaagtcactttttaggtggtccgaagcagtaccatccctgaagagcttggccgaatctcttttctgctgtccgacaagacgggcacattgacgcgaaatgaaatgcgattcaaaaag

SEQ ID NO: 68091 - DNA, 88 bp, Heterodera glycines
atggctaagaagcataataaggacggcaacaagcaaaacagtgggtccgacgacgatgaaagcaaaggcagcgacagcagcagcgaaa

SEQ ID NO: 68092 - DNA, 344 bp, Heterodera glycines
atgaataaaaaggaaagactcagatttttgaaaaattttctagagcaagctagctcggcgatcatttcagtgtaagttagtccttttccggggagtatccctgtaaagtttggtatgcttctgctcaattagcaaaaaataagagtgatcaatctctcagctaaacagttaagcgtaaactttttcccaaagttaaaacgcaattaaatcatttttaaaattttattcacctccgttattgatagaaaagcatcagagaatcttattaacttgtaaataaaatttggtgggtttcagaaccctttgtgaaaaaatatttatgaattaattttgcaaaaaataaa

SEQ ID NO: 68093 - DNA, 2252 bp, Heterodera glycines
atgttgcgtgcccaacagcaccagcagcacggcttggagacagtgggcgtcgtcactgagactgtcaccgtatcgccacagcctaccgtagaaaccgttatggtagaccaacggcgtccagcggcaatgccaacacacattgtggaccctttttcgtccaccattgttgatgccggcgggccaccgccgatgacacccggcacgcgacaccgcttgcaggagcacggcgtgcacaaagcgcacgacttaaaggtgcgtttgccgaatacagtaatggggccaaaacactagcgcttactgcaaatggttgatttgtaactgggtttggttaaatgtgtaactcaaaaaaagtccctatggttgtcccgacatttgcgcctttgtccaaaatcgggttcaaaattaagtattttcaatccctgacaaatgaaagcttaaatagcattatttaagtgatagagagttgttatgtctgataatttgatagttattaaatttttgaaaaaaattataattattcaaacagctgaattaagtttcctaataaactagaaaactgggttttcttaatttaaatgctgtttaggctatcaaggcttgaaaaaattcaattttgaatccgcttttggacataggcgcaaataccggggctctggtgctaacgagaccaatgtagaaaaatttataatttgtaattggtttttaatttatttcgtaccataactggttttgggggatataagtcccatttaggccgaaaatttgaatttttattggaccataataaattttcaccgtttgtctcaaaaggaaagcccaatccatttgacttaatattcaaatacttttttttcactttttatctttataattattgtattaatttttttgaaaactttctcaattggggaaatggttgtaccgcgtgaactgctcccctcccccctcaatcacaccaaaattcaggaaacgttaccttcaccagtcgaaggacgaggctcagccacaacaacggatcacgaggctgagtcggaaacaccgaggcaagtggagaaattaaaaaataataaataataatttcattaattacaatgtttatgaaacattcgaggttagcggaaaaatttaaaaaaatatagcaattaattataatattcaatttttagttcaaggcattcttcaaaagcaacaacgccgcggctgagcttgaaattccggggcaaagacaaaacggacggcgtttttgagtggggaaaatcgaaactgagcagcaaacattcggtgagaaaagcgaaataattttcatttaaaaggaataattatttaattataataacaattaatttgaacaattatttaattgcaataaaaattggaaaatattttgtctctttgtctcaggtcgtccgtcgtggtaaagaggtggaggtgaagctggacgggctcaagttgggcaaagaagacgttttgcgagtggtaatttaaacaaataattaatttaaaaacttaattaataaatttgccatttttgcttgtaactcctcccgccacgagtgccgccagcgctcaaattgcaggcgaacaacgcgtggcagaaccaactgcagcacaaccgcaagccgttgagattgttcaccgactccgcaagacgggcagcaaaacgtgggagatcagcttcaaaccaacggaggtgaaaatgggcatttgtcaattggaacttaaacacaaattttaaaaatggaacaataaaaatggaacaataaaaatgtgccatattaagacatttaatatttcattatttggaaagaattggttttaggtcattttttaaattccgccagaagtgtttttgtactggtaaaaccaaagaaaaaatttttttttgttaattttcaaaattgttatagaacatttaaacaccgaattataccaagaaactatttaaatgacgaatttttatttcaaaaaatttaaaaggtttctgaacaaatgtgtcattttcaggtcggaacgcacaaagtgttggtgttcgtgaacaacatggtggcattttggaaataatttttagattaaatttaataaatttttaaaatgtttagccccatccccaaactccgttcccaattcgggtttatgatgctggccaaattgtggtggaagacattgtcaccgaagcgactgtcaatgatacggtggaatttactgtggacgctggcagggccggatttggaaacttggagatggccataaag

SEQ ID NO: 68094 - DNA, 896 bp, Heterodera glycines
atgggacttatatcccccaaaaccagttatggtacgaaataaattaaaaaccaattacaaattataaatttttctacattggtctcgttagcaccagagccccggtatttgcgcctatgtccaaaagcggattcaaaattgaattttttcaagccttgatagcctaaacagcatttaaattaagaaaacccagttttctagtttattaggaaacttaattcagctgtttgaataattataatttttttcaaaaatttaataactatcaaattatcagacataacaactctctatcacttaaataatgctatttaagctttcatttgtcagggattgaaaatacttaattttgaacccgattttggacaaaggcgcaaatgtcgggacaaccatagggactttttttgagttacacatttaaccaaacccagttacaaatcaaccatttgcagtaagcgctagtgttttggccccattactgtattcggcaaacgcacctttaagtcgtgcgctttgtgcacgccgtgctcctgcaagcggtgtcgcgtgccgggtgtcatcggcggtggcccgccggcatcaacaatggtggacgaaaaagggtccacaatgtgtgttggcattgccgctggacgccgttggtctaccataacggtttctacggtaggctgtggcgatacggtgacagtctcagtgacgacgcccactgtctccaagccgtgctgctggtgctgttgggcacgcaacatttccacagtgcgacgcgctaattgaataacaaattgactaattaaaaattggaaacggaaaaaagggggggaaatggattttttttgaaaagtatggtcatttcttaaaaaaatgtttaaagaagaaagcttttgatatcctttaca

SEQ ID NO: 68095 - DNA, 1175 bp, Heterodera glycines
cggctgtctatggctctccgccgacccctcgcggcgcctccgtgccgctggagcgtggcccgtcctccgcttaccattcgtccgtgtcgccccacgcggacaccgcctcttcttacgcgccttctccgtcatcgccggcgtatattgcgcgcgcggtacgtaaaaaaatgttatcttcaaaatggacaaataaaataattttaatttgaaacacaataattttttgattcatcataaattaaacccttatttattagtacttttatggcatttttaacgaaaattaactaatattttgctttaaatattaaatatcgttattgttttttaattttatcagcattcgcagcacgcgtcgcccgtcgagcagcgtcgccacgatctgtccgctgagcctgtgacgactgccggcgacttgcgcagcacctcactgctgcagtccgcgatgcgacagcgggagaagagtgaaccgccgcgggggctactcggttatacggtaggaggaacttttgtatttttatcaaaagcaattagcaaataaaataacatatagtgacagttaattattggaaaatatgctctttcaaaacatccaaaatctacaaataaaggtggcacagtatgacaaaacaacaaccacaacacatactgtggagcgtcgtatgtccccgttgccacccccacgagagacggtaaattttattcaatcaaattaaaaaattaaaaagcaatttaaatactgttattaattccagcaatttggtggccgtattccatcaccgtcacctaaagctgctgtttcgccaccacacaaatattttggcactgaaactgacgtgaaaaaaccgccgccaccgccgggggttggtttgacatgaatttaatatttattaatttaaaaattcaaattattttaaaaaacgaattttgaggctgactctgaggcggcccaatttgagatgaccagatcagctgaactcactttgctcaaagaacacccatcgaccagtgaacagaaagaggtggacaaatattggtgcactccaaaatatcgctggatgatattttggaccataactttttttaattattaaccaaattaagagaatttccagaattgttcgatagctttatgcttttactattttctgcaaaatttcaaatacgccaaataa

SEQ ID NO: 68096 - DNA, 701 bp, Heterodera glycines
atggatttgttgtgagttttgtatgggccaatcacaacgttctttttattacttatttttttgtttgctttccgctgaaaatatcgatgagaagaaacaaattgaaaaaccttctcaatttactctttgtggcagaagaattacatccactcattttcataaaagtttttgaatatattttttattcgctcatttctaataaaattttaaattaaatttttcattttcattaatccccccccagcatttagtttatgcaacacattttatttgtttttcttccctccccaattttatttttttatagaataatcagtgccaaggcctcatttgctaggcctccaaatcgcaaaaattgtttttgttttctgaattcgttgaaaatgtcctccggcgatggcctcggccctccgttgtcctccccgcgctatgtgtcccaattgtacgttatccctgcagttgacgcgaccgaggcgggcaagggacagttggaaatttcggtcaaccaaggccaagtgccgaacaacgtgcaaatgcagggtgaatttggccaatatttcaatttattttaaaatgaaaaatttatcatttttatcaaatcctgtttttttgttgcttgaatataataattaattattaattaatgactttttttaatttataaaatttttaattaaattatattttttgcgtttaataaa

SEQ ID NO: 68097 - DNA, 191 bp, Heterodera glycines
atgtccatcactgatggacgacctgccgatccgtcgtcaacagctgcacttggggtggtcaccagtgctggaagtggtggaaaacgtgttgtgcaagcaaaacataaccaggtgggcgtaaatttttaaaattttcttattatttttttaaatataaaaaaatctctagtaaatatttatttcaattttga

SEQ ID NO: 68098 - DNA, 494 bp, Heterodera glycines
atgcagaatacttttctcgatttactctttaccaggggctcccataattggaacgtaagcgtaatttttgtaacccagagtctctacggtcgggacattaaaacggcaagagcgaacgcccattatctggttttaatgcgcaacccttcaggacaattacaagtgaggactctagggtcacaactgttcccaaaaagactgaattatttcatggatgcatatcatgatgcgaccaataatcaatttagctatctcatgattaacatgcacccaaattctgatgaggaattcagattatgtagcaaaatttttccagatgagactctggaaatttatttaccaattgaatagtatataagaatatgaatttaaattaaattaaaaatgtataaatttagctccgaagtgaaggagaatacagcattcctaaagaagcttgcctccaccagatcagaacaaaagaagaacgaattaatcgaaaacgctacagctga

SEQ ID NO: 68099 - DNA, 187 bp, Heterodera glycines
ttcattctctatacatttagtgtcttatttcatgaacttctatataatttaattttaaataaagaggcaaatttttacagaaaataaatagacgctgactaattagctaacatttataaagaaagtagaaatttgattaaatgcatatacaaaatattacttttttaaaatttgtataaagttccta

SEQ ID NO: 68100 - DNA, 1211 bp, Heterodera glycines
  unsure (1)..(1211): unsure at all n locations
atgaattattattatttcatttgtatattttttctaattttattaaatcatcgcaatttcaatgccttcncaagtgtaaatgctgcggttgtaagttgccattttaacaaattagctaatttaaatacttttataatcccattataacaagaatgaagatgacgctttggttgcacttgcgaaaggcccggaacattttgacagattttgcgcaattaacggcttaaccattgatgagaaaaagcaattgttgtctgaaaaatatgaggcacaccttggcactttgtattatctaagaatggattggcatgagattcagcagattacgaaagtaagagcatccgctgacaaatgaatattaatttttaaaaccataaaaaagtttaaaatataaaaaatgagaaaaaaattcgctttcgcaatttaaattttttaatttcctaacgaaattgatttttatattatgataaaaatttcggttcttgcatgttaattttttcaaaatatatatttttttgtttctatttttgtgaaaagtaattatttgattttcgttttcaaaaatagaatttttttatttttgatttattttttaattcaaaattatatgaattgtcgaatattttcatgattttaagcagaaccaattttatgcgccagaatgggaaaggtcacgcaaatttgctttcattctgtacgagtatttgttccgcgaatatgttgctgaatatgtaaaaggttcgaataattttcaataaaaaatttacttaatataattagtagagacctacttttgaggcatatgccttttttcggccctctagtttagatatattaagcataaaaaacaaattttatacttggtttgaggcttctacgtttactttctattatgccttttttgccattttgccgttttggtgcctttttggcgtgtttttccaaaaccattaaaaaaagcagtaaaatcgtgaaattacacccctaagaatgacttgaaaaaatgttcagtaaatacacccttaagaatcgaaaaattttctcaaaaattaatcgttaaaatttcatttttttctttataaaaaagtcttaggtttaaaattttccttattcgaataactattataaaacctttaataatttaaagggccaaaattaagttatttggttaaattttacgttgttttgctcatctaaaaatccttaataaa

SEQ ID NO: 68101 - DNA, 1199 bp, Heterodera glycines
atgtcgggcgatgacgaggactttgttgtgatggtttgtctgtttttatgttgcaattcaaaaatataaatacattctagaacacttgccaatcggtgtttgaccaagtcaatcagccgcaacaaatggtggtgcatcaccatcactacgagaagaagaagaagaagggtagcaaaaagaagcgcagttcgtccacctcctcttcatcttcctcttcttccgaggaatcgtccgtttcaaggaggagaaagaaagagaagaagaagagcaaaaaggagaagaagagggaacgaaagcgaaaacactcggacgaattggcggagagttcggcagacgaaggtgagagggattcgggatttacaacaaatagttaaataattgacacgttcaaggacgatcgacgtcaaaaaaacagcccattgtttactccgaattcgaccacaagcgaaacccatggaaattattgcgcaaaaacgagtgggtccacaaaccgatgcacatggtcgtggacacgttcggtgacccggagaatgcgaaatatgacaactcgcaccggtttgtatttgccatttctatttgtgttaactaaaaaaagtacaaaaatttaattctattgctaaatttgttgaaattctttttccattatagttttacatttgttccccttctcagtggcgatgtgcccgactatcgcgcgcccaattcggaggacagtcccttctggcgagttttttccgaactctacaaagggctgctcagtaaccccgagagcggtgcggtgggaaaagaacagcgcgcgttttccgcccgtgtcatgaagcagtggggcaaatgtgcgcccgagcgcgttttccgcaatcgcgccaacgacaaattcgaaaattatgtgaaaatttcgcatgctccgtgtccaccggatgaagaaggggtaaagaacagaaatgggaaaagcgtttttcaacttgcgattttatccccatttttaggcagtctctttgggtgttataaaacatgagatggacccgcagatgctcaacaccattaacattgaagactttgagcacattatgcgcagtcaaaatgcatcgtatgaagaagcgctcgagtcggacgtgcaaacacggtacagcattctacaggcaatggttcttcgagagccggacaatgttgacgcgtggctcaagttcgtggacattcag

SEQ ID NO: 68102 - DNA, 3452 bp, Heterodera glycines
atgcggcagaatgatcgtgcagtcttcgatttgagaaaaatggtaggcgaaatgtctaacaataaaccaatttaaaaaaatgtttctatgtaaggtattgatggactccgctcggacggagtcgcgacttccactgattgaccattgcatcaaaaaacttgtcgaaattaaaaatggaacaatcaaaaggtgacgtttttcctcctaattgtattgtgatttttcatcatttgctcttttccttcagtcacgcgatgatggaagggactgaacaggtgacgcatttttgtttgaatttatttgagtgtttaaattctgtaacagtttcttgtcgacctgttggtgcaacggtgccgcctccaagtggtcgctggacacgtcgcaaaagctgtggctgtgctgcaggtccgattgacactcaccatacgcttaaattaaaatctagatgtcatattgccaccttattttccaggccttggccgaattccacttcttccgtcccgaggtgtacaaaaacttcaggccggacaccaaacctcacgtgatgcaacaagaattgaagaagggcttcaaaactttttggactagtggactgcctcgaatcggagagccgagcgccaatgggtttttatatcgttaaaagtagcgaaaacccaccaaagttctgtccttaagatggcttcgctttgagagaagtgacgtggactcgcaacatccgaaacatgacgaggcggaagtgttggagcagaaatggagttgcatgcacgaggaggagaaggctttgatggccaagtacaagggccttggcttgtcgtctgtggaaatacgccgtcgcttggagaagtttcgggcaaaagttcgttatcctcagatcatttgcattggcaatggtctcaaatcaaacatgcattaatggtaataaattattcagtggttttggttcccggtgcacttcaaacatgacgacgagaaactttatgaggtgaaattcgttgaactaatttaaaattacgtaaatattgcctaacccaactttcagcacaaagcacgcattgtcagttttgaggagttggagccgttacttttctcattcaatgacaccaactgtgtgaaggatctgatcttcaaactgttgcacatatttggcgttccaattccggatatagtgggtttttttattattcgacagaacattacctaattaatcgtttttcgttcattaaaccgtttgcttttttagtttattgaaacccaagagaatattcttcggcagttttcccgttcttatttccactccaactcaccaatttcgttggatttaaatgggtttagcaaatttattgactgttttgtcactcaaattgcggaatccccaatgatggattcgcctcgcatttacacggcattgatcacatcgtacgcagcaaaatatttcctttttttgttattcccttttttaagaatttcgaattctccgctttccactcaaaagaaatacaacacattgaggcagctcgtcaggggcaaaattcagactttaaaacggcatggaaaggaaacaaaattgagcagagaagtgcaattgtcgctttacctcaccgcctttgaagaggtttttaaatcaatttactgacaaattttcaatttcatgtcgaatattttgatataaattgtttcgtttagatgatcaaaattaaacaagagcacaatgacgagtgtactgacgcaactgatgagtcaaatccgccaattactgagtccgaggagtgcaaaatgtgtttggcggtgttgcgcatgaatttggacgccaaagaccgttccctttgggagattggggagacgggcgacgtggacaaacgcaaggaaaaattggtaagaaaaatcgaaaagaataaagctataaaacccccactcattgtcagttcttcatgcgttttgctgtgtttttggttcgtcaattgcctttttcgacagatccggacgaaagaaagaaggagaaccgagcagtcatagctaggaatggaacaataattgggtatttggccaccaaacgtgaatttttgctcagtctgttctaccacgggcgtgttttgcaggtcacaatcaaattgagtccccttttcaaatgtttttttaggtggcggaaaatgcggagacaaaacaaaaggcatataaaaattttgttgaacgcttatcgcacccggcagcactaattttggacgaccctttgcgttggatcggtgacgaaaatgaattggtgaaactgtgcaaaaaaaaaaagaatttctgttccattttcaggtgttcgaactttgtgcctactacaactatgaatttcccattagtccattagttcgtattagctcttttgtgcgcgttgacagccccttttacacgacgaaactcgccgaattattgaaggaaaggccgtgtgtgcaggagacgcgcattgccattctccaggttctttcattcccatggacaatgtgctcataaccttacttataattaaacgtatatttttttactaatatttaaacgtttgcgttggtttcattattggcttttttccttttcagcacattgtggccacaagtgcattctttacaccgggcgaattgcgcgaacagctcagccaattggtgcagcgttttccgcacaacatcccaattttgcaagcacttctgcgtgttggcagcgattttcacaggcgccgctttttggcacaacatcctggtacaggtgagtgataagagttggacctcaatttgggaaaagcattagcaatggtttggcttaatcagatgatcgttctcgtctgatccgcacctgtggtcgtattttcgccgctcatcatcactacttggccgagcacaaacgatattatgagcagaaattcgacaaccaagcctttcgaactttgctctaccaatatgtgcacctcttacgcaaggctgccgaggaaaattggtcctttttagtgatttgaatatttactttatacaaattaattggaaaagttcaaaattctagtggtagtgcgcttcccgacgactatatttgggttttcttgatgcaacacatcacatcggagaggacaatgttaccaaggcgcgttattgacgaggttctgcagccccacagcttcttttgcgtattaattttcttcttcaggtgtttacaattggccaaggtcgttgcccctggagtaagcagtttctcatggagtcgttgcgcggctgttgcgaccgcaccgacccatcggtgacaatggtaaacgccacaatgaaaacgcatggcatcagtgtgtactgcacggacccggaagtccaactgctgcttgagaagtacagcaataacaacacttttcgccttccaagcaatgatttccacttttctgttttagcgtgtgattttggccttcgtacgaacgacgcattcattgcctgggg

SEQ ID NO: 68103 - DNA, 978 bp, Heterodera glycines
cgagcattataacagatcacatgcgcctttcgttgcagcggcatatggccacggtcggcaagccattggccaagccagcacgtgcaatggccaagcattgaaatggccaaagaaatacgacaggagggcttcgatttgctaagcaaagatttgtgcgccagcagcccatccacaagcagtgcagcaaatgctgctgttcaacaccatcaaaacaacaacaattataacaacaacaaagcacaacagtaccaacagcagcagacaccgcaacagcagacaaatactgtaaatacagtaacaacagcggtgacaacgactacgatgatggagggcgacgcgtggttgatgagcacagtgcaagcggaggacaaactgttacaagcgcacacgaacagggaaaaagtattttccattctgaagacattgcgcgacagacacttggacttcagtggatcagcaacaacaaaacagctggtcaaagtgagcagagaagggaagggtcagatcaggtcaaaaagagatgagcaacaatgaatgataggcaaaagattaccaatacaaaccaaaggggggaaaggaatgtgaaccaattttgggtcgagaatttaaattgaaattattggcacaaagcaaataattaataaccgttattatgcattatttaacataattgtcaggtgctcgtgctgtatgagtgcgaaaaacattatgccaactatgaatggaacggtaacatttttaaaccttttgaaaacgtacaggcaaatggtattttcagatttctgtcttggcgaccgaatcattggcattcttctgcaaatggtcaactgtttgcagtgccggcggtgcccccatttttttctgcctcagatggacctgttgaaaaaccggtcgcccaaatcgctagacgaaagtgctcgagccgtgtgggcattggtccggcaactgatgctgaatggcaaagcattggaacagctt

SEQ ID NO: 68104 - DNA, 270 bp, Heterodera glycines
gagaattcgcatccacgtttcgaaactattgtcttggacgaaaccgaagatgatggccaccacaacaatcttgtgggtacggattcagacaaagagaatgatgaattggaactttagcgttaaagccctttagatttttttgattactatggttttttgccttttgcgctttttttgttgcaattattcttctttttttataaaatcattccctttccccttggtttatgctcttattgcttctcggtcaaatgatgacctaaacatcaa

SEQ ID NO: 68105 - DNA, 762 bp, Heterodera glycines
atgccccctaatttgatattcacttctctgcattttaaacgcgcaaaggacggcaccggtgccgtactcgaaacaagcaaagattgggcgcaaaaaatggaagtggagctggtgccaatgaatagcattccatttcagcgcagaatcaaacaattcggcactttggccataacgtaagtttggatgcaaaattttgatcaatttgttaaaattagttagttttttttaacaccggaatgatggcccgttgagcctttctaagttcatttaaaaaaatccgggggctaaaagtgatcaaaatttgctaattttaattaatgttattatgaaaattacggttttgaaaatcaaaaaaaaaatcgctcagttgacacaacccggccttttagtgccttaagaaaatttcgccataaaaaaatttcccgttcagttacattgaccgaactgtcatcgcctttctacacagcattaagcatgtgtttagcctggataactcgcgcagaaattctttgatgggtagggctgggattttatgtgctaaatggccaagaaaaatgtaaaaatatgtactaaaacatgttctattaaaaagtgcaaaaacatttcttaatattagcgacattttctcaattattctcatgccccttaaattttaggcctttgcctaaaaatgcaaatcccgttaaatgttttttaattttaaattttcatgatcttttttgcttatattataattatttaaaaattattttatatatttaa

SEQ ID NO: 68106 - DNA, 306 bp, Heterodera glycines
atgacttctttggcgactcaaaatcgggcagagaatgaaaaagcggacgaatggccgcccatcgaattgtgtgctccgaaattgggcattttgtcacagttttccaggtgttcaacgaaaacaacctttgctttctcccatttaataatggtttccttaattgggttattttgctcccatttcagtgtctctgccgattctgtggcgcatgttttggtccgcgagttggccgaacgcgtcgaccgtccatccgccgccgaagtgaacagtttcaagaatgacacggaagtggaatgggttatgcag

SEQ ID NO: 68107 - DNA, 659 bp, Heterodera glycines
atggaggttgaccatcaatcacttgacagcatttgcgaaaatattttgtcaatttctcgtcatttgggtcttccgctaactgataatctcgacaatgcccatttgtcactcttcaagactaaggttggtaaccgaagcaatgaaagggcggggagaccaataaaataacctctaattgtatttttagctgactgaatttgctaaagaaagcaaaaaacaaaaagccattccgagtttattgcttccgtcgaatttgtcgttgaatgacaacgaatgggccaaatttggacagtacgtcgacttaatgaatgccgattatgcggagagggcattattgctgaagagacgtgccgaagtgaccatcgattcttttctttggtaacgttaattaagtttttaggatggctaatcagaagattggtatattttggtctagatacattaaaacctccccaaaagcaccatcagtgaatgggtccatttcggttgctttttcggaactagcctaaagtaccgctaaactatttgtacttttgagtttaggtcggatcgcgtcaaacaaattgaggacaaaattcgacaggttttggaagtcggcggattcacaaatgttcattttgaccctgtccatgccgacgatgttttggccgctaatttgg

SEQ ID NO: 68108 - DNA, 481 bp, Heterodera glycines
  unsure (1)..(481): unsure at all n locations
atnatttgtnaaaaaatggtgatttgtgagagagaaaaggtaaaaaaaaattgattatngaagnatattaatttatttaatatttttataattaaatanatttttaaaantaaggtattttaaaataattnaaaaattataatatatntaaaaatgaataaaagagttaaaatattttattnattntataataaaaaataatatttaaaatgttaattaaaaaataatattattgctaaattctttgaaaataaaaaatacataaaaaagcttgaaatttaaaaaaataataccaaattttccaagaaaaaaaaaaactttataaactaaaagaataaataagtttattaaattaataataaaattatgcagcatttatgtaaattaaataaaaagagcaaacatcgccgattaccacgaaccaacaaaattattatttttttcaagctcttacaaatattcaaaaattaaaatcaataaa

SEQ ID NO: 68109 - DNA, 434 bp, Heterodera glycines
atggcaaatgataaaaactctattttattaattaatttgaaaattcaggtcaattcacttcaaatcaaaggaagccgacaacgagtgtttactaacccaaaagattttcgatacaattggactcggattgaggttgattgttatgtgagttggggttttctaattccaaaaatttgtttaattgattaattttacagaaggccgatgcgggcactgtaagcttttggggctacagtaacccggagacaaaggaaatcattcgggtggacgaattacactgtttgacttatgaaactgctggagtgccaaaacggttcaaaagtttgcaagtcgaagaacagccgccgatgaaaaaactgagtccaagtccattcttggccaataatgcttcatcacttatccatgtgttcgtgccatttgttggccatccatga

SEQ ID NO: 68110 - DNA, 59 bp, Heterodera glycines; identical to SEQ ID NO: 55001

SEQ ID NO: 68111 - DNA, 159 bp, Heterodera glycines
ttccaatttttttgacagattttcttgtttatttttatttgaatattagcgctgggagacgacaaaaccaatttccgccctgtcaatagcctaaatggggtgcatccacagtgtgagcgacaaaatgcgaaggcaaggagcaggcaaattgacgaacag

SEQ ID NO: 68112 - DNA, 910 bp, Heterodera glycines
atgaaggaaaagcagcagcgaacgctcactttggacgagttgggcatcgacatggagcagttcatggaatttgtggaggccatctcaaccacagctatccacaagccaattttaccaaatcgtaaattcattatttgataatttcagcaattattaaacttattctgattatgaaaatggatatcatccatttcgattaatttttaacattgacaccggacatttcttataaaattattattttaaaccaccgagcaaataaattttttttttattcggttttttatcgaatatcaaaatgactgaatggatatgatattcttgagcagtgaccttgaaaaccctcggatataatattggaaaaatttaggaccacaaataattaaaaaagcgctaaattttttattatttccaatttagcaaaaaatgtgctcattctgctcaaattggccgactatttccaagtggattggctgaaatcgcgctgtgaggcgcatctgatcaattgccctgaaattccattgatcgaccgttttttgatgatcgatcactatcgtctcgacaattttaaggcataatttttcaaaaacatttcaattttaaagaaaaatttccccatttagaattattttttgaatttggaggttgacaaattgcgtgcattttacaaggctaaccgcgaccaattgtcgccagggaaaacggctgtctgtgatcaattgttaggggaattggtcaaccgactttgtggatgatttgatattttgcggaaaaaacagtaatcggatttaagggatgaaaatttttgaaaaaggcaccttaaataggcacgaaaaaatgaaaatggcaaaaagagaataagtattaacaaattacggaaaatttttttataagaataagaaaaaataaa

SEQ ID NO: 68113 - DNA, 638 bp, Heterodera glycines
gcatttgccaatgcttcatctcctgccaatttcattgccatcatttcgtttccgttgccttttgctgactcagttgtgccatttgcgctgaccaacgaattgactcgcgaacaattggcattgaaagtgattgacaatagccatcgttttctgtttgtccgttgtccaattgcgcgagacgaaagcaaatggacaaaatgggagaaggaagcgattggctggagaatttcttatctatggaacagaattgatattcaaattaattatgagcgtcaaatcggagatgggtaagtgaatgctttctcaaaatttatttaggtatttcatttttgtttttaggcttctcgatgaaattcccggcccaagtgatcagcagcagaagtgaatgaatgaattgttgagaagggatcgatcaatttgaattgcggcgttggataaagaatttgatgttcagaaaattgttctttttttgttgcggtgatcaatttgatctaattgaattatgtaattgccaaatgaatttgatgctattttgacctatgatcataaaaattctttactttttttgttgttggaattatcaacataataatctttgttaagccctaatttgtaaggttaatttagtgtttatttca

SEQ ID NO: 68114 - DNA, 49 bp, Heterodera glycines; identical to SEQ ID NO: 51181

SEQ ID NO: 68115 - DNA, 294 bp, Heterodera glycines
gtgattcgattggaggcggaaaatgccattctccgagaacacattccgcgggatgtgcttgacagaatttgcttgccccaccatttccccagcggcgcggcgtccgtcgcctcaattgcccagtgaatttgacatgccaataataataataaaataacatttaatgaaagtgattataaattattgttattattacaataggctttttactttttacttttgtctttgtcagattttttttaccgaaaaaagctttttaattatgcaaaaaaaaacagcaaataaatcatttgt

SEQ ID NO: 68116 - DNA, 116 bp, Heterodera glycines
tgtttttttcaagatttaaatgtttcctacatcaatattcctacggaagtacaaaacttttcgttttctgttttttggggttttcgatttgttgcttcatcgactccgaaataata

SEQ ID NO: 68117 - DNA, 3336 bp, Heterodera glycines
aaattttttttctaaaatcacaaaaagatacaaaatctatatccaccaaatcgtaaaacaaatcgcttacaaatatttttatgcgcatttttaattttattgaataacatttaatgtggcttttatattatttttatgaaaaagaattaatcaccattagagtcgtcccaattttcaaaatcattgcgcataaatctgtattgcaaagatttgagagttaatttgaaaaaaatattattttgtcttttcttgcaatgaaattaactctggctaaagcagacataaatttgattaattttgggcataaaattaaataaaaaatttttttttgttttattaaaatccccaaatgtctagtccccaaatttaacgtctattgcttaatttttacttttgccatcaatttttcttgtgtgcttttctcgcttattaaataacaaaattactaatgtttaatgtgccaaaaaacaggtgaaacgtctaaaaaggccaattatactctgaactcatcagtaaaagaatttttgaccttaattaagtctcaatattatatcatttaattaattatttgattggattcttcatttccttgcatttttttaaatttaattcgcgttgaattgcgccaattttttgattaaataatattccaaataaatcgactaataatatgagtaataacgttaattcatcttcgtccgttaatgaatttggagagtccgaccaaatttacgtgtacaccagtttgggtgacaatcattcagcaaattttgtcactttttggcattgccctaaacagtgccatcgtttacatcaccatcaagcacaagtaaaagagaagatttgaaaattgcataggaattgttttgaattttaattttgttttgactttacttttggatattataaaaatgcatttttaattatgaaattaggaaactccaccgaagtttcggctttctgttggccatctgttctttttgtgatgcactcactgaattggccactccattggctaccggtaaaataattaaataattttatttttattattattttttaaatttttagtcctcgtttttctttgtttacggattcctctgttgacttgtgtttatgcgcaatttattgcaccactttcatgtttagattcttcactaaatttgttttggataagcgttgatagttttgtggcattggcatttcccgttttgtaatttaaaatagtttaattttccagaaaattaatcacttcctttttaagttttcgtaacatctcaacatcatccggaaaatatgtgataattgccaatgtgttttccttgtcaattattttttatgttgtttctttgtcgtttatatttgatctacaacatctcaaatgtaactaattaattaactaattgatcaattaataataaattttaccaattaaaagaatggtttattgtgagcctggcgatatgcttcaaggcgaattttaatcaaaatcattctcccggcctcaaaattccaaaggcagctgctggcggaatggaacaaaaaacgggcccacatcaagcaaagtgggaagtggcaacacctgaacattcgaccatcgctcagtccggcagaactggaggagcgcagggcgatgcaaaaagaatgcacagagcgaaggaaggccgaacccaacgccgattggatcatttacgccggaaacttagacttagttttgccggcaaatgatcaaattgtaaagcaatgtactattgaaggtggtgttttttcatcggatcatttagcgcaaattttcacattgactattccaaaaacactacaaaaaacaaacttcttttacaatcgacggttttttccgtcgaatgtttctctttttaatattatggtttcttctagaattagcgctttatctaacgagcattttagtgtgaacgaaaaatacaacgcctttaataatacattgctagaaaccttaaacgagtgtattccaatgaaaaaaattaccaaaaaagatttgacccctaaatatccaacgcatttattggcctccatcaaagagaaagccagactgtataggcaatgtaaaactgacccaacaaaaaaagcactttatgatagcattagtttacacataaaaatacaaacaaataaatttcactcgcaaattgagaaaaaggctatttcaaagggaagaaattccatttttaaatacctacaaaaatacgatgttaatccctttgaaataccgaatttagtctttgaaaacaaatgctatcatgatggtgatgaaaaatgtgaattatttgccaacttatttgcaaattcgtttaacaattctgatgttgacccaggctacctaaacttgggcaatacttttgttaatcaatgctttatatcagatatagactttaacatcatcgagacacaaaaacttttgaaaaaacttccgaataaaaacgggacctccccggataatattagctataaaatattgaaaaactgccattcttcattagcaactgttattactgacctattcaggatttcattagactctggttctcttccagatatctggaaggaatcaatagtttttcctcttttcaaaaaaggggacaaatttaatcctgaaaattataggcctatttctataacctgctcactttgcagggttatggaaagaattcttagccaaaatatttacaacttcctcctaaaaaacaataaaatttcggaataccaatttggttttgttagaaataggtctacgacaagtcaactaataacagttgtggaagattggtacgaggcaattataaatggaaaaaatgttgactgtatttatattgattttcaaaaagcatttgactcagtgccccataatttacttttatacaaattggaaaaaattggtataaagggcaaacttttaatgtggataaagggctttttgagtaataggacttttcgagttaaaattggggattctttatcctcaagtaaaaaagttacctctggcgtcccccagggctctgtcctgggccctttattatttttgatttatattaacgatcttcctgatgctttgccatcaggagtgaaaataaaattatatgctgatgatgttaaatttcaaatttgtcattctttcaaatttgtcattctttcaaatttgtcattctttcaaatttgtcattctttcaaatttgtcattctttcaaatttgtcattctttcaaatttgtcattctttcaaaaataaaattatatgctgatgatgttaaattatatatttgttaaagagcaagaaccgacacagaaattatgcataaagcat

SEQ ID NO: 68118 - DNA, 423 bp, Heterodera glycines
atggaacagcaggagccaatctccgctgaagtaagttttatgttgccaattttacttgtgcattgtaaaatttcgtctttatcaaataaataagaaatttattaagatgttgcgtttccatgccgcaattgaactggttaaacaacgtgttgccgttgcgaacctttctggcgtccgtcttgtgcggctgtttcatcgtacgttacagacctaatcatgattcatgatcagaattttacaaaatatataattattagggatgtgaattttagtgactaaaaacttcaattttgctcaagttgattttggtaatttggttcaggatcaccagaattgctggaaattttgcatgaaaatactttaaaatgattcctatcaccctgcaaaatttcagagtttttcatattggtaaaacttttttag

SEQ ID NO: 68119 - DNA, 1013 bp, Heterodera glycines
atggatttgttttgtggtaccgaattggcatttagcaattcctattttggaccgacacgacactcgcgcattatcaaaattagttcaggtgaacagtgtgcttttcctttctccaaattggtttgtttacctttttcagatacccctgtccgttcgttgaccaccgccgaaattccgccatccgccggctcattttcaagcagtgatggcggtcttcagagtcgcttcattttatggcatgcattttcacactggccaaccgactaaatctttttgtgccaaaaccactatgtccttggggttaaatttccaattttttaaactaatttttgaccgattgtcttactaatagaattctctttcatcaatactcaaaatgtcaatttttaaggcgtgccgaaggagcgaatttattcctcaatgaatactctgttgaccgcgatttgattgacgcgtcgctatgcattaatttttcacaatcactggttcgatatttttaatgcatttttctatttaattgagccaggaaattgactcaatattcaaagttcgaacacaattcaagttggattcaaaaaaagaatccctccaatggttgaaagaaaaaagtataattttatagatggtggccgggagagctacaaaaacggaaaagcgcctaaatttgggtccaattgcgaacaccttttcccttcgttaagctgatcccgggcacccaactgtgcattgtgcgccgcaagttgctgcttttggctgtgcccactcagtccggcatccaccgcttctacgtgcatttggcacggcaccaggacgattcgctggtcagacttacttacccatttgtcagatttgttcgaaattgtccatccaaacatgaaattcaatggattacgtattcttggagaatttggcacttattttttcgattaaaaaactgcatttcaaattcacagcaaaaaacaaaacttgttattagtttgaatttagcttcctccgaatttttcggaaataaa

SEQ ID NO: 68120 - DNA, 900 bp, Heterodera glycines
  unsure (1)..(900): unsure at all n locations
atgcaatctgagcaccagccaacatttacggcacaagcaatgccatttgagtaccaaacacaagcaatggcacctgagcaccagccaacatttacggcacaagcaatgccatttgagtaccaaacacaagcaatggcacctgagcaccagccaacatttacggcacaagcaatgccatttgagcatcagccaacatttacggcagaagcaattccatttaagcaactgacacaaacaatgcaatctgagcaccagccaacatttacggcacaagcaatgccatttgagcatcagccaacatttacggcagaagcaattccatttaagcaactgacacaaacaatacaatctgagcaccagccaacaacatttacggcacaagcaatgccatttgagcatcagccaacatttacggcacaagcaatgccatttgagcatcagccaacatttacggcagaagcaattccatttaagcaactgacacaaacaatacaatctgagcaccagccaacaacatttacggcacaagcaatgccatttgagcgccagacacaagtaatgccatctgagcaccagccaatatttacggcagaatcaattccatttgagcaccagccaacatttgcagcagaagcagtgccatttgagcaccaaacacaaggagggcaaactgagtaccaaaatcaaccaacatntacggcacaaacaatgccatttgagcaccgaactcaaacaacttttatcaagcaagcaaatcttattaggtaccaatcacaaccagccgaaaattgcaactcaagttcgcctccgccagttttctggcattatgaaactgacaatgatcttaatgggatttttgccccataaaatgacgtttatgaaaaattccgaaagatttaa

SEQ ID NO: 68121 - DNA, 1012 bp, Heterodera glycines
tgaaaaaggctcgtcttcaaggcacaatcggttagcaaattaaataatttaaataaattaaattattaaaaaaaaattaaaaatgccaaaattaaattttctaaaattcttttccagaagatttccatgcctatgtgacgttaaaattacaaaatgtgaagtcaacaacaatcgctgtcaaaggcaatcagccgcaatgggagcaggaatttgtgttgtaagagaatataaataaaataaataaaatttattaaaattgaatttatttttaatttaattttatatcaaaaaatttactctgatgactcatccatccatttatttcattttttattgcttaatttatttcaatgtatgtgaattgaacaaaaattaacttaatatagagtgaattaaaattctgccgttaatttaaaaaggaattatttggcacaaagtgcccgccactgacatatgccgtcctgacggaccggcctagtatggcacctctgattttattttactttactcacaaatttttttttcccatttaaacgtttataataaattattcaatgagttatgtgcataattattataattgcctcattaggcatgcaattaatttttcatttagtttttttgataataattttttcaaattttaattttatacattcatcactccgcctgttttggcaccattttcggggatattttcggcccggcatttgaccccgactcgggtcgaacgttgtgccgggattgggcaaaggttccccaagaattaatggcaccaaatttgccaaatcctattggatttgttgtgttagctctgatcactctgatcatttttgtttgccatttcagtgaaactgatcagctggaccagggcctggtacttgagctgtggaacaagggcgtgttgtgggacaaactgctcggtgttcacttcttgccacttcgtcagattggctatgcccaagaggcggggcccggccgatggctccagggcaagaaaaaaatgccataa

SEQ ID NO: 68122 - DNA, 229 bp, Heterodera glycines
  unsure (1)..(229): unsure at all n locations
atggctanacatganatcttagatcatttagntanaatgatttccttttattataaatgggaaaaatagatattaaattataaattaaaaaataaaaatgtatataatttaaaaaaaaactaaatttggcacagccacaaaaaatatttttagaacagataaactattacaaaaactaatgatgcaatataaagagtttaataattctttataatatgaaaataataaa

SEQ ID NO: 68123 - DNA, 430 bp, Heterodera glycines
atgtcggatgaactaagtatagaaactttagttaatggaatgaagtacggaccaaaaactggtaaggaatcattgcaataaaattaacaataaaataaaattataaatggaatgtgaaaatttaatatgaatttaaatttagacccaaacttttgtgaaaattttaaaagggcgtatgcagaatattcaaaaacaatgaaagataaccaaattgcggcacaaatttacaaagtctgccagtctaaaattagttattggaaaaagatatgcggaattgagtttaaactaaagaaaaagatgacgaacaattaaaaaagcattgactttcgctatcgtgataaattatttgtaaaaaaagatttgtttttaggggtaattagaatattgcatgctttggtttttgtaaaaaaaatttaaaaaaaatttttca

SEQ ID NO: 68124 - DNA, 925 bp, Heterodera glycines
atgttcttctttatattcgattttgattttttgggtttttgtttgactttccttttcactgcgcaaaaacttctattcattccattgttattctatgtttgtcataaagggaagaatgaaaagatatgtgttgtattcagaaaatcctgtatttatttgtcatttttattgggatttatttattcaattattttgggatgttttttattgttattaattttattgtatggcacttgagaaagaaattggcagaaaaaattgtttttgttacaccaaaaattggaagtatttaagggcatggaactgttgttgtggcacattcgaaacatttttcaacagcaaattccatctcgaaaattcaattaattccattctaaaatggcttcatcatcgattaaattgtaaattttcttttattaattacccaattattaaaaacccctttagggtttcggtttcaatgtttctgctcgtcctttgcattggcatggccattgagcagacccaagcttattatgtacaaaatattttcaaaattccccttctcgttcttaaaactttcattttttcattttctttttaagggctggggtggctacggctatgtctatccttacggattttatggcaaacggcaagccggttttggtccatccgaaaatgctggcacttttggtggcggtggagaaggaaattccaacggaggaggaagaagaggaggaggaccatcatcaccaaacaatttttgagagaaaaaaggaattacaaaaccaaaattgagcttttcccattttgtaattgatgatcaatcggataaaaaaaatggccaaaagaattttctatttattttttgccaattattaataattttatgcatttttgcaatatgaatatttttaaatgaagcttcaaaacaagaagaaga

SEQ ID NO: 68125 - DNA, 860 bp, Heterodera glycines
atggaggacatttacggtggcaattggggtgttttgattataaaagagcctgatttgatttccaccataatccactggacatttcctgaccatcggtatgtgttatggtaggatgtgggcgggcgagggggttaaaattagagtagagcgggaccgggaattttgagcaaaaccgggaccgggacgggacctcgatttttgtccgggaccgggcccgggacctgagcttttcaaaatcctggacctcggatgaccgggaattcccggcccggtcccggtcccgctctactctatttaaaatacatcttaaagcctaatcgacattattctttgactcgatgttttaataaaattgtaactaaaatgctttttaaattgaataaacaaaattacgaaactttataaatttttcctgcgaaaaatttttcaatatttaatttgaaaatgaatttaaagttaaggacagaggtttaacttgttgttgaaataagttttagcatctcattttatttgttattatattttaaatttaaagccatcgtgatggttctgctgctttttgccttcaagttgaaaatggttggcaatataatgtgttcaaaactggggacattgacactgaagaccgtttaactgttgagaaagtgatggagcaaataaatcggcaaattaactaattaaaataattaatttaaaaaaataataattaggcgaaatgtttcacatccatcgtcaactcaaaaatctgcacaaatacgagcaaaatttggcaatgtgttgaagaaggacagcagattcacaaattcattgcttattcaacgaaattagacagccacaatttattgaaccaacaaaataaa

SEQ ID NO: 68126 - DNA, 603 bp, Heterodera glycines
atgtttgcgaactgttgcacattgttactcataaatacatcggcgctgactgcgcactgcgcccgggcgaacgtttggtggtggtggacaacggagacaaggattggaagcacaggttcaaggagtataaaattttaaattttaaggatttttaatagttattgaaggctcattttatgagttgtctctaaaattgctcatttttataattgataaaacaaaattataaattaaaaaacatatataataattagggttcgaagttgtatgattaaaaatgctcactagccattgttttggtgttttaaaagtcaattcttaatttaaacacaatttttggcattttttgagggttaaaagccattttgggtaatttttaaggcatattttactgcatatttggggtttttagggcatatttgggggatttttagtgcatattttatgcgcatgtttggcattttttagtgcatacaacttcgaaccctaataataattgggtttattgtatttttcccgcttattgagtctattcatgatacggagtgaaaatttttaaataacaaaaattttgttaattaaaaaaatattttagctgaatga

SEQ ID NO: 68127 - DNA, 289 bp, Heterodera glycines
aaatttttaaaaattttccagcaaataatggaaatttttttcgaattcccccccccccctcccaaacgaaaattaaaaagtttaataggcaaatttcgtaacaagtagcactcaaatttccaaaaatgtttcccggcggcgcctatcggcaccgccggacctccattttccactatttttacaagttttttgccttaaaacggccaaaattgggtcatttttagtgaaaaagtgcagttgttacccagcagtggaaaaaaaagttattggttaaatagcaaaaaaaaaa

SEQ ID NO: 68128 - DNA, 785 bp, Heterodera glycines; identical to SEQ ID NO: 39595

SEQ ID NO: 68129 - DNA, 447 bp, Heterodera glycines
atgagccatgaactaagccgagagttcatcaaagacattgacgaatggatagcgcagttgtacgagtgcaagcagctcagcgagacacaagtgcgactgctctgtgacaaggttggccatttcaaatttggtcaatggaaaattgccgtaatgtcccgaaatgtaacaaaaattgcgttaccaaaatgccattttttgttgggttggagttgtttacagtgtagagcaactaacttttcttagagacaaccaaattaaacatactttgagatatggttcgatagtcctaaatcttttctattagaaatgaaaaattccaaaaaaaaacatttcgtaaaatttgccaatagtatcacatattttttgaattaatttttattttttaaaagctataaaacacactttttaggggggttttcggtcacaaatttgacatccgtttcatag

SEQ ID NO: 68130 - DNA, 1295 bp, Heterodera glycines; identical to SEQ ID NO: 39601

SEQ ID NO: 68131 - DNA, 632 bp, Heterodera glycines
atgggaaaagcagattgtgatgtgcttgatgaagaggtcagtaaaaaaacaatggcccaacatggcataaaggcagaggcaaatatttatgtattagtggatggatttgaaattttggtggaatatgaggaggaggaaattgataaatatggtgttgtgaagtggaaatcgaagccctactacatttatttcgtgaatgccaccgccactgtggcaactttgaagcgcaagatcgcggaagagattgacagttttcactctattcgtactatttatgcacatcaactgacaattagacatggtagccattatgacattgcgcttgatgacaacaaaacaatgaaagattatggcattggaagactcggaatcgtttatgcttcgacttttgaatttgaaattttcgttttgcatggtggcaaaccgtacaccatcaagatgaacaatggaaacacggtgcaaacactgaaacaaagaatcaaaagcagaattggcattccgcccgagcgccaaacactgagactcaacaatccatatgccaaagtgcttgaggacaataaagaaacaatggaaaattgtcacattgaaaaagaaacaataattttcttggcgttggatgaatttgaatccat

SEQ ID NO: 68132 - DNA, 673 bp, Heterodera glycines
atgcatttttcgttgattcaaatgatgatgaccattttcacaaaatgtgccttaattatgggaatgttagaaaattcggaactaattgctgttggcaataaattagtaacaactgtggctcatgaaagccaaatgataccaacgctttctacaactttggtgccggtcaagatccgtgtaaaataccgtgaaagtggcgaaccagggcatgtctatgttacagtaggagattacggtaacaatcattagaatatgttaaatgctcctaaaattcagaatttgatatgacgcggtcaagtgctaggcgtagaaaattgtaagttttggcgcaattttattgtagaaatgtgaatttattcatatcccttcgaattaatgacctgaatacacacaaaaaaaacaactaaatttcggagtttggattggcatttcttgccatccgagtaaattacattttaaaacggatatatttttttataacgagcttagaaaatggactatattactagatagggaatgaaatattttgaaaatattgatttaatacttccgttgacattttttttaccaattatgcccaaaaaattaaaatattgaaaaataatttatttaattcatttttaaaaaaatgtttaagtccaattttatccgttttcccttgaccattccttaa

SEQ ID NO: 68133 - DNA, 597 bp, Heterodera glycines
atgttcacgtataaacatccttgtgactttctgagccctgtttggatggtcccgatgtttttgggaccgccaaaattgtactccatcgcttacccatgttttcattttgcaattgcatttgaacgaatccgttcaacctttttggccaaaagatatgagcgaatgggcacacaatcgactgtaataataatttggataattgtgagttaaatacaataataagtagagcacgactaaaaagtcaccaaaaatgcgaaaaaggcactataataggcaccaaaaatttgaaaaaaaggcattaaaaggcacgaaaatcacgaaaaaggcatgaaaataggcatttaaaatttttttattaaggatttatagggagcaaaacacgtaaaacttaatcaaaaaattcatttttggtcatttaaatgattattaatattgctttttcgaataagaaaagttttacacctaaaatttttatcaaaaatatatatatatatatatatatatatcaaattttgtcgatcaatatttgaaaaaaaatgccaaaaaatgcatttaaggcacgaaaatcccgaaagaggcaaaaaaaggcataataaa

SEQ ID NO: 68134 - DNA, 304 bp, Heterodera glycines
aaaattccctcaaaaataaaaggtatattgcgcaccgccctccctatcatgctcgagagcatttgtatgtgtataaaatttatcaaaaaaagagatagccatttttctgggataacctctaaatataaaaatcctctgtgaaataaaatggcgattgtgcacagccctccgtctcatacgcaagcgcttttgtgaggtataaaatttctcaaaaaaagagatagccatttttctgggatagagtataaatttaaaaattccctcaaaaataaaaggtctattgcgcaccgccctccctatcatg

SEQ ID NO: 68135 - DNA, 304 bp, Heterodera glycines
aaaattccctcaaaaataaaaggtaaattgcgcaccgccctccctatcatgctcgagagcatttgtatgtgtataaaatttatcaaaaaaagagatagccatttttctgggataacgtctaaatataaaaatcctctgtgaaataaaatggcgattgtgcacagccctccgtctcatacgcaagcgcttttgtgaggtataaaatttctcaaaaaaagagatagccatttttctgggatagagtataaatttaaaaattccctcaaaaataaaaggtctattgcgcaccgccctccctatcatg

SEQ ID NO: 68136 - DNA, 1992 bp, Heterodera glycines
atggtggctaaaagccgtggctgggcaagttggaagttccgccgctacgtgcacagccaacacggtcaacagggctgtcttcaaagggatgctttgcaacttatgcaacaaattggcgcacggcctggacttaatgcgtatgatgctgaaattgttgtgccccgagtggtggatcattggaacaacagccagcaacgacatcgttttgctgtgtttatttttggatcaactggtcagtacaagccgctgtacaaatacatcaacaactattacgacacaccaatctcactctacctaaacaacggccattttgatggtgtgcagaaggagtatggcttatttggacaacactactgcctagaatgtgagaagccataccagcgaccatcaagacatccaaattcttgtaaagcttgagatccaatttttgtgcagagtcaaaacaatgcaaagagtgcggagttatttggaatgttcgtgacaacaaccgtaatggaagaaaagtaaaataatttaaaaatttttaaaaaaaataattcttttagggtcaccaatgccacgagacgtattgccaattgtgcaacacttaccacaatcccgagcggggctgtttcatccaatcaattgagccgaaggaacaagacccttacagcattgtggcctttgacttggagactatgcaacaccaagcgttggacccccaacaacctgaaaagaaggaacatcagccaaacttcattgctgcccgggttgcatgccccgactgcattcaaaacggcaaatggaagagggcaactgcaggatgtcaaatatgtgggccacgtcggaccgttgtgttctgtcaacaccgattcatggacacacaagtggacaagcaagtgatcgctgagaacccgcttgagccattcgtgaattggctcgtgtttgaactgccaaaaaaatgcgacacctatgcctactcgcattttggcggtcgcttcgacatggtgcttgttttcctcgagctgttccggattggctttaaccccgaaatgctgcgacgggtactcaattacgaatttgtgtcaaaaatttaaattttcagggaaataaaatgtacgaaatgaaagtgaggaagcagaaaaggcgcaacccaaacatagtattccgggattcgttcaacctgataccgtgttcgttagctgcgctcatcccttcttatggtcttgacgtggaggacaagcccttcttcccgcatttggccaatagaccagaaaactacggcagagaaattcacccaatgccggacgactatttggcaaacggtatgatgcccgggaagaggcgccaattcgacgagtggtactccgagcaccgtcatgagccttttaggctcgatgaggcgcttgccaggtaaaagctatttttaaaatgtataaattaagtgcgcctatttcagttattgcacgaatgatttcgagattctgatcgctgcccttgtcgcattccgtcggtaattctttgagatttcgcgtcgccaggagtacgtggacgggatcgacgacagagagaaccatgatggcatcgacgtactgcgtgagtgcatgaccatcgccggcgcgtgcatgcgacactttcgcactaaccatctgccggacgaccatcttgccatcgtctcagagcgcggttacgacaacgctcaaaatcaaagccttctcgccttacggttcttccactggtactcggaggagtaggtgtggaagtgcagaccgcccattctgctggaggagagaagcgaatcggcccctactcggttgacggatggattgaggcagagggacgtgcaattgaagtgcacggtattgattattattgttattgcataaaaaatcaatattttagggctgtacatggcacggatgcaagaaatgttatccaatcgataacatgttgttgcccaacgggaagacggcggggcaggttttggggacaatatcagctcagactgcctaa

SEQ ID NO: 68137 - DNA, 415 bp, Heterodera glycines
  unsure (1)..(415): unsure at all n locations
atgttctcatcggagaacgccaaacgcggctcatttgctaagaaaagtttgaatggaaatgaattggagtccgaggccaacgagggggacgcggaggacattgggaagagtttggaggagcagtcgcatcagttggcactgccacggcttttcaaggcacttctctcttttgagtttgccaattactcccgtctgaacggtaagtacgtatgcatacaattccacgccaatttcaaatgttctccagaatccgaagtcgaccctttgctgctttcctgggatgttctgatgcgtttttttggagatttggacgtcctttcccgggttcgcttttgcgatgccatcgatgtcaaaaccctttccaatgcgttggcccatttgtttaattctctctccgaccccccggngcataaag

SEQ ID NO: 68138 - DNA, 733 bp, Heterodera glycines
atgcacgcgttttgcgctcgagctatttatcatcgggcttgtcaatccaaagcgaaacaacaaagatgctgttttgaacgaataaagggcataggttattttgaagaagtgtcaaaaaacatgcagcaataagcctgcaaaatctaataagtggaaaatacatgagtatagaatttattttcagaaagtgtccacagacttttggaaaaatatatttgcaatttatcaacaattttgagaggtgagttagaaatgataaacttcacgattcaaaccaattttcggtgctctaattaaccgcgataaaaacatccgaatcaattaaatagcttctgagataataaggtttatcataaaatttcatttaaaaataaaccctcaattattggtatgaacgatactttccaaacatgcacgcgttttgcgctcgagctatttatcatcgggcttgtcaatccaaagcgaaacaacaaagatgctgttttgaacgaataaagggcataggttattttgaagaagtgtcaaataacatcagcaataagcctgcaaaatctaatgagtggaaaatacatgagtatagaatttattttcagaaagtgtcaacagacttttggaaaaatatatttgcaatttatcaacaattttgagaagtgagttagaaatgataatcttcacgattcaagccaattttcgtaatgtaattaaccgcgataaaaacattcgaatcaattaa

SEQ ID NO: 68139 - DNA, 855 bp, Heterodera glycines
agcaaaaaagatcctcatttgtatttggacgtgtccgaagtgcaatggggcaatgtgtacatttttgacttgaacaaaacggaagtgatcgctgttcggccgcgcagagttgcggatgaattgaggaagttggaagagcgggaccaaccaccggtgaagagggagcaaccaaaacgtactcatttttggaatttagtaaaaaaaatattaaaggtgggaggttaatttaccagtcaatcgaaaaattactcccaaaattaagggacaattatatatcagttaatttaataatttttgaatataattaaacaattttttaatagattttggggttatgaatttgcgcgagcattggacaaagttcaattttttaaatgaacataactttatcttgggaaaggtcctaaaatgtacataaattttgaatcaaagaaaataattatgaaattgctttaattatgaaaaattaatttttaattgaacaagctccaagcggggcaatcaaattccaaattaattatggtttaaaaatttttttttttttaaattaactatatttaaaatcagagggtcaaaaatgaacatttttaagcgcaaccgcagccacaaccacaacctcaacctgtgacttttcaaaaaattctgtccggtttggtttggccaaccactgaaaagtacaccctgctggtgtcatcgcgtgattttgatttggatggacgaggatcaccgatcaaacaacgcgccaccaatcccgacccgaccagagccgagacaaactacaagggcacattcgacgtcaaaatggcactgacggaaaggccggaaactttttacgtgtgggtttcaagtgccaag

SEQ ID NO: 68140 - DNA, 98 bp, Heterodera glycines
ggctgctaggtccagatcccggttctcggtcccgggttttgaaaagctcaggtcccggtcccggtagggcaaacgggaaccaggaaaatcaagcactg

SEQ ID NO: 68141 - DNA, 1221 bp, Heterodera glycines
atgatttcatttgtattgttagctttgcttgtttgtaagaaaacatttctcctcacagcgactcaattttgggctttctgttcaaataatatgaattttctgtcagtggtctgtgaggagttagtaaccaagtaggtcccatattcggtctaccttacactgtatgttaattttagtgcatttaaaatctaatacctaaatacgtgtggatgtttaatacaatttttaaaagatctctatttttttttaatttaatatttttttatggaaaatataaaaaagaaaaacttaaaggtccggtcgaaatcacactggcgaatcactcaatgtagaaatcaaccctgtcgaaaacatatggcacgtcgaatgaccatttttacctacctaatttatgatttactttgcaatcttaaaaaattgttgaaaactatctttttttgtatgataaaaatattgtcattgagtggactctcgagccttttcttcagattctttgatgtctgattatcctaattaaaaaaccaatgtgcgagtggttaattttctttcttctctcaaactgatggcttctaggcacaggtttaaaaaatattacttaacaaatttaattatcttaaattttttctagattggacacgcctactatttttgatgtgtgttgcgaagttgaagcggcaaaagaatttcaacaaacaaaaacaaaggcatgttttagtaaggatgacattttagtatttttgcccgatggttctgtttggctatcacccaaaccataaaattccctttatctcacatcagataattttttttcgatttcatacagacctaagtaaatacctatcaatttatactatttttaggtactttatcctttggagttttctgatgaaaacattctccgttcaataaaacagttttgcttcccattgaaaaggagtatgaggtaatgaattgatttgttcgtgacatcaaatgagcgattaacttttttagaagcgaaaatgatgctgttcaactcttcacatttgtattaaccgatgcacattctatgcactcttttggattttgcagatttacacctcggactaactcctgtttttgcatcctgaggtgttttaccgttttctttcctcttatatattccattttagtggatttctttgggtcaattttttctacaaacttcttaatacaatttcatttgtgttcaataatggaaat

SEQ ID NO: 68142 - DNA, 655 bp, Heterodera glycines
atgttatcccaagaagagacaggggatcgattggtaaaaattttaattattatttaaatgttgatttaattctttttatttattcaggagcgaacctctgtatgcggaattgaaggatctgatggtttgtccgggcgatttgcggaaatgtctgtcacacttcggacatcggaaggatcagcgcaacttggtcgtcgacgagctggattggcacgacgacgacgacgacgacgacgacataacagaaggagcttggtgaaagagctatgcttgtttaataaatgtcgaccggaatatctcgcgatgatgcttcgaagaaggaagaaggaaaatatcaaatttataggcgatcggaaaatcgaaactgtacatcttcgacagaatttacaaatttatccggaatcatttactctttttggtgctaatcgtatgtacgcctatcgtggtatgcttggtgtcacggtagagcaacatttatacgctaagcatcgtgtccgtctaaaatttcccaacctcccatgtgttgtacaagatggcggcaacggccatcaaagttatttcccacttgaacttttgaaaatatcttcgttagctatgcaagatgaaactgcttaattatttgttgtattttttaatggctgcaattataaagaaa

SEQ ID NO: 68143 - DNA, 2976 bp, Heterodera glycines
atgcctgaagaagaacagacctatcgtatcatcgtatgggacactgaaacgagacttgaaaaacttgaggacgaagggcagtgtatacacgtggtcaactttctttcagcacgcattacttgtaccgattgctgtgacgcatcagagttagaaacagattgtgaaatttgttgccagaccaatgggacgtttgaacgaaccaaagaatggttgagtaaattgagtaaatttatttttcattaccaaaattcaaataggagtgaagctgatggcgatgagcaacctgttgccgcttttgtcgaatggattttaagggcgtggaacaatcaatacaaaacctacatatgggttagggtgaaaaaaaattatttttaaaattttataaattattaggctcataacgcctcaagatttgatggccattttgcgctaaattatatctgcaaaaccgttaggcgacctgatgtcgttatgaatggactcaagatatacgagtttcgtgttcgacatagtccaaagcattcaatgttaatatggcgtgactcatgtctgattatgccgattccgctcgctgatttaaagacgactttcaaccttgactgcgaagacaaaccgttcttcccgtacgcgttcaacaggagggagaattattgtatacgactggagaaacttcctgatcagaaaatgtatgaacccggctcaatgaaggcggacaaatatgaaaagtttaaaaaatggtacagcgaaaatgaagacactccttttttcttgcctgaacaactccgaacctattgtcataacgacaccgaaattttgctcaaagccttggtgaaatttcgccatattttaattaataaaatcacccaagggtttgatgttctaccgataagttgtacaatagccaggttaatcaatcatacacaacatttgtatttatattccgttaatttacagtgcctgtatgaacatcttcaaggcacaatttatgcaagaggatcagctagcaatggtccccgaacttggatatgaacgtaacgatagagccagcgtaattgcgatcaaatatttggattggagagcaaaaagcgaagggattgatatacaacatgcgggcaacggacgggaaaaacaatggaaaaaatttaaacttgacgggtggattgaaagtcagcaacgatgcattgaagtgatcggctgctattggcacgggtgtgatcgatgtttcaaacctgacgagcagctcgttgacgaaaagacgtgtcaagagctgaatgaaatgacgcaagaccgacttcgtcaacttcgcgagcctgacacggatgggcgcagtctacaggttgaagaaatatgggaatgcgaaataaacgaccagctgaagaaaaaccacgagatgaaagtgtttttcgatgacttggcaaacgaacgtggccctttagaccctagacttgcatattgcggtggacgaacgggtccattacgactttttgctgaagcgtccgcggatgaaaaaatttccgtattcgacattgtctcactatacccatgggtcaactacgacacggcttatccaattggtgttcctacaattattcgtcctagcgcggaggagatgatagtcaactggaccaaacctgaacatctaagttaccagggtctttatcgagttcgtgtcatccctcctcgtggtctacgaataccagttctaccgatgaaaattgatgagagactgctgttcagctgttgccatcgatgtgcggctttgtttcgtaaaagtgtgacacgctgtgcacacaaatgcgaacattcggaacagcagagagccttcactggaaatttcactcatattgaattggaaaaagcgttggaaatgggctacgtcatcgatcgattttggagagcatggcattatgatgaatggagtgatcaggtgttcaaaggatatgttcgccaattcatcaggcttaaggtccgtcattcaacaaatattttattcaaaattattttcacaggtggaatcaagcggatttccagatggcgtggaaacgttagaagaaaagcatcaatatatccgcgagtaccggcgcatatacggagttgatttagaatttgggagtattaaaaagaatccaggactacgattcatcgcaaaattaatgcttaatagtctatggtcagtttaaaaaatttttgtttggcattttagtttatattttttaggggaaaattcagcatgagaaatcagcttggctcgaacaaagtgataacgagaccgcaggagttttatgatctagtgctaaaccatagaatggttaggttttttctacatatattgagttatttttaaaaattaaggaaatatcgtcaataatccccatatccgatgcagctattcgagtgctgtataagccgaagaaaaacttcatcgtagaacatacatcaagcaatattgtcctaagcctttggacaacgagtcgagctaggctgaaactgcttgactatatgctgcaatgttataatacaccgggcaccgagttactatacactgacacagacagtgtaattgttcggcataagcgagaccttgttccagttcacacgggcgagtatttgggtcaaatgagcgaagaatacgccgattacgacattttaacttttgcatgtggcggagcgaaacaatatgcaatgaaaatggtgcataaacagacaaaagcagttaaatttgtgcaaaagattcgaggcattacattcgacgtcaacaattctcaggagcttcagtttgagcattttgtacgcaaagtgatcaactacgggaaagaggatgagcaggagaatgcagtagtcttcaattataataaaatacagccgacaaaagataatcgaattataactaggaaacaaaataaaaaatatttacctgtctgtcagaaaggcattattaatcaaacccttgaggttttaccgtttggatatgaatga

SEQ ID NO: 68144 - DNA, 914 bp, Heterodera glycines
atgttcgatgcccttggtggacaaggaagtcgccggaagcgaaaagcctcaactccccacccaaatctttttgatcacgcaccatataaccctttgggtgtgtttgtgttttttttgttgccagtatgccacacatttccggttttttttgggtgtggaattccgattatattatatcctagaaaattatttggtttcggaagtccgatttccgaatagttttcaccatcagtgttcctattttttaaatcagaaatcagtggcatgaaaacaaagatctccgatctttggaagggatataaaaatgatcgtcagaaaataaaaaataaatatactacggaaataggtaattggtgaaaaataataaaatatattaaatttttgatttgaaaaaatattttaattaatttgtatttgagttttttcgtttttaattattatgattttttctccaaatttaactcatacatttaatttaaaaattttttaagaagttttgcaaaacggattggtgccatcgactagcgccgccgcttgggttgggcacgaggaaattggtgataatttggatgattttccatcaaaaattaattttaaaaatataaaaatttaaaaaagataatttgaaaaaattttaaaactttttaaaaactgcctagttggacatcaaccgtcaagtggcgcgcgttattcgccaatatcacccaattattttgaaaaagaataacaacaatttgcggcaatattggcgtcgatgtgatcaatttaatatgtaatgtttcccaatttaatgtgataattagtattttaatatgtgattttttcaatttagtatggtattttagataacttaatgtttaataaacatggtaatggtgtcggtgattgattatatgcataggtaaatgatgtaa

SEQ ID NO: 68145 - DNA, 593 bp, Heterodera glycines
atgtgcaacactcttttttatttgtttttcgccgtcgcttttcttctattcctccctactattggcgcggaggacaagtgggaagtggtcacaaatgctcgccgcgccaattgtaccgcggccggttccaaatgttggaaaccgatcggttatgtccggccactgatctgtctcaaggccgattacgatctcaacttaacagatcagtggccggacatagccgaggaccaccattggtccgataaaaaaatgtatgtaaaaaataaaaaattttaataaaatgaataataaaaaaatattttccatagtttattgctgatcaactggtccgtccttgccattttttttttctggttgatcgggttgaccattttcatcgttttcggtaacaaaattaaaaaaaaaacaaaataaaaatttttataaaattttcagttttcaaaaaaatggccgccccgagacccgcgcctccgacaatcacggcaccgttcgagctctcccatgttttttcgagccagtgaaatgatatttaaaaatttttttttatcatttctcaatcaatcaaatattttataatttttggctataataaa

SEQ ID NO: 68146 - DNA, 2613 bp, Heterodera glycines
atgagtaatttttggcgagaaacggctttagtgaaaaagccaaaacaccaactaaaattgataaagcccatttttagaaaactgataaaagataaaggtaagcaaattgccgacccaattaatattgatgatgatgaagataaagataaagaagaaactgtagaaaaattcatgaacttaaaagaccgttacacaaagagaaaacaagtaaataaaaatgaaataacaactattttttaaacattttaccggactaaaaatatttgatttttaaagtgcttttataaggttatttcaaataataattttaatataaactaatattaaattaattataataataaatcaggattattcaaaaaagaaagtattttatcgatttatttttgagattttgttaccctaaactttttagtttctgtgccaggagtctgatgatgatgaaccggatgaatgcgaagaatgcaaaaaagtggccaaaatcgatgcgacaattagccaaatgcgggaaacgctgcacggaacgcaacagatcgttgatcagatgattgccagtgcgaacaaaaccgatgcttcttcctccactggtccaaagagcaaaacaaaagcaaggatgatgaagattagcagcgaaagtgccaaaaaatatttgaatatggctggcgacacgatatacatggccatacttggttggtaaagttcggtttccattggaatggcaattaggcaattcattagcactcgggccacgtaaattgcatgtattcagttttcaaatgattattaaggaagggttttcaacagggaactcatatggaaaaatttaaaaaatgtaatatttaaaagcaaactatttaaatattaaaaaatttaaaattgttggtatcatttcctggagcttgcctaattgtttttagtagtttttaaatctcaaaaagttttaaattaaaaaaaattattatttttttttggattttgttgggcattgctttataatggaaaaatcatttttcattttgcagactaatagagctttggagtgatctcaagattatgtgcgaatttttccacttttaatggccaattaataagctgcaaaaactgttactcaactaaaaaatatttttaaatttttaaatttaattaatttttaggcgtttatttgtctttcattgcaatttataatggtgatgacaaattgaatgttttgagtgaaatttcaccacaaatggttgaaggcattggtgatgcattgaacaggcataaaggattggtcaacgacaaattgaaaaaatatgttgacgaaataaaatatcgtcagttgaaagaaaatggacaatttttgccaaaaaatgagctgattaaaaatatggaggtataattataaaatatattttaatgctataaatttcatttttatctcagaaaaaatgcgatttcttttgtaaaaagaaacaataaaaattttacaaaccatatttatttaattcgaaccccccccccacgaattagaacccctccctgaaataaagccctctttcgaggggggcataaaaataaaagccctagggctctaattcaaaatatgggtatttatatttttctgagattcttctaagtcatcgaaatttttaaaaatgtatataaaaaaaaaattttatcttctaaactaaattttgggttatactaactcattttaaaaagataaaattcttaatatctgaaaagtaattttacaaatttcaaaatttatcttccgtaaataaagtttaatttgtttatcaaaatatttaaaatgatttagatttttttaaatattttcaatattattggctttattagaattttatttaatattttttagggttttttacaagctgttgaacaaaaggtgccaaacaaaaaagaattgtttaaaaacatcaatttttacatcaatttgtacgccgacatgaaggtcaatttgacccatcagcaaacccaaatccgaagcttggccatcggcaataatgccaatgcttcgcccgcaaatttggttgacgtgttgaaaagtgttgcggcaattatcgacaaattgttggccaaattccatgtactgctccaaaaggcaaccgacgctgaggaggaagaaagaaggaacccagtgattgttgagatcagctccgactcgtcggcggacgagaaagaatcggccgagaaaaagcacggcgagcaggagaaagattccgacgaaacgttgtcagactgtccaacggacgaactcggtaaaattacaattttatgttgtaggtatactggtaatattatttttttaaatttttggctaatttttatcgaaaaatcggcaatagattgcgattttttatataggacaaaaggtttgttggcattttttgaaaaaaatgccatttccgcaccttttggtctgtctataagttaattttcggtgagatataaccatgagatttaaaacaattttgtaaagccaaaaattatgttaaatgaattatttcagaaatttttttagagtatactcaaaacgttttagccttacaaaaaacgtcactattttatttttacacccttttttggaaaaatgttaaaattttttaa

SEQ ID NO: 68147 - DNA, 273 bp, Heterodera glycines
atgcagcacattctgttggacattcactttttggactattttttggccaaaacggaaataaatcagcgagaaaatgaacaaaaaattcaaatttacacaattatttatttgcttagagtgaaagcggaacaaaataaggcgaaattggaaagaatggaaagacaacaatcggaggaagagaaaagagcgggaagaaaacagcagaagaagaagaaaggacgaagtgaaagaagtgacgaatgcttacggaaaattggacgaagaattgggaaa

SEQ ID NO: 68148 - DNA, 98 bp, Heterodera glycines
attggcatggaaaagtgatcagttcgagcagaaaatgtgcaatttcgaaattacacaataaaaaactgatgaaaaattggggtataaagaataaaaaa

SEQ ID NO: 68149 - DNA, 1155 bp, Heterodera glycines
atggacgaatcggcgaaaaagacgctaaaacaaattccactgctgaaaacaaatgcagggccacggtaaataaacaaaaagtttacgcattttaaagtccaaaatgagttaggaaagtgacacatgacaaaattcatacagagaccttgccaaaacacttgtttttttttaaattttgggtaggagacagggacgatcatttattgttgttaacccaaatatcggcagatatttaaaaaataataattttttgcttattgccagagacggacccctttggcttgaacggttgaaggaggagtacaacagtttgatcgcgttcattgagcacaacaagcagggcgatgccgactggtttcgacttgagtcgagcgcggatggcactcgatggtcggtgaatttggcatgtaaattggtgatgattgttaactttgttttctcccccccccccctttcttacaaaaatgtttcattttttcatgaaatccttgggtttccgggatcgctgagctcgaaaacgacattgattttgtcggacggatttttcgaatttaattttggtgtgaaagcggtttatataatgctgaaagcatttttcgaagtttagtcatttcagcgatgggctggaattcggaattgttgcacgtaattaaattaatgcggtgttttttttaaatttttggtgccattaaatacgcctgccgtttaacgaacccttgtttttaagtaattgcttggatctcgattgttaaaatgggaaaatggcttttgttggttttatatggcatggaaaacattcaatttttgtttaggttcggcaaatgttggacctaccacaacaaaatcaaatacgaattcgatgtggagttcgacgtgccgattacatacccaaaaactgctccagaaattggtgggtaaatggaaatagaatttaattacttacttctcttctggattttcatattttcagcccttcccgaattggacggaaaaacggcgaaaatgtacaggggaggcaaaatttgtttaagtgcgtttttcattaaaaaaataccgaaaattctattttttctcctcgttttttaggtgatcacttcaagccattgtgggcgaggatggccaatttctctttttttaaacttagaaaaatttaaa

SEQ ID NO: 68150 - DNA, 561 bp, Heterodera glycines
atgaccatgattttgatgtacaccacaatcgccgctgtcgctccatcactctgtccccgccggcgtcatcaaattgttgccatcgccaaagcaacgggggcaccaataaaaatattgatattgggtgagtgggtgaataataattgtaattactaataaaagaattttcggtgcggtaaaaattccattggaaaaattgagaattctcaaaaaaaaaaaaattttttttttttggaaaattaagaagacattactttttttgtaatttttaaactttgcatttaaaattgagacaaaatttgtttgatttcaatcgaaaaatgtggagttttaaaagaaagtctccattaaaaaaaaattttttttaatataatttttaaaacgtataatcactaaaatatgtattattttttagaattcttgacgacaacaacgatgaccaactgttgttcataccaaggacagcagcagcagatggaaatcaacgtcaaagccatcgccttttgctttcgtccaccaccaccagtcagtcgtcctccgtgtccgtctccacctcgttga

SEQ ID NO: 68151 - DNA, 163 bp, Heterodera glycines
atgcgtttcttcctacctttgcggctgctcattgtcattattttggcgttgtgcatcaatttttgtgacggaatgtttcaagatccctcaacagatctctcgctgagtcagccaggtagaaaaatcagtaaaggttcaatgtatgacaaatttgaatttatcg

SEQ ID NO: 68152 - DNA, 411 bp, Heterodera glycines
atgaagagatccgctgctactctttctactgctgctgctgccgctccaaatcagcatgagaataaaattgaacccattccgacacatgtggaagctgagccagatcatgagacaaagggaccgccaacaaaaaagcgcgcggtggaggaccgagatttgtggaaattagcgaagggaaaatatttgcttactacatacctctgcccgggtaaattaacaatagacaattttttattttaattaatattttaagacgactggaaccgattgtatcacaatcagcagaaggtgaagcgcctggacgacgaccgcttttctatcaactttgagctatgtcaggaatgcgtgcgggtcaattgccgagcgactgacttaattgcacccatgaagaaaaagccaaacaatgaatga

SEQ ID NO: 68153 - DNA, 1500 bp, Heterodera glycines
atgtcaaaagtgattaaaagaggtacaacagtgattagaacaggttcaactgtgattagaagaggtgcaaccacggaagggaaaggcacaacagtgattaggagaggtacaacagtgattagaagaggtacaactgtgattagaattccagtacagcattgatgcggctgtggcggacagccgtgagcggggaattcatccaacacacctcggctgcctcatcagtagtccactgtttgcatgaccatcgccggcgcgtgcatgcgacactttcgcactaaccatctgcctgatgaacatctggccatcgtccctgagcgcggttacgacaacgctcaaaatcaaagccttctcgccttacggttcttccactggtactcggaggagtacggggtggaagtgcagaccgcccactctgccggaggagagaagagaatcggcccctactcggttgacggatggattgaggcagaggggcgtgcaattgaagtgcacggtattgattattattgttattccataaaaaatcaatattttaagactgtacttggcacggatgcaagaaatgttatccaatcgataacatgttgttgcccaacggaaagacatcggggcaggtacgcgagcgcgacgcaaagcggatggaatacatccgggcccgagtgaatcgtgtggacgtgtactgggagtgcaaaatcacgtccatagtagagcggagcaaagccatgaggaaatccttcgcgaactacgtggatgacgggccactggtgatcagggacgcatttacgggaggacggaccgggccactgaaattgttgcgcaaagcgggaccgggagagaagatctcctattacgatttcacgtcgttatacccttacataaagtcagttctttttctccatttgacaaataaattgtaaatcttaagcttcaccactcgatatcctgttgggcacccgaaagtgcatgttttaaaccaacaagtgcagtggacaagcgcatcggacaatcctttcccgctggcgctgatcaaagtctgggttgtgccgccccgtaaaattgacgttgcggtgttaacggtcaaagtggacgaccgactgtgctttccgctgtgcatcacctgtgctaaagaatatccaactggaggcgtggactacgactaccactgtcagcacactgatcaacaacgcggatgggtcagcacctgtacatcaattgagctcaacgtcgcgctagacgagggttaccgcgtcacgagggtgttccgcgttctggagtacgaacagagcgacgacaagctattccgcccctacattgcggaattcatggctcaaaaaatccaggcaagcggttttgacagcagcataagaggggacgctgagaaggaagaacaatttgtccgagagtgtgctgagcagtttggcatcaacattgacccggcaaaaatggtggtcaacaaggggaaacggtccctggcaaagctgtgcctgaacaatttat

SEQ ID NO: 68154 - DNA, 443 bp, Heterodera glycines
atggcaacaattaacaccagctcagacgaccaggtaaaagaaattaataattttttaaatttttaaataaaatttaaaaaattaacttttatgcttattttgcttttctgtgcttgatttcaatgctatttaacgaagattttttatatcctatcaaaaacaaaaataaacatagaacgtaattaaaaagctaaataaaatttattatgatttatttgtctctttatttttattttaaattaaaataaaataggaaatcaaattaaataattttactttctcagatttatttggcctaccgtttcgccggtccatccgccgatttgattgtgccggccgttgcattgaatttggttgcgttggttggcattgtgttgaacggcacagttttggtggtcactgtcaaatccaggcaaatgccatggcattttaaaattttttaa

SEQ ID NO: 68155 - DNA, 352 bp, Heterodera glycines
ggaatcgaaggtgttgtaagcttttttcctttttcacttgtaaatttatttaaattttcaatttttttagctttttttcgaaaatttttttgtctttttttcggcaggcactgcctctgacaatgttttttatttatttagaaaaataaatttttttttcttgttgatttattttaattatatttcatccttaaattttttaataaacattttcaaactttcaccttattaatttaaggcgaattttgccttttttaataaattctcttgtgaaaaggcaaaaaaataggctcttttaaataagcctatttaaattactttaattgctttcctttcgcttacgaccatacca

SEQ ID NO: 68156 - DNA, 245 bp, Heterodera glycines
atgggcagcagtgcctccgaatcgccgccaccgccaaaacttgtcgccatccaagacgtaagttcatcggactaaacgttattaaaattgtaaaaattcatttgttctcgagtcaattaacgataatctgtcccatcaattagtgccttcgcttcactttcagttgcccatttacaaggccgagtccgtcccggccgcacgtgctgcacggcccgtcgacaccattggcaggccggccacttttg

SEQ ID NO: 68157 - DNA, 707 bp, Heterodera glycines
atgactattcaagaagtgtacaagtaagttcatttctgaaaaaatttgccatgagtagacgtaacttactttttatttagttaaagattctgggatattgtgagatttactcatattttgtactcgtaaatgcatcaaaattgcttttccatttaaataagatatcgcatttatttactttggggatctggaagtttaaacttaaatatacactatttcgaatattttgctattttagctccccgtgattattagtgcttgttcctagatttgttatttttcgaattaacttcatttttgttcctccctacttgttttttctttggtctaatttctctcttccttctcactgtctctttctcagtccattttgaaaaccaaaccaaattgcaaatattttcgccggcggtgaatactgactgatccactgaagcatcataatttctagatttaaaaattagggcaaaatttccaaaaatgtaaatattgcattcaaaaagctaaattgaaattgataaaagccttctgtttaacactatttttggttcattaatgtgaaatttaggctttagctgccggcccattaaaccaccataaagaaattgccataattattgttcaattggtttcaattttacagagttattgggaagcctccattgtgtctacaaactgctgacgaagacagtgatgaacaaagatggtag

SEQ ID NO: 68158 - DNA, 3718 bp, Heterodera glycines
tttaagaaggaagctgcgattatgtgattccaattgccccctgcatgagtcactgcggagatacgtggtgacatataccagcctataattggtaagaacttatgtgggaccattgtaataaaatttagacattttcagccaaaggcgttggaatccggttatactgtggacagattttatagagcgtggctctaagaagaggagccggatgatttattcaaggcatacgtgcgattatttttgaagctgaaggaggagtcaagcggttttccgaagggagttgagacggaggagcacgataggatatgtggagagaagagtataaggaaaaatatggaatcgacattgaattggctaaagtgaagaagaatccaggattgcggtacataagcaagttgatgctaaatagtttatgggtaagatttagggttttgcgaaagagttttaacttaaaattttagggaaagttttcgatgagaaattgtttgaataagaatgcggtaattgatagggcgtcggaattttataaaattatgtgtgatcataaaattgaattatgtgatattgttgaatattcggaagaggcgattagattgatatacagggacaaggaggactttgtgatggagcacaagtcgagcaacatagtcatcagtttatggtgagttcaaaaaaattataaatttgtatataacctaatttttaggacgacgagtatggcgaggttaaaattattggaattcatgagagaagcggagagccatggcggggagattttgtacacggacacggacagtatttttgttaggcacgatcgggatgtggagccgatcacgacggggaaatatttgggagagatgagcgaggaatacggcggctatgagattgaagaatattgctgtggaggggcgaagcagtacgcactgaagatgagaaacaaacagacgggggagatcgaatacgttatgaagattagagggattacgttcgacgtggacaacaggaaaacattgcactacgatacattcagggagatggttctgaattatgggaaaggggaggtggacccggcattcttcgtctataagaatgattttgggtgagttttttacaaattatttgcttcattaataaatcaatatttaggccgacaagggattcgaaagtggtgacgagggagaagcataaaatgtacaggccggtctgtcagaagggtatcatcgatgaggagcttaatgtgatgccatttggattttgttaattttgtattttattgttgtttttttttgttaaataaagttgaataaaaattaaagtgatattaggactagcggggtggaacggtctaaagtgaaggcccactcctgttagccgtaatatttttataaaaaatccagcagttcaaggggaaaatagcatctatgaccgttattctggtacatagttatacatgggagttgagggaattgtagcttgacacggtgtcttgaatagaggtgctgttcaacagtaactccgaggaaacctcggtaggcaaaaagcctattagaaccgttaaatgcgatgtcatccggtgagataaactgattgtgcctaaggtgtctcgttattagggcgtgtcttctcaaaaatttcaaattttgtttcttccgctgtcgtagaatttctgataattcgtgaggttcgcaatcgttaaaatcgcataaaatttcaacgagagaatacatttttgaacaccagtaggcattttcatattcgttgcaaatccttatataccgttacctcaccgccgtatgatgaatttttaccttttctctttatttttaaaattttgagaactgaaatacagatgaagaccactatcaaatctaaaattgacaaaaaatatacccaaatatttgaacttgaaactttaattttctcaaattctttgaacacgacaaaattaaagaattcactatttgtgtctgccacatatttgggaagtatctcgtttgagtcaaatcgatctttgtatattttcttctctttaattagataaatttgtccctcaattattagtaagtcggtaaatgatgatggcatagatccgatcggtttagtaataatttcggtgccattatgatgtgtccataaattctctattgtactaatgtcaatctcgtctattcgattggcatatgcgggagggaggaccggaccgatgaaattgtttgcgaaatcgaatgagaagaaaaaaattagtgtttatgatattgtgagtctgtatccatcggtgaattatggtacagcttacccgattggttttccgaagattattataccgaagagcgatgagattaatgtaaattggacgagaccggaggatttgaagtttaatggattgtataaagtgagggtccacccgccgcgagggttgcggattccggttcttcagttgaagtgcgatgagagattattattcccgttgtgttggagatgtgcgtcaacatttaagaaggaaactacgagatgtgattacaattgcccccatgatgaggcacagcggagatacgtggcgacatatactagcgttgaattggtaagaacttatgtgggaaaattttaagaaaattttgacattttcaggcaaaggcgttggaatgcggttatactgtggacagattttatagagcgtggcactaagaagaggaggcggataatttattcaagggatacgtgcgattatttttgaagctgaaggaggaggcaagcggtttcccgaagggggttgagacgggggagcagaaggatatgtggagagaagagtataaggaaaaatatggaatcgacattgaattggctaaagtgaagaagaatccagcattgcggtacataagcaagttgatgctaaatagcttatgggtaagatttagggttttgcgaaaattttaacttaaaattttagggaaagttttcgatgagaaattatttgaataagaatgcggtgattgatagggcgtcggaattttataaaattgcgtgtgatcataaaattgaattatgtgatattgttgaatattcggaagaggcgattagattgatatacagggacaaggaggagtttgtgatggagcacaagtcgagcaacatagtcattagtttatggtgagttcaaaaaattttttttaattttttatttaaaatttttcaggacgacgagtatggcgtatgagggaggctgaaagcaacggaggggaaattttgtatacggacactgacagtatttttgttttgcacgatcgggatgtggagccgatcacaacgggaaaatatttgggagagatgagcgaggaatacggcggctatgagattgaagaatattgctgtggaggggcgaagcagtacgcactgaagatgagaagcaagcagacgggggagactgaatatgttatgaaaattagagggattacgttcgattggacaacaggaaaacattgcactacgatacattcagggagatggttttgaattatgggaaaggggaggtagacccggcattcttcgtctacaaaaatgattttgggtacgttttaaaaaaattttgactcattaataacccaatattaaggccaacgcgggattcgaaggtggtgacgaggagaagcacaaaatgtacaagccggtctgccagaaggggataatcgatgaagaacttaatgtgatgccatttggattt

SEQ ID NO: 68159 - DNA, 994 bp, Heterodera glycines
ctgaaggaggaggcaagcggtttcccgaagggagttgagacaggggagcagaaggatatgtggagagaagagtataaggaaaaatatggaatcgacattgaattggctaaagtgaagaagaatccaggattgcggtacataagcaagttgatgctaaatagcttatgggtaagaaaattgaaaataaatttacgataggtaattttcactttcggggaaagttttcgatgagaaattgtttgaacaagaatgcggtgattgatagggcgtcggaattttataaaattgcgtgtgatcatcataaaattgaattatgtgatattgttgaatattcggaagaggcgattagattgatatacagggacaaggaggactttgtgatggagcacaagtcgagcaacatagtcatcagtttatggtgagttcaaaaaattataaatttgtatataacctaatttttaggactacgagtatggcgaggttaaaattattggaatttatgagggaggctgaaagcaacggaggggaaattttgtatacggacacggacagtatttttgttttgcacgatcgggatgtggagccgatcacgacggggaaatatttgggagagatgagcgaggaatacggcggctatgagattgaagaatattgctgtggagaggcgaagcagtacgcactgaagatgaggaacaaacagacgggggagatcgaatacgttatgaagattagagggattacgttcgatgtggataataagaagactttacattacgacacattcagggagatggttctgaactatgggaaaggggaggtagacccggcattcttcgtctacaaaaatgattttgggtacgtttttaaaaaattttgactcattaataaaccaatatttaggccaacgagggattcgaaagtggtgacgagggagaagcacaaaatgtacaagccggtctgccagaaggggataatcgatgaagaacttatgtga

SEQ ID NO: 68160 - DNA, 516 bp, Heterodera glycines
atgccaacagcacaaccagcagcaacaattcacttacaaaacgttcatgctgctgttgtccgtgctgttgctgctgtacgtttattgtgaatttgtgaaaaggaaattatcatttaaatttaaaaagaattttttatttaatgcaatttattttttttaaattatttcttaaaatgttttttcatttttttaaaataattctattaaaattgaaagaaaatttatttatttctttcaactttttcttttttttattattttttttagctaattttggaattttttttcctcgctaatcttttttttatttaaattttttcaatattttacaaaaaaaaaagtatttaggtaagccatgttgctgttgtggttgtgggtgtggctgctgcggttgttgttgtatgattttttcgcaaaaaattttattaaattaaattaattttttttcatccaaaataggcaacaaatgctgctgctgtccatgttgtggtgggggttgttgcggaggtcaattca

SEQ ID NO: 68161 - DNA, 527 bp, Heterodera glycines
gcttaaaagcattgtactgcataattaaaagctaaaataattttcgtatatttttcacaatttatttcaaaaagccaaaaagtccggaaccaattttaaaaactaaaatagtgcacaaaaggggagccgccgcacggcggggcttaaaagcattgtacagcataattaaaaccgaaaataattttcgtatatttttcacaatttatttcaaaagacaaaaaaaatgattcaattttgaaacgaaatagtgcacaaaagggagggatggttagacgaaaagaggaatttttagaaaagagcgcccccatctgatattcccatttttccgttccacaactggccaaaggcgactgtgctcattgacacgtagttgtccaataaggtacttggactttccacagtaaaatgtggtacaaaattttggaactgtcccgcctcacggcggggcttaaaagcattgtactgcataattaaaagctaaaataattttcgtatatttttcacaatttatttcaaaaagccaaaaa

SEQ ID NO: 68162 - DNA, 704 bp, Heterodera glycines
atgcttttaagccccgccgtgaggcgggacagttccaaaattttgtaccacattttactgtggaaagtccaagtaccttattggacaactacgtgtcaatgagcacagtcgcctttggccagttgtggaacggaaaaatgggaatatcagatgggggcgctcttttctaaaaattcctcttttcgtctaaccatccctcccttttgtgcactatttcgtttcaaaattgaatcattttttttgtcttttgaaataaattgtgaaaaatatacgaaaattattttcggttttaattatgctgtacaatgcttttaagccccgccgtgcggcggctccccttttgtgcactattttagtttttaaaattggttccggactttttggctttttgaaataaattgtgaaaaatatacgaaaattattttagcttttaattatgcagtacaatgcttttaagccccgccgtgaggcgggacagttccaaaattttgtaccacattttactgtggaaagtccaagtaccttattggacaactacgtgtcaatgagcacagtcgcctttggccagttgtggaacggaaaaatgggaatatcagatgggggcgctcttttctaaaaattcctcttttcgtctaaccatccctcccttttgtgcactatttcgtttcaaaattgaatcattttttttggctttttgaaataaa

SEQ ID NO: 68163 - DNA, 1923 bp, Heterodera glycines
atgggcgtctacgaggactatgtgaagtcgctgatcgccatcggactgggcccaaagcgcgagttggagccgcaggcggcgcgaccgcacgcgttcggcaacccattcaagctggacaagaagagcaacctgtacattgcggacgaggtgcggaaattgcaactggggaatgcaacgcttaactcgccggcgctttccttttaggtgggcgaaatgaacgccggtgccagcacttcggcattgccctcctccgatgtgccgtcttcgtcgtcctccaacggaggtggcgcttcaagcggtgggagtgggcgacggcgtcgagcagtgtccgaagttggcaccatggcaacaacggccggtagcgtccgaccgccccgtcgacggcccggcccaatcgacgcaaaccgtttggccatgtggcggttagtggtgccataacatttcggcacaaattcccttttttttttaataggcgccgtcgacgctcctcttcgattgcttcttgtccagacgaagcggtggctgtaactgcggaaacgacagaaggaacatcaacagccaatggtcataaattggggatgaccaaataattagcggaaagaaataatttttgcataaatcgggccgattcattggaatccatccatttgcaacaattattccccaattaccttcccttttttagagtctaacgaaatgccgaccaccactgctttgctgcggacgtcgaccattgacggcacggtggcaaccaacaccctcggcacaccgccaccagcggagacggcgtcaggattcttagacgaagagttggcaccgttgcgcatggcggacgaggaagacgaagaggaaagcgacggcggaattcagtggagggacgaagcagtagcagcaccaacggcagcggacgaaggaccaattgcagtgccggaagaggccgaactgcgctttggcatcgcacaaatcactccggcagcggcgtctcctcctcctccgtcgtcgtcgtcgttgccaccaccctccaacggtgccgctccgtttgcgctggccgagtgccaacttttggagaagcagcgccaaattcgacacattgttcgacagaaaggcccttgttcgtgcacttctttcagcctctatttcctttatttttgagttatttctttcacaaaaagcgcacacaaaagtcggagaaagaaaaaacagagagtgtgttacggtcagacaacgagacatggtacagagagagagaatgtgtgttacagtcagagaacgagagtgcttcgatcagagaagataatacaggaagagaacgagacagtctacaaaagagagagagtgtgttacagtcagcgtaagggacagcgtacaagtagagaaaacgagacattgtcacagttagagaaagaaagttgcagaaagagaacgagacagtaggggtggggtataaataaatctgtatacataaatattttgagaaaacaaattgtaattaaacaaaaagatgccgaactgtgtctcattgttggatcctttcggttttttgcttatcgttacagtaacctaattcactttcactcattttacggtattctctcttcctccataataatccatgcaattcattcattcattcattgcaactttgtagcgaattctcttctggcggaacgcgtcgctgcggtggcggccagcacttcgccgtcgtcacggaagcgcgcccgcgagctgctcgagctgggaattgaggaggcgcgacggttcaagcgggcgaagctgtgcgaaatgatcggacagcatttgcaacggcagcagcgaccggtggacgcgtcggtgacgagtaacaacagtccgtcactgaacaacaacggcggcagcgcattcgcatcggcacgacagaatgggtacagcaacaacagcagatga

SEQ ID NO: 68164 - DNA, 331 bp, Heterodera glycines
atgggaacaattggaccatctgctgtggaagagcgacatttttatgtaaaattgaattattactgaaatatattacagtatagaattaaaatttgaccaatcagttgttaacataaaattatctttgaatcaaacagtaaaaataaattaaaaatttcagaacttatgaaataattagtaaaataagtcttctaacttatttggtattttttttattattgtcaaaagataaattatttaaaaataattattttaagtcaaattgtttatgaatgagcctgggaatttctataattaatgaataactgtaaaaaaatagaccttaaataaa

SEQ ID NO: 68165 - DNA, 173 bp, Heterodera glycines
ggtgttgggccagtgcaaacatccgttccacatgcattgcattgtgaagtggacgaacacgcaaagcgggcagaagcccgcctgtccgctgtgtcgtcaggagtggaaatttgcgaccagctgattttttgcggggaaggcgaagaagactaataatgacttaatgtttttgt

SEQ ID NO: 68166 - DNA, 49 bp, Heterodera glycines; identical to SEQ ID NO: 51181

SEQ ID NO: 68167 - DNA, 148 bp, Heterodera glycines
aaagttgttgatgaatgagatgacagacagcagctcagttggccgacgatttttgcgtcacaaaattggcgtaataataacaaaaataaagtgttggcaatttatgtttttttggaaacgaaataattgtggtgtcattagtggcaga

SEQ ID NO: 68168 - DNA, 153 bp, Heterodera glycines
atgattaacattttttatggccagagattactggtctcgaatattttcactgataaacatggtcaatttgagaaatttataccagtggatgatgttatattgatagaaaattgtaaaaaaatttacattggattttacagtggaaaatccgag

SEQ ID NO: 68169 - DNA, 1129 bp, Heterodera glycines
tgttgtgcggcagtgatgagatggagcagcggtacagaggacgcattgagaagtttgtggccccaacaaacgacgtaaaaatgccatttattttcacagagtcaaatttggcgttcccgtcaacgaggccttttgtccggacattccggcgacacttttggttggtattaccaaataataatacaaagacatgtttacaaattggaatttcctgtttaaaaaaatatctatataggttggattcgaaatatcccaattcctcaaaattcaatgagtttttaatgattcattcattgattttttataaataaatttgtaaggcattcacaataatgaatgtcatgctgaaaatcatttccaatgtttaaaacccataaaaatgggatcaatttttgccatccttccgttcaccaaactttatcatttgccaattgtttattccaatctcaacaaaataatgattatttgtcataagatgattgattggttggcctaacagattgaagatgccttcccattttcaggtgcttttgctcaaagtgaacaaagagggcccgttgaagaaggacatttggcgagcgccgggcaaccaggcgcaagtgcgcaaactgtcccatattatggtaagtggtggcagcattggttggctttatgggcctccatttaaaaaagcaaaatgcttttgtgattttggcattttctggtggaagggctatcggtagaaagtgccatttcagaaattacattgtatcaagtgggcacacacatttgtagaggtggaatccgatctagggatagaggaaagaagcgataaatctgttagcgagtcgggatttcgaactaactcaaaaacttctcacagtcaatgataaaatttgaaaaataattcaaaaatatttttttttccgctcctaaccttacgatttaatttggcaatccctaatgatattaagggagctaattttgagacatttttcaaaaattattgagcgcttaaaccctcttccttgaaaaattaatgtggcaaatactatataaaaatcgtaaaaaatctcccattttgcagcaacatggccgcctcgtcaacatttcaaacatcagcgtgtacacagccgcttcggtgatcaag

SEQ ID NO: 68170 - DNA, 402 bp, Heterodera glycines
gttggctttgaacatcactggttgcaaattctggacaattatgttgctccaatgcaggagaaggtgttcatcggtttctatcaacgggtaagggaaaggatggaaataatttgattactaaattaaacaccgagtgaaattttacaacaaaaaaaacctcattttttagcctatccatgccaacatgatgttcgtggtacgctatcggcctgatgaacaggtggaaatacccccccacttatataatttttaaaaatttttttcccaaggcctcactccgtccccaccacgacgccagcacgtacagcattgatgtggcgctgaacaaaaaagatgttgactacgaagggggcggtgttcgttacgttcgctacaactgcactgtgccagccgaccaaattg

SEQ ID NO: 68171 - DNA, 1476 bp, Heterodera glycines
atgcgcgaacaggtgagactaattttttttttctggcaaatcccgagcccgaaaggaaaattcaatttattttttctaaatttacacttggtctaaaattggtcgaaacaacaaaaattgccgaccattgagcattaaaaaatggacattctgtacagacagactcgaacaatttgaaaattttgtcattgaaaaatgagtcatttattagaattatgaaacaaaaagaatgacggattgtgagcatgttcttgctgatcctgtcctgaattctattgtattaggcaaaatttgaattcacacattaaacatgcaaacctgccacaatctgtgaaatcagagtgctcttgtacaattaaaaattggacattttcctctttttattgcccccccccatttttcaattaaaaaaaatccaaaaggcgataataaaccgaaaatttatttaacgcatgaattgcatgcacaaattgttgatataacattgacagtaatgtatcaaaaaattgaaaacatttttagggtggtgcacaaaaaattcgactgctccgtgaatatttggagccattcaaagaccggaaggatttgattttgctgttcattgatgcgtcagtttttccatttttttttttgcgcttttcgataaataatttaaaaatttttgccctcatttttcagttatgatgtcattttgaatgccgactccgacataatccttcgcaaatttttgtcccttttcccggacaatcgtattgtgtttggtgctgaaccgttctgttggccggaccgtaccctcgccccacagtatccgcccgtggtttttggcgaaaggtttgtgtcacaaaaaattttggaaaaaaacgtggaaatgtgcttaatttttatgctcaaatcaatttttcaaaaccaccattttacagtcctaaataccatttaaaattacaaaaaacaataatgtttataattttcttgaataatttttttctttcaaatttgagcacaggcgcaaatttagggccgcaaattttctgggggacatttttccagtgtttcccgatccacgcacaagcagttttttatttttgaatgccaaaccaaattgtcaaaatgcttaacccaaacaattttcttacaattgcagcccctttctcgaaagttttttataaaaaaaattccactgtttttttttgaaaaatttatatttgaacgtttttaagaaaaaaaaaaaattaaattctcgggggaaacggcagggagtaaatgaaatgtttgtccacttgcataattgtagcaaaatttcatatcccaattcaaatatgtttccattctccatccaggtacctcaattccggcatgttcatcggttttgctcgcgaaatttacgcattgttggccattgccggggatttgaatttgcaagacggtgatgacgaccaactcttttatacgcgagtgtttctcgacacagacaatcga

SEQ ID NO: 68172 - DNA, 827 bp, Heterodera glycines
atggcagcagaaaatgcgatgttttataaggggataaagatggcacgagacacaggggactctacgccagcgttggtcgcagggcatgaggccgcccattcggtcgccgtgatcatgcaaacacacatgccgcatgatttcatttctgcgacgaacattgccacgccagaaaatgaaggtctgatgttggcaagtgcagtgcagccgagaaattgtttgatcaaacaaattcaggccctgcagagcggtggaattgttgttggtgggcgaaagccacggagacgaaggggacattgaagaggccaccgtgaacgcgcgggaggtttaatttatgctgtgaaaacccaacgttgctaacaggggattgaatatgcataaagctttgataattttaaaagtattttttcgatctttttttaagaatttggaaaaatttttgtgatcattggagctgtagcgaaaaaaaaccaaactgaatcaatgaattcttaacatttaaaatcggagtgttcccttgtaagtggcataagtaaaatttagctgctttgaaaaaggggatggaagccgccacgtggaagaatgcgaagaaagctctggatcgagcaatcaaaaaggtcatcgacgagtcgactgaagcggccaaagaattcctggaagcaaattggagtgcgattgaaagggtatttagttatttttaaactaaaaactgctaaaataatgttgaaaaatcatcagggtttaacagtcttacttttgatgattttaaaaccgttcataaaatagtcaatttcgtttcattcaatcatcttttttaaatctaaaataaa

SEQ ID NO: 68173 - DNA, 484 bp, Heterodera glycines
atggacaaaaaaaaaagttcaaatttctgtatgactgagaaaaaatggcatttttctccgtatttaagcggtgaattccccaccaaaaccatccattcatttaattgctgcactcacttccattcttttccctccatcggtcgaatcttcatcctgctgctgctgtacaataaagataattcccgtcagtttttttttgttttgtttatttcggttttcaaaatgtattaaattttgtgcccttttttcaggatggtcagagcaacaacggccaggacaagggcatcagcagcgcgagcacggaccatcaaaatcaatcgtcgaaatgccaagaaagcgcgtgccgcaattggacgagccggacttgtgagtgacgcgcgaggggggggggggggggcaatttgtacactaattgattcagtgtctttttttaatttgccgatttttcaggcacgctatgcaaatgcgcgggagaaatgcatga

SEQ ID NO: 68174 - DNA, 59 bp, Heterodera glycines; identical to SEQ ID NO: 52422

SEQ ID NO: 68175 - DNA, 59 bp, Heterodera glycines; identical to SEQ ID NO: 52421

SEQ ID NO: 68176 - DNA, 59 bp, Heterodera glycines; identical to SEQ ID NO: 52422

SEQ ID NO: 68177 - DNA, 59 bp, Heterodera glycines; identical to SEQ ID NO: 52421

SEQ ID NO: 68178 - DNA, 59 bp, Heterodera glycines
accattttccttctctagtctggctctaccaaacactcacacgatatttgaaatgctaa

SEQ ID NO: 68179 - DNA, 516 bp, Heterodera glycines
gatctggtggtcaatcacaatgttccccgctgttctaaaacgtatgtccatcgtgtcggaaggtcggccagggccggacgttttggggcggcggttactttcgtcacacagtacgacgtgcttttgctcaaaactattgaggtgaggtgggaacggaagatgcatgtccttcccttacggtattgttttgaatttcagggggtaattggtaagcaaatggaggaattgaaagtgagtcacaaagaagtgtcgctctacgctggcaaagtattggccacaaaaagggaggccgaaattcgaatgcaacggcgaggctttggagaacgacgggaaatatggaaacgaaaggaattggccacggaaggactgagtgaagaagaaatagagaaggcaattgagcaatggaagaacggcggaagaaaaatagtgaaagctcacaatcaacacgaggcagaagaaagtcaaaaggggagaacaaaagagtgaaaaccaacacaagagaatgaccttgaagaa

SEQ ID NO: 68180 - DNA, 251 bp, Heterodera glycines
cgggccggagctcagacaccgttgtttttagcgctaagtagacaaattaacggcgttccgggaaaatattacaggtccttacggcgcgggatcctgtaaaattcattttgttcttctagcgactgcaaagaggccaaagtgcaccaattcgcagaagacgaaatcgcgtgtgaaattctgtacaacaacagtttggagcagtgcgggttggaccattctgccatttgaagatgggaacaaaagctactttc

SEQ ID NO: 68181 - DNA, 615 bp, Heterodera glycines
atgtatatttcggaacaaaatctaccattgcaaacgccaatatcctgttttacaaaatttaaaagcaaacttttgagacgcagcccagccgggcgtcgtcgtcctgaactgccccagcttgggctcgttccggaagtaagtcgttgttcatttgcgtgctataaaaagtaaatgagtgataagatattattgtaaattacttattttttgaaataaagcattaaaggtgataatctttattgagaaatataacatcaaatttaataggaattatcctcaaaatgtgggggtcgggtctacagtatgtgtacaactgcgttcctcttgtgttctctctcacaaggaaacgcatcgcttcagaatgacttcaaaaattggaagcgatttctacgtttagatgatacaaatggtaattcaaaaatttaagtagacaagtggtagagaatagcatgccacctacatcagtcctacggtcaagtattctattctctgttagaatcacttccttgcctcctcataataacgggaggccttaacaaatatgatttgaccatgggtcttcaacttatagccacataggaagagagatttctgtgccagaattttgagattaaa

SEQ ID NO: 68182 - DNA, 1162 bp, Heterodera glycines
atgagaatgtttatattttgttttgataattttaattcctttcacaaagcaaaatcgtggggctattgcccaagttatcaccgagcttctgcgcaagcaaagagcacttggatgtacgatgagtaagttaaaaacgcctaatgccgataaaggtataatatatatataattcctagttgtgagcacgagcgtcgtgcaaccgaagcgcgggcggttgcggcggcagcggacgtgtcgactgaagcgtcaaccaccgccgaagatgctcctacctacaggcccgacgcggacagtttggagcaggaggacgacgagactcaagactccgtcgcctctgactcgctgatgggggtctgttggtggacaacgagaacggtgatgatgatgatcaggacgagcaggagaaggaaacctgatgggcggttgccgcctcagcatacttgcataattcgtagggcccagtcatgcccattgccaccttccccccaattaactgtttttttcaatttatttgttttttatcatacgatagccaattttggcactctttttgatagccaattttggcacttatttaactttattgtatcaaaatagttattcataaattgagttacctttaaatgtcgaaaataggtatatatattttcatcaatttaccaaaatatgggtatctcaacattacaagtgcccgatctgtcattctgttagctcatctcgaatccctaaccagaattcgaattttttagaaaatataatcattgtttttttgttgttacaaatattgctagtaccgagttaacacgattaggccccacccaaagagttttctggggctaaaattattttcagtatgtttttttaaattatgatcgccgaggcgaaaacaggaatttgttaggttttgcaccaaaaaatgacaatcttttgccatgcgagatcaatttttcgataaaaatattatattgggctccggcggtgtcgataagtgtcgacgggaaaatttttgggattttatgataagaaaaacattcaaaatttaaaaaatttgtccttttctttaaaatttttatttttgggggaggacaatgtcgaccctgcttctgaatcctttcatattgctgctacaactcaatcattccacagcaatatttgcaataaa

SEQ ID NO: 68183 - DNA, 1461 bp, Heterodera glycines
atggtaattggaagtttttgtattttttcttctaaaataattttacataacatatttagcgattcaagatattagcttaaatttaacgaatttgaagattttttggaaaatttagccctgaatttgaaaaaaatgtatgcacatattttgcaatttttaagcatatttattttatgtccatataattggcgtttatattcattataaaggttctattttttaaattttggattaaaaaattggttttttgaaattattgaagatgaaataatttaaaaagttttggatgaaatttacttccttgctagatattgcaccgataactaaaaaaaatcagtttttttctcgactcggtaccagttatttcgcaagcaactcttcttcttatcttttctatgtaaatttatatatgttatttaattttttctcattcttttaaaataataaaatttaaatctaattttccgatgtataatttaccgtttgtagtgattttcgatctctttaatcgttgcacattatcttcaatacatatataaattgaatttttaattaaaggactttgcccatgactgttaatcgctcattgacaaaaatggggacactttgatcaaatcgtaggaatttttgcaaattgaattgcaaatccgtgaaatttcaacttggtaagcagtaatttagttcaaaaaagtttatggctaattaattcatttgattattctccattaattttaattgcatttttcggcagaatgaatttcgacatttgggacaatttcgattgagtgccaattgaacattgccttaattaacgtaattattgttaattaagcaattgatggacccgagcaaaggctttcattgaaaaaagtgttggttttttatgagaaatcgatgggagcgaacttagaagcgaaactgttcacatcaaaggatttccgtggaaatatgggcacaaatagaaaagaaagataaaggcactgattgggctttttcctttgtgcattgcttcagaggaaggtgctattaatgttaatttaaatgataatcaatttcacttttgtgatcagagaaaacattacacttatcactgatgtccaaaattctctatcactagaaatattttgccaatttttttttattgatcagcattttgttaagcaggggcctttcagaattacgaacaatagagacaaacaaaataattgtcgtaaaacttatcattttctcgcgaaattcttgccgggaattaggcgtttctcgttcgtaattgtgatcgaactcaatgacaaacgcaaaatttcagacgacaaatatttaaggtacgctcaacccctaattgagttcactgatcaagaatccgattcaagttttcattttctgtgctttgtttatgatttttcatcaattatttagtataatgaaatttttcagattacacacaacattttaaaacagaaa

SEQ ID NO: 68184 - DNA, 635 bp, Heterodera glycines
atgatcgataagatgatctttcaccatatttttggggggtaaaatttgtaagtttttgaaaaccagcatcatctatcagcactggcggacgaataaattcactttaaatttaaaaaatgatatttaaaatctcaaaaataaactgattttgtgcggaaaaatatgctaaactggttttttgtttttagcacggtaaataaaaattgttagaaattaaactgaaaaaaaattggaacgaagagaaatatttctcttaattacccatacaaaactttttatgttcggcttaaatgcccgccccttccattcacctcaattgccataaactcggagaaaccccaggggttctctttttcggagcaaaatgactgatcaaatgttttgctggtgccattgtaatgggtgttttcctcattttttggaacaacacataatgttgcagaacaagtacagctccaattcgagccttaacatcaaaaacaacacataatgttgcagaacaagtacagctccaattcgagccttaacatcaaaataactaaattattagtttatgaaaaacttttttttccaccaaaatatctatcagagaaatttaagtaaaatattcgagaaatatacaaaaaaagtcaaaa

SEQ ID NO: 68185 - DNA, 292 bp, Heterodera glycines
atgtgttcttgtggcacaaataagaaagaacagctcactcatcgattaatgatttttcgctatccattttttgagccgattataatgatactcgaaagtgccttcactgttgcccatgtcatgaaaatcatcaaaattccactcttcacaatgacacttccaaactttggcatccttatattccttggggaatatggcacgacaagagacgtcggaatcttcattcgatgccggattacggccccattcaggctagtgatgcttgccaagtttcactgataatgagtggcaa

SEQ ID NO: 68186 - DNA, 1008 bp, Heterodera glycines
atgtggcgcgaaatgctgcacgtccaggcgattactggtggtttgccgacgtcctccgacaacggcaccgccccgctggctgtgaccgctgcacgagtgaagcgtcaaactgttggcactacggcgtatgatgcccaaatgctagcgggtgctgtagcggggggcggttcgccgccgggcagcagtggaaacccgcagggcggcagctgctgcagttgccaagtgggcccgccgggccctcccggaccgccgggcagagacggacggcccgggtcagttagacaaagcaaattatgcccggggtaagtggataaaagaattgtgccctatttcagtgccccaggacgtcctggaaacccaggacctccaggaagagatggcgtgcttttacccggaccggtgagacgtggagatgagttttgaaaaaaaaactaaaaaattcagcctccaaaacccccgtgccaaaaatgccctccagggccgcctggtaataatagtctccatgaaaattgaaaacttttcctcataaaggtccgcctggtccaccggggccgaagggtttgccaggcccccaaggcgaaggtgggatttgtttgaaattttaagaattcgttaaatttgccagctggttcatcgggcagagatggagcgcccggactgccggggccgccggggccccaggggccgcaaggaccgcccggccttcccggggacaaaggccccccaggagagccggggaaggtaaaaaacaatcgtagctattgatggcactttcaaccctcaaaaaattaaggtgattaacggggcaccgccaggaccacccggtgagtaaaaagggcaaatcaaaacgccacactttgtgaaattgtcagaaaaacataatttatattaaagggcccttgggttttccaaaaattgaataatgaatatttattatttttcttaatgtttctgccatttacaggtcctccgggcgcaccaggaccacaaggttggttcggagtataa

SEQ ID NO: 68187 - DNA, 95 bp, Heterodera glycines
cgttgtgtgtgttgtgtccgctttcttcggcggcggtttcggctttggcggcgacggttgctgctgtggcgattgttgttgtgactgttgttgcg

SEQ ID NO: 68188 - DNA, 80 bp, Heterodera glycines; identical to SEQ ID NO: 51817

SEQ ID NO: 68189 - DNA, 1107 bp, Heterodera glycines
atggaagaaaattatgcgaaaatggaaatttgtatggattcggccaacacatttacgaatttggaaatcttagaagaaatccgtctagaatttttgcaacgaatgaacaaaatttggcgaattaattttttaggcaaaaaaacattcttttttggtgattacggtggttcgtccacagatggccaaaagagcattttgaaaagcgtttttgcaatgcacgaacaaagtctgaagccattgctattggtcaaccaatttcggcaaaaattgaaaggtgtattttttgtttttggtatttttgctgaataacaacgccatgaagggtaatgggcaggtcgagagtctcggccattaaatttttatttttatatttcacataattagaattattttacttttttaagaaatttacattgacacggagagaataggtggagaattgcatgaaaattcagcagtgttttcaattatcaaagaactttgccttggtgtactgtactcagacggtaagggaagcgtttgaaagatctctccaattctttaaaaatactatttttatattgaatagaaaaagttttttgttactcaattttagccaccctaaaaagggactcattttagagagtaattttggttttcagaggaaaagaatatgtacaaattgttgaaaaagtattttctgcttttgattcgaacttcggatgagccaatttcagaggaggaaaagcaaaaattcaacatcgaaacgtataaagcaaacaacgaaattgtggtggccaatctgctcaaatttgtgtcaaatttaaatgccgaaaatgaaaggcaattaatttggattgtaagcgaagcggcgacggaattggccaatttgggattaatacacacaaaaagggacaaatccgaggaagaattgggcgaggagagcatcggagaaaaactgaggaaaatttgttacttcgaaagcttttcattttggctggcaaacaatgggacgatattgaaaagtgaaaaatggagaaaatttatcctccaacagaattatgtttcaaaggttacatttttatatttaaaaaattaaaataggcaaagaaaattaatgcgattaaa

SEQ ID NO: 68190 - DNA, 1446 bp, Heterodera glycines
atgcgcattgagaataatgaaaaggcaattcttgaatttaaaagtgcggttgaacagctaattggacccattttgctgagtcaaattgaaaatcggcatccatttttaatggcattcggtaatgggaaatccatttgatgaaaagagagcggacagtaggcactaaaaatgccaaaaaggcacaaaacaacaaaattttatgcttttcgaaaattgtttgcataaaataaataattaattttaacttacaatagaaacaaaataaaaactaaaaagaataaaaacccagagaatttaaaacaaaacttaaaaagcttttggtccatggcaatcaaagcgctctcaaaattataaaacaatttttcgaataatcgcacaatatttaaaaattgataatagtattattattttgttttatttaatattttacttctcaagatttggtgactaatgcgaaatgggcggacgaatatttgctcattttatcaaaagagacaattgttgcgggcattggcgaatttcgaatttcctcgcgcatttatttttctcgaatttttgaaatattccaaaaattttatttactgcaacgaaaatatttgcataagacggatgcaaaaatcagcaacatttttaaagaaattgaagagaaatgggaggaaaacataaatatgttttctgtccttttcaaggagaacaaagttaaagacataagtgacattgtggaaatctttgacttttggcaaaaattggcacttttgtacaacaaaatgccaatgttggaggcgcacgaaaaaatccaacgggtggaggaaaatgcgaaagtttggcacaacgaaagccatttaaagattctttttgcacggatggaactggtcgatgaacatgcccaaaatgtgctcagattctacgcggaatttttggcgcagcatttgcaaaattcgctttttgaaagcaccggcgctttgtaccgactcaaaaaatttctgtgcccaaaacaaatggaaaaattcgtttcatttggacaactgacgcaaaagtacccgcaactgaaagagatactcagacgaagtgagtaattgggaacaaaaagtgaatacttaagacaacgacttactgtgacagtaaccactcgaccgatcagtggcttatgtcaccagcacggcatactgcactcatttaactgtcctttgggcttcttttttttgagaattctgccggagttaatttgcccaatttgtcgcttaattgagtcatttaaatcccaatttaaaaatacaaataaaaatattttttaatttttttattgccattttagggctgaacactgttgaaataatgcaactccaaatggtaaattacatctcattgttcgacttcgatacagctgctccccattggaaacagtcacagtttttgctggacaatctcgcgtattatatatggtaa

SEQ ID NO: 68191 - DNA, 869 bp, Heterodera glycines
atggccttaaatgggacctatcttttcaacctgagcttgtactgctccaactccatgcatgaagttcgagctgtacaggtttgttgcgatcccagagaccaaatctaagaccatattcgaactcaacatacccgatttaccttgtttaattaaatccagaatttccaaaaccacttttaaaacattatgttacttggtggtcttgaaaaatgccgtttttggagaccactttcagtctcggctctccaataattcaatttttgtaattaaaattttatatttttgtgttcttatagtcctaactttgctctatttaatcactaattctctggctctgtatctcttttatttttctttaaatcagccatcaaaaatacctaactctaaaatgaccatttttacttacttaactctaactccctaactccctttccattggtattgattgatctcttgccagaataatggcaacatattattgataataatggcgggtattttgaatcatgattgtgttttgttgaaattaaaaaaaaattttattaaaaaaaatttgggtatcaaaaattatgttccaccctaagtatttgcatataaaagtcgggacttttatttgcatatttaggtttttatgcatatttcatgcatattttgccattttttgtgcatattttaagatgttttgcatattttgccatttttcgtcaaatttttccgatttgcccttggggaaaaatttgattatccttaaattaaatataaatctgaatggatgcgcgagtggatcaacactaataagcttcactgacgaaaatgttgagaaatttttgatttgcaattgcaaaaataaccgataaaatttatgagga

SEQ ID NO: 68192 - DNA, 961 bp, Heterodera glycines
atgcctttttgtcatttgacaagcgcaattttcgcctttttcgtccttttttcatttgatcgtgccaattgcattagttttggtttgtttaaccccaatttttaaacaaaattcctaaattattttagttttaacaatcaaagaaattgacgcgctttattctcagcttttgaatttgccaaatgaacagaaagccttagaaaatgagctgccgaaaaaggaaatgaaattaaaattggaattggcacttttttacgacgtttctcatcaaatatttgtttcgatgaaaaacaagaaattaacaaatgttcaacaaaaattaattgaagaaaaaagagtggaattttctgagttggcggaaagaattgaaaaaacggacgaatggacggcggaaatcggaaaatgcaaattatggaaattttggcatcatttgaagatttttttgggtaattaataactcattgcatttttaaagcgctttcggcatacaaaaaatgttaagagaattagtccatttttcagtctgtcatcatttatttatttttcctaattttttattttaaaaagaaaaggcaaagaattattatgcataaaggcattgcccctgaaattgaagtgcccattttcatttaaacacatttttattttagcggaaatattaggcgaagaatttggacgaatgattttggagagtgaaaatacggcccaaaaaatgattgactgtgaacaaattgagcaaatgttgtctaaaaatgatgagaatggaattggtagcgacgaacaaattgaaataataaaaaaatatttggaggacacaaaaagcgcaacgcatttcaaagcactgatggcactaatggaaggccaaaaaaagggagagaattggcaaaatgaggggaaatggcattggcaaggacttttaaaaagaagaaattattattatattatttttaattaaaataaa

SEQ ID NO: 68193 - DNA, 59 bp, Heterodera glycines; identical to SEQ ID NO: 52421

SEQ ID NO: 68194 - DNA, 59 bp, Heterodera glycines; identical to SEQ ID NO: 52421

SEQ ID NO: 68195 - DNA, 59 bp, Heterodera glycines; identical to SEQ ID NO: 52422

SEQ ID NO: 68196 - DNA, 59 bp, Heterodera glycines; identical to SEQ ID NO: 52421

SEQ ID NO: 68197 - DNA, 59 bp, Heterodera glycines; identical to SEQ ID NO: 52422

SEQ ID NO: 68198 - DNA, 59 bp, Heterodera glycines; identical to SEQ ID NO: 52421

SEQ ID NO: 68199 - DNA, 400 bp, Heterodera glycines
atgttcgacgaggacgaaaacgacaggtatttttgcgaaccccgaacccgaattcgaactattaccgtaataatttcccgctcacatttaaggtgttcaagctgaaagtaatgttgaattgaatgaagatgagcgaacggcgaataaagtgggtttactcaaatttttaaaaaattcaaaattaaattttttttccgtttttaaggaactggataatgtgatcaacagttgtgaaatgagtgccaatgccaacaatgggaccaatgatgaaggggtaagtaattgtgattaaagttttgaatttttgatcaatattcccttttgatttaaggtggcggcggcggtgaacaacggcggaacaaacagtgccaatgccaacaatcggaccaattgtgaaggg

SEQ ID NO: 68200 - DNA, 403 bp, Heterodera glycines
attgctctgctaaaatgccggatttgtctccgtccctaaatgctctcccatttgaagcacaaggatggcgttgtgcgtgtcgacaatggccacgaccgctgggaggtcggcttagacgcggccttttttcgacccgacgaaattgaggcatttaaaaataattggtttaataaatccaatattttgtaccatttttttcttctttttttcctccgcttagatcagtttggccggtgaccatctgttcgtctattgtcaccacgaagaacggtcggatgagcacggctcgataagccgcgagatcaagcgcagctacaaactgccggacgacgtggacacggccaccatccgatcgcatctgacgctgcagggcattttgcgagtcaccgcccaaaagaaaaag

SEQ ID NO: 68201 - DNA, 81 bp, Heterodera glycines; identical to SEQ ID NO: 58971

SEQ ID NO: 68202 - DNA, 313 bp, Heterodera glycines
aaatttttaaaaattttccagcaaataaagtgaatttttttcgaattcccccccccaaacgaaaattaggggggggggaaaaaaaaaaaaaagctttatataggcgaagatttcagtaacaaatgtagcaactctaaatttccaaaaattttttccggcggcgcctatcggcaccgccggacctacattttccactatttttacaagttttttgccttaaaacggccaaaatttggtcatttttagtgaaaaagtgcagttgttacccagcagtggaaaaaaagttattggttaaatagcaaaaaaaaaagaa

SEQ ID NO: 68203 - DNA, 710 bp, Heterodera glycines
atgccatcgtcgtcgccgccgtcgcctggtgagtcccatcggtgcccggtatgtcgccgaacactgcagcgctcgtacactttgcggggcctcctctgggcaatggtgtgcttcccgtgcgggatgtactgctgcatgaggaggctgaggaggcgttgcaccgcttgtgaaagcgatgtgagtgcgacggaagggcgggcgccaggggatttaatgcaattttacgtagaaaaaactaggattcggtattaaaccttgtcctggattccatgaaaaacaggttgccaaaaatggcttggacctctggatccaggcctgggtccggacaaagccaaaaaaataggcaaaatttttttttaatttccctacgtttgtgcaggccataaaaattctgaaaaacgatctttttgttatacaatacagttaccatagtatacataattgtgtatgagaaacatttcctctcccattggcaggtgatcatctcggacggcggtgtgccaaccgttgcccaaacgtacaacacatttgccgagttcaaatggcaatttccaccttcggcacttcgcagaaaaagtgccaaccccaagcatgacaaggaccatgatgatgacgatggtgatgatcaacatcacggcagcaatgatcaggagacggaaatccaacggctgtgccctgctacccgtccgtccaatcaacagcagcagtga

SEQ ID NO: 68204 - DNA, 694 bp, Heterodera glycines
atgcggcagcaaatgcacaccggcgcagttcgtccatggccgatttgggaggtgcaaaaataaatttgtgattgattaaaatttttaacatttaaaaatatttatgtaaataattttaaacggagaaaatgaatgctttcagcaaattttaaaaacatttttgtaaatttttcaagacttggtaaaacaatgaagcaaaaaaaaaaaaattagacattcaaatttattaataaataatgctaaactaattttatctaatttgaatatttttttaattattaaacttaattactttttcgctcgaatgaaatcggttggccatgcaatgaaaacggcggcggaagatgagttacggtatgaaatcattcgatttgccgcccgaaccacagcacatggcattccgatggtaaaaatttattatttttagagaacagcaaaaaaaattaaaattttaaaattaaattttaaatttgaaataaataaaaacctgaaattctaaatttatcaaaatattatagaaaattaaagacaacgttcttaattttctggcaaatttgggcagtattttgaagcaaatttataaggacaaatcctagttctattaaatgcatacaatcaaagatttaaaagattaaaagatttattaacaaaattttaaggggttcctgaaaagccgagtttaaaatgaatttga

SEQ ID NO: 68205 - DNA, 554 bp, Heterodera glycines
atggtggcgggtgcggtgaagcaaatgctggaggaaaacaaccgccaaagagaagaagccgccatcgaggtaattaattaattattgtgccaaaaaaaacccgggttgatttaactaattagaatttacgaatttcaggaattagacaatttttgagggatgcaattatccataaaagcatacagaaaagttcataaagatttcagtatagcaggcgtcagtaaattattgcggatctaattagtattaattaattagtaattaattactaacaggaactggaacaaaatgcgggaaattctggcaccacaaaacccacggcacacattcgcttttccatcccggcactgtttgggataccgacacgccattttgtggccagtaagcgtgccgccgggggtgattggcaaatagtgccgccagcagcagcagcggcatctgatcagcagcagatgattaagcgtgggaagcagcagcaacagaagatgcgggtagaagcaggaggcgaacaacaacaaaagaaggtagcgaaaagcagtggatcaatgggctga

SEQ ID NO: 68206 - DNA, 949 bp, Heterodera glycines
agaagaagcagaaattcgcagccgttctttgccaaaataaacaaaataaaatgcatatttttgccattcttgggtcaattttcaaaaataaagttggggtcctgggcccgttctcctctccttggttatgggcctggttatcccattttttgccagtatgatccgccagatgagcctcgtgagtacattcaccgggtgggaaggacggcgcgcggtgacacgggcacaggacacgctctgctcattttgaggccggaagagcttggcttccttcgctttctcaaagttggcaatggaaaatttaaaaaacaaattttattgacaggcagcgaaagtgactcttaatgagtacgaattctcgtggaataaattggccaatattcaacctcaactggaggaagtgatatcgcgaaattattacttgaacaaatcggcccgagaggcgtacaagtgggctacaacgaatgccgtagcctggggaaaagccgccatcttttcgtttggacaaaaacggatagggatcgtgaaaataatagaaatccgagactacttttaaatttgtactcaaaaatcctagtacaactggtattttggcgaaatcttctcagtcaaacggttttcctttaactcccggtaaattttgcttttcctcccccccccccctaatttgaaaattgtgccctttggctacggattgtcgattcgtttttacagattgtttaaggggttacattcgggcgtatgactcacattcactgaaaaagatttacaatgtgaacacattggacctcgttcaggtgagttttcccgaaacattaaggaaatttacagaatcattttttgaaaggtctgcaaatcatttggcttcgaaacgcctcccttcgtcgatttgcctgtgtccaacaaaccgaagctgaagcaggacaaagcgaggcttatgggcgcgggg

SEQ ID NO: 68207 - DNA, 1220 bp, Heterodera glycines
ctgtccagcaaaaaatacgttccgccgacttatcagacgccaatcatcgaccaaaatgctttctttttcttggaattatttgaggaaacgcaaagcattggcaaaaaatggctgaaatcggagtccaaaaaggaaggcgctgaggaggcaatttccaaatacaacggttaatttttgcatcgttttgtttgtttcgttgttcgcgcaaatgtttatcactatcgaaattttgaccaacgattttcaaaaattggattggggtcgaaaattcagaattttctttacctcaaatttaaattactatcttaaaaaggcttatttttttacgttttgttaaggcgaatggcaaattgggtcgcccactgatgaaattttggccaatgattatggactcattgtacggactaaggctcgacaccacgccatttctgcgcgacttcgaaagcctttcaaattcgatgggagtgcattggtcgtccagtgagtggaagacttttgttttgttatcgcatgaacaatttgtttgacagatacgaagtgaaatatgagcagggtcaagaatgtggcggtggttatttgaaactgttgcgggacgacgcctcaaaggatttgaagcagttcaacgacaaaacaccctatgtgatcatgttcggtaggtcaaaataattttgttgcagcaaagcttaataaaaaaatcatgtttcaggaccagacaagtgcggtatgacaagcaaagtgagttggggaggggtaggggttgagtaaatccattacgtaaaagggaggaatatggttgtttatgcgattctcactcccgtgaaacatctcaaatttcacaacccgagaatatttttttgctcgctcttcacttaaatttccataggaaccttattcttaagaaatttaaaaaacagagaattagtggtcgatacgcaatgttgtacaaattatttcgttaaatcgaacaccactttcaggttcacctgattctgaagcacaaaaacccgaagaacggaacaatcagtgtatgctttttccatcgattgccttttcacaatttctgtttgaatgaatgtttttttttttgcctttttctcaggaacaccatgctatacagcctaacaaatcgctcaggaattactttgaggacaaaaataatcatctttaccctcttgagacccgacccgacaacgcattaaagcctgtctggagaccacacg

SEQ ID NO: 68208 - DNA, 1257 bp, Heterodera glycines
atgatcaaaaacccgaactacaagggcgtttggtcggctcgtctcattgacaatccggcctattttgaggcggacccctaccgacaactcgagccaatcggagctgtcggcattgagctttggaccatgaggttggtgggcatttgggatcatgtaaattcgacttttctcgtgcttttagcgaacaaattgtgttcgataacattgcgttggccaacgacgtggacagtgtccgcgagttggccacacagactttcgacctgaaacatgagcaggagaagctgttcctgagcagcacgggcgacgcgaagagtgcccttcgttcggcaatggacactttggaggaaaagccatggtcagaagcgggggtttaattaattgtaagataatgggatggaattagggcttattttctgtgggtgtgggattttttaaagtttggctttcgaattgcgagttaaaatatcgaccaaatttaatcctttcctccaggctttgggttgttgtcattttcgctgtgctggtcccaatcattctgatttgcatcttctgcttcaatcgaaaagcgcgtccaatgcatcgtaagaaaactgacgaaccaaccgaagatgacgagaaggtgatgacgttttttttgtaaaaattaaggtttttgacatcggaatgaaatgagaaatttcatcaatttccctttgttttcagtttgagggccttgaccaaggcgaggaagaagagggggaggaagagaggccaaccgaccttcgtccaggtaaagaatgagttactgtgctattcgaaagtatcggactctgacagtttttatcctctatggtacaatagttcatttgaatgcatttattttcattaggtataaattagagttatttcgtaaagtaattaattcaaaattgtctggtattttgagtttgatcaaacctcaaatataatcacagatgaggccaaaaatgatgtgcacgcttcggcttcccagtcgtcctcgtcgaagaagagtgagtcgccgtcccggtcgcgcagtccctcccgccgtgttcgtaaggcgtctcagcctgccacggacgatgtgcagcagcaggaggcggatgctgtcgaagttgatgatgaccatgaggagggcccgtcctcgtccatgcctaaggcctcgccgcagcagccggtccgtcgtagtcgccctcgtcgtcaggactgatgtggagaagggaacagggaatgaatgatgagcatttttgaagcaataaa

SEQ ID NO: 68209 - DNA, 2412 bp, Heterodera glycines
tgtggcaagaaaaatgtgccttttgttcaactgtttcccgccagcttcttttttccttaccacggttgcccgtttgacaaagtgcgactccatgttgaaggcgatgttttccgggcgaatggaggtaccgtggaatcatttttcgtcctaacgatgcaaattgtttttcgaaattgcctattttaaacatcgtccttgttcaattcaaccccaatttgatgtgatcgtccgtttttcaggttcgtcgtgacacggacggctatgtgctgatcgaccgatgtggcaaacattttgggctcattttgaactttttgcgcgaggggacgctgccgttgcccgactgtcggacggaagtgctcgaaattctcattgaggccaaatactatctgctgcaggtgttgtcgtacgaaagctaaaaaatgctcaagattaaaaaataaatttaaacaaaatattaaaaaaaataaaattttttgatgaaaaatctttactggtcggacagagtcagattgaatcttggaaaacgctacaatttaatggactttgatcctttttggtcataaaatactcgacatttctttcatagtttatttttaattagaatgaagcatttagttgcaaaattagcaccaaaaaataaattaaaacttttttgcatttaaacaacaggaattggtggacctttgctattcgtcccttaaagcccttcatcatgaccaactcgtgtccacgcttggcatttgccgtgtccctgtagttgtgtccaaaaagcaagttgaacaaattgtgcagagttgtgctggaaaggtgatgaattgaatgaaaaagccacatttatttatgcaatgcaacttttagccggtcatcgagctgttgatgaaccgtcaaaacaacaaatactcctacaatgcgtcgtccgacgagaacttcttgcgcaaccaggaactgttcgacaaactgatccttcgcttcaacaaccgcgtgctcttcatcaaaagtcactccattcacaatgccaagaagaacttatgttatcaaatccaaaaacttatttgcagatattggcattggcagttcggagatttgccaatggaccttctatgggaagacaaatcgtaaaatcgaagttggtgtcaaagacggggcacccttttgggaagcttcttttttgtgtgggtgggtgttccgggtttccgacttttgttcgtacttacgaatttgaactatttttttcttccttatattttttgttcagatttgttgcacttcgattgtgtacgccacggataaaaagcaaacaaaagtatgatactgtcttattgaggcactgagttaacgataaaaaaatattcaaaatctttattttttatttgatattccatcgctttgtgttcaggtggagtttccggaagcgcgtatttatgaggaagcactgaacgtactgctgacctttgatcagggcgaactgtctggtggtgccggagtttgcacgcgttgccggggtcaaaatgacgacaactttttggtcgaatttcccgccgagctcggccaaactggcgcaaaaacgctgtcctcggcccaacaacaggaaaacacagcacttggcggtggtgcagttggttcggtgatgtgcaacggacgaattgactggcgattggtgcccgccctcccccgcccatcttttatttatattttgttgaatttaaggaacaattggcactcaacagcaccctttttgcgacatcatccaccaccaccaacagtggcacttccgccgatgaaggggcatattctggccaccaaatgaggagaaaaggagcggcggcttccatggcaataggcgagacgacttcgacggcggcgagcagtgcaactgtgacgactactggaggcggtggtggtccttcctcaactgtgccgatgagccacaggggaacggcgggacaacggaaaatgagcgaatgcgacgattgacggaagaaaacccaaagacattccaattgcaattttttccaattattgtgtagctcccctttccctaagcttggcagtaactttattgtacagaaactccaaaaaagagaaaacaaaattttacttggactaattaaagaaaaaagggggtggggacaacacaatgacatgacggagtgacgatgaaagagttgcaacaacaacaatcagatgaatcgatcgtaaaagaatttattgcttcaaaaatgctcatcattcattccctgttcccttctccacatcagtcctgacgacgagggcgactacgacggaccggctgctgcggcgaggccttaggcatggacgaggacgggccctcctcatggtcatcatcaacttcgacagcatccgcctcctgctgctgcacatcgtccgtggcaggctgagacgccttacgaa

SEQ ID NO: 68210 - DNA, 537 bp, Heterodera glycines
ataattgtttgagtaccccaaacggacacttgaaaaaatcgatttttttgttttcggggcagtccccccgaaccgatgcgcccagatttatggggaggccgaatccttcgggaatagcttccctatagcctgtactttaattctgctttggatttttgctccccataattgtttgagtaccccaaacggacacttgaaaaaatcgatttttttgttttcggggcagtccccccgaaccgatgcgcccagatttatggggagaccgaatccttcgggaatagcttccctatagcctgtactttaattctgcgttggatttttgctccccataattgtttgagtaccccaaaggacacttgaaaaaatcgattttttgttttcggggcattccccccgaaccgatgcgcccagatttatggggagaccgaatccctcgggaatagcttccctatagcctgtactttaattctgcgttggatttttgctccccataattgtttgagtaccccaaaggacacttgaaaaaatcgatttttt

SEQ ID NO: 68211 - DNA, 468 bp, Heterodera glycines
atgacaattacgatttacacagttagattaacaaaagaaatcataagttctatatgctcatcagcagaaaatctgcaaagccaaagctacaaccaaatcgatttaatcaatgactcatctgatatactgtatgatcatgtcaagaacaaatgtcgaagaagtctcacccattctactataagcgcatcatcatgcagaagacgaacaagacgtgatgacggtgggccatgcatgttccccttctgattcaagcagtgaataggtcacgttttacgcgctccaaaaattcccggtttttcagcccgaaaaggtcccggtcccgctcaactctaattttaagttgtaaacgcgttcaaagtttgaccttataatttcttaacggagcatataagtaggtagatttttttaaaaagtggcttttttatgattttgggaaattgtttcaaaagctcttttaaatttgtttga

SEQ ID NO: 68212 - DNA, 1589 bp, Heterodera glycines
aaaacaatttattataaaatgattttttccataaaaatttgaaaaaatatttcttcagctttgtgcccattttgaattggctgccggcataccaatggcgtcaatgtttgctggccgatgccatcggcggtttgaccgttggcattatgcacgtgccgcagggtaattaattaattaaaaataataatttaaattaattaaaataaatttaaaggcattgcctatgcattgctcgcccgtcttcaccccgtggtcggtctttacacctcctttttccccccgttgttctacatgcttttcggcacttctcggcacaattcgattggtaaaattatttgtacattataatttaatttttaaaattaatttcgaattttctattttttaatttaatttttcgtattaattttcggctcttttgccgtcgtttctctgatggccggcatggcggtggaacagttctcttccaatgacactttcttcagtggcggtgacgaggacaaagtgaaaaataaatattttgaaattattttaattaataataattgtattatttaatgaattatttcacaataaaaaaatatttcaaaagatttaattttatttattaaagaaatttcagataaaattgaagtttaacatttttttatttcctgttttccctggccgattttttctaaggaatttattatattttcatataaaatttaaataaaatttctttttccattttttcaattttaattaaaattttaatttttttttaattttccgttcgatttgcgcctctccgacgcgtcgtcgcccgtccgcgtcgcctccaccctcgcgttcaccgtgggccttctccaattgctgatgggccttctccgactggaactgatcaccacttacttttctgatcaggtgcggccgatcacttctcttttttttgtcaaagttttaaattaatataattgtttattatttcattaataaaaaacaatttaagcaaaaataacatattatctttgaccaggagattttcaacacattgttttcaatcattttatcccccgcccctctccgaaatgcaaaattggattttttagtaaaaatcgacagttgaaaatttgtatcagtttgaactttttttcttaaactttaccaataattcttattaattttcggccattttttaaaacgctttacaattaattttgttattttaaatattttaaccttttctttttttttaattattttttggcataattactggctaattaattgcaactacatcttccaattacatttaattggtcccattttctctctaattggtcccatgttctcgctaattgtcaggtggtcgccggcttcaccaccggtgcctcaatgcacgtgttcgtggcccagctcagcgatttgtttggcctccgatccgtcggtttgccgcatcgcaacggagccgggtaccttttcatggggaaaagtttaaaaaaaacaaatttaaatataaaaacattttttatttatttaaatttttaaaaatttttttcagaagctttacgacaccgccagcaacattcacagggcaaatgccatca

SEQ ID NO: 68213 - DNA, 3066 bp, Heterodera glycines
  unsure (1)..(3066): unsure at all n locations
aagcgatttccatctcagtctgcccaccccaattttgcccaatttgtcgctggtcccttcgctgctgcccgacgcacttggcatttccgcggttgttatcgctgtgcacatttcgttggccaaaatgttcgccaaaaagatggcctaccgagtggacgcgggacaggtgaaagagaatttagagaagaaaaactcaaaaaacaccccaaaaaatgtctccgagtgatcggatcaaattttgatcaaaattcatcgaccacaaaacatttgatcgattgtcaggaaatcaatagcgagtaaattttcgattgcctggccataaaatcgaaaatcaagttatttttggcaaatttatcgcaaaacctcttgtaaattttgaaatttgtgccaattaaaatttattggcggtgcctttaggaactgtacgcgttgggcttctgcgcatcgctttcctccttcttcccggtgtacccggtgtcctgctcactgggccgaacgctggtcaatgtggaggccggcaccaaaacgcaggcaaaaaattgggggaaataaaattaatataaattaattaaatggaggaaaagagtttaaaaaagtaattaaaacaatttttaattatttaaatatgttgtgccgtgtgttcagttctcaacattgttctcttctctgctgttgggtgcaattattctgtacattggccaatggcttcggacattgccaatggtttggccaacatttttcaatttaatttaaatttaaatattttattaatttaagtcattatacattattcattatttttaaatctttacttatttaaacatttcgatcatctaaactattcgattaataaaaattaatttaattttaaatattaattttgattaaattttaattattaatttttttattaattcattttctttttttccgccagtgcgttctgtccgccgttattatcgtcgcgctgaagggaatgttcaaaaaaatcaccgacctcaaaacgctgtggccattgtccaaaattgattttgtatgacgccactttaattaactaattaattgatttcaaattttaaatgccctcaggccatttggttggtcagcttttgtgccaccgtttgttgggatgtcaccgaaggcctcgcagtttccatcatttttgcgctgatgacaaccggtaataaatattccaatgtttgtgcccccccattttggcatttttgtaaatttatattttcattttttatttttttatttcgttagttttccgtacccaatggccccgctggcatttcttggccaatttgtcgggcaccaacgattttcgcgactcagaacgctaccagacagtctgcacatatccggtgtgagaaataaaacattttcaaaaatagtgattttttatttccattttaattaataataaaataattttaattcatttttagggcatttgcatttttcgcttcgattcgccgcttctcttcacaaatgtggacaattttaaagtgcattttgaataccaataaaataattaaaagaatattaaaaacatatttcttaattattttgcttatttattttaatttcaaagataaagctgattaatttaattttatttctcaatttttttcctataattaaaaattcatatattttccttccccaaggaatccattcacaaggcattccatcgttggaacaatgggcgccgtcggcacggtaaaacggatacattttcaaatcaaaaatgccataaattttaatgatacaaaaattgcataaatttaattaacttcattccatttcaaaatttaatattataattaaaatattaaacaatgattacatttttattaggaaatttcaaatgtcaattatttaattatccctaataagaattattattatttcattcttttttaattaatttgattataaactcatctcaattattgaattaaatcatttttatttattttttgtttttattaaatttaaatgccattaagagccaaaaatgaacgcggtcgaaaacggcactttgtcgctgggcatacaaattgggcattacgcggaacagcaacaaaagcttgcccagcaccagcagcattcattgccctctccgccaccgccgacaattgttgtgcacggcacgggcgacgacgccgaagggcaaaaatgggaggacgacgacgacggcacaattccgaccaaaatgggggttggcgatggtcccaaaatgccaattggtacaacgacgaagacagcattggcaccgcaagacaacaaaaatgngcacgacgaaaaggaagcggaagatgcagcagaaccttgaggatgaggaaggcaccaaaaggctcgacgatgccgagggcaataatgacaacgacaattaattggatgcacacaatggcattggcattgccggtgggcaaattaaattaaatggaccaaagcgaatgattaattagcaaattgatgaatcagactaattagtcagttggactaaatcagactaaaatattttattttaaaaatgttttaagttttcggagaaggcgtcgtccattttcttccgccatttcatcatcgactgttccggcttcaccttcgtcgactgtatgggcgtaaatgcactcaaagaggtgcatattttgttctattacaattacactaatggaccctaattaagctaattagggtaattattaaaaaagtgattaatagccgaaaaaacaacaacagattttcaccgaaatgcgagagcaaagagttcttgtgtattttgcagcagcgaaaggtgggcggcatttacttattaaaataaattgtcgaaacaaaatgccaaagtaattcagccccggtgcgcgacctgttcgaaaagtgcggctttttccgctacgtgcaaaagcacaacttttacccgacaattcgcgacgcggtggcaatcgcgcggaagcggcgaaatgcgtaagcggaaaaataaataaataattaaaatgtgaaataatggtaaaggagggagagggaagcttaaaaataatgaaacattccactaat

SEQ ID NO: 68214 - DNA, 196 bp, Heterodera glycines
atgccacgcggcagtccgcgtccaccagtgcgtgcagcgtcgcaacaacagcagcaacaaacgccgtacgcgaaggcaccggacggcactgaaagcagcgcaacggtgacgctgctgacgcgtccggagcgcctactgcagcaggagatgaatcgactgaagcgccaaaactcggacccgtcaccggcgttgaagc

SEQ ID NO: 68215 - DNA, 950 bp, Heterodera glycines
  unsure (1)..(950): unsure at all n locations
atgtatgcggatcctgccggatcccgcacaaaaatcaaatttgcggatcctgttgcaggattggaattaattttttgccggaccggatccggccggattaatcctgcattttccaaaaaatgcaggattgcggacttgggatcctgcctgcaaaatcctgcgcaggatccggtcctgctccgggctctagtgttaatgttatatatattttttttaaataatacaaaatgctcaaattctaagattttaacccaaaaagaaacattttacgatgatttttttttccaacattttttcccgtaagtgctttcaatttttgaatttggcaccaatcaacaaaaaaatcgatagaataacaaaagatacactgaccaacaatttcattatgttatagccaattgaatcatcaaaatttaaaacatttaaatttgatgtcatttttccattatttttttattagtattctcaaaattttccaattttttcggaaaatttttcagtctttaatgaaaaaagacccgcatttttaaaaaataatctagggttaactatttaacttacgttggttgacttctagcagttcgaggaaaaaatatgattttgatggttttcgtatttttcgcaaatcaaaaattttgatcaaaaaatattaattatttttaaattgcttaaaaacccagctaatgttctaccactaaaaatggattgatgaaattaaataaaattaatattatttcaaattttaatcattcacgaacaaagaaaaacaaggattaacaaaaaggcatttacatattattgaacaaaaataagtgctaacaaaaatggctgaaggcggtgccattttnggaattttggctacaaagttttttataaaaatttttttacagattttatagaaaattatgaaaaagaaccataaagaaaaaaacctaaaggcggtaaaccaa

SEQ ID NO: 68216 - DNA, 817 bp, Heterodera glycines
atgtctgccgctgcttccggctcattgttcaactcaagtgcttcatgggttgcttcatgcatgtccgatggacgatatttgcttaatgatccgatttgtatgaacaaatgcgtcaaaattgaatataatggaaaaaggtaagatttgtgtggcttatcgtcccagggctttctcgataatccgccaaaattgaggatttttctaaaatgaatgaaatttcccagactaatcgggagaatagaacgttatcgaattattctattaatttattttcgaaattttaaaaagtttatagatatataccgtattctttggcctctgcccgacttggttacatttttttcatttctaagtttgactgtgccaatcaacaatcaatgcccggaatgtgaagtgaaccatgtggatttgtcaaccgaagcatttttatggttggaaccagccggtggaacggttggagtggcgactggtaataacaattttaatatttcaattgcaatattcatttcaggtgccaccattacatatttggaatgtgcctaaagaaattgggttagaggaagaaatgcacaggcgatggaacagatgaaaaccgagcaaaaaatattaaaatgttaatactccttaaatttatttaaatgatacggaatattgggctgcactttaagttttatgcatataaatttgctaattcggttcagctttttcagttttgtttgaatttgtacattttgtttcacgtttataaagattaaggcaattaaattgacaagaccaagctcttttcgtaaccaattccaaaaaagtttaaccagta

SEQ ID NO: 68217 - DNA, 990 bp, Heterodera glycines
gcaatcagtgatctgatcaatgacaaatcgactgagaagagtccaaactatcatgcggaaaatgaacatttgaccaaagacaaagaggcaatctcgcaagaaattcgacggtatccgtagacataaatttataaaccttgcaattaaagcgaaaatttcgcaaattttatgatcttgcacaaaattataatttttcggatggattttctactgatttccactaaaaactttcaatcataatagttttattttcccgtttccggtcaccctatcgggatcggtacctgggatttttaaataccgggatctggaccaaacgataagaaaatggcgttgccgaaggagactgaaaataggtaaataaattgatggtttcaacaaatgtgcaaccgtcgcttacaaaatggcaaattcaaaataatttgcaacgaaacaatgttttagactgtattcaccatttttttatttcctatttttgttttttcttgataaggcacccatttggggacggaatttatctttttgtgtattttactgttgggttgtccctgtccgatcgtccacctctgcggattgtcctcaatgtggattgtccacttccaattttcagtcacgcctgaacctactgaagaccgggaattcctagcttggtcccggtcacgtgctacccaattcttccctcttaattctccgcctactaaatttatactaaagttttgttcttttggaattgcatatttttcaggattgatagtcaaattatggtgtataagcgagcctctttgtcactgaacgaggcgtgtgagctgcaagtggacagcgacaaattggagctttccaacccgctctattcaggcgctttcatccatttcatcagcgagggtgccgctttttgcacaaaaatcaaaatgggcaaaagtgtcaattatccggacctgaacgctaacaaagggtacaactttttcgaggaactcattgaggtaccgagat

SEQ ID NO: 68218 - DNA, 757 bp, Heterodera glycines
atgtgctgtgccccgccaattgggttattagaaaagcggcacacattgtaccatgaacagagttctaaattcggagggatgaatccatcagtgaaggtaaatccgcttttgcctaaaaccgcctccccgaaatttgcggataatcccgacagttgaggactcgagatttgaattaagtgataatattttttgtcaccaaataaaagtgcctttttaatgggcgggatgattaattaattacggacactcaaaaagtcccaaatgcccctccctgttgatggatcacataaagcaactttatacttattccataagatttaatgcttttgtttattaaaaaatattttttattcctttttattacttttcaaaaacggaatagaataagcagttgaataaaattgatgaagaacaaataatgttagcagaacattcattgcgacaaattttgcaaactgaaaaattgcaaaacctatgaaataataataaaataatattaagcctaattaattattattttatatgagaaaaaaaagaaaaatgaatcaaaatcgatgaaaacattcatatgattttagcattttttaattaatatttccgggcatcgcattttgacaaaatgaaaatttaaaaagaaatggtaaatattgttgttaataaattaaaatacatttaatattaattaatgcctaaattacagaaaaaactggtattaaatattaattaatacataattataagttcaaatattattaaa

SEQ ID NO: 68219 - DNA, 256 bp, Heterodera glycines
atgcccccaaaacgtaaaaatatctatttggagagctacgaaaaagaattccggcacataaagaagagtcgaaaaggcgaagaatttgccctttgtgtcgtttgcaacgatgatattaacctcctttccattgggaaagctgccatttctcatcatcaaaaaactggaaaacaccagaaagcggcaaaagcagcaaaccgatcaattccattgcaggaatttttgccaaatacttcggctccatcaactgaagacc

SEQ ID NO: 68220 - DNA, 598 bp, Heterodera glycines
atgaaatacaatcgaaattgtccccatggcattctttttttgatggtattctgtgcctttttcactgtcattagtgcaaccattgccaaggaacatggtgacaaagttggcactgtgaattatatccgccttcaaacacaccattatgtcacacatccaaacaatggcaattctttgtcgccctcatacaccggctgggggtacgaaacgccaaaagacaaggaagcacgactgaaaaattatcgaaaattaatgggtaaggtttaaaaaacttccactaggatttggaaaaaaatcatgaaaacaaaaaaacggaaagaaaataagccttcttatctgtatctaatacaaaccgacgaaagaatgagtccgcctattcataacaaaagtgataaatcacctgttatttttttaaagctgtaagtgggggccctattgtttacacaaattttttgtaagacgatgtctgattgtgaaaagttgctcggtgttttcagggtcgctgacaacgaatctgaaaccaattttgactattgcctaattccgaatttgattttttcttaaatttgggttcagaattcagattggtgaaaataaa

SEQ ID NO: 68221 - DNA, 1374 bp, Heterodera glycines
atgaaattcaataaaacttttaacattttcggcatcatttcaatggcattttcgacaatttttacgcgcactaatgcaggcaacattatcagcgacattatgaaaaaagccgattctggcaacgaggaagaaaatgccaatgcttcaacagtgccaccaaaattgacatcatcaaacccatcagcatcgtcatcatatgtgacgggttgggaatacgaaacgaagaaagacaaagcggcaagacaaaaatactacaaaaaactattgggtaaaaatgaaaaataacaaataattttattctttcaaagaaagttagttaagggtcggtcgattcttaggggtgtatttttcgtttttttcattcattttgttaataaatttgggcaaatgcattttaatcgcccagccagcttcttccacacaatattcagatcaaaaaaatctctttttttataaaatttatttaatttccacggtaaaatcaatttagaaaaatgtttagaatataaactaaaactaatttttttttggtaaaacaatgacgaatcataaagatatttagcagtaaaataatttagcagcaaaaaattacagcttatttatccgctaatttttatacacctttttagaggggaaaccaataatggaaatgccaaaattaaccaagccatacaaaatgctttctcttcccagcccatgcaaaatgccgcccattccgaaactatccaaaattccatctatgcccgacctatgcaactcaatggcacataaaatgctatgcaaacaaacgcattcaaatttgaatgaagaatatgacactgacaatgacagtacaaaagttgaactgtcacacaaaagtgatgaaagtgaaagtgacagtgaaaatgatttgtctattaaaacttggatggaaaatgagggcggaaatggcggcaaatcaaagggaatgtggactgaaaatgccaatggagatggcacttcgggggaaattgaggtcgacgatggcagcatttttggtggcataccatcggcctcctcttcacacattgatctgatcaataggtcagcccaaattgagcaaagaagattgatgcgtcgattaagcaaaaaggagcacaatttttcattgtatgtatctgctgcttacaaatttattttaaaatttaaatatttattgaaaaatggtttcatgaattttggtttttaaattgggtttcagtaaacaaccattttttcgcaaatacagggtcctacgtgacctttttttaactcaaaagctttcccaacccgttaatatatttttatatgtatacataaaatattttttaaatatatttaattattcagcaaaattgaagaaatcgattaaataaa

SEQ ID NO: 68222 - DNA, 183 bp, Heterodera glycines
atgacaaatatttggagaaatctaggacgaaatcataaaacagtcaatgcctcaatcttggcacagttttacagcagcggatgggtggacgtgttggccacggatattcgcttggtcttctccatgggcatgctccactcgggcgaacatcccagctgcgcatgttcagctgcacagcgaaca

SEQ ID NO: 68223 - DNA, 674 bp, Heterodera glycines
tcgggaatagtcagcgagtagcctgtattgtagttcttcgttgcatgaatgctccccataattgtttgagtaccccaaacggacacttgaaaaaatcgatttttttgttttcggggcagtccccccgaaccgatgcgcccagatttatggggagaccgaatcattcgggaatagcttccctatagcctgtactttaattctgcgttggatttttgctccccataattgtttgagtaccccaaacggacacttgaaaaaatcgatttttttgttttcggggcagtccccccgaaccgatgcgcccagatttatcgatttttttgtttcataaatatttttttcagaaagtgctctaaagcgcaccaaattttatttacaacttaattttagcactctgatgctttagtatcaaaaaggaagatggagaaaaaaattttttaaaaatttttccttatattttggttatatcgttttgcttttggtggggtgcttggaacagtggaatcatgcgcacccgtccgatctggcaagttaagcaacgattgctgactagccaaaaggttcggtgccgtgatgaaaacgaaccagcactgcttaccccgcggcacccggcacggtcccccccgaaggaatggatttaattaaaattctcctccttccggggatttttttcc

SEQ ID NO: 68224 - DNA, 510 bp, Heterodera glycines
atgaaacgtcacataaagcaaagcaccaaaatagaagtaagcttataaaaattacacgccaatgtacaaaagtatttggatctatgtgtgatcgcaatattagtttaacattaaaaaatctttgttttatattttatatacttgccatcaactttccagcaacttgcggacttaagtttcggtttttttcataaaagaaccaattggattcaacttcaacaaaagatcagggatcatacagatgcattcatcaagaaattagttaaacgaggtgcttaaagaatttcagcgttggtaacatttctttgctgcttatgaaaaggcgccaccaaatggcattagagggaaagaccttaaattacccaaaatcaatttttatagaattttaaaccaattagtactttaaagataatttttattgaaattaagccaaaaatttttttaaatttagtttcagtgacgaatgatagggagcccctggaaatgtcgtccccctttgtagtaaataaa

SEQ ID NO: 68225 - DNA, 816 bp, Heterodera glycines
tttaatccattccttcgggggaccggtaccgggtaccgcggggtaagcagtgctggttcgtttcatcacggcgccgaaccttttggctagtcagcaatcgtggcttaacttgccagatcggacgggtgcgcatgattccactgttccaagccccccaccaaaagcaaaacgatataaccaaaatataaggaaaaattttttaaaaaattttttctccatcttcctttttgatactaaagcatcagagtgctaaaattaagttgtaaataaaatttggtgcgctttagagcactttctgaaaaaaatatttatgaaacaaaaaaatcgattttttcaagtgtccgtttggggtactcaaacatttatggggagcaaaaatccaacgcagaattaaagtacaggctatagggaagctattcccgaaggattcggtctccccataaatctgggcgcatcggttcggggggactgccccgaaaacaaaaaaatcgattttttcaagtgtccgtttggggtactcaaacaattatggggagcaaaaatccaacgcagaattaaagtacaggctatagggaagctattccggaaggattcggtctccccataaatctgggcgcatcggttcggggggactgccccgaaaacaaaaaaatcgattttttcaagtgtccgtttggggtactcaaacaattatggggagcaaaaatccaacgcagaattaaagtacaggctatagggaagctattcccgaaggattcggtctccccataaatctgggcgcatcggttcggggggactgccccgaaaacaaaaaaa

SEQ ID NO: 68226 - DNA, 770 bp, Heterodera glycines
atgagttattttgctgctacaatttcttcgataatcatttcttattctttattactacccatttcaagtggaaatccattgcctgtgagttttgtatttatgtgccaaatattattaaaatttaattctgtttaataaaattagtttttttcgggatttttaaacatcatataaatatttgatgtttttaattaaaagcaaaacttttttttatatattttatagcaaaatgaagacaaagcattcatcgaatttgtgaaaggcgagacattttttgatgaaatatatgaaacttataagaaagaaaaagaattggtcaatttttatccgaaaccgttgacaaatttccacaattttgatttgaaaaagcatttgatccaaaagtaccaagctcatcttggctttctgtttgcgctgcgaaatcattggaaatgtgaaaaaattggaaaagaatttgaccagaatgagcaaaaagaatgccacagatttcgacaatatgtggacattttatatgaatacttattccagacggcacagaagaaaaccgtagtgaagccggagtttcttgtcaatgaaaaggccgaaagtttaattggcgtgctgaaggcattaaaccaaatttcaactttttatttcgatgacgaattcaatgctaaatttgggaaaaatttagcaaaatttttcaaaatggatccatgtgagccgaaactgcagaatgagaaggaattggacgatttgaagaaagcgattgaagacaaacggcacgaaaa

SEQ ID NO: 68227 - DNA, 582 bp, Heterodera glycines
atgcagtgcatttcctctaccgtactcaacctggaagacgacagtagcggtcccatcgattcatcgtctccaactaacgttgctgattgtgcaactctgtcgaacactgctggtgatcaatctgatcaacagcagcagcaacaaattcaaccgaatgatgttgaaaatgatgcgacagcgttggcagctgaacagctccaaatccatgcacaacaatttgaagcggtccaagcattgaaacgtgaagcgaatgaacgagtgcaacagcttgagctagagctgaccacagtccgccaatcggtgcacaaatttgttgcttccatcattggccgtccaattccggcaccgttcaaccaaattttgttgtcctccaccaccaaagctgatgatggtatcgcttgtgccgatgtcgacgatttggacagtgtggagcgattgatagaggagctgttgcataattatggcacattgaccgaagttcgggcagaacttgagcgccaagtggaacagttgaacgagcaaattgagcgtgcggaagcggaccatgctgtgaaggaacacaaagtaggagcgaaaaattga

SEQ ID NO: 68228 - DNA, 115 bp, Heterodera glycines
agccccagggcattttcccggaattgcgcaaacaggaatgccaatgagtacgcgccgctgttggcacgggtcgatggcgctgtacaaacggtctgttgaaacatggcaacggcaa

SEQ ID NO: 68229 - DNA, 351 bp, Heterodera glycines; identical to SEQ ID NO: 53910

SEQ ID NO: 68230 - DNA, 688 bp, Heterodera glycines
  unsure (1)..(688): unsure at all n locations
atgggatgnaatgacatgaaagtggacaattatgaggagttagaaacatgnaaggaagatgatgaaatggatgagagatagcatttactcttaaaccgatctttgttttttgttttgatattgatgataattaaaaacaaattagtttgtattatgttgcacagaatacacttatttatccaaatttttaaatctccattttgtcatttcatttttggatttagccttgccgtttcaatgttaacattctggtaatcattaatcaacctcttaattttaaagtggttaaatttagtcccacctgtggcacaattctgactctctcagacgggaaggattactgcaagcagttcagctgtggttcttgctcctatacattgccaatttccaagaaggttttggcttcatttattccttttatatatatttttagctgacaagcagaatatacagcaaaaagaaagaagatgagaagataattgggggcaccgaaatgtgggaaaacgcccaagtgacaaatggtctgttaggctcaaagctgagaaaatgcgcatttgtgtgttcagagcgatgcccaagttgttctcatgacaaggcctacttccagcagatacagacgaggagtgccgacgaaccgatgaccattttttatcgatgtgccaattgtggacaccgatggaaggagtaa

SEQ ID NO: 68231 - DNA, 680 bp, Heterodera glycines
atgtctctttcttcgatccaccatatgtcacgtctgaaactttggatgaccccagtgcgcgacaatcactttgggttggatgacctcaaaattttcaacagcgatggttactctgaaaatgccccattttctcgtgagagcagccgaaactcttccgcggatggcagcatcgcatgcaacgcggatgctgctgatgcggtcattaacatgaaaattggcgtctggaaaccattggtccaattttttgaattttaatatgcggaatcttaggcataattttgaacgtccgggaatttatttttctgattaacaattttgtatttagcctcagaaaacttgtggcttctgctacatacaatacaagcgtcactgtcagcgactcggagttgcatttccgcgtgtcaccgataagggcttctgggtcggacacaccaccaaagacgagcacggggatgtcatgtaggagagaccgtattggaatttgattctatggtttaatacagtaacgctttatcattcaacattttgtttttcaaattttctttatttttcgtttgttttgcagctgtccggagttgcgcaagctgaagtgtccgttgtgttacgcttctggaaagaaggcgcacacattgaaattctgtccattgaacagcatcaaagggaggcgtgacgaagcataa

SEQ ID NO: 68232 - DNA, 2675 bp, Heterodera glycines
atgacgcaccaaattatgacctactcgaaacggtgtgaattcggtcccaaaaatgagcattaattttaatcatttgacttttaacaacagaaggacattccggcggaattctattgggacgaaacgtggaaaaagttggaagaaacggaattggtcatgcagatgttcatccttccgaactacacatcagaacagtggagttttaaatgctttctgtaaaaactctgtttttcagacaccgcattaaattttcggatcccgagccgctctttcgcattctttacacggaaattcttatgggacgaattgaaatcactgaccttctgacagtggattattggattaaacagaccatttttgattttgtgcaaaggaattgcgccaatccaacggtggaaaagaaaatatgcaatgacttaaatggcgttttacgtaagttttttgactagaaagcttcaacaaatatatgcagttttgctcaattttttttaaagatagtcatgtcttttagggcgtcgtataatgctgcataagtcgcgttcaatcgaagtcgaaattcgtacgtcttccccagtgcgacatcgactgcacttctcctcaatatcgccctaattgataagtgacgccttggatcaactgattcaataataatatcactatttgactgactaataatttttgatagtaatttgggtcgtttttaacctttttgtatttttaaataaaataaccaaacagagccaatcataaagccccatgagggaattccgtaaagttaagctttatgcctttttccaaacattctgctaattgtaagttaaacattttcggtagattttcggatttatcacaaaggggtccttttcgggaaaatttattcgtgtagtttacaaggctaaaaacgactggcatcccttacatatattatatttcttaataatttgttttcattttacaattattgttatcaatttatttgaattgacgaaaaaaataatgatttgattgatcatttgcttttcgtgtcacatatttcatttgtatatttttatattacattttacaatatctgttgttatattcttatttttactttccaaaggtaacaaaactaattttgccgatgcaatccgattcggtccaattggtcgaatgttcttcgtcgtctcacaatcggccgccttcgcctgctgacattcgatggcccctttctgcaaaatcggctcagatgttcaaatggcattttctgttcctgtttttgactttctctgttgttttactctgctgggttttgtatgtcaatgcttgcgacgattttatgttccaatttaaaaatgattcgtcggagcattcttcaggtgaacacatcaattttgattatgcattgtttatttagggtatttatcgtttttataccaccctttcaccctcttcttttcctttaaattatgaacattttttttatctcagatgattatgccttcccgacaaaaccggtcattctgatgtggacttcggtgtttggacaaaattcgctcaaattaggcccggactgcccattctttgaccagtgctttttcacctatcaacgtcgcgcattggcccacgcggacgccgtcctctatcacgttccggacatcaaatggacttcagacgaacgcccggactttccggaacaaatgttgctgccggccaatgtgaggaacgtttttctcacccaagagaatccgagtgcgctaagagattatcaccacgcggaaaagctcagaaaggcaggtaaattacccggtttttaaaatcgtgttcattatttctcgcttcttttcaagctcccaactttttccattggacattgacttatttgcgttcctccgattttgtgatgccttacggtggcttttggatttctcccgaggaaacacttcgtctcggcttttcggtttttcattaaaaaaaattattttacaattcgaattatatttgcagcaaaaaattgttttactaaagtaaataaaattcatttgatgtcaaaactacacttttgcatttcggtttttcgcccgtccgtctgcccactgatcgcactaccattttgaaggacaaaattgtgaggggcgccgtttggtttgtgtccaattgtcgcaccgagtcaaaccgtgaattggcggtggacgcactttccaagtgacttaatcatactgattttttttattgtctatagtattcaaattcggaaaggatttgctatatttatacggttttctgaattgttctaggaaattcgaatttccttaatcatttttgggccgattccgcttattttgttgtacctaaatccaagccaaatttaggcatatgctcataaacattggcggcaaatgtgccaaaactgagcagggcaaaaaactttgtccacgcaatgcgacttcctgtgaccacgtgttttccgcccattactttttcatcgctgccgaaaatgacatttgcaagtgcgcaattggacaaacaaaaactaaaaacagaaaaattaaatttataaaaatttccagggattatgtgactgaaaagtattgggaccgttaccgtcttccctccgtgccgatgtatgagaaaacacatttatgaagggtttggtgagaattgcagacaaattatgccagatcagattataaaaa

SEQ ID NO: 68233 - DNA, 386 bp, Heterodera glycines
cttatttccagaaaatctcgcatgaattctcatttttaaattttttatagatttttaaatatttggatatttttttggcttaccaaaacttcatcgaacctggctctttctattctcattcaaatcgctccaaattttttttacagcttaactaggcccaattaagcttatttccagaaaatctcgcatgaattctcatttttaaattttttatagatttttaaatgtttggattttttttggcttaccaaaacttcatcgaacctggttctttctattctctttcaaatcgccccaaattttttttacagcttaactaggcccaattaagcttatttccagaaaatctcgcatgaattctcatttttaaattttttatagatttt

SEQ ID NO: 68234 - DNA, 361 bp, Heterodera glycines
tgtaaaaaaatttggggcgatttgaaagagaatagaaagaaccaggttcgatgaagttttggtaagccaaaaaaaatccaaatatttaaaaatctataaaaaatttaaaaatgagaattcatgcgagattttctggaaataagcttaatagggcctagttaagctgtaaaaaaaatttggggcgatttgaaagagaatagaaagaaccaggttcgatgaagttttgttaagccaaaaaaaatccaaacatttaaaaatctataaaaaatttaaaaatgagaattcatgcgagattttctggaaataagcttaattgggcctagttaagctgtaaaaaaaatttggggcgatttgaaagaga

SEQ ID NO: 68235 - DNA, 501 bp, Heterodera glycines
atgggaaaagtcgaaaagcttttgaaggggagggatggactcgtgcgcacggcacgagtacacacaaaaggaaaaactctggttcgagcgattaaccttttgtaccctctagaaattaacacttctgcggaggacgaagtcagtcaaattcaagtgactgccattatggattcaccaagtgctgtgatggaaggcggggacccgcaaactgtcacaacggagtcaagtctgcctccagggacagtgatgcaggattcacaaatcgtcacgacagaatcgagtttgtctcctatcagaggaaggaatgagcggcaagctgtgaaagagagaagaattcgaaagagacagccaacggaggaagtcagaggcaaaggcaaaccgaagaagaatgggccatatgatccactgcgaccgggcaactacagaattcctcgccgaaacccgttctttccgtcacaagtagcgtacaatgagcaaacacgcacgtatcgacgacgacgg

SEQ ID NO: 68236 - DNA, 713 bp, Heterodera glycines
atggcatctgcgatgacgtttactgagttagcaatcaaataatttggcaaaattatcttttggtttttcaggaccaaaaccgcagcatctccagcatctgcatccaaggggtcaaacaacaagcccaagcagcaaaagaactcggcatctgcttcaatgacatctgtgatgaagcggactcagttagcaagcaaatactttggcaattatcttgtggtttttcaggaccacaaccgcagcatctccagcgccggtatctggtacgatggcatctgcgatgacgtttactgagttagcaatcaaataatttggcaaaattatcttttggtttttcaggaccaaaaccgcagcatctccagcatctgcatccaaggggtcaaacaacaagcccaagcagcaaaagaactcggcatctgcttcaatgacatctgtgatgaagcggactcagttagcaagcaaatactttggcaattatcttgtggtttttcaggaccacaaccgcagcatctccagcgccggtatctgccaggactcagttagcaatcaaataatttggcaaaattatcttttggtttttcaggaccaaaaccgcagcatctccagcatctgcatccaaggggtcaaacaacaagcccaagcagcaaaagaattcggcctcggcatctgcttcaatgacatctgtgatgacgctgactcagttagcaatcaaataa

SEQ ID NO: 68237 - DNA, 760 bp, Heterodera glycines
agtggcagatgcattatcgagagttgcaattaaatgggaacaaatagaaggaaaaagcagagaggacattccttttgtattgaccgttgatgaagaaataggtttacatcgaaaaactatagaaaaagagacatttgaagatagtatactgtcccgagtactgtcacagataaaggcaagctgggtggaaccgatcgatgatgatgagttgatgccgtactttagagagagagataaattatacctcgatgggaaaataattcggaaaaagttgggaagacaaataataattccacagaaaatgagaaaaagggttttaaaaatgattcatcgggcacattttggcattgtgagatgcaaagcccgaaccagagacttagtgtggtggcctaattggtctgaggaagttgaaaattatgtgaaagagtgtcacatttgtcaacgaaatgcgtcaaatgaaccgcgtgtggaccccgaatataaatggcctgaggccaaatatccattcgaacgggtccacgcagacctcgcgggtccaatttgggggacgaattttcttataattgttgacgcatattctaagtatccatttgtgtgtcaaatgaactcaactcattcacctgccatcgtaaattatttacgagaagtattcgcattttttggatcaccacaatgtttggtaactgacaacggcccccaatttgtctcaagtgagacggagcaattttagaaaatgagggggtgcggcacttaaaacccc

SEQ ID NO: 68238 - DNA, 571 bp, Heterodera glycines
atgttcgagcaaagcgcgcgctcaattggcgcccgactgatcaccgagctgacgcaacgcggacgcggctttgcgctgtcccatggcagcaacagtgccaaaatggaggacgaagaacagttggacatcaacatggacaacgaggacgacgacgatgacgtggaggaggaagaggaggcacaaaacggtgtacagtatgacggacaacagcaaagtgacgatgaggaagacggtggcagtacggtaataaatcaagggcatctaattgactcaatagtaaagctgctagagaaccaaactttctcgagaccgagttcggcatttaatccatgacataaaaagaaataaaactagaaaaatttttaattatttttttttttgctaaatcgtacccattttaaattttttcagggcccggaaaaatttttcggcctcagctaccgaggccaaacggaccgttcgaagcagcgcaaaaagcaaaaatcgggcaagaaaggcacttttggctgctcattgcaggccggccatttccgtgccatgcgccgtcatgcgcaacagcaaacaacaaatg

SEQ ID NO: 68239 - DNA, 305 bp, Heterodera glycines
  unsure (1)..(305): unsure at all n locations
gtaacttattgtctgattttccgacaacaacagctggggccaaccaatggtcttcaccacaatcagtgccaccacaacaacaacaaacgcattcaccaacaacacgaacaacacaccctcaagcaacaacatcgtcattatcatcatcatcatcatcatcatcatcagaattaagccaagaaaatgattttacagaggccatgactgatgaggagtttcaattaatgttggcattcaaggaaagcttgacaaatgtggaanatggagatttgcatttgttgagcggacttagctcanaaaaacga

SEQ ID NO: 68240 - DNA, 762 bp, Heterodera glycines
atggcatttgtcagccgccgatttgacgctttggtggacgaacattttaaaacacgcaaatggacattgggctttctgaaaattgaatgccgtaaaattggagataacggcacaaccgaaatggaaattgtaaatctgcagcagcagaaaaaaatgccaatgccgcaaaaaccgttgccaaacaaaatcatcgctttcagaatgattattctcgagtaatatttgatggtagtaaaattggtgccggaacaagctcaatattttttatccggctcatagttctttttcaaaaattttccaatcggttcttaaagataagtcagaaatatctgtctattacgaaactttcagttgtttcgaccaaaatgtcatcgactttcttcaaaattttcgtcaaatttttgcctctggcacaaatttatgcattggttactatgatatcaaagatgacattgtggaatttgtcgtccgcaacatttggccaatgctcaaagacaatatccgcgggattcattaccacattgaaaacaaacagtcccatcagttacaacaatttgtcacttccattcttaacgagtgccaaactcttcgctttctattcctatcggcactttccctgtttttcgaccgatgaaagtgccaaaacttcgattgaacaagctctggtcagttggcttttgacgccacgttctgatggaattccaaagttgattgtgtgcagtcaaattcgagaacaccaatggaggccgaaaattataagca

SEQ ID NO: 68241 - DNA, 816 bp, Heterodera glycines
taattaaatccattccttcgggggaccgtgccgggtgccgcggggtaagcagtgctggttcgtttcatcacggcaccgaaccttttggctagtcagcaatcgttgcttaacttgccagatcggacgggtgcgcatgattccactgttccaagcaccccaccaaaagcaaaacgatataaccaaaatataaggaaaaattttttaaaaaattttttctccatcttcctttttgatactaaagcatcagagtgctaaaattaagttgtaaataaaatttggtgcgctttagagcactttctgaaaaaaatatttatgaaacaaaaaaatcgattttttcaagtgtccgtttggggtactcaaacaattatggggagcaaaaatccaacgcagaattaaagtacaggctatagggaagctattcccgaaggattcggtctccccataaatctgggcgcatcggttcggggggactgccccgaaaacaaaaaaatcgattttttcaagtgtccgtttggggtactcaaacaattatggggagcaaaaatccaacgcagaattaaagtacaggctatagggaagctattccggaaggattcggtctccccataaatctgggcgcatcggttcggggggactgccccgaaaacaaaaaaatcgattttttcaagtgtccgtttggggtactcaaacaattatggggagcaaaaatccaacgcagaattaaagtacaggctatagggaagctattccggaaggattcggtctccccataaatctgggcgcatcggctcggggggactgccccgaaacaaaaaa

SEQ ID NO: 68242 - DNA, 2044 bp, Heterodera glycines
tgtttttctgaggccgccgtttgtcagtcgcactctttggctatcgtcggtcgcctcttgcaaaagaagggtttgctcacgccgatggattggtccgtcttagacgttctgaatgaacaaattgcggctgtggaaacggtggacaatgtgacggaaaattcgacggttgatacttttcccaatcacgcgaactttggcattgtctgtccatttgctctccaattcgtcataatattcctcatttagtccgattttttgcgcagatttaaagaattgactcagaatttaatgttggccaagcgatacgaagccattgggcccatttgtcggttgatcattccattgttcgaacgcaacgccgactttaaggtagtgactgttgaagaactaacaaatgtccatttggttgacctccccattttcagtcgcttatcgcaattcactcgcaaatccaacaggcgtaccaatgtgtggaccaaataacgacgaatgtcatcagaaggcagcaattagccagctatttcagggtctctttccacggccgggctcaatttgggtaaccgtttccgtacttctaggttttgtcaccccttgaaatttcatataaccaaagacgacttttgggttgattaatagaaaaaaacaattcgagaggatgacatgccaaaccctagaagtattacctttccctctggtccatcatcctttcccctccatttcatccccagcgatgaccatggctctgaatggatttaccgtgagcgtccgttgacttcgttggccgaggcatgtgatcgtttgcgcgagtcggtgcagtcttcgctggccaattgccgtgttcagctgctgaacaccgccaacttcccgccctcccctcccccgcctcgtccgtcctcttcaaagtgttcttcgtcctcctccttctcttccgtttcgtctctgcttccgcttcctgtcgatgatccgtccgtcgcttacattggcgtggcccacgtggagccatgcaaaacggtgcggacgacgcattcttcggagaaagccaattgcgggggcaaattgggcggaagagcgatgtcgcgcagtcgttgcgaattgacatcaatgaatggcagcacttttgggttggcggaggaggacggcgaaggggcggcgatggaagtggcgcccgacccgaccaactattggctgcacaccaacgtacgaacttttgtgctaaacgaacgccaagcggactcaacggtgtcggacaacgcgcccgaattggcacggatgacattgcgacggacgacgctgaccggtgtgccgcggggcggcagagcggcttttaagtcgtcggtggttcttttgcagttgaaaatcccttcccgggcacacgccgtcggcaacgcgttgtgcacatggagcaaacggtgctcagtcccttggaattggcctgcgagagcattcttcaaaaggcggaccaaatccgacacattttgtcctccgccggactccgtcggtgtcgccaccatcacaaccaccaccgactgatcaactgcgggtacgacaaaagtgtgctgaagcgggtggatgtgaagcagttgcagctgtttctgcagggggccgtcatgccgacggtcagcggacgctgcccttttcattggcattgccttccctctatttgttaaggttaacgccggtcttttggcctacgcggagacattcaccgcaccggcgcagcagaaacggtacggcaacaaaggactgctccgcctttggaatgcactgaagtaacaaataaaaggataagcgaacttttattgtccatcgcttttccctttgggactttgctggacgaattggacgaggcgatgcgcgtcaacgaagcgacgatgggcaacgagcggcgcgagtatcagcaaatgctgcgcaacgcgtacgaaaacactgtggagaaactgaacagggcattcgcacgcggcagagagtcgccggcgatggacaaacggcggagtatgagcatcgacagggcgaagcggagcagcaagcagggcatgctgatcag

SEQ ID NO: 68243 - DNA, 874 bp, Heterodera glycines
atgaattacagaattccacaattgggaactcctggttatcatttactgaaaaatattgaagttgtaaaaaattcaaaaattagtaattttttctaagaaatcatattaagcgaatgttgctaatgaaattttttgcacaatttttgatatttaatcaaaaaatttttgatttaagggacgtgttttccaaaaatttccaataattttccatgtgcaaaaaaatatgtaaatccataaaaatccgggccctcccggacttttcgatagctaaggacatttcgaagcaaaggactttatttatttattccaaaaaacgtttattaaataccgttttaaaaacggagcataattaggccattttgctggcaataatcacttaagagactttttgtgacatttttaatattgtagcatatttatttgttaattgttttgtcgaaatttttaagttttcatttcttaaatcatgttaatattgtaaatttggaattgctaatttgccccgaattcactatttattttcataatcacaattaatttaagaaaaaattgtcaaaaaaatcaaaaatcattaaatttccagcctagcgtttgtcatcatttgtagtaatcaagcatattaataaaaaattgcctaattcattcatcaaatatcagaaaaattaattttttggcaatttattctttttacatagctaatttccacaatttaaaaaaataagctttgatttaaataaagataaattcaaaaacgatttttataaaatttaattttagagaaatagtgaaggaaatgaaactgagcctattattcctttcaatcggttttttgactgctcaaattaatcaaattgaatttgaaatgaaaaatgaa

SEQ ID NO: 68244 - DNA, 854 bp, Heterodera glycines
atgtctgaaaattatttgaaaatggttgccatcggccaaattcgaatccaaaagccatgggccaaattcgaatccaaaagccatgggccaaattcgaatccaaaagccatgggccaaattcgaatccaaaagccatgggccaaattcgaatccaaaagccatgggccaaattcgaatccaaaagccatgggccaaattcgaatccaaaagccatgggccaaattcgaatccaaaagccatgggccaaattcgaatccaaaagccatgggccaaattcgaatccaaaagccatgggccaaattcgaatccaaaagccatgggccaaattcgaatcaaaaagccatgggccaaattcgaatccaaaagccatgggccaaattcgaatccaaaagccatgggccaaattcgaatccaaaagccatgggccaaattcgaatccaaaagctgtgcaaatcgattgccatttaaatcaaatgtttaaatacttttgttaaatttgatgggattccctcgacagatgttaaccaaattgcaaattaatggatttttagttgaaaaaaatttgaatgagattttttaaataagatttcgactcaaaattttggagtaaaattacaaatgcgaaaattggctaaattcttctttcgttattaagtagggctaactatttcaagcatggaacggaatcaaagcacttacttagaatccaagtgcagaaaaatgcaattgatgggatggaggaatggggggattcggggatgacaccactcggggaaggggaacttatccccgaaaaatgccaaaatgtcagccaatggagcaaacctaacatattttaaaattgcaataataaa

SEQ ID NO: 68245 - DNA, 824 bp, Heterodera glycines
atgaatagcaacgggagatttaaaatgtttgtgggaggagagcggccgatcagggcaatgcttggatcacatggcggcatgggcgaatttgacacgccgataagcggcaatccagaaaacttgtacatttgggtgcgagaggaaaaggtcatgtcttgaggggcaaaattttgcaaaatttcttttttaaattcgtttaattaaatttaaatacttgaaaatagctaaatatgacaaagcaaatcattatagaagaaaaaatacaaaacaaagttaaaaatatattaattttgatgaatatattttggacacttatttttggcatagttttccaattagaaagtcacattaattattatcgagaaaatacacaaaaaactaaattttctgaaaatttttatgtcctttgagtaaaacaaatattataattaatttagtcaggaaaaattcaaagatttgtgataaaaaatccaaattttttcaaaaattatgcacttgattttcgagatggcgaagtgattgagtacgatcgtgtaaatgctgtgcttgaaaaactccaacaaaagtcattatatttcaatgtcaaagacatgttggagaaacaaattgaaacaaattttaaaaaattgaagaacaatttatttgatgaaatggacgaaattattgacgaaaaattcagcaaattttccaatgggctaaggaaatctgagcaaaatttgagaaaattgaagagttacgtcattgacgaaattcgagaaaaacttgcgcatgaaatttccatttttaagcggaaaaaatggacttttcgattggcggacggttaa

SEQ ID NO: 68246 - DNA, 946 bp, Heterodera glycines
  unsure (1)..(946): unsure at all n locations
attcgagtganccgtcattagcggattatgacgattcacataaaaaagagatacttcaaattgagggtaatatattaaaaattttcaaataaaattataatgtaaaagaataattttcaataaaatatttaaaaaaaattagaagctttaacacctatttcatctgtccaagccgaagcaggagcaattgaaaagggtaaatttgattttctattaagtgaaacgtagaaatcgtctggacctggacccagtaatccgtttcaggttttgcacgaaaacaaggacttattgaacaacattttagaatttattatttcagattgaccaatgttttatttcagttatctgaaaaagattaaatagattaaaaacacattattattcaagtagataaaaacaggtgttcctaacaattaattgattttttcaaacagttttatccaagtcatggcctgagaacaaggccatgacaagcctgggtttttcctggacctagatttttgaccaggaaatccaggcttttttcaaaaataggactctagtgaaaagaattgcaatttttattttgtagtgctcgaaaccggtgtggttcaagggaaacgactttttggaagttttgtctcgacactaatgggccaagtgaataaagcagtttttgctgaaccaagtaaaaaggctgctgatgaatatcaagcttctacatcaagcagtaataaaaaaaacctaacaaattgaaaatcatgcttaaggctgctaattaatttgatttaaaaaacaaagatatgtcttaaaaccgccgaaatatagacataaaattacaaaatatgggcacatttaaaaaaaacatttttttactgaatacttattcaagtttaaaaattctgatttaactgatcgtggccattccaacagaaattttaaacaaataccaaaatatataaataaa

SEQ ID NO: 68247 - DNA, 198 bp, Heterodera glycines
  unsure (1)..(198): unsure at all n locations
atggaagttgatgaagccgaatatgaagccaaaaaacgcgagcaccgttcctttgttgaaaatgatggtttttcatttgttttgcattataatgtagcttttataattaaggtagtcattattacgatgaggaggatgattctgaggacgaatttgaagaggaggagcgttctanaaaattgaaaaaaagcaaaaagg

SEQ ID NO: 68248 - DNA, 123 bp, Heterodera glycines
atggaacttcagagggaatacggacagaatgctttcgatatagccaaagtcgacgcggagtcattgcccgaagtttcaatggcacaaaaagtctgtgccgttccgtctgtcatcattttcaag

SEQ ID NO: 68249 - DNA, 1701 bp, Heterodera glycines
atgaccgaccaaatggtcgaatttgggcatttaaagccgacaaaggaaatggccaacggtcagcagaacgaatgtccggcaaccctcaacctgaccgacttcacccgaaggtcaattccgtgggatgaacagcgaaaatgccattaatcggagacattttaaattaattaaataattaacccgttgcttaagtgccccgctttgcaaaatttggctaattggccttcaattaaacgatgcaattaaaaatataaacgaagaaaatgaagaaaaaataaacgaaaaattgagcaaagaattggacgcaaaaatatacaaagaatatgaaagtgaagtgttgaagggattgttccaacatgtcaggctaaaatcaacatttgttaccagtgaacaattggcacaatggtaaaatttaaaaataaaatttaaatttataaattcactttaggaatattgacaaacaataaataatggagaaacgagaacaaactgttgattacacagcatttacgattaaatacacattttttaattatttataaaatttaagaataaaatgtcattcgttgattaatgaattacaaagaatttataattacataaaatacagtatcttttttaaaatcttcagatatattacagctaatacttgagctcggtgcgggacggatcacgcacgggattttgcgggatcccagtccgcaatcccgcatttttaggaaaatgcggatttgcaggttttatacctgcgggatcccgtcccgcaaaatttggagttccaatgccgcagcgggatccgcatttcatttttgaaatttcaaagacagaatgccaaatatttttgaatatttataaataaaatcaataaaataaagccatttttttctcaagtttcatctaggatttgtaaaaaatttcccggcagcgcctatcggcacagccggaccccctgttcaaaaaagtttttgataaagcgcgccgcaaaaatgacttcaagaccagggatgaagcgaaattccgatttttgcatttcgtaattgccgtattttcaattttgcaaatttgaatttcgaattttggcaccgtaaaatgtggaatatacatacgccgccttgagtttatattaactagtgacgagaattcaacgcgagattttgcgggatcccagtccgcaatcccgcattttttggaaaatgcgggattacggggttaatcccgcggggtccctgccgcaaaaaattttgcattcaaatcccgcagcgggatccgcaaatttgaaatttccagtctctactatcgaccctatttgctcgataatatcacctcaattgatccattaatattcctctcggggaagcttcaccttctctgtcccaaggccaaaatgttgactttgaaatcgctccctgacttatcctcttttaaaattaacaagcagatgtacaaggataaaattgaatcttacaaaacataatcccttatacaaaatggtgaatttttgtgttatttttttaagttcatatttaaatattaatctattattaattcattggcacctatttatataattaattaaattattttattattccttgagttttttcgcatcaaatttactttaaattcttcatatcaatatgaaattatatatattactcaacaattaaaaggaaatttaattcatttttatcggccaataaa

SEQ ID NO: 68250 - DNA, 2346 bp, Heterodera glycines
atgctgaacattggagcatttatcaacgaaattcagcacagaattgaaacaattgagaagataagcaaaagcaatggcatggaaaattcacaacgaaaaattggaggggaaaaggaaaatttaaaaaaattaatggaaaagcacaaaaatgaaaacggaggaattggcactttggagataaaacaaaaattgtgtggaattttgaagcgaattgccacagaaaaagacacaaattgtggtgatgagagtacggtaggcgatggaggaaggagtacggtggaaaaggaaattaaactggtacaaatgcaattgcacaagaacaaaatggccaaaacgatcattggagagggcgagaatgggacagacatttggccaaaaatgacaaaaagtgacattttgaacgacctttttgagacaaagcagacaaaagcaaactcaatggacagatttaatgaacacattgaaaattggagaaatttattgagacaacaaaatttaggtggaaaataattaattaataaataaattattacattaattaaccgagtaattaaaaaaaacattataataattaaccgaataattttattttatttttttataattttgaaggctaaaagcatatataaataacaaatagtttaaaaattaaattatttagacaaaaaattatctgaacgtttttccggtcgctctgaaacggagagagaaaatttagaaaatttatgtgaaatgcacgagaatttgcaacagatttattttcagggcagagaatacaaaacaaaggacgaaatggttaattaataaattaaatgatattagcctatctacttagggtgtaacataagttttgtcccccgaaaattttaaatcggccattctgagtccgaatatggccttagatttgacctgtgggttctcactgtacctgtacagctccaacttcatgcatggagttgaagcatatacaagctcatgtagcaaagatagataaaatttaaggccatattgagattctactgctctaaattatgcagaaaaacttcgtttttgttattccaggtttacgtttttaacgttaaaaaactcgagtaaaattagtgggccaatttccaattttggcatggtcatggaaaaaaagctgaagcaattgacagagaatagaaaaggtttaatgaccgagccgagatgaaattaagaatagacaacaaaagatacaataaaaaaagagtatttaaatatatgaaaaaataagggagttatgaatttttaaaaacgaaaaaattttctatttaattcagcttcatcaaattttggaggaaaatgggtacggaagaaaagaaacgccgaaagatttgatggagggaataaaaaggaccatttcgaaatgggtaatttaattttctaatttaaaaattaatttttgtatgattttctaaatcattaaaatcaaaaaaatcgactttcgaatgcgaaaatattcagtcaaatggcgatgctcgactgattgtgacgggttcgcatttgttggacacccaaacgcccggctcggacatcgacacaatttgcataatgccacaaaaattgtcgtatttggaggagaaaaacaaattctttggcaattacatttttaattgtcatcatttaaatgacggaaatttggaggagagaaaatgcggcgacgattctttgttctgccaattttgcaaagtgaactaataatattgactaataatagcatatttaaatttgcttcgggattactcaattccatcactttttttaaaatgaatcggagttttgctttttcctatttaaaattggccaattaaattttccctttgaatttgtccgatcaccggccaaatttgatcatctttataatttgtttaaattttcagaacccaaaattggatgaaatcaccaaaatttcgagtgcctacattcaaatgctgcaactgaaaatgtccggcgtcaaattcgacatttcgctggtgctgatccccggcatggaatatttgccggacgaaccattggacggcgacgacatcgaatggatgatggaagtgttggccaatcagcagaggccgcagcgggcgatgctccgaacactttccagtagaactcgagattttgaaaaaaggctggacttggacatggattccatggtggatctggacctggatttcatggataaaaatccaggaaaaatccaggctcctcgagacctggatccaggcctggacctggaatttttgaaactcattttaaaaatcaaaaacaaatgtttgaaaaaatcaattaattgcttaggaacatctaaaaatattaatttataataataaa

SEQ ID NO: 68251 - DNA, 909 bp, Heterodera glycines
atggcgctttttggcaaaaaaaaggtgattgtgaacattgacaaataaatgccagtgaaatttaaaaaaaagaattccttaatttttgtataaaaaccagcatataataatgaattctatttatgattaattaggactgggaattttatatgtaagaaaaatcgcaaaatatgatgatttaagaattatctacaaaatatttaaaaaattttatgagttttttaaacaaaaaaaaaaaccttagaaaaaggtgaataagaaaaaatgccgtaaaatactgttaggcctagataatgtttaaagcattttaaaaatcttcttttttaaaaaattaaatttaaggggtacattttcaaaaaaaatttaaccttttcttaagaaatttatgtcttctaaaaaaatctcaaaatatgttaaaataaaaagtgatgcgaaaaattgcaaaattttggtatagccctaaattttccttatttaagccgcttttagcgatttatgaaacgcaacagcacggcaataatatgtgccaattccgacccaaatttctgatcatcatttacgctttgcttgctctgctgagcaattttggcattgtttggccatttgaagtgattgtcgaagacggcacggaaccggagacagccgacatggaaaagacgttggcattgagcaaaacgcactttttgcgccatatggtggaggattggcattgtgagagcggacaaatgaaaacgccaaaagaactgggctatgaaaaaatgccagaaagatttggttgagttctgtaaaatttggcaaatgatggcattggcatcccatggctacgtgtcgggttcgcggcgcatgacgccacgttttcgtgtggcacaaggccggctccaattaagctcagcaatggaaataattaaa

SEQ ID NO: 68252 - DNA, 104 bp, Heterodera glycines
tgtccgtttggggtactcaaacaattatgggagcaaaaatccaacgcagaattaaagtacaggctatagggaagctattcccgaaggattcggtctccccataa

SEQ ID NO: 68253 - DNA, 652 bp, Heterodera glycines
gttttcggggcagtccccccgaaccgatgcgcccagatttaggggagaccgaatccttcgggaatagcttccctatagcctgtactttaattctgcgttggatttttgctccccataattgtttgagtaccccaaacggacacttgaaaaaatcgatttttttgttttcggggcagtccccccgaaccgatgcgcccagatttatggggagaccgaatccttcgggaatagcttccctatagcctgtactttaattctgcgttggatttttgctccccataattgtttgagtaccccaaacggacacttgaaaaaatcgatttttttgttttcggggcagtccccccgaagcgatgcgcccagatttatggggagaccgaatccttcgggaatagcttccctatagcctgtactttaattctgcgttggatttttgctcccataattgtttgagtaccccaaacggacacttgaaaaaatagatttttttgttttcggggcagtccccccgaagcgatgcgccagatttatggggagaccgaatccttcgggaatagcttccctatagcctgtactttaattctgcgttgaatttttgctccccataattgtttgagtaccccaaacggatacttgaaaaaatcgatttttt

SEQ ID NO: 68254 - DNA, 375 bp, Heterodera glycines
atgcacacgttttgcgctcgagctatttatcatcgggcttgtcaatccaaagcgaaacaacaaagatgctgttttgaacgaataaagggcataggttattttgaagaagtgtcaaagaacatgcagcaataagcctgcaaaatctaataagtggaaaatacatgagtatagaatttattttcagaaagtgtccacagacttttggaaaaatatatttgcaatttatcaacaattttgagaagtgagttagaaatgataaacttcacgattcaaaccaattttcgttgctctaattaaccgcgataaaaacattcgaatcaattaaatagcttctgagataataaggtttatcataaaatttcatttaaaaataaa

SEQ ID NO: 68255 - DNA, 195 bp, Heterodera glycines
ggaattttaaagaaaataaaaagcgaaaattaatggccaccaccagcggagaaggaggtaatgaaatagaaattaattaatgagaggagcaacatttgttaagcttgccaagaatgcccgtgtagtgcttaccgcgaggatggcattgcggacgaaaatgaccgatgctggtactgttggtgtggccatctgttg

SEQ ID NO: 68256 - DNA, 647 bp, Heterodera glycines
atgaatgccaatttgaagcaacagaatcatttggtgggtgtaatttgaaaaaaatattttgtaaaaaaatctatttgtgcgtattccttaataatttatatattttaacaacgttttgctgtgttgctttttaatacagttctttatgttcatttaatttgaatgcttttcataagctaaggtctttctgtggtgagttctttctcattgcaaagggaaaaaagagttaaaattaattaaattattatttataaatttaaataattttagtggatggaaggaggaaaaaagtaaggaagaggcagagagcaaaagaagaagcaaattgcgaagtaacagtgcatttttcacctgaaaatgctaaaaaagagcaaaatagattagtcacagcatttggtattgaagggacaagtcgcattgaagaacatttaaaggaattaacaatcgaaaattttgcatatgaaaaagtatgcaaaagacaaaaagaggaaagagaaagcggaaatgatgagaacgaagaacaaatagcaatgaaggagaccaaaatggccaaaaaagagtcggaagaaaagggcaaaaaggagttaaagcagaaaggaaagaaaacccctaaagaggaggaagacgaagataaaacaaagaaggag

SEQ ID NO: 68257 - DNA, 325 bp, Heterodera glycines
  unsure (1)..(325): unsure at all n locations
atgagacaaaagctccaggcaacaataatgcgaatcaatcacttaaacgacatgtttgnntaattccagaattactaggttgtctcataattacttggaccctntaaaaattagcataacatcgattcgcacacttttcttcaggtccgtagccaggcccccgccccctcccgaaataaaaaacaaaaatttttccaggattcaacatgacagaatgaaggaaaaaagaaaaaccggattgtcattcttgggcttggttgtcggtgttgagggcattggacaaaacatgcaaatgaaaagaattaaataaatttgtgggattaaa

SEQ ID NO: 68258 - DNA, 3895 bp, Heterodera glycines
ttgaagaaagagcaattttatgcattaatgctcttaacggcacttaaatcgccgagcgacgcagcactgaggcagcgaatattggctaaattggcaacggatggacaaaacgtgtcgtatgatggaattgtggaagacctcatcaacttccaatcaacgattgcggaggctcgagcgatcgaaacgccgatcagctctcgaaatgttaatgctgtccaccaaaagggcaagcaaaacttcctgccgaagaacaaattccccaaaagtggacaaaccacaacggcgaacaaaagttgttggcgatgcggagaatgtgaccatcagccattcgactgccgattcaagttgacaaaatgtcacaaatgtggtaccacgggtcacttgggaaagaaatgtgaaagtgttcaggcatggaggaaagaaaaaagtgcaaagatgttgggaaacaagaaaatcggacatttgaggatcggtatgacctcctgttcgatcaatgcactttcgttgatgcagatcaaaattctgctgaaccaacaaattgtcaaattctacctcgacacgggatcggacatcgacgtgattgatgagctgacttatgccgacattggcgagccaccgatcgaaccgtgcaatgaaattgggaagacctttgatggaaaagaagtcccattcattggaaaaggaattggcatattcaaattcggcgagattaaagtgaagcgaccatttttcgtggcaaaagctggctcacttaatctgctgagttgccaaaccatggacaaatttggtttgttggatgaaatgaagcagaagatcagcaacgttgcagtaaatttgtgcaaagccggccgcccaaagggagagaaaattattcccagtggcaccaaacaaatggccggaacagaagccaaaattgaggcattgaaaagggcctttcccgaagtcgtaaaagacgggttaggactctgcacaaaagagaaggcacatctgtcattaaaaaaagacgccacacccatttttcgaaaggcacgtcctgtgccatacaactctttagaagttgtcgaaaaagaattgggccgattggaaaagatggacgtcatcagcaaagtcgatcatctgaactgggcagcgccgattctaattgtgaaaaaggccgacggctcagcgcgactttgcatcgactattcgacaggtctaaatgatgcgcttctcgactgccagcacccgctcccagttccagaggatatttttgccaccctgaatggaggtaaaattttttcccaaatcgatctgagggatgcgtatttgcaaatcgaattggacgaagaatccaaagatttgtgcggattggccacacataaagggaattaccgaatggaacggttgcccttcggtgtaaagtcggcaccaagcatattccaatcaattatggataaaatgctggccggactaaattttgccgccaccgcttacttggacgacataatcgttgtcagcggaacaactgaacaacacgtccgacatttggaagaagtgttttctcgaatccaaacttacggattccgagtcaaattggaaaaatcaaccttcttccgagaccaaatcaaatatttgggtcaaataatcgatcggaatggacgccgaccggacccagaaaaattcatgcaattgtccaaatgccgtctccaaaagacatttcgtcacttcgatcattcctcggcatggtaaaccattaccaacagtttgtcaaggacatgcgcttcactcggaagcctttggacgacatgctgaaggatgagatcgaatggaagtggacggaaaaacgacaaaaagcattccaaaaattgaaggaagtgcttacatcgaaactgctactcacccattatgatcctaaattggacataattgtggcagccgatgcgtcggaactcggaattggggccgtcatctcccacaaattcctgaacggtcaaagtaaagcaattgcacatgcctcaaggtcgctcactccagcagagaaaaattactctcaaattgaaaaggagggcctggttcatggatgcatttaagtgcaaaagttccacaaaatgatctacggcagacacttcacattacaaactgatcacaaaccgctgatcagtatcttcggaagcaaaaaaggcatacggcagtgcagcgcaaatcggctgcttcgctggtcacttactttgctggcctacgacttcgacattgagtatgtcaataccaacgagtttggtcaagccgacgcactgtctcgcctgattgccaaagaatttgaatgtgatgatgaacgagtgatcgccgcgtgtaacatcgacgaggatcttggaactgttttggatatggcaaaacaaattctgccaatcaaatttgaaaatttggtctcagaatccaaaaaggataaaacaatgcaaattgttatgaaattcgtcagagacggttggcctgatgaacgcaaattgacgccacaatcagaagaaattgagcttttcggcagacgaaaagccgatctgacaattctgaaagactgtctgatgtatggcgaacgaattgtgatccctaaaaaattccggaccaaaattttgacactgctacacaagggccatcctggaattaaaaggatgaaacaactcgcccggcagtatgtcttctggccaaaattggatcaacaaatcgaagaatttgtcaaaaattgtgaccgtgtcaattggccgctaaggcaccgacgaaaacggatttgcactcatggccaaaatcaacgcggccatggcaacgaattcatgccgattatgcgggccctttcttcggaaaagaatttctgattgttgtggactcatattcgaagtacccggaggtattcgaaatggccactaaatcagcggccgcaacaatcgaacgactgcgttatctcttcacacgtcacggtataccggaaacattggtaaccgacaacggaacgcagttcgccgctagtgaattcgcaaaattcacagaagcaaatggaattgcacatctcttttccgctccgtacaacccaatgtccaatggacaagcggaacggttcgtggacacatttaaaagggcttttcgaaaaataaaaggggagggagtgccaaataaggaaatcatcaacactttcctggtcacttaccgcacgacaccgaacgattcgctgccggatgcaaaaacccctgccgaaatgctccttggccgaaaaccgcgcacaacgattgatctcctaatgccgcctcttccacagccaacggagagagacacaaaaatggagcaccatttcaatcgccggtttggcgctcgaccacagaaatttgtgtcaaataagccagtttgggctcgacaccgactctcgcagaattggagagctgggacaatttgtgaatgctcgggagtcatctacacggtaaaattccccgacggttcgacaaatcgctttcatgcgaatcaattgagaaaccgggaaaacaccgaaaatggccacgaaccattggcaattttaaatgaggcattccatctgccgatcaccgcaccgaacgttggaattgtagggcaggaccttgagccaaggcctgacccgatcaacgatgagcaccaggacgagatcgaaccggagcaggcccgtcgaagcccgacaccgcagcaacaacaagtgccgcgccggagtggacgaaaccgccgagcccctgatcggtactcgcccggatgagccaatcaaaaggggaggtgttcgggtgatgaccccgagagagacattaattaattttattatgtaattccctctctctgtctccccactatttctctcatttattgtgtctgcactccctttggaaaaggtcagacacatcatccctccccc

SEQ ID NO: 68259 - DNA, 371 bp, Heterodera glycines
aaaacaagtaaatgtctaacaacaaaaacactctgtcgcttcaaaactccgaaacttcctcgtccgcttcttcttcctccccccgtccaacgtcgccgaacggaattatgaacgaatacgtcaagtgagttgggcatgaataaaacaaacattgcccattccaacggatgaatgaatgcctttcagaagtgctactgagcggatgatccatctgagtgtgttggaggtcggccgcgtgggcaacgacggcgttggcattgtgcaactgcacaacactttcgacttcggcgcgtcggacgcgcggcggacctgcgcttgttgtgccgttctgtgtgcttccgggtgcgggtgcggccgtttgctggcggaag

SEQ ID NO: 68260 - DNA, 84 bp, Heterodera glycines
gttttttaatcagatttgaaaatgtctaaagaatcgacgaaaaccggtaaacaacaactgagcggagggaccgattttaaaatg

SEQ ID NO: 68261 - DNA, 624 bp, Heterodera glycines
agacagtcggatttccccgagttcgtgccagttctaaactggtcgttcagcgccaaccgaagtgcataccctgacgagcatacacgcagctgaagcgctccacaagcagctctcaccactagtccacgcaccatccccgaaagaacagcacgcagccacgggcaaaagccgcctgtttcacgcaacagcccggctgacccgacctttagagccaattcttttcccgaagttacgaatctaatttgccgacttcccttacctacattattctatcgactagaggctgttcaccttggagacctgctgcggatatcggtacgatcaggcaggagattcaaatagcttccctcgcattttcaagggccgtgtggagcgcacgagacaccacaggaaccgcggtgctttacgggcgcaacatccctatctcaggctgagccacttccaggcacgcacaccctaaaccagaaaagagaactctggctcggactccacacgacgtctgcgagttcatttgcgttaccgcgcaaaacagctcttgcgaaccgtcatttccctagcctggcgtgggaatgttaacccacttccctttcggcaaccggatggaccaactgcgcaagcacagaa

SEQ ID NO: 68262 - DNA, 1356 bp, Heterodera glycines; identical to SEQ ID NO: 39769
  unsure (1)..(1356): unsure at all n locations

SEQ ID NO: 68263 - DNA, 304 bp, Heterodera glycines; identical to SEQ ID NO: 51570

SEQ ID NO: 68264 - DNA, 304 bp, Heterodera glycines
aaaattccctcaaaaataaaaggtcaattgcgcaccgccctccctatcatgctcgagagcatttgtatgtgtataaaatttatcaaaaaaagagatagccatttttctgggataacctctaaatataaaaatcctctgtgaaataaaatggcgattgtgcacagccctccgtctcatacgcaagcgcttttgtgaggtataaaatttctcaaaaaaagagatagacatttttctgggatagagtataaatttaaaaattccctcaaaaataaaatgtctattgcgcaccgccctccctatcatg

SEQ ID NO: 68265 - DNA, 836 bp, Heterodera glycines
atgtttgtgaccgcatgtcttaccaacgtggtgcgttccgtgctccgtgtggtcggcttccatatgatttgttggggcccattttggtgggttcgcttaaacccgaaggaggggtggcattgtctttgattttgatttttgggaaacaataaattctggcgttctgtcagaaattattaacactttttggtgaaaattcttaaatttttttagaaaattttatgagttgtccatagaatccgaaagggagtggggggtgggggggggagaggggaggggtgaaaaacaatcaacaaggatttctattttgggaaatacattaaaccaatttttcagggtcttcgtcctcatcccaatcattgaatacttccaattgtctcaactgccgagggcattggactccgaattttcacgaaatattcgaatggtttcgaggcgagaattttttaaaatgaattttcaaaaaccatttaacacttttttaatttacagtttcttgccttatttgaacagtgctggcaattggatattttatgcagcaatgaacagagaaatgaggtgggaaaactgtgcacacccaaaaacacgaagaaatttaaaaaaatatataattaaaatcctttaaatttttgtttgagaaaaaatagcaacatgaaatgcaactaacaaaaagaccaacttattgatgaaattagtgatattccggaaaatcaagcaggggaataatttaaaaaaaattgcaccaattttacaataaacaaataattaattaaaatttaattatttttctattttgagaatttaagaagaagggggggggggttgtgctttaagaa

SEQ ID NO: 68266 - DNA, 977 bp, Heterodera glycines
atgaaagtaaaaaaaaggaataaaatattgactctgagttaaaaaataaaccataaataatatgataaattattttatataattaaaaaataaactttcaaaatttagtaaatgcgattattaattttcttatttagcatttcaaagtaatatttattaattttaattgggtgaatattaattaatgttttaagttctatgattttaaatgtatattatataagaatctaatagggttcgagccccgctcccgcccccgtccccggggcgggacaggtttttggggctcacccccgtcgctgccctcgtgactctgaccccagcatcccccgcccccgcgacctttttttaaaatatttgtggtttagtggttagtgttctggttttggggtactaccttattttcatctaaaaaagggaaatttctaaaaaatttggctaatttctaacaaaattcaaataaagtcttaaaaattttccgcttgcggcgcaaatcggcaccaccggacctctcccctcgcacattcaccaagttttttggaaatgtgccgcaaaaaatgttaaaaatctgctttagtgatcccgaatgcactgaaatttatgaaaaatataataatagaatacattttggatcgaataaaatgtaaaaatatttgaagcaattttgcaaaatgttcttatttttgaccctaaaatcttattttttggcctttattcttattttgaaaattttgaaatagaaaccctggatttagacaaaaacacccataaaaattgactattctggcataatttataatccttaaatttggtcatttttagacaatatctgtgcaattataccaaaaaagaattgaatcgaagcgatacatcgataaaggaatgtggagccaaacaacacatcattcataaaaattaattttttgtgagattttttggagctaattaaaaacaatccccgcccttaattgaaaata

SEQ ID NO: 68267 - DNA, 464 bp, Heterodera glycines
  unsure (1)..(464): unsure at all n locations
atgtttaatttctggcgttttggaaaaattaagcgaaatttttggaaaatgtgggtgatggaggtctgtaccaccccgggaccgtccctagtcagtttagaactgtttaaggactgtctctaacttaattttttttcaaagtcagttaaatttttcaagaattaaaaattttaaagatataaaaaattaaattcacaaatttcttttttaagtgataggaatttaaatttttgttttaatgaactttaattaaattttctttcttanatttaagatttattcaattgatgcgcaagaacgggtggatgatggcaaaatgcatttgatggaggtgaacagagagggcaatctgatcaagttgaaggtggacgacggaaaatgtaaaaacaataaatcaatttaattttttataaataattataaattttaattattatttgaatatttgtttaatctcaaataaa

SEQ ID NO: 68268 - DNA, 516 bp, Heterodera glycines
atgaaactgtgcatattattcttttcaattgcattatttttaattgctctaattgaaattggagcggaaaagaaaaaatttgagcaaaaaacatttgacgaaatatttggagaaaaatgggaagaaaaagaaaatgaacagaaaaagaaagaaattattcacaaattctacaaaattaaagaaaaaatcaaacaaaaaggaagaaaatattcaacaaaagaatggaataaaattgaacagaaaatagcgaaaaaattgggaacaaatcgaaccaaaatttataaatggatcaaagaattaaatcttccagaaataaaatcatataaatcaaaaacggatgaacaaaaaattgaaattgtgcaaaaatttatggcaatgaaaaatgagtacaaacaaaatggaagaaaatattcgagaaaagaatggaagagaaattatgccgaaatttgtcataaacttggagttggctaaggagtaattaggaaatggaagaaacaatttggaatgggtgaaaga

SEQ ID NO: 68269 - DNA, 72 bp, Heterodera glycines
atgccaaaattctggtttccaagtacaatcttggaaataaatacagttaaaatttccaagcataaaagccaa

SEQ ID NO: 68270 - DNA, 384 bp, Heterodera glycines
atgagacgtggtttgcagaaatttgtgttgttcgctttggcttcgtatatgctaatacagctgtggggctgctacataaatattgctgacaaagtaattttaaattaaatttttgattttttttattatttaattttttagagatttttctctgccggcgcctcattttttgcatttgatcaatcacacatttattctatgttgcattggcactgttcaagcaatggatgcacaaatggacaatgccgtttcaagattcactgggccatctgtaattaatttaaaaagaatttttcatgtaaatttaaacaagggctatcaagtgtcattctttcccaaattttatgaatgtgttgttaaatagctttaaaatgagctattaaa

SEQ ID NO: 68271 - DNA, 886 bp, Heterodera glycines
atgggcagcagcggtggcggcagcggaaggcgtcgctccaccgccggcagcggcggcgtccaccgctctatcgcttcgctgcttttcaagcctctgatcggtgccaagtcgtcccctcgcggcaatgatcatcacgagtcggaagttgccgctggcgtggcgagtggcggcataaccatggcctggtgcttccacccgcaccatggcaccggcgtcgtccatttgtgtgcgctgagttccgcgtttgtgcccgaattccaacttggcctggcccctggccaactgagcaccaggccaattgagtacgagcaaattaaggtcggctgatcagtctgtgttccgatcagttcagatttgtcaacgaaagcccctcgtcagcttctgctggacgtgttacagcacagcgaaatttgcagcacaacacaaagtgagcgaagcgaagtgttgggcaatttgcggtgattacaaccgaaaaaggaccgatcagattgattgatccacagctatttttgatcaattgattgataatttaattctttgcccaaacatcgatcggaaatggttgttcaggttcatcaaacgtgccgactatccggagaatcaggcacggcaacgacaccgaaccgaatcggcagcgactgcggcgatgcaatcggcaaatcgaaggactcatctcaacccggtcaacaatgggccgaaatatttgacaacggagcaggggagacagagaagggtttcatcctcacttatggacacagtgatcgaaatgcacaaatgcgctcctccatcaaacgcatttggaggaggtccaatcaatattcactgtgggaagcgatcgatcagcatccttatagcatggtttattgatcgggtcgatcaatgcgca

SEQ ID NO: 68272 - DNA, 2210 bp, Heterodera glycines
atgccattattttatttgccttgccattcagcgcccgatttggaggcggtcattcgctgggcgtgtttcataaaagtcgggcggccacttccgttgcccgacgatgtgccggacgcactgcgacagattttcgatggatgttggcaatggaaaaaggacgaaaggccgagcattgtggaggtgaaaacgcagctggacaaggcggaacagagcgtggacagaagctacaaatgggcaagcatttgaaagagaaaaaagaaaaagcgggcgaaagatttacaaaaaagcgggggatcgatcggaattcggggtatttttctgatcgttggtcattcattttctctgcaattgacaaagggaatgtcctccctccattaattaattctcctaaagcaattagccaattcctcccttgccaaatttgagttttatttcatcttttttaattaccttcacaaagcgccgcttcagaaattggcgacggaaacgcagcaaaaggaggcgccggctgaagtcgttttggaacagatgcagcagcagcagcagcaacagaagatgttcagcatttcggaacaaaaagtgcagttgtacttggaaagggtgtacaaaaaaagttacaaaaaaccgacaaaaatggagcgaattttggccgcgtggttccaaccgccggacccaaagcggcaaaagcgaacggcgaagttggaaaagcgaagcattggcacgccaagcggtgggagggggagagggcagtgccaacttcaaaccgttttttttaccttttaagggtttcggcacattgtgtcggcacaggtcgagcgagcggataattccggggaccaaccgacggtcaaactttgtgagttgattttttcttaatggttatggccattagttttgccgtttgtccctccgtttctctttttttgtcactttcatctctctatacagcataccttttcgttcctccgtctctcttttcgtcattttgtccctcttcgtccttttgtctgcttttcgtctgtggttggtgatcatttgttgctcgtctcttttcgcagatgcaaatgccgagttggcaccgctgcaacggcaacagtcgcaccgctcgcacgactcgctgttggagtgcggcagggagcggggcggcgacagaggcggcaaaaacggggcgccggcggtgggatacgcgacattgccacgcacattccgagtgcagcagcctcaacagaaggtgaccgaaaagaataaaataattatggagaggggaggagttattaaccgtgtccaaaagaatagtgatgattcaccaacatttaaaaaagtatcggcactcactgatcagctccagtttctgctgatcactttttgccatgccttctattcttctcacctccctttttcagtcacctctttctcacaatttgcttccgcctgctttgcccccaaaatcgtcctgctgccgtgcccatccgtgctgtgccaaaaaactcggcggattggtgaaaaccaaaacggcgaaaagcaacccggaactgaacattttgggcacgaaaagcggcggagggaaagtgtttcccatgggaatgagcggcgcacaaaacgccggcggggtaagtcatcttccaatctgttgaccaatcccaaaaagcattagccaaacagtttccacctccattccccccacccctccggcaaaatttatttgtccctttagaaacagcaaaaaattcggcaccgatcaccgcaaccgattagtcgaccccacgattacttgtcgctgttgccgagcagttgcccctcaggccatcagcagcagatgaacgcatgccaaaaactcaagcgtccgactccgccaatcacgacttactcatccgtcgggccggagagggactgtccgctgcgcaaagaccgcgctgaaccgaactggaccgagacggatgaggcgatttgcgacgatagcgacctcattggcattatgcagcgccagtatgtcaatttgccgcacagcacacaaaaggcggcacgtcgcacgaacgcagttcgccagcgaatggttgcggacgcgacggagtcgtccgactgctcctccgacgtcacaacacccaacggtgccattatggaggaattggcatcgctggcgacggagggcgacggcgcggcgatggcacgcgaaaatggcagtgagaaaagcacaagcagcagcagaacag

SEQ ID NO: 68273 - DNA, 425 bp, Heterodera glycines
cctgttctgctgctgcttgtgcttttctcactgccattttcgcgtgccatcgccgcgccgtcgccctccgtcgccagcgatgccaattcctccataatggcaccgttgggtgttgtgacgtcggaggagcagtcggacgactccgtcgcgtccgcaaccattcgctggcgaactgcgttcgtgcgacgtgccgccttttgtgtgctgtgcggcaaattgacatactggcgctgcataatgccaatgaggtcgctatcgtcgcaaatcgcctcatccgtctcggtccagttcggttcagcgcggtctttgcgcagcggacagtccctctccggcccgacggatgagtaagtcgtgattggcggagtcggacgcttgagtttttggcatgcgttcatctgctgctgatggcctgaggggcaactgct

SEQ ID NO: 68274 - DNA, 577 bp, Heterodera glycines
atgaaattaagtggaattcggttagaatacatatgctataatgttagaaaattaaagatagaaatccacttgaggcaataaattactcgggttttttaaggtctcgtttcaagtttcatgaaatccgagagacaaataccgtaaaactcgaacaccgatattcacgaacgcgagcatccgattggcaattttaaacatattttatgtgtttttttgacaatttttctttacttaacattcgtgttgatgtaaaaacattttaatttaatgagaaaatatgagtgaactgaatttttaattggagagataaatattttttttcaattaaatttttaatgaattttatgcagaaatcactagagatcgacattttgaaaaatgcctggacctggattccatgttggacctggacctggatttcctggacaaaaatccaggaaaatccaggtccaggaaaaatccaggctcctcgagacctggatccaggcctggacctggattttttgaaatttattttaaaaatcaaaaaaatgttgaaaaaattatttatttgagtagaagcatctaaaaatatcta

SEQ ID NO: 68275 - DNA, 365 bp, Heterodera glycines
aaattgtccgaagtcctgccaaaacaccacctccaccaccagtagcagcagcatcaacttttacaacttttacaccgccgacaccaccaccatttcctactccatttcacaaacacttctcatttttaacaccgtcaccaccaccacctgcaacagttgatttggatcagattccacttcccccaacaccaccagcaacattttcattggatttttggctaccacccgcaccacctccaccaccagcagcaacagttcatttggatatgaatcccacatcatcatcaaaggcggcagcagcagacgaaattgaacgtgaaaaaaagaggaaaaagcggctaggcaatcggtggagcagcacacag

SEQ ID NO: 68276 - DNA, 1086 bp, Heterodera glycines
  unsure (1)..(1086): unsure at all n locations
atgcacattggcatgnatcagatcgccaggtgtttggcgtgagaagattgctcgcaaaacgaaaatttaaaaagcttatgggtgtgctacgtgccccgcccctcccgcccttttttccatatcgttccactctcccaaaaatttttaaaatttcttatagaccaaaaagtttatttatttttttaaactcggattttttgaaaagacaaatttttttttgaaaaaagcctggtaataattttcttagggtctcgagaatttttatgattcgtctctcttctcttctgtattatgtagtattgcgaccgatatcggcaaattaataacaatcctcgagataatttagataagtctcgagtagagttgtgctcataatcagattcaagagaaattatgaattttgactcattaggaataaaaattttgtgtattttcaaaggaataaaaaaaattttcttttgaaataattaacattgtagattgacaaaaaaaaatttatttaatttcccaatttgtcttttaggctagcagcagaagaagcgcgaaaggaacagcaacgacaagcccaggaggggcttatcgggcggaaaaccacccttggtggggctgtcagggaaaaggtggaaaaaattgtaattttttttttaaatgaaaataagttaggtcaaaaaatcgagattccgatcgtaaataattcgggaattctcgtctactaaacttcacttttaaaattataaattgaccattttgggtaaaatttattattttgcacgattttttaaaaaaaacaatttttaaaaaattatttattaatttttaatttacctattatggttcttttgttattgacatataattcagggcccttcctcgttatacatattcagtgaagacaatgtgatacggaaaaatgcgtaatttaataataataaatatattattttaatttaaaaaataaatatttgcagtcgtgccatcattgaatggggaccttttgaatttttcattttgctcacaatcattttgaactgtgtggtgcttgccatggaacaacatttaccaaggctggaaacaaaaagaaaaaaa

SEQ ID NO: 68277 - DNA, 86 bp, Heterodera glycines
  unsure (1)..(86): unsure at all n locations
gtgtgttcggctggagatggacttgtttcgggaacactttnggattatgtgcgaatggttggcattgactctaacaaatgcctntg

SEQ ID NO: 68278 - DNA, 192 bp, Heterodera glycines
atgttggaatcggacactttggcccaaaatcagtcggcaagcgtttcgcccggatggaatgacccgccgccgttggccaacccggcgacaacgacagctgcggcacatgccggcctcaccaacggagtggcgaacggcgccggtcggctgcatttgcagcgacagcgaaggcccgtggacccgtccgtccag

SEQ ID NO: 68279 - DNA, 1420 bp, Heterodera glycines
atgccttggcccccgtcgcccttttggtgtgccatcgtcgccgccgcatatgccccggtggatgtgtatttattggcagcagcagcgacatttggtatggcactgttacacgtcggctttttgtccccccccccccttagcccccactaaatcgctgataaaattcaagtggcccagcaaaatggagagagaggtcgcgccatgccgtcatcgctgtcgcccaaattgccttggaaacggaaatgtttgtccgtattcttgcgcccccgccgcaacccttatttattgtatttatacattatgcatttgtgccaatgccaatgccaatccattgcgccacacattgaggagggggggggcttagttaggagaattcattaaaaaaaagaaaattggctgcctgccgcccgccggctgacgccattaatggaatcgaaaataaaggaagtaaaatgcggattcggaagtgataaaaacttaaatgacaaaatgtacttggaaaaggtacacaaaatattgtttaattatgtaaaaaaaaattatgattttaggcaaaaaaattttttttttaatttcgaaaatttaatttaaaaaaaaaatattttacattaattttcgaaaaaaactaagattaacaaaaaatatttttctttaattttttgaaaaattagactttagaagcaaaatatctttttagttttcgaaaaaaataagtagaataggcctaataactacaagcctatgctatgcttaggctaagcctgtgcctaagcttcgtatatcccctgattaaaagtcaatgtgtaagaaatgattgaaaattttatgggattagactcgagatggaaatcccgaggctggccgaataaaattaggtatagtaatcagtaatatttaacattaggttggtaattaaaattagggatggtaattaaaatatttttaaataaataaaacaaatgtttatatttatcgcaaattcttctgtttctttaaaagacttaattaatttaaaccaaaacacattcatccattaaattgatttacaattaacggttcccctcttaaaagaacaatggcattttactgagggtttagaatttttacgaaaattaaacttttcagtgttatttaaaaatttaacattgccaaaattgatcggcaaaaactgaatattttcagtatttgttgcattatttgatatcttgaaataggtacataaacattggtcacttaaaaacaacaaattttaagggatcaaagatctgtcacaattggcctggatttcctggacaaaagcccaggaaaatccaagaaaaatggccttgacttaggtccaggaaaaatccaggcctagagatccaggctcaattgaaccctaataataatttaaaattaatttaatttttaatcaaataaa

SEQ ID NO: 68280 - DNA, 81 bp, Heterodera glycines; identical to SEQ ID NO: 58971

SEQ ID NO: 68281 - DNA, 634 bp, Heterodera glycines
atgaccggcctcataagagatcggtctcgttatttctcgtcactacctcctcgcgttgagagtgggtaatttgcgcgcctgctgccatccttagacgtagtggccatttctcaggccccttctccggagtcgaacccttatcctccgttacccgtcatcaccatggtagtcagatacactaccatcgaaagttgataaggcagacacttgaaagacacgtcgccggtacaagaccgtgcgatcagcttagttgttctgagtcaacactggacgcccggagggcgcttggttttgtggcgaaaaaatgcgctccgctctggggagattggagctttggtgcatgtattagctctagaattaccacagttatccaagtaagaagtcaaggtcaagtaaattatagctggtgtaatgagccgtacgcagtttccctgtctggcaggttaaacttacacatgcatggcttaatctttgaaatgaacacatcagttcaggcaggatcaaccagatagctgctagcgagcgttgccaagcgccgctattacagccgtcttgtaaagacggatagtttcagcagaaacaactccgttcagcgcaagagtgcgcatgggcggcgaaggcgaccgagcaagtg

SEQ ID NO: 68282 - DNA, 116 bp, Heterodera glycines
gttgtacctcttctaatcacagttgtacctcttctaatcactttgtacctcttctaatcactgttgtacctcttttaatcacagttgtacctcttctaatcactgttgtacctctt

SEQ ID NO: 68283 - DNA, 770 bp, Heterodera glycines
aagaggaagataaagtggaagataaagtggaagaggaacagaaagtggaagaggaacagaaagtggaagaggaacagaaagtggaagaggagcagaaagtggaagaggaacagaaagtggaagaggaacagaaagtggaagagaaagtggaagaggcacagaaagtggaagagaaacagaaagtggaagagaaacagaaagtggaagaggaacagaaagtggaagagaaagtggaaggggaacagaaagtggaagataaagtggaagaggaacagaaagtggaagaggaacagcaagtggaagagaaacagaaagtggaagaggaacagaaagtggaagaggaacagaaagtggaagaggaacagcaagtggaagataaagtggaacagaaagaggaacagaaagaggaagataaagtggaagataaagtggaagaggaacagaaagtggaagaggaacagaaagtggaagaggaacagaaagtggaagaggagcagaaagtggaagaggaacagaaagtggaagaggaacagaaagtggaagaggagcagaaagtggaagaggaacagaaagtggaagaggaacagaaagtggaagataaagtggaaggggaacagaaagtggaagataaagtggaacagaaagaggaacagaaagaggaagataaagtggaagaagaacagaaagtggaagaagaacagaaagtggaagagaaagtggaaaaggcacagaaagtggaagagaaaacagaagtggaagagaaacagaaa

SEQ ID NO: 68284 - DNA, 1012 bp, Heterodera glycines
tctccgatgtgcgcattgtcggaggagacggacctgaaagcattgctgcgtgaagcagaaaatttccgaagggttgccttcttcggcgtggttagtaaagttcggagagagggggagggggaattgtaaaaaatattttaaaaatcaaccaaagtttattgacgaaggaattgaacccgatttttggtttataaatcccgaatctggtccaaatcgaatcattttctcgaaatttcaaattttaaatcgaccaaactaaataaataatgaaaatggcaacagacgacagcagtggttgccacgctgatggcggtgatgtcagtgccgatgatgtacaattatgtgcagcaaatgcactcccaaatgcgtgacgaagttggacatttagggggggggggggagtttaaatttttaaatttataaatcagtgatttttcgttgcataaaacattcccaaaattatgcaggcagatttttgcaagctgaggtctaccagcatttggaaggaagtggccagggcacaggtcagctaaaacaaaatgggaaaattttgaaaattttcttttgaacttttcagtttgttgcaggaactctttcagtttctgaaagccaacaacagattcaacaacaaaggcacaagcgccaactgcagcagggagcttatggggcaagtgccattgggggaggggggctgttcaagtttaaaaattaaattctatttttatggtaaaatatgttgagttttactgtcgaattcaaacactgtcgattttttgctttcttgcataatcgtactcaccaatttgttgaacaaatgatcccgttaagtcatcgccaattggcgctgcggtgaccgacggtgcttatgtgaccgctgccgcggcggcagcgcaacagagcacgtgctgtggctgcggacagagcccgcaaggcgtgccgggactgccggggatgccgggcagcgacggagccccggggcagcaggggccgcccggcaaagacgggcccgatg

SEQ ID NO: 68285 - DNA, 563 bp, Heterodera glycines
cacatgggcgtgaatcagatgctaccctccgtctcccgttcacttacaatgtcacgaccgttgccatttatggctatgccgccgctttgaagcggtaatttgtttgctgaacagcagcgacaatgcaattgtttgttgcttttagtttcgcgccgaacatcaaaataatccattttcttggcaagcaaaagccttgggctctgctctacggggacggcgctgcggggatggcattcgtttcggactatcacaaggtgaaggggatgccttatattgaacgcattcttttcaaaaagggtgcacttcacttacaccccgccggttccccaccttcccgaaatttgaaaaaaggttatacaaaaaggtttagattttttcttgaaaaatttctgtttgaatattttttcaaaattttcggccgggtaacgacgtgtaagactccgtttcaaaaatacgacatatttggtgtttgttcgcatgcttttcaatgttttaacccatttcagcaatggtaccaactctacgcaaacattgtccagcaacttctgcctccgtcctcttcg

SEQ ID NO: 68286 - DNA, 411 bp, Heterodera glycines
atgaccaactccaatttggactcaattatggcatcttcgacgccaattgaatttgcggtaaatggacgtggcgaaggagcggcgaaggtgccatttggaaaagggacaacggacggaatggcaaaaataattacagacggaaagggacacttttgtgggggcggacgaatggacgacggaggacgacgcggaaaagcgggggacgacgggcagaaggaacagaaacaaattggagttggacagaacgtcacgaccctcctcagtgcacacgttcgatgggaagggaatggcaaacgaaacaatttgcgaagctttttcagttacaattccatcgtaatcatcgaatattcggacagcccaagtggcgaccagcaaaaatgccaacgcccttcagtcagactttcgtcgtaa

SEQ ID NO: 68287 - DNA, 762 bp, Heterodera glycines
atggctgaagcatcttcaaacggcaccgaaatccacggcactatcattttcgctgcttatgccatggcatttttggaacttggcacatttattccgacaattccaattgtggcattctgcgcttcaattttgtacaaaacttccattcttcaccgaaaccttaagggcattctgttggcccaactgtttagcataatgatgaatttgtggccacgtgcctttatgttaattgcccaaattttcgtgacgaaaaatatttttttgttgccaccaaattttatttctggcgcagcgactgcggcattgacattcaacaacatggcaggccatgtgctgattgtggagcgaatatgtgcaactgtttatgtgggcacttatgagagctaccgtagttggacatttacggcactttggctgtcaattacggtaaaatttcattttcatttatttatttctgtagtattattttattcattaatattcttaataattttttaataaataaattcacctaaaattttttaaaaatatctcttgtttcatcatcattgagtaattaactttgatattaattaattagaaatatttcaaattaattaattattaattaaattaattaattattatccgtatttaaagatcatcctttgtttggcattaacaatttatcaattgcttgttttggattcatcgtttgcatttacaaatatttttgtgggtctgtacatcggagcaatgatcgccagtttaatcgaaattttt

SEQ ID NO: 68288 - DNA, 827 bp, Heterodera glycines
atggagccaatcgaacaacaacaaatacaacaacaacagattcacactcagcagcagcaacaaccgccgcaccaaacggtgccgaaaattgtcggcgccaccgtttttcaaccggacgaagcagcgccgccgccggtggtggtcagtccgacggcaccaccagaagaggaggaggaggagggcacgacagagccaatgggaggcggaagtcgaaaaggcagtcaaaatgtaaggaaaaggaataattaactaattaataaggcaattaagagtaattaattgctaatatattgtgaggatgcgacagcatttgctgtttgtttgaaattccaattataattaggaactgaacggcgaagacgacccctccggcgccgatcggctgactccgtcgcaggatgaaagcaacgaagcattgacggaggagcgaattcgagaattggaggagcaaatgcaacagatggagctaaggtgggcactcaaaatggaaaggaatcaataggacccgcattttagtgatgaaaacaacaacccggaccaacacgtttacagtcggaagttcctctatttcattcgcaaagtgactatggtaagcaaagcgaaagtcccgtggcattacggtcatttacagtgttcttctttatgtacagtatgccactaaaaacaaaaatcatttaattaaactcctgacaaattgttaatttgtattcttttaggcactcaaaacggtgaactgtccaaaatcggaggaagatttggaggagttgggactgagccgacgaggaatgccaattgtccagtctttctcagtgggaggaaagacaaag

SEQ ID NO: 68289 - DNA, 1223 bp, Heterodera glycines
atgccacaggcattgctgataactccgcagcaacaacatcaagcatatcaccaacagcaacatcagcaggtgatggccagcggaccgaataattaatcgatttccaatttcgaaatttcccaattgatttttcggttttcttattgtccatttccattttgtagttgctcgctgcccagcaaattgccgttgctcaacaacaacagcagcaacagtcccaccctcagggctccatgcccatgccggcccaccatggtaccgccggcatgccaatgccgtcggtgaccagtgtggcgcaaatgccgcccgtttctgtgatgagcggtgccggcaccgtttctgtcgccgccgctgcccaacagtcggccgccgtttcggttgcgcatggcatagtgccgcaagggacaacgcatttgcaaacggtgggctattttcgtttattgcccccccccattttgttttttgacgttttcctgtaccacagtcattaatcacttaattacttacaccttcctttttccctccagacaaatgtcgtggtcacttccactggtcctggccaaccaattccgccgcagcagcaattgcagcgcgagaaaaagttactgaagttcactcacccggagactaaagaggtcatttcttgggcaagagaatgccttttagccattaaaaaaatgccatggcttttcccttggcttatttttgttggcacacacaaaaaagtgaccaattttccaggaattggatttgtccacgggaataacgaacgattcgaagagaaaaacgaagccaacaacggacggaaaggacagagaggcggaggaaacggacaaatccaaccacgcgaaggagttccaaaagaaaatcgcagaacggctgaagtacggggctgacagcgacgattttaaagcggaagggaacggcacagtgccgacgatcactccgccgccggcagtgccggtgggtgaaaaagtgccgaaataaaatgccaaaaacatagtgcaaaactgtgataattctttcagatcgccagggaaggaaatgatgatcagacgaaacaaaacgatgggccaacggcggagagatggacacaaaaagtgccgccgccttctcaacgccaatatggccaaggtgagctgggcatgttcattgtcaatttggtaaagagaaacggagagaccgaaactggtaaaacccatggaaattcggtcaaccgatga

SEQ ID NO: 68290 - DNA, 924 bp, Heterodera glycines
atggttctcgtcagcgaattttgtgctcaatttctctcctgcccgacaaagtcacttcgcgatcgactgaaccatccagaggaccgagtccgagttttgcagcaattgattgggaaaaaggtccagacaacatacaaggatcggaatggaatgcgcaaatctttcctcgttggtggaatgactgaacgaggcgcggcatttgaacccgcatatggacgtctgcgtaagccgttcaacattaacgtggcagcgcatttttatactcgtcaccgtgtcaaattgcactacccctatgtgccatgcatcattgaaggctttacgcgtggtgaggaccgttattatccgatggaactgcttgaaattgtcgacgacaaaaagggagggcgattatttggtcgattgttcactgaaattgaggagcaggaggaggaggacaccaaaagtgaagcttcacattcttccaactcttcctatttacaatttaacggtaaaggctgcaaatggtatgaaagcattgacgaaattaccaacactgggcgtggtgagtgcagccaaccatcatcatcatcagcacacacgtactggtgaacacaaacacacaccacatacacccaaatttgccacaaaattcatattttttgttaattatatcttccttttcttaactatgcattttttcacctaaaaacaaatactcccaacgcttaattatgttttggcttaaaaacttgtatcttctaatccttaatttttttaaattgtatcttccaatccttaattatgcactttttctacctaaaagttacatcttccaacgcttaattattttcaaatttcatcttccattcgttaattatgcatacatttttactaaaaacatgaataaaataacaaaaaagagataaaattgcagaaatcaagtaa

SEQ ID NO: 68291 - DNA, 202 bp, Heterodera glycines
atggtccggacgcattatgtgatggtgagagacgagcagcagatggggacttacagtaccactcttacaataaaatgaaattacagtatgacaacgaccgactgctgagaagcaccgattgtcacgagcttttcgggagggtggcagacgaatcatgcgaaaatgagaaggaaacggacggaaaaggaagaacggaccaccg

SEQ ID NO: 68292 - DNA, 555 bp, Heterodera glycines
tctcttgccttcgacagtctttcaattgattcttctgaaatcgacattgacaatggaattcgtttgccaaattgtgatacgctaattaaacccgcaattgtaagtttttttaaaattttatttattttaattagtgtaatttcagcgtcaaaatccaactttactcggaaaaaaacttccaaaaataaaagaagggattacaacggatttttatcgcattataaagcgcgccttatatttgaaaaaagtcagtgccgaaaaccaacaaattccctcgttgttggtctcgcgccttttgcttaccgattcgatgctgtcttcattggaaggcgacctttttcgaaacatggatctgatgaagcttgactatcctcggatgccaatgtgagttttgtttcgaacattcgccgaagaattaccgggcgaagacatatccattcaaattcaggtggtttttggagacattggaccattggtttgatgacaatgaattaacttttgtcaatggaggagtttttctctattcaaaggcaagatttactagcaatttctctg

SEQ ID NO: 68293 - DNA, 636 bp, Heterodera glycines
taattaaatccattccttcgggggaccgtgccgggtgccgcggggtaagcagtgctggttcgtttcatcacggcaccgaaccttttggctagtcagcaatcgttgcttaacttgccagatcggacgggtgcgcatgattccactgttccaagcaccccaccaaaagcaaaacgatataaccaaaatataaggaaaaattttttaaaaaattttttctccatcttcctttttgatactaaagcatcagagtgctaaaattaagttgtaaataaaatttggtgcgctttagagcactttctgaaaaaaatatttatgaaacaaaaaaatcgattttttcaagtgtccgtttggggtactcaaacatttatggggagcaaaaatccaacgcagaattaaagtacaggctatagggaagctattcccgaaagattcggtctccccataaatctgggcgcatcggttcggggggactgccccgaaaaaaaaaaatcgatttttcaagtgtccgtttgaggtactcaaacaaatatggggagcaaaatccaacgcagaataaaagtacggctatagggaagctattcggaaggattcggtctcccctaaatctggggggatcggttcggggggactgccccg

SEQ ID NO: 68294 - DNA, 1894 bp, Heterodera glycines
  unsure (1)..(1894): unsure at all n locations
atggaaggtgcctccttcgtacggcgactcgggcggtccttgatgggaggccncccaatggtacaagtctctgccgtcatccatcggtgccgcggtgtaacccgtcgtgaccagttcctgatgcagctccgccagttcctgcaaattggtcaaaacatttaaagcattggctgatcagtgttgtaatttcgttccaccttttggatgcgtcgacgtgccattgcgaaaacggcgagcgaattgatgtgaaggacggacggacgaatgaacgatgagaaacggcgatgaggtcgcttttgaagtgttgttgttattgcacaatgaagggatgatgatgataaacgcaaatagttctgttctaaaaaaggaaaaaacataaaaacaatacataatgaaatgaattataaatttaaaaatagggaaattgcagtttttgtaaaaaaaaatttttataaatttaggttcaaatttggtagtataggccagggaaactctgataaactttcaggtcgatgtcgataatttttggaattcgggttgggtatttactggttaagataagaaatatgtctttttgaaacagtgaagtttatgaaattcacaaaaaacagagtaaaacactcataaaagaaaaatgagtgaatgaaaagggaggaaaagggggcacaatatttatagtacgacgcaacaagggagggcaaaagttaggtaggaacgtaggtaggtaccattgcccaaattccaaggttttctctctatataaggaggtgtttttctcactggactgacattttttgcattacgcctatatgcttttcttacttgttccctcctctattcagtccttaatgttctgatttaattttttgtgttacagagtacgcaaaatataattaacccgaatttttccaattgttttttcaatcaaaattgactgtttctcacagaattttcctgctggacaatctaaacttggaatttaatcaaaaaaccccaaaaaaatgcttttccctatttgtaaaatttataattcatttcattatttatgtttttatgctttttcattttttagaacacaactatttgcgtttatcatcatcatcccttcattgtgcaacaacaacaacacttcaaaagcgacctcatcgccgtttctcatcgttcgttcgtccgtccgtccttcacatcaattcgctcgccgttttcgcaatggcacttcgacgcatcaaacaggtggcgaaatgacaactctgatcagccaatgctttcaatgttttgatccatttgcaggaattggcggagctgaagcaggaaccgatcacgggttgcaccgcggcaccgatggatgacggcaaagacatgttccactggaaggccaccatcaaaggaccgcccgagtcgccgtacgagggaggcaccttcaacatggacatcgttttccatcgcgactacccattcactccgccagttgtcaaattcgaaacgcccgtttaccatccgaacgtcaacaagcagggtggcatttgtctggacgtcctgaagatgtcgcattgggcgccgtcgttgaccatttcgaaaggtgaaagcgacgcgggaaagagcagacaaaatatcgacaagacaaaacgatccaattcaaaacgaccaccaaaaccggactttttggaaaagtgtcgatattttgtcgtgtaaaatgggatttttcaaattcggaaatgccgttttaattcattgtctcccctccatttcagtgctgctctccatctcttcgcttctctgcgacccgaatccggacagtgcgctggagatggacatcgcgattatctaccgcaacgaccgcgagcagtacaaccgaaatgcccgtgaatggacgcagaagcacgcgatgaaatga

SEQ ID NO: 68295 - DNA, 146 bp, Heterodera glycines
gaacagaactatttgcgtttatcatcatcatcccttcattgtgcaataacaacaacacttcaaaagcgacctcatcgccgtttctcatcgttcattcgtccgtccgtccttcacatcaattcgctcgccgttttcgcaatggcacg

SEQ ID NO: 68296 - DNA, 888 bp, Heterodera glycines
gtataaaaggggtcgtctttccctccgcttcacatttcttcttcttcttcttcttcttcaccacactccaaccaacgaaccgcttcagtgcgcaacgcaacgcaatggccacttacctattcatcgctgctgctgccttcggagcaggaattgtaatgctgcgctttcttcattttttcaatttgcatttcattacatttttgtccttttcagtactgttggaaggcgtacctcggcccgatgctcgaccaaacgaagagcgacgacgaggagaagcccaagccggaaggaggcgaagaagcgacgaccgccggcgacaaggaggagaagaaggctggcagcaagggcgacaagcacaagaagaaggacaagaagggcgaaggcgcagcagcagcagcaccagcggcggacaaaaaggaggagaagcgcaaagacaaacaccgatcgaaggaggcggggaagagcgacgacagcaaagcgggcaagaaggacaagcacgggaagaaggacaagaagggcaagaagaaggacaccgccgatgcatccaccgtggacgaagcgctgggagaacagagcacagcggagacgagccaagcagaggaatagccaggccctgctgcgtgcaaatgacagtgttcgacgacgacgtctcgcgacaccaacacacccgtcccttgctttcgaccattcccttcccatccgattgctgtgttttgtctgttccaatgcttcttaaatgttccccttgtgaacagtgatccttccttatgtggcctgaatatgtatatattgtatacccattaatatattgtgcttcgcttgttcgatatttgtgaaatctcattcatattcatcgtcattgtatttatatgcacatttgatatatta

SEQ ID NO: 68297 - DNA, 944 bp, Heterodera glycines
atggcggagctgcatcaggaactggtcacgacgggttacaccgcggcaccgatggatgacggcagagacttgtaccattggaaggcctccatcaaaggaccgcccgagtcgccgtacgaaggaggcaccttccatttggacatcgttttccgtcgcgactacccattcactccgccaaatgtgaaattcgacacgatcatttaccatccgaacgttggagaaaggggcgacatttgtttggacattctgaagcagatgtgggcgccgtcgttgaccatttcgaaaggtgaaagagcagacaaaacgccgacaaaatatcgacaagacaaaatggtccaattcaaaacgacagccaaaactgtactttttggaagtgtgatattttgtcgtttgaaaatgggatttttcaaattcggaaatgccgttttaatccttatcccctctccatttcagtgctgctctccatctcttcgcttctctgtgacccgaatccgaacagtgcgctgcggcaggacattgcgactatgtaccgcgacaaccgcgaggagtacaaccgaattgcccgtgaatggacgaagaaccacgcgatgagatgacacgacaaacgaccgatggatgggagagatgcagaagacaaccgccgaagagggaggaggaggaggatacattcaactgaccctattcccacatatgatcccaactgtaaagattgtattattgtatctcactgtatgtacagtattatgtcgcctggttactgtttaagcgaccataattgtctgttgttggttgatcaccattatcaatgtgttgtatctctgtgttatcatttcaaatgacttgtgatcaattgtttcgcctaatatgtattaactgtgatgaaacgtgaattttattaaagacctatagacctttttgattgcaaaaaatgtttccataataaa

SEQ ID NO: 68298 - DNA, 146 bp, Heterodera glycines; identical to SEQ ID NO: 68295

SEQ ID NO: 68299 - DNA, 688 bp, Heterodera glycines
atggcacttcgacgcatcaaacaggtggcgaaatgacaactctctgatcagccaatgctttaaatgttttgatccatttgcaggaactggcggagctgaagcaggaaccgatcacgggttgcaccgcggcaccgatggatgacggcaaagacatgttccactggaaggccaccatcaaaggaccgcccgagtcgccgtacgagggaggcaccttcaacatggacatcgttttccgtcgcgactacccattcactccgccaattgtcaaattcgaaacgcccgtttaccatccgaacgtcaacaagcagggtggcatttgtctggacgtcctgaagacgacgcattgggcgccgtcgttgaccatttcgaaaggtgaaagcgacgcgggaaagagcagacaaaatatcgacaagacaaaacgatccaattcaaaacgaccgccaaaactgtactttttagaaaaatgtcgatattttgtcgtgtgaaaatgggatttttcaaattcggaaatgccgttttaattcattgtctcccctccatttcagtgctgctctccatctcttcgcttctctgcgacccgaatccggacagtgcgctggagatggacatcgcgattatctaccgcaacgaccgcgagcagtacaaccgaaatgcccgtgaatggacgcagaagcacgcgatgaaatga

SEQ ID NO: 68300 - DNA, 926 bp, Heterodera glycines
atgcgaaaaggcccaaatgattggtctccaaatcgaaaaggcaaatggcaaaatctgcggggacaaaaagtaaaaaatggttataaaatccggaaaattggcacaaagggaggggagagattccatttggcaaaagtggaggaaatgagcgacttaatcgaaccggacaaagtgagggcattttggccgcaaattctttgactaaatctgtgcaatttatgccaaaaaggaatttaaattgaggcgatacatcgactaaaagaatttggagccaaacacatcattcataaaaattagttttttttttgtgagatatttagaagctcgcacctttgttttatggctttctcgccgccattgaatggccagacccaggggcagtggaagagacccattcaaagcacgcagtgccagggaaagacgtcgcatgggcaacaaaagaaaggcggccgcagggactgctgcaaacgtgggttttattctgctcctgtgctattcggccttcaattgttttttcttttcactttttggcacttttccagcagacagagcgaaggtcgaaatttcatttctccctttttcaggtgcaagctgccaacaggcgccccatttgtctgatctgcttgaagaaaatgacccaagtccgtcaggtgcgcaccatctgtgaccacgtgttccactacgtctgcttccaccgttggctcaaatatcgtctgttttgccccgtctgtctgctcaactttcgcacggaattgtatcattcgggaaacgccgtgtttgagggcgcgtacaacgatggacacgttgtgctcatacctgatggtgaacaaagcaacagtggataagtgatcggcactcatctccaattgtgatcggacaaaagcgatatctaattttgtattgtacataaataggttattcggaca

SEQ ID NO: 68301 - DNA, 1218 bp, Heterodera glycines
atgcagaagacaaccgccgaagagggaggaggaggaggatacattcaactgaccctattcccacatatgatcccaactgtaaagattgtattattgtatctcactgtatgtacagtattatgtcgcctggttactgtttaagcgaccataatgtctgttgttggttgatcaccattatcaatgtgttatgtctctgtgttatcatttcaaatgacttgtgatcaattgttgcgcctaatatgtattaactgtgatgaaacgtgaattttattaaagacctatagacagacctttttgattgcaaaaaatgtttccataataaatcatgaaaattcattcatggattttcggggttgctcgcatcagcaactggcaattgtctaaatttgttgtcccgataaaaaatagccagaattttcggctttcctttgcagcgattttagggaaaaagttctgattaagaatattgcgttaaatgatttatcgaatccaaatttttcacattcattttttcaatggcggcgagaaagccgatgaaacaaaggtgcggcgagttgggcggtgccctccacaaaatttagaaaaccacgagccaatttaaaaatgcacattacagttttattgtccgaataacctatttatgtacaatacaaaattagatatcgcttttgtccgatcacaattggagatgagtgccgatcacttatccactgttgctttgttcaccatcaggtatgagcacaacgtgtccatcgttgtacgcgccctcaaacacggcgtttcccgaatgatacaattccgtgcgaaagttgagcagacagacggggcaaaacagacgatatttgagccaacggtggaagcagacgtagtggaacacgtggtcacagatggtgcgcacctgacggacttgggtcattttcttcaagcagatcagacaaatggggcgcctgttggcagcttgcacctgaaaaagggagaaatgaaatttcgaccttcgctctgtctgctggaaaagtgccaaaaagtgaaaagaaaaaacaattgaaggccgaatagcacaggagcagaataaaacccacgtttgcagcagtccctgcggccgcctttcttttgttgcccatgcgacgtctttccctggcactgcgtgctttgaatgggtctcttccactgcccctgggtctggccattcaatggcggcgagaaagccataaaacaaag

SEQ ID NO: 68302 - DNA, 697 bp, Heterodera glycines
atggcacttcgacgcatcaaacaggtggcgaaatgacaactctctgatcaaccaatgctttaaatgttttgatccatttgcaggaattggcggagctgaagcaggaaccgatcacgggttgcaccgcggcaccgatggatgacggcaaagacatgttccactggaaggccaccatcaaaggaccgcccgagtcgccgtacgagggaggcaccttcaacatggacatcgttttccgtcgcgactacccattcactccgccaattgtcaaattcgaaacgcccgtttaccatccgaacgtcaacaagcagggtggcatttgtctggacgtcctgaagacgacgcattgggcgccgtcgttgaccatttcgaaaggtgaaagcgacgcgggaaagagcagacaaaacgccgacaaaatattgagacgacaaaacgatccaattcgaaacgaccaccaaaaccggactttttggaaaagtgtcgatattttgtcgtgtgaatgggatttttcaaattcggaaatgccgttttaattcattgtctcccctccatttcagtgctgctctccatctcttcgcttctctgcgacccgaatccggacagtgcgctggagatggacatcgcgattatctaccgcaacgaccgcgagcagtacaaccgaaatgcccgtgaatggacgcagaagcacgcgatgaaatga

SEQ ID NO: 68303 - DNA, 2871 bp, Heterodera glycines
atgatgagccggtctgctcaaatttgcagccaaaatcgctcggcacatccaagcaatttgctggtgtctcaatgcttgcaacggtcgcggaggtcaaaaaatgggtccacgcgctgtccaacgaactgtcaaagcgtttggtggccgacgatgataaggcaggcgaagcgaattttttttttgttttttcattttttgaaaaaaaatcttgtactataatttacagtacaagatttttttcaaaaaataaaatattttaaattttaatcaaataattaacaaacaaaaatattttaattttaaatctatatgtcttgaaatttcgagaattaattttttgagtgttttacataaattttcattggaataataattatcattttttaaaatttccaccctcaatttttttttgtctcttgaattttaaattgattggaattatttttttttttttttgatttttctaccccatttttgttttgcagtatggtcgcattgctcaaacattggtggtcggcttctccgccgggctaagcgatcacaatgtccgcacaatgcacttgcccaactacacaacggcgggcatccaacaggcatgctggaacttcatgcgcccattcaatcgtgagaaggacggccattcgtggtacgggtacaggtcgaacaacaggaggagggggcggggtgaagacgacaagggcagtcctacgaacacgtaccaggcttcgtaagaacagaaaaaaatttctggactggaaatccgcgaatattaaattatttatttatttatttttttgctttttggcccactcgaaaaaaatttatggggtctctggcacccctagcaaaattttgggcaatttttttttgattgcaataattgaaaaaacaacaacaaattcgtcaggtatccgcatgtcagttgcatttacatgtccgcgagtcgttttgaacttgttgatcgccggctgcccaccagacgcatcaccgaattcttccacaaaaaagccttgggtgttgaatgtgatggccaacaacaatgttcaggttggttttggcaaaattagtacaattaaaaacaaataataaatacctaatcataataaaatgaacgctttcaacagttcccccacccccctcccacccgaaataaataattaaaaactgatttggtttttcgcatctgaaaaaattaaaaacttttaattttttaaatttatggggtttttttaataaatttttaaatcttttttcttgtttaaatgttctttttttcgaattgtcaaagaaaaagtttttttttaatcttaattttttaaacaaatttaaaaaattattttgcacaaatttctcgaggtatcgtctcaattttttcaaaaatattccacattaaaatttcggtacaccccaaaacacagccgccgaaaacacagccgagacataacacagccgggaataaacttttaaaaaaattttcaaatagaaatttttcaagaaaaaaatcttagaaaaagttttctttgaaaattctatgagaaaaaaaaaatttcaagaaatcttcggcgatttttttttgaaaatttattcccggctgtgttttgggcggctgtgttttgtcctgttccgttaaaatttttaaatccctccaggcaatggcgatgatgaagacgatgacgttatctttttggctgaaatgaatttgccaaaggaatgcgacggcggtggcaatgcccaacggcgggaggacgacaatgttgagcagcagcaggaggcggcggcatgcagcaacagtgaggcgcaacagcccgctaatgatggtaaacatttgggatgcttttttggacaattttttggttgctgcatcatatatatgaaaaagggggggggtcgacccgccaacccttcctcgcttgggaaaatttgtttttactaaaaaaaaaaatttcaagaacaaaaatcatagttttttttgtaagaaattccaatacaaaaattttccaaaattttttgtttgaattacttttcaaaaatgttccaacaaatatttttggcactttgagtcggaaaatgcatataaatgataatataccattgaatagagcaggttcgatatgttcccttgttagaaatttgaaaaatttgtaaatattttgttccttttttttcttttaaattaaaagtactatattagtatactgtaattatctgactgttcggcaatgatagtcactatttcggctgtgggtagggggtactgacaaactttttttttttttgctttaaccactgcgccttcaccattttttcgctctgtttttaaacaagaatttcggtgaagagaagaggggaagatttatttttgtaaataaatttttttttttaaatttacattttcccctattttcaggcaccgacggggatgatgaaattgtatttttgggcaaacagaaggatgaacgtcacaatggacggcggcggcggcggcggcaatcgttgacacggctcattacggaattttaccgcccacggcagcagaggatgaggacgatgatgatgatggccaaaccaattttgtgtgcaaccggcaataatgccgtcgatgtaacatgatggattgtttaaatgcattaacttttgaagtaaataccgcatgaattaaaaatttttttaacttaggaattaatgttttttatgcattatgaaaatgattattcaattatccaaaagatcaatcccaaaagaggaagagaagcagaagtggaacaaaagcaaagagaaaaagaacatgagggggatagaaggggaaaagaggaaggggaagagaaagggggagaggaacaggaggagaagacagaagacgaagaggaatag

SEQ ID NO: 68304 - DNA, 1428 bp, Heterodera glycines
atgcgccatctttgtccgatcatccatttgtgccgtgtgcctgcaattgaaggcgtggagaagggagacatcagcaaataccggtgagaattttttttttgatgggggtagaaaatttcattcccttgtaaatttccgccatttacgaatcaatttggtattttttaagtgcaaaatactagataaagcaaccgctctcaaatccgagctaaattactcaaaaatagttgggaaaaaatttttgcaatcaaatttgattcccaaaatggacgttttctaagaattttttcaaaaattaatgaaaatttatcaaaaattcgcgaaaaataatcaaattctgtaatttatgtaattttacagggacgcaagtggtgaaatcttcaaagtgctggtcgatttttcggatcaaattgtggtggaaaaggcgtcagttgacgaggtcggaccatttttggcaaaaaaatttttcttttatttttttaaaggcatttttggatttgactgcgcactgtgagatggaattaaacagccaaccaatggaggaattggttcaaaaggtactcattgttaatatctttttttagctgaaatttctatgttttttgcaaaaaagtggatttgacaaaaatttatgaccgaaaaactcaaaaaatgaaccaaaaaattcaaaagtagtctttttgagatttacgggtattgtgtcgagggacggtcccaatgggttccccaaaaaatgtcgtaaatcgcaattcttacaccaaaaatactggaaatttttttgtacaatttttaccaacaaaaaaaaaaaaaaatcattttagctgaacgatgacattgcgcagctgttcccgaacacttttttggtcaacgaaagcgacaaacaacagacagtgatcgcggaggaacggttgaacagcttgaaggagtggttgagcaacgactgtcgcgtctccaggcaacaggtagggcgggtgcataacatgaaaaatgggtgggtgcgtttttttgcaaaagaaaaaaaaagattgggtaacatgacgggacccgtattgtcatttgtccggaaaattttaattttagggccaggctccaattgacgaaacaaatttttaaatttgttaacaataaatttaaaaaaaaaaatttttttctgaattgtggttggggaccctgtgaaaatttttggtttttgctgataaattttcaaaaaaaaaaaaaattatttcattttgttgtatttttttaacagttggccattgccatcggtgcgacggttgttgaacggattcgcaaacgcgtcaaggaggtcacccaattccgatgttcggccggcatttcacacaacaaagtgccaaatttttctaattttttcataattttttttttgtattaatttttttagattcttgccaagcttgtttgtgcaag

SEQ ID NO: 68305 - DNA, 1151 bp, Heterodera glycines
atgggggagtcaattcgggtgatcgctttgattgatatgggtaaggaagggaaagcatttttttggcttttttccaatttatgcattcaatcactgtttacgcgtcctcaatttccttttggccataatattcctgcttggtcaatcaatgtctaaaaaacaaacacaaaatttggtgtttttccggtatattcattgaataattttttttgtcaattgcatttaacaaagaatttaattatatagaaaaaaaaatctatagactttaagccttcgattgacaccaagaattttttttttttaaaaagggcggggtttccacgtttgagaaattttgctaattttaatgaaattaaaccatttttttttttgatttttcatttcataggcatacatacccctgccgaatttgaggaaattttttgccaaactttgtagatgccttttacacccaagtggaggagcgtgaacagccccatctccgcggccgagcgttggccgtcgttccgttcagtcgcggtacaaccatcacgggacagtaagcaaatatttctagtttttgaattattattttgtttttctaaatccgtccttttgcacctagcgctcacaacatcgtctctcgaattttttgattttttttttaaaatttaagcctccattgtttttcagggccattgccgtcaactatccagcccgagccttcggaatcaaacggggaatggacagcaacgaggtttgagtttcaacaatcaccaaattcaatttaatggtggcaatcctgcagtttactggtcccgtttttttttttttgtaaaattctgggaaaacttttctagggctattttattgtactgagcacgaatccgaccttatttttgacaaattctgaaccccgaacccggaatcgaacatttttcacaacaaaaactttttttttgcattaacgcagccaacaaaagtgatttatatgaatggtccgctccatgctctaatctcaatgtcactcctgaatcaccaattctctagtaatcgcgaaactatcatattattacatgattgccctatttcgtttaaatatgcaaaaataccaatatttctcgttcgtcttacacaataactgataaactgaatttttcccccttaataaa

SEQ ID NO: 68306 - DNA, 205 bp, Heterodera glycines
atgagagcatatgatttcatcaccgaggctcgacataaagttgtggtacaagcgctacggcaagcagtaattaatatttagttattcacaaaaataatgataacataattaagaaataaaataaacgattcaaaaattaaatttaaagatttaaaattaaattgaaatttgtcttggattattaatgcaacaatttccaaaagaa

SEQ ID NO: 68307 - DNA, 1166 bp, Heterodera glycines
caattatcgtgcgaaattgccgaattggagaagttacgccaacaatcacaactcccaaatgttcaaaaggctatcgatgagctaattggaagatggaaagtgaaaaaggaagaacagaaaatggttatcggattgctggactttatttaatcgacagaattgcatttttaattcaaaaattaatcagaaaacggacaaagggacagcggagacactttcagccccgacagaagcaccgaaactgatcagcggaagtgtccacgttcgtccgacaaagaaactgaccacttacggtatggaaccactgacttagcggaccgacgaccactttcagaccaaaccaaatcaaatattcttggtatatttcgataaccctaacataagtgttctctattagcatgccaaattaaaaaataatatttgttgagtttgagttcaagaaagcttgtttttttgggcccattggtcgcgaaatatccaattagctttgaaaaaggcagagaaatcgaaagataccaacaatatttaatttggctgactatgaaaaaagaaaatattttttggtccattaaaggcctttccgctaattacccattccgattttattctactaattggctcttgcttttgggcttttcctccttaaacccaaaaattttgggttttgaggcgaaagaggtttcccttcccgcttttccattgtcatcgtttagcgtttgatgagagtgacaagttcgtgaagctgtactattccctgcccggtatttccgactccgtccccggcacaatttcgaccgatttccgtgaaaagttaaaaaaatattatatgagaagaaaattaataaagcatatgctaattgcagctctttttccattgtttgctccgacgtcaaagggattgactacgaaattcgagtgcaaggactttgtcagggtgagttggcattttgtcaagaaatgttttatttaaataaatttcccattttttgagctgttgagccggaaaagtgtgtggtgaaggtgcttatttttatgctgcttttttgaagtaaatcgaaatttaagcaaaaaagcggtgaccaattgttaattatgctgaagaaggcgaaagaacgacaaaattggggatcccttctgaaattggaaaaggaagtgggcaaaagcaa

SEQ ID NO: 68308 - DNA, 1214 bp, Heterodera glycines
atgacaattttgaatggcttttcgcagattggcaccgccgtcgaagcggcggtcgaacgttttgtggccgttggggagacaatcgcagatgaaaaccccgacattcagccggagctgtacgacgcgtgcaacgaggcgcgaatggcgggttagcgatgggatgtaaccccaaaatttcataaataactgaaatttgccatttttagcgatgcgatgggttttttgcataaaataaaacccaaaaaatttcataaatattctgatatttccaattctgaggttcttccattgccaatttgcacaattcgctgctggcggaggagcgcagcgccgaccatccgccggaatttccctctgcgccggctgtcgtcgtcgattccgcccaattggtccgtgccgctcgccaactcctctcatccgtcaccaggtttaaacccaacaaatgggcaaaatgtccacaacatgcaatgaatgcgtcaaaatatgtcatcgtttaattatgaattgtttttgaaattccccctttttttctcaaataattttccgtatttttatgctgtcaaattccttttcacagagttttgctattggccgacagagtgttggtgaagcatattttgagagcggaggacaaagttcgtcagcagcgattaattaattaattactattaattattagttttatactattcatttgcaattcctttaatctaattattaaattttctttaagattgcctattccttgacaaaattggaacacacggccaatttctcagaatttgttcaaattttcaccgaatttggcaaccaaatggtcgatttggcccatcggtcgggcgacagacaagaggatttgaagagtgagaagaggagggcacaaatgcaggtgatgggacttctctgctggtcactgtgtttatttgttgggctgtccccccagggaatttattttttttaattttcaattccggaatcaaggcccaaaaagctccgaaattcgaaaattacccaaaattttaaattttataaaaatgccacttttgaagaatggagaattagtcagcaccttaagaaattttttatttgttaaattttatttatgaagtacaataatatttcagaatattctcattttttgatttcgattaaaaataatcggattttcttttagataaagatttttggagccaagaaaattttttgttaaaaaa

SEQ ID NO: 68309 - DNA, 2197 bp, Heterodera glycines; identical to SEQ ID NO: 8501

SEQ ID NO: 68310 - DNA, 903 bp, Heterodera glycines
  unsure (1)..(903): unsure at all n locations
atggtggaagtcaaaccaagtgaaagcatcactcaaatggtcacggaagcaaaaatcatttttgaatctgccggaatacggatccgcgaatttttcggaagtcacatcgacgagctaaaagagcttgactcatccgaattggccaaagacctcgaaaacacaaaggtgttaggcatcgaatggaagccaagacacgatcagctgatcttcaaaatgccagtcttcagcagtccaaccacaaaacggaagatcctgtcacacatcgcaaaagtgtatgacccacttggacttatttcaccggcactgttgcccgccaagcattttttgcaaatcgtccaaaatttgaatttcaaatgggacgatcctctgccggaaaagatggcaattgactggatcaaactaatgcatgcgtgggacggattcggcttcaacttcagggtggaattccctcgtcacatcgcgacaagttccagcgaagaatttcattgcttctgcgatgccagcaaatcgggactcggtgtcgcgctttatcagcttgcggacacttcctacggaaaaaaggaaagcaacttgatttttggcaaaagccatatcaaaccgctcaaagtggccgaccacgattcaacaattcctaaattggaactgcaagcgttaactttggaagtcaaagtgacaaagttcgtacaaactcaactcaatttcaccgacgaacaagtcatactttggacggacagccaatgctcaatcgaacggctcaaagaggaacggaaatacgacagattcgtcaacaataggctgaagaaaatcagagaagcttgtttcaaagtcagacacattcgcacggatgaaaatccggctgacatcgcttcacggngaacagacccacagagtctccaatcgtga

SEQ ID NO: 68311 - DNA, 596 bp, Heterodera glycines
gacacattgaccaccatttaatcaatcagtcgaattgccattttttgaatttgccatccatttaccccaaaaattatgccattttgttccctatctttttcccccttaagcgtacattttgatgtccggcattatgcccttcgacgacgactgccgttctcggctgtacacacacatcatcacggccaattatgtgggagagagattttaatgaaatttgaaaccacaaattgggccgcaaaacaaatttaaactggaaaaataggaaaatttgggtgaatgggtcacattttgcaccactttttattttttcacctttgattttttaaaagaatttcgattggatttcacaaatttttagacggttttaaattaaatttaaattgttaattctctcgtgccaatttgctcatgaaatggggggaatggtgctgaatatgccccttgctcaggtgtattatccgcagttttggtccggctcggagcaggccaaacactttgtggacacacttttggacacttcgcccgaccatcgtccgtccgccagcgacgcgttgcaccaccattgggtgaccggcgatcggccgcattcgaag

SEQ ID NO: 68312 - DNA, 955 bp, Heterodera glycines
atgaagcgtcttatcctcacccaaggccagttgaaacgccttcaactgctggacattgaacagtaccggcaggcggtgatcggcttttatgtccgggtcaactaccctgggctgccgtccaaattctcgacgacaatttttgtgcgtttttttgggtagtattttgctaggattttcctggattttttttttttgtaaaattctggaactttcacacgaactccctaaatttagtccaatttttttgttgtacagatcgaccaaattggtgacgtgatggaggccgagtcttttcaacatttgtggctgaagcggcggctgcgcctccgtcggctcggcgattattctattgacaaaattttgccgacacaaaatgtgaagaacgaccaggacattgtcagctggttcagctacatcgaagccaaggttttgtgaagtgtgcatttttcaaaaaaaaattgattcggttttttttgtttgaaaaattacaaaaatgtcgtttccatttttttattgagtgtccaacaatttttttttcaggaagaggagtcaccaacacttggctttgtccatcagaaacaaaatgatttggcacaggcaataaagacgcttgaactggacgattccatcaaaaaggaggaacgtggtaaggaattttgaaattttttttttgaaatttgtcattttgttttgccagtttcgccaccgatcaaaaaggataatttgattcaaattgcgctcagtccgtcaatgctccgtctgttggccaagctggagtttgagcgcttccgtgacactgtcactggctgcttcgtgttcatgccgtgtatcagcaaagaaaaggttgttggtggtggggtttagtattcttggtgtaccggcctatacgctacctatttgggtccaaccttgacaaaacattgttacatgcatttatttcctatgccttattaaa

SEQ ID NO: 68313 - DNA, 428 bp, Heterodera glycines
atgcaactctttagaacgtaagtaaatttgtgaaaaattggaggcaagaacaaaaatcttaattttttatgagatcactttttttatttgatcgttcctaattaaaatttacctttataagatgatataaaaattttatataaaattgaacaaaattttgataaataaaattttaaattaatttcttctgtaatttacgatttaaatattttattttaattcaacatttcatgcgttttcttttattattgaattcatccaattatcattttaaaatttatagccacttttctacaatttattaattttcataaactttttttcatgaatttattaaatctttcatgattatttattattatttttagagttttaattttcgcactcttcgcgacactcccgactgcgggtgatgttgaataattaaa

SEQ ID NO: 68314 - DNA, 4250 bp, Heterodera glycines
atgaaactatcccaagaaatattgtcaaatatttacgttgataaccttttgttatgttgtgatgacccattggttggtaaaaataagatttcgaatgttatttccctttttgaaactgtgtcattaccaataagggaatttgccagcaattcgtccgaagcaatttctgatctccctaatgaccgtatgctcagtggtacgatacataaatttcttggtgtatcatggaacactctaaatgacaatttgttgttaaccgtatcaccaccccctgaaaatttatgtactaaaaggtcaattttgtcttttattgcttctaattttgacccccttggactcatttcccccgtaattcttcccctaaaaatttttatgcaaactctttgcgtggaatctgtcgaatgggaccaaccaattacactaaattcacaaaataaatggaatcatctttttaaaaattgggtacccgctgagaaaattgaaatcccccgaaatcccctcactctcccccttcaaaatcgatcatatgaattacattgtttttccgatgcttcaaatctcgccatgtgtgccgctgttttcctatgtgtttccaatcccaattccgagttttctgattgttttttaattttttccaaaaaaaagttaaaaccaaacataaaggaacaaatttgactattcccaaaatggaactcattgctgcagaaatgggctccaaaatgcttaatttactaattcgcttttaacaaatatttcactaaatccatccttaacctctcagcaacaatttggaaatttcgtacacccgcagccccctggaagggtggccattatgaacgttttgtagccctcgttaaattccatatccgaaaagttttaattggtccccgtccacgtgtttagataatgaccaaataaatcactacattgctttgtgaagttgaaactactgtaaatactcgcccaataacattcgattccgctaatcctggtgacctcagaccccttcgtcccattgattttatacggccattgggctttaatgagcctctattttcttccattgttgagaataccaaaaaataccatatagaaaattttgacagtactaattcatctctaaaagacttatggcatacaattaccaaattatccgaagcctttaaatcaaaatggacaagagattatcttctttcgctaagggagcgccacaaaaaattgggatgccattcaaattgtgtaccaaaaattggggaactcgttctggtacataatgaaaatactccccgctcattatggcacctcgcaattatattggacatattcaaaacagaaacaaagttgcctaatacggcaaaaataaaaacaataacgggtcacattaccacccgttcagtcgcccatttatatccccttgaaacggaaaatgaattttgtaatcgaacatgtgaaccacaaaagcccccaatccaaaaaattaaatggacaccataccccccaaattataaagcaaattctaaaaccatcatccctcacacttccgttccaagggcgtttgtcgataaaaaatggacttgggcccttcagccaccgacagtaccccacataacaacataatcacatttccgtgcccgggagcgcgctgatcgcgttcaatgattcaatgaattttcccacagcccgctccttacgatcacatattaaaatttacacttttccatgtttatcaacttttgccccccccctttttttcctttctgccgctaacatccggcgggccagcgaatgggttttcgccttttcacacgttttcccttcccatcccgtattgtaaattaaaatttcattgaatctcggcactccatttccttataaaatggactttaattaaaaaatattcatattcttcactgtttctcactaatgggaaatattctctcgcttgagtttgcgttccatcacaacccagccccacagcaatcccaatccaacccaatcccacttttggccatcctaatccctatttttttgatttttgcagcggtaatttcatttgtctgcgtccgatttacaactcattccttgtccgttttggcctctgctcaaattcggcacatgtaaatcggcaaatctcaccgccaccgctccaacccactgaacttccgatcaccgccaccgctccaacccactgaacttccgactactcatccgctcccatcgtccctatccccctcaattattccgacggtcgtgttcctttttgtaatttttgtgctgcttccccccattcaagcgcatcccaaaattaaattatccccaaaaggaattgctaaaaataccctcccaatccttgcttcatccgccctgtatctttgccttgattccctagcctctgaacctgaaaataaaccccaatttcccatttcgcttgtgttggctatttttcctgtttggcaggaatcctccttcttatttttattaaaatcttttttattttgcgcaatcgtctttttggaaatattgccaattcccctaattccatttcctcccccgaatccatcgaacttggagaagttcgacatgccattcaagagttggttctgcgaaccaaccccccgctccgctaaataaatttgaatggaagcacgaaaggtgccaaaattgtccccaatttcgatccaaaatatccataaacacttaaagcttagtccttttaaccctcccaatttctctgacgccaatatgccgactgaaaccgatccatcccaaatcgacattacccagaattcactattgtccgttgtacccagccttgagtcatccctcccccctgaaattgccgacattgaattgaacccccgaactccggacactatctattcttcatgccctcccaacacgagaccaacttctccgacaaacatccccaccgaattcgttgttacaattccttcggatgaggtaagttcgactcgtgaacgaatccgaggaccatcaccgccgaccggccaatccatcacaaaatccaagtggtcacaggggtcacgggtccacaaaattcaaatttcattcaccccctttcattctcccacaattgctcgccgtgctcgtcctcgcatcatctctcgtaccagagtcggaccgcatggccaattgcagcactttccgatgagcactcagcgaataccagtccggtccggtccggcatttttgaaaattccgatctctaataaaaaatgcttttttatgcgttttactcaggagaaattaatttgaaacgcaatttaagtatttttggagatacatttttggtcaaaatatgccagattttttgaaaaaagtatttgttaacacttgttttttatgcagatttatgttttataagcagtattcggatttatatgtgctaaaaacgatatattttagcaaaaaaccaccaaaatatttgctaaaaactcgaaaaggctaaaatatgtgtctacaattgaaaacaaattgcaatttttcaaaaaatcgtatgccttatccattccactagcataatttaaaaatccaaattatattgaaacttttcaaggacgaagagcaacaacatttatgtggtcaacgtgggttgacgacaaattttacgaaggggtccttagttggtcgcaatgctcgaccctttccttgacttcgccgcttcctttgattttctaaaattttttcaagaaaaaattgtcaaaaattttttataagaaaatttctcgaatttgaccgggatggacggatgccagattatctgccgctgagtgaaattaatattatattcgtgatcagcaaccccgaaaaccccagaaaaaaacaaaaaaaaattttttttttgtgtggcgtaaagagaaacagtaccgatttgaaaactttttatttttttcggcggagttttgtcccgctccgaattctttaccattgacgaaaaaaatcattacgccatcccatggaaaagtttctaatgaaaattgccgatttctttctgttcagcttggtgctgatcaacgcgctgtacttcaaaggcacatgggtggacaaattcaactcaaaatgcctgggattgcttttagtttgtctgctactattaaatttctggacgagtgactgtactgttttctcaagtaagctttacctaagcccaaatacttttcgaaaaaaatgtttttttgttttctgaagtcgtgaaaaaatatttccgagggttttctgggtctctgatc

SEQ ID NO: 68315 - DNA, 57 bp, Heterodera glycines
gctatagggaagctattccggaaggattcgggtctccccataaatctgggcgcatcg

SEQ ID NO: 68316 - DNA, 669 bp, Heterodera glycines
tatttatgaaacaaaaaaatcgattttttcaagtgtccgtttggggtactcaaacaattatgggggagcaaaaatccaacgcagaattaaagtacaggctatagggaagctattccggaaggattcggtctccccataaatctgggcgcatcggttcggggggactgccccgaaaacaaaaaaatcgattttttcaagtgtccgtttggggtactcaaacaattatggggagcaaaaatccaacgcagaattaaagtacaggctatagggaagctactcccgaaggattcggtctccccataaatctaggcgcatcggttcggggggactgccccgaaaacaaaaaaatcgattttttcaagtgtccgtttggggtactcaaacaattatggggagcaaaaatccaacgcagaattaaagtacaggctatagggaagctactcccgaaggattcggtctccccataaatctaggcgcatcggttcggggggactgccccgaaaacaaaaaaatcgattttttcaagtgtccgtttggggtactcaaacaattatggggagcaaaaatccaacgcagaattaaagtacaggctatagggaagctactcccgaaggattcggtctccccataaatctaggcgcatcggttcggggggactgccccgaaaac

SEQ ID NO: 68317 - DNA, 237 bp, Heterodera glycines
aatcgaacgctaacggacgacctaatggaaaaaaatccccgaaggagagaatttaattaaatccattccttcgggggaccgtgccgggtgccgcggggtaagcagtgctggttcgtttcatcacggcaccgaaccttttggctagtcagcaatcgttacgtaacttgccagatcggacgggtgcgcatgattccacggggagaagcaccccaccaaaagcaaaacgatataaccaaa

SEQ ID NO: 68318 - DNA, 651 bp, Heterodera glycines
atgaacttttggtattttaccattgcattattaaccaaaatcagaaaaattttaatttgtgatcaaagtaaacaaaaagtttaataataataataatatttattttcaaatatgtaattttaaatattaggccttgtaggacaactttacagtgatgggatggcatataaatattttacttgacactgaaattttttatttaaattaccaggaatttgggttttacctatgagttttattttcgaatttaagcatttttataaatccacagttatttttattaaattttcgattctcgggaaatttacatttataaaataatatgtatatacgtatttttgctttatttcagcaaagaaatcggtgttctttccttcaattgaattgatcgagtttacgatcaatttgctcgggttcagtcccgagaatgttcaaagcgaatggaaccctttgatttatgaattcttagacaaatatatcaaaggtagatgtacaaaaatcaaatattgacccaactatttaaacaacattcaggtctaattgttcaaactatgcatctagaaaaaagacaggtgtgttgtgtgaaatctgaataacagcccagggcataattacggattacagaaattacagcgtttttcagctcccata

SEQ ID NO: 68319 - DNA, 343 bp, Heterodera glycines
atggacccggttcctttccaattcgggcggttacagtgcaatgagcagcttattccaaacggattattcacagcaccgatttttgggtgaaaaatgataataatattaatgctaatataatcaacatttattattacattaaactttaaaaaaattattttgcttaaattatttttgaataatttttgaaactgttacatttaaataaaaattaatttttttcagggcttatatactaactttaattaaattaattgacttttaatgctttaattttaatatttttcacagaattatttggaaaaattaaaaaaaaatcaaacaaaatttatgcaattaaaaa

SEQ ID NO: 68320 - DNA, 668 bp, Heterodera glycines
atgcatgggtttggcctttttctgtcgctactggcggcaataaatttgtcgagaggtcaaattggtccaaaggatgaaagcaaaaaaggtttgaacaatattttcaataaaattttaaatattattttgttttgttttaggtctttttttgatggccaacgaatttctcgagacagggaaaatgcttctcgacgaattcccaggaaacaaacaggcggagaataaatctgatgatggactcaattcacaaaaagcgaatggaaaggcattggaagagaaaagtgacaatttccagcaaaaagcctttgagtttttgtgtggaatcgaaatgaaagcaaaaaatgatgagaaaggaaatgacaaaacaaagaaagatgacaatttgttagcttttaaagaattagaagaaaagcgactcaatttttgtcaaaattggaaaaatggcaaaagcatttggaaagggttgaaagaggcagggatttcaatagtaacatcagtgaataatttgaaactgaatcagcaaatatacggagaaagtgaacaatggcgaaaatggaaattttgaacagcaaaaacaaaaaagaatttgaaaattttgcgaaattaagtattgatttggtaaagaaagtaactgaaattcttaaaggtaaccaattaagttattctaa

SEQ ID NO: 68321 - DNA, 409 bp, Heterodera glycines
atggaagttttatccgacgaagaagaaggaatggcattgtccgatttgaaagagacagcaaagaaaaacaacgaagaagccaaacgccgagaatttgaccggcgactgccaatcattcactcatatttgggcgatgtcaaccaaggggaattgtctggtcaagaaattaaacaaaggcaatttgaggaacctgggaatacaatcaaaatttcgggtaagaaaaaattaattattgggcaattggtaaaaaagataattttgtttttttagtttttgttataaacgaagtttgtctgtttccgggccagaaaatgccaatccaattccaccaaaggtcgggcatccaatttgtgcacaatgcacaccgtcagcaaaatatccttgcccttttcactgcggaagaccctaa

SEQ ID NO: 68322 - DNA, 56 bp, Heterodera glycines
atcattggagattgggggattaatggagattgggggataattagagcaaatacggt

SEQ ID NO: 68323 - DNA, 2531 bp, Heterodera glycines
atgtctcttttaaagaaaaatattcttcacagaggtaagtgttacacacttttactgagttaaaaattaattataaaattaaagaatgataaaagcaaaactttgacaaaataggatttttcgagtgatcgttttagggttttaagggccgcagaatccgaatctgcacccatttcgacccagttctaaccccctaagctagactcgaacaagtcgaaaattaattgtttttaaaacaaattttgccataaagtggggcggaaccgacttatccagcaccagaagcggattggattcccagactctgaaaatctcttcaacaattttatcttgtctcggaaaagctaccatcggcagaactagcaaagtttcgatgcgcgctttggtgtaaatccataaaaataccgggccccattaattaattactgatttgtagggctgggaattttatgtaaatacatattttttcctggcttctccatgctctaaatagtaggaaaaacacttgcttttttttgtgttttgctaacaaatgttgggaatttacatatttagggattttatacatatttggtacaaattttggactttttttcttagatattttcattttttttttttacatattttgaggatttactacggaaatttttcgaaatcctcaaaaatccaaaaattcggcaaatttttcgtaaatattttctttattttttgaaatgtacccataaaaataaaaaattaatttataaatattaaaatgtgattctaagactgtttagcttatttttattgcattttgtgcctatttcacccattaagaagaatttttttgcaaaaaaaaaaccattttaaaaattttatttacatatttggtagatattttggtttttttttttgtacatatttcgggattattcttacatatttatgtacatattttgaccaccttttgtacagaaacatataaccttgtgactaaacctccagtctttcttttattttacgaaaattacctaccattaaaaattaaaaacaattaaatattatcttctattctaaaatatagactaaaaagttaaaaatgttttccttttaggtgcaaaatcgtttaaaattgtaacaaaatttctgaaatttgccggccgcgcctgttgacaccgttgacacaaaaattaaatattaccaagatttaattggataagtgaaaagacagtcacaaaatctagaccatggaattggcattatgccaatttttgcctttttgcttcttctcaaatctaacattatttaatggcattaagccaacgcattaatgtgcctgtaaatgggcatgaattataaagaaatgcctccaatattattagaaaaatggcatgcttatatgctaaaattataaattgaatttgatcaataaaagtaataaatggcaaaaaatgaaaataataataattgaccagaaaatgaaattattttataaaaaaatatcataatcacttgggaacaaggctgggcgaaactttaggttttagaaatgcaatttgttaagaaaatcacttgaatttttgaacaaaaatgagcatgtactataattgctagggctaccaattttatgtaaatacattttttttttcctggcttctccatgctctgaatagtaggaaaaacactttcttttttgtgtttgtgaacaaaagctgggacttttatttacatatttttacatatttcagggtttttctacatatatattacatagtacttatttttatacatatttctgactttttcgcattttttcatacatattttgcaattgccaattcactataattatgtcaaattaaagtgatcattcaattgccaattcactataattatgtcaaattaaagtgatcattcaattgccaattcactataattttgccaaattaaagtgatcactagagatgggaatttaagtcaactgactttttttttgctgatcttaaatggcctaaaaatgactttaaaatgttccacactttgtttgaagcttctaacatgcattttttgtgactttttggcgattttttatggcttttttagtccactttttggagatttttcgtgacttaaattcccagccctatacctatcacgaagcaacagatcccacattcattcactcattaattaacattcttattgtcaccaaatttgcccaaatgaagaacaatcattttggcttttcactgctctccgccgttggcatcgcttctgcttggctaataatggcaatgcttttgatgatgccctcttcatccatcgctgatgatgatgatgaagtatttcaaatattcgcaagatatggttacaaatcatataccgttgaagtgaagggcacggacactgtggcaacactgaggcaaaagatcggacaaaagattggcattgtgcccggacaaattagacgcgtcccatacggtgtaattaaggacggagaaacattgaatagatatggcattgaaaaagatacaaccattttcttgtga

SEQ ID NO: 68324 - DNA, 330 bp, Heterodera glycines
atgaagaacaatcattttggcttttcactgctctccgccgttggcatcgctgctgctgcttggctaataatggcaatgcttttgatgatgccctcttcatccatcgctgatgatgatgatgaagtatttcaaatattcgcaagatatggttacaaatcatataccgttgaagtgaagggcacggacactgtggcaacactgaggcaaaagatcggacaaaagattggcattgtgcccggacaaattagacgcttcccatacggtgtaattaaggacggagaaacattgaatagatatggcattgaaaaagaaacaaccatttttttgtga

SEQ ID NO: 68325 - DNA, 184 bp, Heterodera glycines
aatatctataaaaaatttaaaaatgagaattcatgcgagattttctggaaataagcttaatagggcctagttaagctgtaaacaaaatttggggcgatttgaaagagaatagaaagaaccaggttcgatgaagttttggtaagccaaaaaaaaaaatccaaacatttaaaaatctattaaaaaa

SEQ ID NO: 68326 - DNA, 349 bp, Heterodera glycines
aaaatctataaaaaatttaaaaatgagaattcatgcgagattttctggaaataagcttaatagggcctagttaagctgtaaaaaaaatttggggcgatttgaaagagaatagaaagaaccaggttcgatgaagttttggtaagccaaaaaaaatgcaaacatttaaaaatctataaaaaatttaaaaatgagaattcatgcgagattttctggaaataagcttaatagggcctagttaagctgtaaaaaaaatttggggcgatttgaaagagaatagaaagaaccaggttcgatgaagttttggtaagccaaaaaaaaatccaaacatttaaaaatctattaaaaaaat

SEQ ID NO: 68327 - DNA, 244 bp, Heterodera glycines
  unsure (1)..(244): unsure at all n locations
taattaaatccattccttcgggggaccgtgccgggtgccgcggggtaagcagtggctggttcgtttcatcacggcaccgaaccttttggctagtcagcaatcgttgcttacttgccagatcggacgggtgcgcatgattccactggtccnagcaccccaccnnaaagcaaacgatataacaaaatataaggaaaaattnttttaaaaaatttttctccatcttcctttttgatactaaagcatc

SEQ ID NO: 68328 - DNA, 986 bp, Heterodera glycines
  unsure (1)..(986): unsure at all n locations
agtctttcgtttttatttgttttttgcataattaattcataaatatttttttcacaaaatgctctgaaacgcaccaaattttatttacatgctagtttaggcactctgatgctttttctatcaaaaagggagatgaataaatttttaaaaatttttaattcctttttaaacaggccaaaaagtttaggcttatcttttttttcagaaacttatcagaagcgccccaaactttgcagggatactgaaaggaagagaaataacctattttaaatattatctagtcagttcatttaaataatttttatccaaaaaatttttttttgggttttcggggcagtccccctgaaccgatgttaggcttaacgttttttcagaaactgatcagaagcgcagcaaactttgcagggatactgaaaggaagagaaataacctattttaaatattatctagtctgtttttttaaataatttttatccaaaaaaatttttttttggcttctcgggccgtcccccctacncgatgcgctcagatttatggggagaccgaatccttcgggaatagcttccctatagcctgtactttaattctgcgttggaatttgctccccataattgtttgagtaccccaaacggacacttgaaaaatcgatttttttgttttcggggcagtccccccgaaccgatgcgcccagatttatggggagaccgaatccttcgggattagcttccctatagtctgtactttaattctgcgttggatttttgctctccataattgtttgagtaccccaaacggacacttgaataaatcgatttttttgttttcggggctgtccccccgaaccgatgcgcccagatttatggggagaccgaatccttcgggattagcttccctatagtctgtactttaattctgcgttggatttttgctccccataattgtttgagtaccccaaacggacacttgaaaaatcgatttttttgttt

SEQ ID NO: 68329 - DNA, 403 bp, Heterodera glycines
atggcgatttttactgaaattttctttaacactttaccagcattgggcgcacttttattcaactgggtcagttttataaataattaattatattttttattatatgacaagtgttttttttcaatttttatattattgtatttaaatttgtttttatttttttaactagttttgttgttactttcagagcactgggctggtgatggcaaattacgttggtgaactgagcatttcggcatgccccgtggacgcgttcatttgtgccgtaatttattggagaaatttggtgaaaagaggtggcgttgcccaacagcagcagaacaacattaatttgatgacggtggccaaaccgatgacgacgatggccaacagaaatgtggacagaagactgaccatccgatga

SEQ ID NO: 68330 - DNA, 89 bp, Heterodera glycines
atgaaaaagtttagtaaatttccggaaaaaaacggatttgcgaccaaatcagagccaaaaagggatattttccgtaaactgctgaaatg

SEQ ID NO: 68331 - DNA, 94 bp, Heterodera glycines
ggattatttttcaaaacacctcgtagactgggggataattgaagactgcgggattaatagagactgggctataattagagcatatacggtaatt

SEQ ID NO: 68332 - DNA, 2615 bp, Heterodera glycines
cccccggcaaaatgctattttaactttgcggcagcaacgggcgccaatcggagtcggacgatgcaccaaatgcaccaaagttgctacgcgggggtcgccgggcccaacggaggaccgctccgaccgtccgtctctctctgtaaggcttttcgccggggggggggcggcaaatggcgaatgattggcacggcaaacggacggacggaacagcggaagaataagcctttgtttagccgttgtccacgagagcagtgcgctcggctcggacggcgaaagcatcgaagtgtcgccgtgtacgagcgatcagtcggcgggtggcggagacggaaatttgggggaggggcgacagacgacgaagacggaatacattccgaaggtcaaacttcgccaaaagccgaaccgacgctggagcgaagtgagcagcgaattggaaatcattggccaatttgggggattattaacaaattcatctgtcactaattaatttcgcgttgcaatgaatgacgtcatttctacacacttttggtccggggttttcccccccccccattagtttcctccccattatccccctttttttccaattccccccccccccaattaaaacattttcgatttaatttagtgccactcaattaaatgggacgtggaaagaatattttttacataataatctccgagagagaatgcgattcttgtttatcatcatcagaaaataattggtgaaagaaggaaaaaaggaaagaaaatgaggaaaaaatgaaaagtgaaaagaatggcatcatttgaaacttcgtaaaatgccaacaatttgtgttggacagtgctcgagagtctcgtcctttcaactgatcgtggcctttccgtgaatgtgaagctgtacttcccccctttagcaagacatccaaaagcgactgtcacttccgccggacattcgtctgccccaaaatgtgatcgacaaattgaatagaacgccaactctggacaatccgttgacgcggaagagcaaaagggcgtcgctgaacgaaatcggattcggcaaattggagacgtacaaaaaaatattcgatttgggcgagggaacgtacgcgacggtttatctgggcaagagtttgttgactggcaaaaacgtggcactgaaggaaatacgattggaacacgaagagggcgcgccgtgcacagcgtaagggaccgccgatggcacacgttgaaaggggaaaaagggggggggaggaggaaaagccaattggaggggataaatgggggaaatgatggggagattagtgaaatggacgaaaatgaaaagaatccctattattcagaataagggaagtgtcactgctcagaaacttacgacacgcgaacattgtgacgctgcacgacattgtgtacacggacaggtgacacggcacacttttaggatggcattttgccatttaaacccacgaaaagcaatggggccaaagggggggggggggtgaggcgcagaatgaccaactaatcccttcttatctctcattgccctcacccaaaagtccatccgttaggattctcacgttggtcttcgaatttgtggagcgcgacttgagggagtacatggaggagttggacgggattatcagcatcgccaatgtcaagctgttccttgtgcagcttttgcgcgggttggcctattgccattgccggcggattttgcaccgcgacttgaagccgcagaatttgctgatcaatcggacgggcgaactcaaattggccgactttggcttagcccgggctcagtcggtgcccaccaaaacgtactctaacgaagtggtcactctgtggtacagaccgcccgatgtgctgctcggtaagcctggccaatgggtttcccccgcggcgttggcatttcatttgccatttcccaggctccacggactattccacgcacattgacttgtggggcgtcggatgcattctctacgaaatgcttctccacaaagtgccgtttccgtcgccatcgctttttctttttttgttaattcgatttgcccatttgttcagccaatgttccccggcagcacaactgatgaacaattgaatctgatcttccaaaagctcggcacgccctctcccgcggtccatgccgacatttgcgccctccaggccttcaaaaatggccaatttcgacaacacaatgccaaaccgttgcttaaccctccccgaatttcgcccgaacgtgccgacctgttgagcaaactcttgaaggttaacttttggggatatttttattagtattgccccaggggatgattcattagtcatttaattggccgtcgttttgcagtacgaagggaaatacagaatttctgccatcgatgcaatgcgccatccgatgctgaactgttttcccgcacaattgttctccctcccagacacagtatgaaacaattgctcattttctcagtacagtacccccccccccttccatttggcaattgtaggaatctgtgctgagtttgcccggggtgcattatactcgagacagtaaagacgaagcgtacattgagacgaggaaaagcagtgaaaggacagagaagccgactgggcagagaatgaggacaacgatacagtga

SEQ ID NO: 68333 - DNA, 99 bp, Heterodera glycines
atgggccagctgaagctgtcatcgagaggacgaattgaggaggaagaagaagaggaggaagagatggacgaagaggagcagcagggggaggaggaggag

SEQ ID NO: 68334 - DNA, 119 bp, Heterodera glycines
agtaattagtcaaaatacatgtcagattcgtgattagcgacctttaaaaccccggataaaaaattatcatggttttttatcttaaaaaaattttgcaaaacaaaagggtcccccctttt

SEQ ID NO: 68335 - DNA, 321 bp, Heterodera glycines
atgggaagtcatggagtggactgtgcagtgacagtccgcggcaacagctgcggctgtgtcacaatctgtgacacatgctgcgagaacggctggtggcagcgctatgtggacgcagcgcgggaccaggctgcgcggcaggtcgaggacagcatcgacccgtggacaggaatagtgcggggagatgaggacagccaaaggctttgggtacgcaaaactcttttttttttttgaataaattaaatttaattatgttttcaggtcgaggggcacgatgtgcgccccaaatgccttggatgccaggccgtccgcgtcgactatctg

SEQ ID NO: 68336 - DNA, 989 bp, Heterodera glycines
atgacaaatgaatataagcaaaaaagaaaatattcattaaaagaatggcaccaaaattatgaagaaatttgtaagaaaattggagttggttatggaacaattaagagatggaagaaacaatttggcattagctgtaaaataacggagaaagaaaaaatggaaaaaatgaaaaaatattggaaaataaaaagtgaaaacccaaaaatgagtgacaaagaaactgctaaaatattgcaaattgatagaaggaccatttcaaaatggaagaaacagtttggaggagagattttggaggatttaaatggatgattataagaaaaattggataaattttcaaacaagaaaattatttacgacataaaaactgattaattcttatattttatcgaaccattgtcaaaataactggcataaaatccgtttatttttctcaattggatacgctgaatttgcttctattgtaaataattttttcttagtaacgaaccatcattgttatgatttccgaccagggctgcacgcaattacggattgcggattacggaaattacggggttttgggagttacggattacggattacgggttacggatttttgggatttttccgtaattttgatccgtaatttgacttttggattattttttcgagacgatttcttgtaagattatttttataaaaaacaaatttttctattttttatttaaagaaaatatgttcatttctttaaattcttatttctttagcaatttaaaaatgtcaaacttaaatcctggtaattggtggtattattttgagcgtcaaggcaaatcaactgctaaatgtaaagccgatggatgttcctactcaaagacattaaatgcttctctcagtacaacagtgcttgcttgtcatctcaaaaatcaccacccacaactttacaaacagcgtgaagattttgttcaagcagagaagcaaaaaacagaaaaaaagggacaaagtggaataaa

SEQ ID NO: 68337 - DNA, 823 bp, Heterodera glycines
  unsure (1)..(823): unsure at all n locations
catatgactttcaacatacattcgaccataaatacagatttggaacncgcgggtttttctcggcgattgtccacggcggtgtcgtgccaatgggcgttgaatgagttgtgccttcggcacgtgtcgtgccgcgagctgtggacattgttccgacgcaattgtgcggtcgatgcgcagaatcaatgcaaaatggccaataagtgggcgtagggggggacaacataaaataatgtatcaaaatcatgtcgattattttaaatttaaggcattaaaataaaaataaatttaaaaattgtcaggaacgactgctggcagtcatttgagggcatcagttggaccggactcggctcctgcacctgcgcagggaacaattctgattgccattggattcgtctgcagacaaattacaacaaatgcatttgtgtgttggcacttttgaaaaactgatcaaaaacgaataattgatcaatcaatacaaagaaatctcaaaatcgatcgaatcattaaaaatgataatttgatcaaaatttatcaaaattattttcttttcttcagatgagcttaactacgacgccgattggcatgctcacaatcagctttcaactgcagcacaattttcctcgagaacgacaacaaaaacatttcaacaagagggaaatttgcacgaaagtgttggggtggaaaagtggagggacgagagacaacgggaccagtggagagaacaggatgggaaagagacgattagagaccatggggaagaggagaaaaggaaaaaaggcacatagagaagcagtggaggaagaggaggagaagaaggagagga

SEQ ID NO: 68338 - DNA, 1605 bp, Heterodera glycines
atgccttttttaaatttttttggtgcctattatagtgcctttttcgcgatttttggtgcctttttagtcgtgctctactctttaccatttttagcacatattttggagattttttataatcagggagcaaacaaaggttttttgacaacttttttcaatttttggtgcctttaatctcttaatttttatgcttttttccaattttttgtgctgattttgccttttttgtgcttttttcatgcttattttggaaaaattttatgctgttatagtgcttaatcggtgattttttgtgctgaaaactgagcactagggctgccaattttatgtaaatacatattttttcctggcttcttgctctaaatagcaggaaaaacactttcttttttgtgtttgcgaacaaaaaccgggacttttatttacatatttttacatatttcggggtttttatacatatttacatatttcgggattttcttacatatttgtacatattttggattttttcatatatattttcattttttacatattttgaaaagcacctgcgaccattcgtgctcaagtgcttcaaaacacatgcacacctgtgctggcctcttttccgagcaaagatgccacaaaaaaggtgggttactatcaaaaacaattttgtaaataattttgttttctttttattcaggtcatcaaacgtttgcgccgtgatgaaaatgcaccgcgagccgaacctctcaatttggagcagttggagattccgaatacatatcgtgtttataagcgcactgagattgacgaggagcaattcctgttggcggacactggcgtttttaaaattcacggacagaatggaccccaacggtaagacatttaccgtttaaaccattaaataatggtcatttacactagccacaacttaatggcgttttcaattggttaagtccgaagacgaattttatgaatttttttttttctaggtttctagacaactacacgggcagaatgcgcttcaatgttccaatgacgcacctctgtttgacccacacgaatggaatgttcatcagcgcaccttggatggtgctgatcggacgaacaacttcgccgaggcattccatcggaaactttatcggcaatttagctgaactcatccaacaatttggcgattcattgacacgatcagatgtgagcagaaggcgcttgatgctgatatggcacgttgcatgatgggagaagccgcaccccaaaagaaaaggaagtatcgcgatgccgattcacggattcttcgtctcgtccaacgttataacgatgtcaatattgtcccccaaaatgatcacaattagagaccggcgcaggacaggatcctgcgcaggattttgcaggatcccagtctgcaatcctgcatattttggaaaatacaggatttgcaggattaatcctgccggatcctgtcctgtaaaaaattttgaattccaatcctgcaacaggacccgcaaatttgatttttatgcaggattcagcaggatcctgcattgattttttgaaaatttaaaaaaaaagaatgccaaatattcagaaactttcttttttcaaaaatttttttctaataaa

SEQ ID NO: 68339 - DNA, 333 bp, Heterodera glycines
attatgagccacccaatttggcaaatcggtctttttaaacgcattaaagaagaatcagtcgattgcttggagtgtaagcaaaaaaacgttattaatttttcatcttcatcattttttggtttaaaaatatattgaatacttttttatactttgaaagacttttttattaatacagaattttttgaaatttcctaaaatccgcaatcctgcgcaggatcctgcagattttaaatgcaggattgcaggattaatcctgccggatcctgtcctgtaaaaaattttgaattccaatcctgcaacaggatccgcaaatttgaaatttccggtctctaa

SEQ ID NO: 68340 - DNA, 95 bp, Heterodera glycines
cgcgaggaggaggagcattaactgcaacaggaaaagaccagcaaaaaggagacgaaaaaggccaagaaaaaggagttggaggaggacgtcattga

SEQ ID NO: 68341 - DNA, 309 bp, Heterodera glycines
tgatgagataaaattgggcgagagcaaacgacgacgagatgccgagttgtttattttgttgttttgattccagtgtctgatggagcactgcttttctctttctttcttttctctgtcatttccacacttttcccttccttttttcttgacatggtccaaaatgttgatgattgttttcgtaacaaaacttcaaattgtacaaatgcgacatttctcatttatagtaaattattttgttttggttttggaccagttcgggcaaattgtctatgttttgatgatgcgagatgccattttggttgatgatga

SEQ ID NO: 68342 - DNA, 184 bp, Heterodera glycines
cgacaacgaagcaaggcatgttggtcaaagacgcacaagtgaagccggacatttcgaagccgcgctgggaccagtcgacgttcagtggtcgcgcacggcacttcttcaccgtggtcaacccactgaaccttttggcatcgaacaaccaattggaaaacagtcgcaaaatcgtcaccgattacga

SEQ ID NO: 68343 - DNA, 130 bp, Heterodera glycines
tctcgattcccgagtcgagaaatttctcgggttttttgggtctcggttctcgtatcgtttcccggggtcatttctcggttctcgtatcgtttctcggttcccggtaaaaatcacttctcgcacatcccta

SEQ ID NO: 68344 - DNA, 666 bp, Heterodera glycines
atggcacgccgacgaagaaagaaggagccgcgaaagcagtcgtacaaggtgcagtttacaacgaaagcaaaatgccatgataattttgtaattgtccccttatttcagctgtacgttcgacgtgtgctgaaggaagttcatccgggcaaggaaatctcaatgcgtgcgttgaacatcatgaactcgtgggttgctctgctgaaagctcaacaataatattcattcgtttaaccattttctagcttcgtcatcgacgccttggaccgcattgcaacggaggcgacgcgaatggcccacaacgaccggcgcaaaaccatcacgcttcgcgacatggagttttctgtccgactgtgcctgcctgacgtcatggccaaagatgcgaaccagaaggctcagaaaacggtgaccaagttctatgctgcaaaagtgcgggatcggatgagaaggacggagatgcgtcgtggcgaatttgcgatgatgcagatggcagcgctgtgagcacactcaacttttggacgaccggcggatgaaggcacctgtatattgttgatgattggccccgtatcccccattactgtatgtgtatgtattatacaatgtatctaccattcttgtgtgtgtatgtattattcactatgtgctttatatgtatacctggtcaataaa

SEQ ID NO: 68345 - DNA, 804 bp, Heterodera glycines
gtagagaaaattttatcaaaaatttattttaatttaaaatctccggcaagttttgctggaattcaaaaaattttaaatgaggccaaaaagattgacccgaaaattacgaccgatgacgttaataaattcctagaaaagcagaaaacatacacgattcacaagcccatcaggaaaagattcccgagactaaagacgataccaagtggcttccataccgattggcagtgcgatttgtgcatatttgaccagttgaaaaagcataacgacggttataaatatttattggtctgcatcgacgtgctgagtcgaatgatcttcagtgcaccggccaagtcaaagaagagtgaggacatgatcgaggcttttgatcgggtgttcgaaaagtctaaaattatcccgatgaaaatatatagtgacagtgggcttgaattccaagcaggaaaaatgaaaaaatattttgaggaaaaattcatcatcaaaaatgtaatgtatagtcctgatctgcacgccggagtcgttgaaagggcaaatcggacaataaaggagcgcttgtacagatattttacaaagaaagacactcttcgatgggtcgacgtaatagacaaaataataacaaacattaacaacagtgtgaatagaacattgggagccaaaccgtcttcaattaattttgaaaatgcccgtgcgctctgggaaaaattatataaggagaaggaatttaaaatttcgaaaaagaaaaaatttaaaatcggtgatatcgttcgtattaccaaggaaaagggaaaattttcaaagggatacctc

SEQ ID NO: 68346 - DNA, 133 bp, Heterodera glycines
ggaagctattcccgaaggattcggtctccccataaatctgggcgcatcggttcggggggactgccccgaaaacaaaaaaatcgattttttcaagagagcgtttggggtactcaaacaattatggggagcaaag

SEQ ID NO: 68347 - DNA, 170 bp, Heterodera glycines
atgtacttatgtatgtgcctgtctatgtctgaaatggccaccatgctgcccactgcgggaggtggctatagctttgcgcgtaccgcatttggtccatttggcggctatctcacaggcacggcaattttaattgaatatgccatcgcccctgcagccatcgcatgctttat

SEQ ID NO: 68348 - DNA, 1290 bp, Heterodera glycines
atgaaaaacacaattaagtccgagctcttggcagtggaggaaggagagaccatcttccacggacctccggaaggcatgttaactctggaggagttaataagccgtctcgaagagaaggttgccggctacgaagccgagaaacacttctgcgtcgggccactctatcggcaaacggaccaccgagaggccaaggagctggcgcagacagtatttgtgaagtttaaaaaaatgaacaacatgtgtttagattgcgcaaaagcaagcagtagctgttcacctgcagccgactgctgagcaacttgagcaaatggtgttccagttgatgtcggccgccgaggaaaccactcttcatttaattgaacagagggaagaggattttaaatgggtacggtgaaggcaaaaatcggaaaattttatttgttggaatttcaatcttttgtttttcagatcgccattgagctgttcgctcgcaataagcttaagccgaaggacctaaatgagttttgtcacagagccatgattggctaaattaatcttgacatttattttccagccaatttggaccaccggcgaagctcaaggcgatgaagaggaggacgcagaaatggaggaggtgcaggatgatgattgggaagattgagggggtttttttgtgggattgttaatggcggccacataggatggtttagcaactcccttttttcttttatgtttgggtggccgccaaccagggatgcaacaggcataagaagtttaaattttaaaagtttcgaatatttccgagaatagtgacgagattcaactgattaattaagaaacgttttggaattaattatctcaaattttttgggaaaaaattttctcaaaaatatagtcagccgaagcaaaaaaatgcggcttcttggctcagaatgttctgactacggcggaaaacttggcattttaaaaagtgaacacacaaggctttgttttggtttcacgaccaaaaatttttttacccgactaatgaaattttaaaactcaattaaaattcaaactttttttcattaaggagtaaagaatttttcaaataattttttaaggtcgagcaaatttttttgaggtcgtgaaaccgaaaccaagtctaatctcatccctaaaagctgttccaatttttcaagggttgcattcctggtctcaccatttgttcatttgctttttgttggataaatttttgttggaaacaaggaatccttctgtcttggttcaccccccccctcccgctcacaatcgcttttttccatgaaaaaa

SEQ ID NO: 68349 - DNA, 395 bp, Heterodera glycines
atgagttttggacgactgaacaatgcaacgccaattgagctttttgaattggagaacgaacggactaatgagaagctgacattgaagggagtgtcacgccatcctggcaattggctgttgaagcgatgcccaactaatggagaaacgacgacggttcagcagcagaaagatgaaaattcggatgtcaatttgcacaatgtccattttgtgcttgatattgacaaacaatgcattgggtgagcaataaaaaaaacatttgattttgtttaaataattcaaattgcacttaattatttaggccattgtcgccaccatcggaagaagaaaaagcgggtcaaagcaacgatgaaatgttctcaacgactcccgagcccagtaatcagcggaatgagtga

SEQ ID NO: 68350 - DNA, 784 bp, Heterodera glycines
atgaaccgacaattaaagaaaatgtgaggaatttttaaattgatgatttatcatttaataaatcttttcacacatttcagctacatttgtacggatgtttggatggacattctcccgttctttgaacgagttgaactcggcctcacattggcacttctctctccgcgtttcgatgttttggtggacgcgcatttcgacggaaaaagaaaattgacaatttggagacgtatcattgttcgaaaaggcaaaaatgccgaaaaagttcttgttggaatttattggtgcaaagaagagcattacacactcatggactgctgtccgttgccgaacaaaattcgcttcgattgccttcaaattgagtaattcttacaaaattttctgtgtgtattatgaacgcgttttttatgtcccctttttcagatacatcgatcattctgtgctcgcattttttcgctccaatcagcaaatttttgacaaaggcaccaatttgactatacatatacaatcatccaaaaccgaaagcaatgtgcagccaatttgggatgttttggtccgtcaaatttggcctatttttacggcgacaaatgtccatcatttgcgctttggcaatgctgatcatttggacactttgcttcgcctcacatcgccgacaattccctccgatctgaacattaattcaatccagtcttatcgtggtctgttccccgacgcgcttggtggtgatgatgggccaaatatttcaaagaggtgtgaccaaactttcgttaaaccactgactaattga

SEQ ID NO: 68351 - DNA, 135 bp, Heterodera glycines
gcaataaaggaaattcacagcattcgacaccgtcggtacggagagcacataaaaagcactctgaagccgggaaaacaagcggtgaagagggcaatggtggagaaggcgcgcaagaaagtgcatttgataaggcaa

SEQ ID NO: 68352 - DNA, 506 bp, Heterodera glycines
atgtcaaaccgaacaaattttgccattttatttgcagagggatccggacagcgaggaaacgaacaaagcgacgaggaaaggggcgccgatttcatcggatattccccgataatcccaggcgtatgtgaacattttgtattaaaataattaacttaaatcacgaaaattctataaaactctaaaatattttagcaacgaattgtcgatgtgaaaatggcggttgacttccaaaggcaaataacaaagtacgccttaacatacaaaatggtaatggaactgtttgagtttgaatatgtgagcaaaaatgaattggaaaatgcggacgaatgcgccgtttgtttaaatgaatttgatgaagaagaaaagttcgtcatgatacataagaatgagcggcaacagacaaagccagtaaagaattgaaattaaaattgaataattaaataagcattgattaagcatgtgtttcatgaaagctgcatctttaaatggtttgtgttgataataaa

SEQ ID NO: 68353 - DNA, 88 bp, Heterodera glycines
cagcagcagaaatgaatgaatggaaatgtggaagtgagcatttaatgaaaagggtgccctttttataggccgaaaatgtgagggcggg

SEQ ID NO: 68354 - DNA, 123 bp, Heterodera glycines
aaacggcaagcactcgaagaaaaggaccaactcgagttgtacgcttccgccttggacgaagacttagagcgtctttccaccgactccgaagatgagcaggagacgcggaaagcacggccaaat

SEQ ID NO: 68355 - DNA, 1466 bp, Heterodera glycines
atgacggcggtgatttatcacgggaaaaaatcattgaggaaattaaatacgaatctggcatttattcgttggcgggtgaacaaaaaataataattttaaatgaaaattcaaaatttaggttatcaatcggcacattttcaactctcaattttgccggacaaaaatgcatttgtgaatttattgaaaatcgtcaaagtttgggcaaaaagtcggttaaatactactaaaattattagttcaatttaaataataattttataaaaaataataatttttatgcgaaatttgatatatatattttttcagctcgcctcatttattcgggcatttttggttattttaatggcatttctttttcaattatggcatccaaaatttgtctgctctttccaaatgcgcctttgtcatatttattgcaccaatttttctcgatttactcaaaatggtaataaattaaaattaaaatttggaatattaaattaaaattgcctaatttagggattgggcccgtgttccgattatgcttaatgaattaactccaatcacaaagaataaaattgttttccgttggcccccattgattgggcaaaatccaatgacaataattacgccaaactttcccgaacaaaacacaacattcaacgtgaacaaattcacgcttaagacaattgtcgaagaattggcacttggtttagaaatttttttttactaattttaaaaattaaaagattttaggtaataaaattctgtccgaacatcagaaaaactggcaaacactttttaatgaggttaaaattgaagaaaagtttaaaaacttcgcggtcattgtgggtctgacttctcagttcgacaatttcactgaaaattgtgcatttcaacggagtaaaattcgaaataaattatttgaatgggcaaaaagggaaaatgttgccgacaaattggaccattaccaattaaatgccgaattggaggaaaaagtacgctgcaaaatatttaggtaattttaatctttgggaaatacataattagtgtaaaatttcttaattttaaattttgtaaatttatattagttttgtgctttttgtcgtggttaatctcaaaaaatctcaaattttaagaaagaaatgagaaaaaccttttaaaattatggttcgcagatgcctagctattaggcgccgatgaatttattaaaaaaatgccaatttatcttttagttgtagaagtgatcaaaaattcattccccttttaattttttaatactattaacacaaatgtttttagcaaatctgctttttgctgttattggcttgttggtcttcgcttaaatgctcaaaactttcatcgtgtcgctgatttggtcccaatttatggccaaaattcttccaaaaaattttttatgcgatcatttttttcagcgacaaaaaacctcagcaaattgtaattaaagcatattttattttaataaa

SEQ ID NO: 68356 - DNA, 167 bp, Heterodera glycines
atgtttggccaacattttggcgccctgttcggcgcctccgatctgagcccatccgctgctgaggacaaacaacaggcggtgccgtcctccggcgctgagctagcgccggctggcgcagagaacggcacggcgccggaggcgccaaaaacgccgagcttctgcactct

SEQ ID NO: 68357 - DNA, 49 bp, Heterodera glycines; identical to SEQ ID NO: 57477

SEQ ID NO: 68358 - DNA, 2459 bp, Heterodera glycines
  unsure (1)..(2459): unsure at all n locations
atggataattcttcagaaaaaaaattattaccattttctaatcatcctaatattgatgaaaacacaccattgctcagcacaaggtgatttacagtactctacaaattttctatttgtattcttcggtaaatcaatcggttgataattttgtgctctttccaatgtgcctaataatttttccagtttacctaacctcaaagaattttttaaaaatattaaaatttactgaattttttaataaattttattgaatttttgaaatattttttcgtttatttcaataatgaatttttaaatttttcactaaattcgccttcagaaaaaaatcaaaaaatttttttaattaaaatttataagtaaataaattttattaaattctcaatttggcaaaaacccctaaaataatttttgaaaattgttttaatttttttgaaccaataaattttaatattctaatgtagtaaaacggactcgaacctccgccctttttccctttattatcttacaaaaaccactaatttaagccaattatgcatttaattttgaactgngagccccaaattgagtcaatgtataaagttaagcaaagcggtttttttgctgcagacggacagcccttccatcgattattatttgtagcataaaaaaggcagtggctcttcttttcttcgttgttttaaatgaatatgagagggttaaaaaatcaatttacgcccaccccctcccctcagccttcgtcggctgttcgtcatttttcattcacaccttccttttctcttccttttgcaacattcttttggcaatgaaaagatatagtagcaaaatttaatttttgaaatgcatcatccttctgccaaaaaccaacgccatttgtgctcttttgaatcaagttcattgccctccgtactaactgatccgttgccgtcctccgatgtacaagctgacgatgaaagaaattccttggttctcggcacggaggcacaattttccatgcaaatgggcaattcgcaatccgttgaaaatttggggcgccgaccacggcgaaggaatggccctcaagcgaagcactcgtcaagaaagcgaacaaaacgacggcgcacgcacagtgacacggacattcgtaaaatgcggttggtttaattattgactatttacaataaataaaattacttgttatccatttctatgcatattaaggccattcattttatctccgtttatgcctacaatagcaacacaagtttccattaacaacggtcagccggatagacatcgtgccacgacaaatccatcggttactctctcctcttcactgcctcaaccgccaattatgacaaaagcaaaagtgattgttccacggatcattggagggccttctgaacgtggcgatgttcgtgtggttggtcaggcaaaatatggtgcggtgcccaattcgacgacagataaaaatgttacggtcggaagcgtcgtgaaacatacaattgctgaaagtgaatcggagagtagtgatgaggatgaagaggaaaggtaaagcaacaaatattccgaaaagtcgctctttgttgttcaagtgagagtagcagcagcgtctcctcttcgtatacgcgtttctccgatctgacaaaaaagcaatgggtcactattgggatgttggcaattgcaaatctctgcagtactgtggcgttcagttgcattgctccgttttacccgggcgaagctgaaatgaaagggtgggccattggcgtgtcttcccagtgactggcaccattcagaatgactacctcagaggttggcttagtcttcggcatctttgagctggtgatgttcgttgctgcgccaatccttggcaaatatgttcgtttcatctttcaatcccatttttacaaaaataagtaaagatggattttattggctcaaaattgatgttcactgctgggcttctgattactggtttaactgcaattgcattcgggtatttgtttttgccttttgcacattttgggctgaaataggaattcgtttgagcgaattttgggcaaatttttgagcattacaatcatttttaatccgtttattttcttttgatgacagatttttaaatttgcttcctggtggaaatgtctttttcttcgcttctttgatcattcgttgtgctgaggctttgggcgacgcgtgttttgtcacctcctctttcgctataagtgcgaaatgttttcccggtcgaattgccaccattgttgtgcgtttcgcaatttttaagaaactacattgcttttcagggcattatggagacttttgcgggtcttggttacactgcgggccccgtcattggaggtgttctgtacgaatatggcgggttccaacttcctttctttgtcctcggctctgttcttataatggctacacttctgtcctattaccttattgaggaaattgaaggtttttatttcatttattga

SEQ ID NO: 68359 - DNA, 590 bp, Heterodera glycines
atgattgttgtggtgagaggaaacccgattgattcaacgccccaaccgccaagcgttggaccaatgaatgaactgaatttagtaaatatgagcaacatcttaatgcttagtaaagagggcacccaaatgcgaaggctgactggaaaacccccgacacacagccgtaagtttggaaggagtcgtcgtaaccattctctcttaaaccaatcagtcactttgaggaaaaaattgaaataaaaatgacttcactgcgtctaaacatcgctgaaaggtcggaatgtaaagagcacccgccgcaattccaagaacggccatggaaagaccaatgaaaaagagattcctaaaatggtacgaataattacaaaatggttttgtggttcctcacttttctatgggaatgagaggagacggtcccacaaaaagcattgagaaaatggtggctaacgagccgaaaagcatgagaatgttacagcactggcaacggtcgaggataaggccccacaacggagcagtcaaacagtagaaaccaccacagagcagaaaaataaggccaaccatagtcgttgacagattaaactaaagtaaataaa

SEQ ID NO: 68360 - DNA, 802 bp, Heterodera glycines
ttccaaaaaattcggtccactgttgccgcacaagttcattccgtcgctgcacaagtcagccaagcgcttcctggaaacccaattttccgtgaatacacaatcggagctcaaatcggaagtgctggccccgggctctgttggaaaatattcagtgggaccaaaaacacaaccaaaaaggtgaaacgaaatgcatgcagaagttggagtcaaatgcgactgttcaggaagtgaccatttggcttttcgagaagcgtcaaacagaaaattgggccccggccaaaagggaggaattcccggagattctgaagcgaggcgtcagtcagctgacccggctcagacacccgcgcattttgacggtggatcgggcgttggaggagtcgcgcgactgtttcgctttttgtacggaggtaaattcgatgactgacgcgaccttttgaatattcgttctgcttttgtcatggacagccactcttcgcgtgtttggccaactgttttggcgatttgaccaacgttttttcccctccggcccatttgaaagagtttcagctgttggacgtggagaggcgccatggcctttaccaggtgcacaacggtcaattgtccttccaattggcacttttctgtttctttattgtttgtagtccttttttgtccatagattgccgaagcgttggcatttttgcacaatgacacgaaaactgtccacggaaatgtttccccttcctccgttctgatcaattcgaagggcgcttggaaattgggcggattggacttttgcattttgggaaacacttcgattccg

SEQ ID NO: 68361 - DNA, 2532 bp, Heterodera glycines; identical to SEQ ID NO: 8517

SEQ ID NO: 68362 - DNA, 1056 bp, Heterodera glycines
atgccggctggcagtaatttgatccaacaaaaatatgtgacggagggcattgagacggtggcacagaattgggcaaacggatgctcaatggcacattcggactcatcacagcgcaatgggatgggcgagaatttgtacatgacgagttcgtcgtcaatttcggaaggtaaaagcaatggaaaacgtgtttgataattagggatgatatttttaggcaaaagcctattttttcctgagctccccgtggcctgaaacgcacgaaaaacatgtttttttgggctgttgttaagctacttttcgacttattaatgccttttttctaggcttttatttttatagccttaaaagcctaaaaatttttgaaaatacctatttttgcctattttggcgttttgtccaaaatttgttaacaaacatgcaataaaaatgaaaaatgcaccactaagaaacgacctgaaaattttataaatacaccattaagtaattaaaattttttcaaaaattcatcttcaaaataatttatttattttttgagaatttttgattttaagaattatttagctaaatactgttttccctaatttttttacttttttgtaattttgtcattttaaacccctaaatttgagactatttagagcctattttccattttttggagactatttttagggtttttagagcctaaaggctacctattttagtgttttccggaaaaatttggacttcagaaaatctggttcgggtgtgtttgcaaatcgtttatcaaatggggtttgctggatcaacaagattaagcttagagtctcagttatttttgtttgtctttgagtacagcctttactcgggaatgaatttgatcaaatggatttctggataccgaattgataaaaaaaaacaatttctcatgatcaacactgttttgtagctgatgcgctgaaacaagcttgcgacatgtggtgggcggagctaaagcaatacggcatccaggaaagccttgtgctggacagggaacagttcaacaagggcatcggacattggagccaggcaaaatga

SEQ ID NO: 68363 - DNA, 810 bp, Heterodera glycines
atggtgagatgaatggaatgactctaattagggggtaaaatttaacaatcgtcccacaaaggttaggaaagctttcgactgagacagaaaatcagccacgtgcatacggacaagtgtaaaagttttttgtgcctgcctttttcttctttctttctctaatcctttcaacgacgaagttgcggcctatcaatctgatggttttcaccaataaattgtcgatcattccaccgaatccacgccaaaacgaacttttacctatgcgagtgcttcggcatgaacgattaaacgcagctgacctagcacacttatacttgcaagtactcttcgaacttgatcatcttaaaaaatatctgtttttaatcattttcccttgaaatacggtagaaatcaatcatttttgaggtgtccaattttgaccccaaccctatctcatcaaagtataaatcatagtctgatcatttttagcgtaattgcgttgtgattatcactgttcggaatattgatcaatataaatggactgttcaataatctaaatgtacctataatcgtatctgatatgaatgagatttaccctatatctcaaatttaaacaaatgataacatgttcgacaggtctcaaataacgcgcctcaagatattgggtaacttcatcgtattttaacataattttttcaccattcggctcctcttttacacattcaactgttgactgcatcatatccattatagatatatttgaaaatatatttaacagcgttcatttctgaacaaaattctacattgatgagtgattggaatcacattaataaa

SEQ ID NO: 68364 - DNA, 437 bp, Heterodera glycines
atgttttattttcttttattttcattaattttttatattggtgactcggcgtatacgaaaaaacaactgaaaaactgtctagggcaatgtgggctaacgtttgacccaatgccagaagtgggcacttttcgtgtgagttaattgaatttaatggtaattcttcggaattggtttaccgcagaaaaaaaaattttttttctgctttttaggtaaaaagggcgttgatcacgactacgagctcttatgttgaaaatcaagatattgtctatgttttttttatcaagaatatgatttttcaaaaattttgatagaacgttgttgccggtaactccatttctaaaatatagaactcataaatagtttttgaataagccattaatatatggagaagtcaaactaaattattaaattcaaaagataagaaaacaaaaaataaa

SEQ ID NO: 68365 - DNA, 861 bp, Heterodera glycines
ttaaatgaaaaaacgtgggccaaatcggaatttgtcggaacgaaagaaggatcaatgtcagaagtgatcagaaattttgatgaagtcgtgctgtcatcaaaagtgaagtggctaatcgtaatggccggcaaagattcgattttggcaggagaatcgattgacagcataatggagaaagtcaaaaggctccgacaattatgctcaaaatttggccacctgaagattttttggctcttgccgccgttcatttttgccaaaaagaatgagtcggaagagttttgcgcgagaatgagagctttcttcagaaagaagagtgaaattgagctgatttcggtcaatgaagaaggacgaagtctgttggaggtgttcagatttggcaaaagttataataacgagcacgtgaatcagaacggatggatgacggaaaaaggaatgaaagtgatgaaagcatggctgacgtcgctggttccgggattcccaggcgatcgggagcttggaattcgaacggtgaagtcaaaagtggttgtgccggacgttgagcagggcagtggtccagtagaccctccccaaattcgctacaagggcccggtgaaaaatgtgggaggaggcccaggtgacccttccccatctccgttcgactccttttctgacgatggtccaacccattcagttcggtcggtgaacgtgcggaattttggcggagaatttagccaatttgggcgggctggtacagcataccgctcggctcatcgtggtggaccgtcgtcgtcgcattatcacccgtaccagcgcgcgcgcggcgggcccgtctaccactcgactccatctcgtcgccgttccgattttgtgccgagacgttga

SEQ ID NO: 68366 - DNA, 412 bp, Heterodera glycines
atggagaaggcctgcaaaatttggagagattatatcgattttagtgcgctaggttcgatgaaactttttaaaatataagcctaaactttttggcctgtttaaaaaggaattaaaaatttttaaaatatttattcatctcccttttgatagaaaaagcatcagagagccttatttaactttaaattaacatttgggcgtttcagagcagtttctgaaaaaatatttatgaattgattttgctaaaaataaaatagtgaagcttaaaaattaataaaattttaattcagaattactggagttagcatctagcaggcttttccttgctttttgatgctctcgcaaatctggtcgcttctgatcagtttataaaaaaaaagtaagcctaaattttcgcatatttaaaagcaataaa

SEQ ID NO: 68367 - DNA, 149 bp, Heterodera glycines
tggcctggcaggtcatttaaaaagcaattaaaaatttttagattttttattcatctccctttttgatagtgaaagcatcagagagccttatttaacttttaattaacatttggtgcgtttcagagcacgttctaaaaaatatttatgaa

SEQ ID NO: 68368 - DNA, 719 bp, Heterodera glycines
atgattgttttgtctgtctatcccctgctgcttcttctcttatctcttcctgtgctccatttttccttttcatcttctgtttcttcgattagtgtctctgatcaatcccccggcttaattcgcaattccactgatcagcaggaaatcgccccgggactgtcctcgctgacatttgtgttcgatcggaccggctcaatgaatggtaacgaatgagttgaaagtgatcgaaatgattctgacaattgcagacgatctgaaccaagtgcgacaaggcgcgaagggcattttggagacggtgatgaagcagcggcagaagttcatcttcaactatgtgctggtccttttccacgaccctggtcagaaatgaatttgaaaagggactctctcgaataagaaaagccaatctcgagaaggactgatcggccatattcagaagtggacccgccattgatcaccaccgatccggagatgttccagcagcagctcgcatccgtctccgtccaagggggcggcgactgtcccgaaatgactctttccggcatcaaaaaggcatccagtcatgcttttcgtccactttttccatttatccaggctttggaagtgtctcttcccggctcattcatttacgtttttacggacgcccgttccaaagattatcacttggaggagaccgtgctcaatctgatccaggagaagcaaagctcggtgtgttcaaatga

SEQ ID NO: 68369 - DNA, 912 bp, Heterodera glycines
ttttttctgcctttctttctttgttttggcattttgtcttctttcgtttccgcgcacacttgtggcaacaatcgaattccatacggtaaataaatgacggaaagtaaagttaaaagtcccccaaagtccgatttccctaataaaacacatcgtccaaaaaatgccatttcctttcgctttaggcattgaaatttaccacaacggaatgccgtctttgctctgctcccgccccaattgcttcgacaaaatgtacgcggtgagtccgtcccttttgagtgtttcgaatggtttttcgatttgcgaaggattgcgacgaacgcgccacccgaaaggcgtgcgactcgaaaacgacttgggtcggcggttttgacaagggttacggcgacttccaaccgtaatcatttcgacagggaaacggggccatctgtggggaaatgccaaaaaaattaaaataaaaaatttgcaaatcatcccaattaacaattaaatcgtttaattaattgatcaattaattacccactaattacccccccccccttcccctcagtttgtacctccaatgctgcgagttcgaaatgctccccacactttcgaaggaattgtattcgaatgtgatcattagacctggcgaatatttcgagggggaagaaataatggacaaatacggcgaggaagtgatcgcttttgatctgatcaccaatctgaggaaaattaacggcgatggcacaaaaaacagcaaaaattcgtcgtgagtgttttcaacggcttttatctttcaaaggggtcactgatttggcttttgaaattgcttaagggtttcttactctgtggacattcgccgcttccattgcgaccaaatgaccaggccgaagagattcaaaccttggaaatggccatgaccagcaaatcgcc

SEQ ID NO: 68370 - DNA, 68 bp, Heterodera glycines
ctgcaagtgtgaaggttgaggcggcggacaatccgaaccttcgcatcaacgaagccgacccaatgctg

SEQ ID NO: 68371 - DNA, 540 bp, Heterodera glycines
atgtctggaagtgaaccaatgtctaatgagatcataaacaagtcagtaataacagttgacagagaagaatggcaaatttttaaaattttatagctaatattatcgggagaagtgccatttttattcggaagttttttcagaagattttgggtctcgatgatgttaaaatttatatccgatataaagcattgatcaatttctataatattacccaagcatggatagcttgggtcggtttcactattattaaatgaattggcaaataatgtggcaaataattcagatttctcagcactattatgatagcatttattttcataaattagattaggtatttcaaagggattgacattgaatttttgtatatatttataaattgaatttcttccctttgaaatagcctttttctcaatttggctatggtatttatttgtttgtatttttatatgtaaagaaatgctatcgtatagtgcttttttggatgggtcagttttagcttgcctgaataatttagccttttctttgatagatgctaataaa

SEQ ID NO: 68372 - DNA, 657 bp, Heterodera glycines
caaaaaaatcgattttttcaagtgtccgtttggggtactcaaacaattatggggagcaaaaatccaacgcagaattaaagtacaggctatagggaagctattccggaaggattcggtctccccataaatctgggcgcatcggttcggggggactgccccgaaaacaaaaaaatcgattttttcaagtgtccgtttggggtactcaagcaattatggggagcaaaaatccaacgcagaattaaagtacaggctatagggaagctattccggaaggattcggtctccccataaatctgggcgcatcggttcggggggactgccccgaaaacaaaaaaatcgattttttcaagtgtccgtttggggtactcaaacaattatggggagcaaaaatccaacgcagaattaaagtacaggctatagggaagctattccggaaggattcggtctccccataaatctgggcgcatcggttcggggggactgccccgaaaacaaaaaaatcgattttttcaagtgtccgtttggggtactcaaacaattatggggagcaaaaatccaacgcagaattaaagtacaggctatagggaagctattcccgaaggattcggtctccccataaatctgggcgcatcggttcggggggactgccccgaaaac

SEQ ID NO: 68373 - DNA, 441 bp, Heterodera glycines
atgttatactttaagaaaaggctggccattttgggtgcgcgcccaaaatctcgccgccaaaatttttaaaagtttcaattttaccaatttttcaagaaaaaatcaaaaaaattttatgagtaaatttcaatgaaaatgcattttatttttttcaaaatagctagaaaattttttataaaagaatttttaagtttgaaaatttttctcgaaaatttggcggctaaatttcagccggcgaatttttgtcctgttccggcaatccctccccccccccccggagaaattagtactgtcaaaataattctattaaaagtgcattgtaattaaattaattatttattttcagccaaatctgctgacaagcttgctcttcaactggatgaaaagatggaattttgaaggaaaaaaaatgttttttaaatttttgttgtttattgttaa

SEQ ID NO: 68374 - DNA, 1038 bp, Heterodera glycines
  unsure (1)..(1038): unsure at all n locations
atggctgatgactctaacaacaactacttctttgttgtattgcctagcaatgttactgattacgtggacaactccacgtcaaaatatcgtgtgcacctaccgaaaccagttcaattccgtggctcatgggtctgtggactgtactcaatacagtaccctcactcatgggcttctacaatcggaactgtggaggatcaatggattgacattcattacattgatggaagattgctacgtgttcatctaccaaaatcatcacaacagaacacagaaggactacagcgccatttgaacggtacactaacgaccgctctaagccgcaaaagcactgaagatggtcaaactccttccattaaacggtccaaaagaagcgtggatcaaggacaacagcaatcacgggaagagacggaaaaagaaagcaaaactggtactatggagataaatgatgaaggcgaaagagtaccacaagataaccgtggagtagagtgtataaagattgggaagctgaccaaatgcaagcggattacaccaattgcacctgaggaagaacagaatcaagagagtagcagtaaggacctacctaaagatgacgattcatctaatgatgaaggtgaaagagtgcagcaagacaataatgcggtagagtgccgtaagataggaaggctgaccaagtgtaagcgcataaagccgattgttacggaaaacgataataaaaatgatggcaaagatggagaagcagtcatagatacaaaaacatcagcatctgatacaacattgaaaaattcagaaataacacccccatcaaacccctcagcacaacgacaacaacaacaacacgatgaacctcgagcccaagctcttacacgtggcgaacagctggggaagcgattaagaaaaactgaaaatgaagttcaatctcaacaaaaatcaccagtaaacgaatcattggaagctcagactcagttcagtgatgctaaggaccaatcgnaaacgcacgcagatgtgtttaaagaccgtctttctacaatacacggagat

SEQ ID NO: 68375 - DNA, 918 bp, Heterodera glycines
atgtatgcaaatcgctttgttcttgtaccagaggaaatttacaagggtctgaccgcaacagccacctccggggaccctaatttggactttacacgacgtgctcttgatgaagttaagagagagcacgctgatcctacaacaaaaaacgctcattacaatcaagaactgcgtcgctaccttcacttgaagaaagcatatgacgaacgacctgttaaagtctcaattgacaatgcttccgcacccgttcaacagtctgaaatacccgttgtaacaccctcacaaaagaaacgcgccaaacgttctatagtagaccgacgtggaaggaacaaattatcctcatcaacaccagcgacatcacggcgtagtagcaccagtaacggagaggtctctttctctacggacattgaggaaaatggaggcgcagaaacagattcgggtagtaaaattgacaccgcggattcttcatggacgagtgctaaaagtgccgaaacaaccggtactctacgagccgaatcagaagtttcttctgcaacaaagaccgcaacgcctgagcaacgatcgaaatggataaatgaattcggtgtgctgttcatggcaaatccgggcaagtatggcgtttcggcagatggtggaattcgaaatcaacagggtgctcgaattgcaaacagtaatattcgtcgttcgcttgaatggatcttcaatgttggaactcgagcgaccaccaaaaggcccccaggcacttcacagattgagcaaatattcgagagagaacgtcttctccgtgcctatttaccacaacctcaacaacaacaagggcaccaacaaaaacaaaagggatcgtcatcacgaccgctaataggaaaggaagaagtagcaaaatttgaccctaaattatggaaatatacggacaaagactga

SEQ ID NO: 68376 - DNA, 1400 bp, Heterodera glycines
atggataacaaatctctcacaagtcaactacttcctacagtcaattttttggtcacaactcagggagtgactgttcacagtgaccgattggacactccgcgtgtagtgtttttcaatgatgatggtaccatttgcagacaatgccgatataatatggatttggactatctgatcagtaaggatggagtctacattcattcgagccgactaaaagggaccgaaaaatttgtaccattcgaccgagtgtatgacctgccgcgtttttgtgcgtttcgcgtacggtcgcgccgaatatttaaagtaccctatattttctcggattctccactagaaaaggcaatgtcgtcaactgttacatcaacgactgaaaaccctctcatcgacaatgttgagcggaaaaaagcgagatttgactcagactcgcgcgacattactacgaaaaatggcgaagatgagaaaccagaacttaccaatcggacggatgaattaaatgtgggagagaaagcaacagatgggatgatacggacagacaaaatggatctgtcgcaagtacaactaatggacgaagcaaacacaatggaaaatacacctaaattcagaacaaataaatttatttctaatctagacaccatcaaggaagaaaaagatgtttaaagcgatacgcatgttttatttgtataaaaaccctaattatatcattattgttcaataaactcgttatgattgacgcgcagcggtttgagagtaaagagctaaaattttgtctcccattcggatgtctcgtgtccgggcctagttcgagcggcaaaagcaccttcatttgcaaacttatcgaacaagcggaacatataatcgaccctgcacccaaatcgattttgttctgttatggggagtatagtccatcattaacagatcttcagcatcgtataaccaacgtgcaacttcatgccggagttccggatgcagaaatgattagttctttgacaaagcccgcgatgatcattctcgacgaccttttgtactctatagatgaacgctacctagcagaactatttaccaaaaaagcacaccaccaaaatttcggggtcgtgttcatcagtcaagacctgttcgatcgtaagcttaaagtggttcgtcaaaattcgatgtacatcgtcctactacgtgctccaaactccgcattggccatccggaatttgggcgtccaactgttccctcgacaattggactttttcttggatgcttatcgacaagcaacacgtcaaaaatactcatatctactcatcgatctgcacccatcgtcggacccattgctacgtctacggaccaacatatttaaagaagacaattccgacaccgctattcaacagacgatttttcttcctaaagcaggcatttga

SEQ ID NO: 68377 - DNA, 911 bp, Heterodera glycines
atggagggccccgatgaagacgaatttactattgtagggtgggacccggaaaagaaagtcgtaatggacctcgtttgtttaaaaaacttaaagtgtaatttttcgataaattttaggaagccgccattcactctgctcaaacaatggaacgttcattcacacttaggacaaaaaacggaatggtggaacacaatggacacactgttgacactgaaattggcgcaatggaaaccgttcaaacatcatcaatcgatacatccccattgttcaacacacaacccgtccgtcaatctttgcccccaatttctctccttctgtccaacatcccccaaccagtgaaaagcgttttaaataatataaataataattctaaatgtgaaataccgttttatgaataacataataatacgaaaatgattttcacagagcgcctttcaaccctgctttcctcgcctcacctgcgataccaagcacgtaagacagttgcacactgcccttcaccaatcaaatgctgacggtgaaagcagcagcaacaacaatcggtgttcaagtgctatgtcaatggcgtcctcctcatcatcctcgtcaaattccgggcgaaagcgtccacccacaacagaaacggatttcagaaaaatagcaaaaattcaaaaacacaattaccgttgtgacgacggaaatgggtgccctgagtgtgaccgaattcatacacagaaattacccataaattttaacaccttttaaattcataacacatcatcaaattttccattttttatttgttaaaattcataaaattttccattttgtcatttgttatacattcataaaatttccacaccgccaaattttccgtcttttcatttgttagacattctgacctcccaaaatcgctcaataggcacgagaca

SEQ ID NO: 68378 - DNA, 166 bp, Heterodera glycines
tattatgtaacgtgaccggacatttggacagtggacatctggacagtggacattacgacagtggacatttggacagtgaagtcatttggacagaaccggacaattggacagtggacattacgacagaaagtgaatttttttactattaaaaatggctttagcagca

SEQ ID NO: 68379 - DNA, 345 bp, Heterodera glycines
atgaatgttgaacgacaggaatcggaaacgggactcagcattgtcgccaaactcttcctagcgtaccaagaagccaagaactacgattgtgaggaggcatgggaccgaataatggatggggaattgaccgaaattgagcctttgcattctaggaaaatcctaatgcaaagggccgaaaaattttcagttaatttattcactgaaatggcgaaaaacacaacgacaggactcggcacaattatgtccattctaatggcacgccaaggggaacgaacgcctccacaaaattcatgggatgagctattcgtagctaaacaaccagcattaaatgatttgattggatga

SEQ ID NO: 68380 - DNA, 534 bp, Heterodera glycines
atgttcaaaaatcaatacagggttagttaaaaataaaaattattatacatagaagaaacccaattttatttaggacccatttaaaaagggcaaaatttttttatgggccaaggcctcctcacaagcgcacacaaccattgagaaggggggaagataacatgaaaacatgcaaataattgggggagaaaaacgcatgacaagcaaattgaccgaccaaaaacgagaaaagcatatgacaagcagcagcagcagtgatatttccaaagatttgcccttaattgggcgtttcatcatcactctttttttgtataaaaataaataaataaataaaaaattctttttttaaaaaggaataaaaaaaatttcaggatgttttgccgaatttttattggaaagaaaatgcaatttttaggcattcaaatcacgtttaaaaaatttaaccattgaaattttttgctttttgaccattgattgataccgttattttcaaaatttctttgttttcactctccaaatattcttcgacctaaccaa

SEQ ID NO: 68381 - DNA, 1419 bp, Heterodera glycines
atgatcggaagaagagtggtggaaatgaaatattatgccaatgatcagcaggccaaagattacgctgaccatgtgacccgttttcttcgagagtccaagtctcgaaaatgtaatgccgagagtactaaaaaaaattctcgctcccgagtatttggtagcttcagtctcaggttcgtacaaaatttctttgtaaaatcagcattcaaaaatgagtaaattttgtgaaaagccaaaaatttgattttttatatacataaacactaagcaaagagagacagctttttagcaatgttaattgacgatttaaaaaatttttagaaaaaaaggaaattatagttaaggaattttttaaaaaaggaaaaattgacgatttaatgaatttagaaaaatggaaaattgactgtgcaaagtttagcaaagaagaaaacgaaaatatttatcgtttaaggaattttgaggaaaaaaacggaaactttacagttcaaagaattttaggaaaaaaagagaaaaattgacgatttaatgaatttagaaaaaaaaaaccggaaattgagggttcaaagaatttttagcaaagaaaaaaaagaaaaattatgtttgacgaatttctagaaaaatttaaaaaattgacggttaagagaattttcagcaaagaaaaacaaattgaatacaaattgaatacctatgttacacaaagaatgcaaaattgaagaaattctctacgtctagaaaaatttcgattacaaatatgtatataattagctttttagcaaagggggggggcaaatgttatggataaaatacgtctgctccattcatcgatttgtcgttggcatttttttcaaatatgctaattaagaaatcaaaaatgcccaagtatgtacatataataatgaaacccattaaaatttgaaatgggaaagggggggggggggaattgcccctcgcccaaaatgaaaaaaaattttacccgaaaatggattttttttaaattttagtcaattttcttaatttatcaatttttcccggcggcggctaacacggacggcattgttggatcacaatttcccatatttttacaaaattggtggcacaagccaagcggaagaaaggtgaagtgaggtgaaagtgtggtgtggtgttgacaattagcatgagtgatgatgggatgggaccacagagagagaacaatcatcagaagagcattaacggggtggtacacacaaaaaaggaagggattttgtgcctggggcaattttctgggaaaaaagaatttccgggttgggagaggcatgacctgacgattttaattcattttcaaaaacagtccagaaaaaaatttcagcaggtggggtgtgaggggtaagggcgaaaattttcaaaattttcaacctcaatttttgagttcggtagggctga

SEQ ID NO: 68382 - DNA, 387 bp, Heterodera glycines; identical to SEQ ID NO: 52041

SEQ ID NO: 68383 - DNA, 820 bp, Heterodera glycines
aaaatcgattttttcaagtgtccgtttggggtactcacacacattatggggagcaaaaatccaacgcagaattaaagtacaggctatagggaagctattccggaaggattcggtctccccatatatgtgggcgcatcggttcggggggactgccccgaaaacaaaaataaatcgattttttcaagtgtccgtgtggggtactcaaacaattatggggagcaaaaatccaacgcagaattaaagtacaggctatagggaagctattccggaaggattcggtctccccataaatctgggcgcatcggttcggggggactgccccgaaaacaaaaaaatcgattttttcaagtgtccgtttggggtactcaaacatttatggggagcaaaaatccaacgcagaattaaagtacaggctatagggaagctattcccgaaggattcggtctccccataaatctgggcgcatcggttcggggggactgccccgaaaacaaaaaaatcgattttttcaagtgtccgtttggggtactcaaacaattatggggagcaaaaatccaacgcagaattaaagtacaggctatagggaagctattcccgaaggattcggtctccccataaatctgggcgcatcggttcggggggactgccccgaaaacaaaaaaatcgattttttcaagtgtccgtttggggtactcaaacaattatggggagcaaaaatccaacgcagaattaaagtacaggctatagggaagctattcccgaaggattcggtctccccataaatctgggcgcatcggttcagggggactgccccgaaaac

SEQ ID NO: 68384 - DNA, 305 bp, Heterodera glycines
atgccaaaagccgatgattctcatgtaaagtcagcgaccgtccccgaaatgacatcttctgatcacctaatcgctgatgaacaaaaaggaacgtcgggaggaaaacacactttgctggaattgctcgggatagacccgaaccaagttcagacatattcagcggacatgccaaaagcctatgatacttgtggaaagtcaacgatggcccacgtgatggcatcgtctgatcaacgaattgctgaggaacaaaaaggaatgttgggaggaaaacgcactttgtctgaactgctcgaggaggaacacaa

SEQ ID NO: 68385 - DNA, 387 bp, Heterodera glycines
atgtctaacaattcgaccattgcaatgccaaacaataccaccaattcatcgccatctgagctgattttttgttctggcattgtgttgacctacattgaattggcagttcacccaatttcactgctgagcacattcttttttgtcgtattaatcatcaaaacatcggttttccatgccaatttgaagcgcattttgttgggccaaagtgctggcattgtgatggtatgccaaaaaaaaaaattaaataattttttaaatttttattttaagtttgaaatggcacgaattacgtatgtgctcattaaggttgtggctggcaatgtttttatgcaaggtccaattgtaatacaaatatttgggctgttcggctacattctacggaatgcg

SEQ ID NO: 68386 - DNA, 267 bp, Heterodera glycines
atgcaacagacggacaaaggcgaggagggcaaaatttcattggtggcatcgaaggacggattggaaatgattttgggatggtaagtggccaagagaatcgaatgaatttggcaattaattaaaatggaaaattaaggaaaaacggaacacaacacagatacattgagaggaaagccaggccaacttcactgcaaattttcatcgatgtcggatcagtggaagtgttctcggaccaaggcgagtggagttgcaccgcacgcatcccag

SEQ ID NO: 68387 - DNA, 144 bp, Heterodera glycines
ggcattctccacaaggacaaccgatggcataatgccgtgtgcgagtgcagtgggctaatccctttgggcgacccgctctcattgcagacattgtgggcatttgtctactcaatgtcgaacagcgtggacgaggacggaaggtga

SEQ ID NO: 68388 - DNA, 294 bp, Heterodera glycines
atgccacaaccccaggcactgacaataatccatttgaagaagcattgttggacaaagcggagaagggtgaagcatctgcggacggaaattcaaaaacggtgaaattaataattaaaaaaaatatgtcaaaaattttaattaaagggccaacccccagaaaatgacgaagaaaatgccaatgatgatgagagtcagcaaccgtatgaacgatcacaaacaattccgctgctgatcatgttcattgtttatgtgttcatcggcaacgtttgctttctgcttatgagccggacatga

SEQ ID NO: 68389 - DNA, 326 bp, Heterodera glycines
atgctgaccttggcaaatttttgtcagaaattttggatggttgggaaagaacttgtcggagtgcaaaaaagtaatttgaaaaataatcaaaaaatattttagtaatttttatatttaaattaattttctatttcattttattcagagaaattcaacttttttggcgcgattttcgtgcccagccaaaaaaatacagcttcatttcactcatcaatgcacaaaacaattgcattttggacccaaacaacaacaatccgagctttatggaacgtttacaagcctttcgtgggaatgtaaaaatatttgtagaattttgtataaataaa

SEQ ID NO: 68390 - DNA, 56 bp, Heterodera glycines
atgcagcagagacaaagggccgaggagagaacgccgtcaaaggatgaaaacacaga

SEQ ID NO: 68391 - DNA, 1369 bp, Heterodera glycines
  unsure (1)..(1369): unsure at all n locations
ctgaaaattggattcatcggagcggggaaaatggcgcaagcattgggtaagcgaaacgaaacaaatttaaagcgaaaattaaaaaaacaaaaaatttttttttgtttgtttagcgcgagggctcatcaattcgggtatgaattcggcaaattggacaagaaaaaaaatctcgaacttttgtcaatttaggacgctatccggcagagcaattgatggcgagttgtccaaaggtacggcaaaaaccgaacaataaaacaacaaaatgttttgttttgttcagacggaagttgcaacgattgagcaattcaaagtgagcaaaaaaaagcgagggctttgaattttcaaaaaaaaaatttatttttatttttttcagaaaatgggcgtcaaaatgacggatgacaacacacaaagtttgtggatcatcgcttttttcaccaatttatcaccaaaaaacacacacagttgcgcgtgagaatgaagtcatcattttgtcggtcaaaccgatgcaaatcggcaaagtgacgcccgaaattgcgccccatgtcaaacagagtcatttgctcatttcacttgccttaggcaagcgattaccgtaaaagggattcgctccaacaaatttaattttttcagggattaggctcctctccatcgaacaagttcacacattttgtacatttttttgatggtcgaactaataacaaattcacagtttttgccatcaaattcgcgagttgtccgcgcgatgccgagtaattaatttacttaattgtcacactaattgcacccctaattgccacagatactcccgccgttgtcggcgccggtgtcaccgcttataccatgggtatcaattgcacaataaattattcaccccccccccccattttcgtcgctttaattttgcataatttaggctcggcgtgccaagatggtcaattattaattacaataattgggaattgccaatgaaattttaggcgactcaaatttggtccacaatttgttctccaccgttgggcattcttttgaggcatgcatccctttttgaaaattgacgatcgatcaaaaaattggcattttgacagacgcccgaaattcaaatggacgcaatcggcgcattaagcggctgtgggccctcttatgtgagcatcaaaaaattttgaatctttattcgtatatttttccccataggtcttttcgatcatcgagggattggcggacggaggtgtcaaaatggtgcaaatttgaaaaaaaaatttaatttanaattggcgttaaatgcgtcgccaaaaatgaaatgtcaaatttgccagggcctttcgcgtgaattgtccatanaatgggcgccatgactcttttacgagctgca

SEQ ID NO: 68392 - DNA, 898 bp, Heterodera glycines
atgaccttcggcaacaccgccccaaggaaatattcaatatcgcccgagtttgaacaaataaagttcgagaagagagtggcggagacgcgcgtgggacagctgaacgaactgctcgacaacgcgcgcgaattggccgaggcgttcaaaagggagctgcagcaaaggaaggaggaaatggcacacaaagaccaacgtctgcagaatcttccaaaactcgagtactttccacggcagtgatgccacgagagcgctacccgttttaaaatacattcgaaaatacgccgactttaacaaaattgtcgggaattcgggccctcccttccgaatcttgaacccaataggcaattaattattcaggcgtcaactcgacgaacttcgacagactttggaacgcgaacggaagtcgcattcattgttggaagaatctttcttaaatttgcagcgagagaagagtcatttgcaagacgaattggtggagacgcttcacagacacgggcagaagcacgaagcgatgctcgccgcaatggccgaagtgccaaatttatttatttttctcatttttattttcgtttttgtttagtcatcgcagcgtgaatcggaattgaacgcgaccgtacgacagttgcaaaacgaagtgctgcagttccgaaaacattcccatggcgccatgggactcgcgccggtgggctccgcgacgaactccttgtcaagtgcgttgtccacgtcttcgctgctctccagctcaaccattgcacttcacaacatttccatcggggaatcgagcatcgaattggaggaactttcccgggaagagctcatcagacgatgcaacgaactcaccgaacggtgcaaaagggaaatacgttctaagaacaaggagaagcagctcaaggaagag

SEQ ID NO: 68393 - DNA, 2299 bp, Heterodera glycines
atgtggccattgaggtcaacgggtaatgaaaaaaattccaaaaatgtgccaattttcccattgaaaagatgctattggtatggatgcccgagctgcttccccgacgatgcggcaattgtgggcggaggagaaacggccggggccctcagggcccgggacgcaaaacgaacccggtacattgcgcgggagtttgaggtcgaagtcgtttgggagtgccacttgaacgcaatgctggaggacaacccagccatgaaggcgtatttcgacaactgtccggattctggaccaattgacttccacgatgcattctttggcggtaccttttccatttaatttttaactaattttccggcacaggtcgaactgggcccgaatacttgggcgcatcggtgatcaaccctgagacgggcgactggaaaagccgaacgatcaaagtgaaagactttaacagtctttacccatcgcggtatgaaaatgcgaaaaaaataattaaaaaatctttgaaaattaaagaaacatgttcaccaattacccggttggccacccgaccgtggtgcagtttgacaaggacgtggaatggaggagtccagcggacattgtcggcgacgacggcatccgcctcgagggcatcatcaagtgctacgccgtgccgccccgccactgtcactacgacatcccggtccttccctaacggctcaacaaccggacgttgttccccctgtgccggacgtgttcggaaatgtacccgcgcggcttgatcgaccccgagtacaactgcagacattttgaggactctgaaaggggtgggtttagaaacttttattaagcaaatatttttcttgataggattttcgacaactgtgacgcacattgagctggaggccaccctccgctctgggtacaaggtgacgcacgtgtaccgtgcctacatttggcggcttgcgtgcgattggagcaatgggctgttccactcgtacctgctcaaatttctcaaaatgaaatttgagggtaaaatttgaaaaacttaataaaaaaaaattaaacaaacaaaattttaagcaagcggatatccagcgtcttgtacgtaggcgggcatcagtgaggaggagtcggcacggagaaagcaggaacacatcgacaaggccaaagaaaaggcccaagtccatcttgaggcggaccgaatcaaacacaaccccggactccgctacctgtccaagctgtgtttgaattcgctgtggggccggttcgcacttcggtaaaactttttagaaaaatttataaaaaattaaaaaatcaatagaaatcggctcaccaaaaccgaaatcgtcgagtgccatgcggagctggccaaactgctgaacgactcgaagattgaggtcagcagcatcgatcagctgacggaaaagttttggatggtctgctacaaggccaaggatgagcatgtggtggaacacagcacgagcaacgtaagaaaaaatttttaaattttgaaatttatttgcctttctcaggtggccattgccctatggaccacctctgctgcgcgaatccacttgctggaatcgctgaaaaaggtgtatggccctgcaccaggtgtagagcgctacgacacccgcattctctacatggtaaaaaatttggaaataaatgaaaatatgaagtaatttttataatcaggacacggacagcatcttctacgactacctgacgcggctgggggacccacttccgggtggtgagcagctcggggagctcgccgacgagtacccgaaccacacgattatggaattcatttgtggtaagactcattaaaaattaaacaaaataaatggaatgtttgtttagctgggcccaaggcgtacggattgtggctgcgcaacaacgcaacgggggaggacgagtacaagctgaaggtgcgcggcatcacgctcgactcggatgcctgcgagcgcatcaccttcgagaagatgaaggacatggtgcagaacaagctgggacagccggacaacaacgtccgcttcaactacccaacgaagaacttccggatcaccaagaagggagagattttcactgtgcctctggtgaagcagttcaacccgaccgtcaataagggggtgatcagggatcacggcttgaaggtggtgccctttgggtacagcgacgaagagtggtgtaagtggaactgccctggcgcttgcacctgtctgttcaactcagacctcaatgtgaacatgttcacagaagaggagctgaacgaccccgacattatgccataattgtttttattttttaattttca

SEQ ID NO: 68394 - DNA, 601 bp, Heterodera glycines
gacacggacagcatcttttacgactacctgacgcggctgggggacccacttccgggtggtgagcagctcggggaactcgcggacgagtacccgaatcatacgatcatggagtttatttgtggtaagattagttaaaatttgaccaaaataaatggaaactttttgtttagccggacccaaggcgtatggattgtggctgcgcaacaacgcaacgggggaggacgagtacaagctcaaggtgcgcggcatcacgctcgactcggatgcctgcgagcgcataactttcgagaagatgaaggacatggtgcagaacaagctgggacagccggacaacaacgtccgcttcaactacccaacgaagaactttcggatcaccaagaagggagagattttcaccgtccccttggtcaagcagttcaacccgaccgtgaataagggggtggtcagggatcacgggttgaaggtggtgccctttgggtacagcgacgaagagtggtgtaagtggaactgccctggcgcttgcacctgtctgttcaacccagacctcaatgtgaacatgttcacagaagaggagctgaatgaccccgacattatgccataa

SEQ ID NO: 68395 - DNA, 1746 bp, Heterodera glycines
atgtacaaccagcagctgcgccggtacctgaagatgcgcaaggaacataaggagcggcccgtccgggtacagctcagcaacggtgctcaactgctaaataaaacagtggagacgggtgtgcaggtacggcctggtccggacgaaccgaaggacaagtccgtgatggttaccgacgaagatgaagaggaagagattgaagtgccaaagtttttaaccccaacaagcccgacgcagggaagcagccgatcacccaggaccaataagaaagcagcaaaacagcaaaaattgatcgagaagaaggaccacctgttggccatcattatgtctgatccgcagagattcggcgcaactgaccgtgggaaaatcattaacccaaagacgggccgagagtttatcgactcggacctggcctggtcaattgaacgcctggtggaccctcgcccggagaatgccccttcgccacgcggaaccaaagagttgaagaggaaactcgcacagaatccgctcgccagtagcctactcaatcgactgtttgttgggtctgggttcgtcggacaagtcaaacaaagcgggcgttttattccctcaaaatggacaagaaaataaacaaaatatacaccgacccggccaatccgggcgggtatgcgggggcgagtgctctgtacgcggcggtgaaggagaagcacccgaagttgaagcgtaccgagtttgaagactttttgcaaaggaacaccacctacacgctgttcaagccaaagagagacaagttccgacgcctacgcactgtgcctacgggtttcatgaccggtaagttgtactggggcttattgtgcacaattcagggttcagatgttcaggcggacttggcagatttccaggcactttcgcgcaagaacagcggctaccggtacttgctgttggcggtggatgttctatcgaggcgaatgttcggcgcgcccgtaaagagtaagcgaccagcggacatgaaaagggcttttgaggagcttttcgagcaaatgccaagggtgccggacacactgtacaccgatcgagggctggagtttgtggcaaaaccgttgaaggagttttacgcggagaagggcattcaaaagtttgagaccagttcaaagaagaaggccgccgttgcggagcgtgccatacgcaccctaaagactcggctgtacaaatatttttccgccaacaatacgtcggtgtgggtggatgtgcttccaaagtttttgagtgccatcaacaactcggtgtgccgcgcgaccggacttagacccaacgaaatcagcgacgccaatgcgagggaggtctggaagagggtgtacggcgaagggctcgcacaattggacaagacaccaaaaatcagagcaggggaaacggtcagaattcccgagcctaagcacattttcgagaagggtacagtatttcacacattttttcggtcaatttattttaattttaggttatatacccaattactctgatcacgtttacacagtagacgaggcccgctcaaccaacccccagcactatttgctcaaagactattatggcacaaagttgaagagaaaattttatttgcccgaattaacaaaagtacaagtggatgaaaacacaatgtatcgaattgaaaagaaatacaaagaacgagtgagagatggaaaaagagaaatattggtgaaattcattgggtttccggaaaaatattgggtgaaaaatgatgaaataaatgaataa

SEQ ID NO: 68396 - DNA, 526 bp, Heterodera glycines
atgcgcgacacggataagaagaagaagaaggaagtaataatgcattatttaccacagtttaacaaaaaaattttcaaatttcaggaaattattgctgctgggacgaacaatgtagtgagcgaacagcagcaggacggagtccccggcgacgaacactcggactcggacaattccactgaagaacgtgcgcagaatggagtgcccggcgacgaacactcggacaatgccactgaagaacgtgcgcagaatggagtgcccggcgacgaacactcggacaatgccactgaagaacgtgcgcagaatggagtccccggcgacgaacactcggactcggacaattccactgaagaacgtgcgcagaatggagtccccggcgacgaacactcggactcggacaattccactgaagaacgtgcgcagaatggagtgcccggcgacgaacacgcggactcggacaattccactgaagaacgtgcgcagaatggagtgcccggcgacgaacactcggacaatgccactgaagaac

SEQ ID NO: 68397 - DNA, 497 bp, Heterodera glycines
agtcagcaatcgttgcttactttgccagatcggacgggtgcgcatgattccactgttccaagcaccccaccaaaagcaaaacgatataacccaaatataaggaaaaatttttaaaaaaatttttctccatcttcctttttgatactaaagcatcagagtgctaaaattgacttgtaaataaaatttggtgcgctttagagcactttctgaaaaaatatttatgaaataaaaaaatcgatttattcaagtgtccgtttggggtactcaaacaattatggggagcaaaaatccaacgcagaattaaagtacagactatagggaagctattcccgaaggattcggtctccccataaatctgggcgcatcggttcggggggactgcaccgaaaacaaaaaaatcgattttttcaagtgtccgtttggggtactcaaacaattatggggagcaaaaatccaacgcagaattaaagtacagactatagggaagctattcccga

SEQ ID NO: 68398 - DNA, 321 bp, Heterodera glycines
atgcatgacgacattctgcacaacgttggcctagacagtcgtgccgcaattccgacaagttcatgccgtcgcacagctgtcatcatttcacttcatttcggattgtgtgtgcctagtttagtcagaaattaaaccgaaaatgacgaaaaaatattgttaagaaattattttaatttttaaaacatgttattgtttaagcgaacattaatatcattaatcaatttaattaaattaaatcattaattatgtaaataattttgacattttaggcacaaaaactcgcaaaaaagcgcctaaaaaggcagaaaaaatcgtaaagca

SEQ ID NO: 68399 - DNA, 171 bp, Heterodera glycines
atggcaacaccgccaaaagcaaatgcgctggtcgaagcggccggcaagttcaacaaactgttcattatgccgcccaatcggccgacacgcatcaaaaaagcgatgaacattttgtttggccgcaccgaggaggaaaaacgagtgaccggcaattttgtgtcacgcattgcg

SEQ ID NO: 68400 - DNA, 588 bp, Heterodera glycines
atgcgaaaagcgaaatgcgaaacgccaaaaaatgcgaataatgcgaaaggcgaaatgcgaaaagcgaaacctcggcccatccctggtgagcacacatttcagataagcttcctatcattatttcttagaaacaactaataatctgttgaacagttatttcaaaataaattcgaatatattagcttattatgcatcttcagtgtgcattctaaaataaaatcattttttgttctaattttatgatttatttgttttctgttgactaaatagtcgcttcttatagcaaatattaatttatatttgcgtagcttcaaatgagcattctgccttcaatttcgaagggaagtgaatttttttataataaattgatagagagcaaaaagcacaattgtataatattcaaaaaatttatctatgcatttgttgaatgttcctaaacccgatcaaattttttaaacctttatatgaaaacatttattgcaggaaatgacaaattccaacctgggtgagcacacatttcagataagcttcctatcattatttcttagaaacaactaataatctgttgaacagttatttcaaaataaa

SEQ ID NO: 68401 - DNA, 597 bp, Heterodera glycines
aaattttttgaatattatacaatcgtgctttttgctctctatcaatttattataaaaaaattcacttcccttcgaaattgaaggcagaatgctcatttgaagctacgcaaatataaattaatatttgctataagaactgactatttagtcaacagaaaataattaaataataaaattagaacaaaaaatgattttattttataatgcacactgaagatgcataataagctaatatattcgaatttattttgaaataactgttcaacagattattagttgtttctaagaaataatgataggaagcttatctgaaatgtgtgctcacccaggttggaatttgtcatttcctgcaataaatgttttcatataaaggtttaaaaaatttgatcgggtttaggaacattcaacaaatgcatagataaattttttgaatattatacaattgtgctttttgctctctatcaatttattataaaaaaattcacttcccttcgaaattgaaggcagaatgctcatttgaagctacgcaaatataaattaatatttgctataagaagcgactatttagtcaacagaaaacaaataaatcataaaatt

SEQ ID NO: 68402 - DNA, 2008 bp, Heterodera glycines
atgggtcttaaactatttttgatactgaaaatgtcggacaatccgaaagaagaggagaaacaaatggacaaagaaatgtaatttaataaaaataataatttacgattttatttaatttaaaaattatttaaataataatttaacatatttatttaataaatttcaatttctgttccatttgtcctgctgattggcacgcggtgttcaatttgctgccgccttctcaactcggccttggcattgcgttagtcagccgtcgatttgacggacgagtggacgaacacttcaaaacacgcaaatggacgctctactatatggaaatttgctgcaaaattggcgagaatggggccaaggaaatggaaattaaaaagatggaaaaatccctaattggggttggaaaatgttgccaattccgcagaagccattgcctaacaacgtcatcggatttccacgcatccaaataaagtaatgaaaacaatgagtgttggtcgagaccggaaatttcatggcctcgacaccgagactcaacccaggggtttgagtattcaaaaaactcgagacttttctgggttgaggccgatattctaaggctcactgaaatgggaatggacagtttagcttttaaatttttattggtttaaacataaaataggtgaattttcaaaattagcccaatttatattaaacagtcagtttaattggcccaatttgtcttttggaaacaatttgtgacaaatttcactctgcccgaaaaattctttattttttgaaggttttcttaaatttaactcccatttatattgaaaaattctaagaaattttcaacgacccgtccaaaaaatgacaaaatttatcagattatacatcagttctcaattatttttcagttacattgaccacaatgtcgtcgtttttctgtgccgttttcttcccatttttgcttcctatggcacaaattttgccattcaaacggaaagtgaccgcgttttggcgttcgttgtgcgcaacatttggccaatgttacgcagcgaaattcgcgccattgaatttactcaccacaacaatttgcaccattttcgtcaatcttcctcgtccattctgcgcgattgccaaacccttcactcagtgttttcctatggacagtttcccgcctttccggccgacgacagtgccacggcgacagattgccaagcgttggccaaatggttactgtgctcgccccctcgtccggacggttcgccgcgaatgtttcattgcgaactcgaatccactgagcaggagtaccaactggcaccaaaaatagacgaatttaaagcggtagttaattaattaactacatggtttttatgtgtttaggacgtcgaaaacttgaaatttgtttttcagggatttttaagacatcacgacatatttcttttgttattatggataaaatcaaggatatcaatcaccctttaaatgggcatgatcgaatttcaggcctttttgtatgcttcttcccctgcaaatttcatcattaacatttgtctcgtttcgcttgctcacacttcgattttgccattcgatttgacgaatgatttgacgggagagcgaatggtattgacaaagacagtactcgagtacgggcagtacgggacgattactgtacctgaatacgttacgaaatttgtgatggtccgttctccgatgtgccgcgatgagaacaaatgggccaaatgggagaaggaagcagaggaatgggaggacaatatgaaccagcggaatcgaaacctaattgaaattgatgtcaacgaggaaaatttggatgatgggtcagtaaatatatttttaattaaccagcaatgcccaaaaacggaagggttccaaaaaacggaattctgaaaattttctggaagagtggtccgtactcagatggatttacagttctattttataaatttttaattcgtcttttgtttttagacttctcaatacaattaccagccctaatgatcaacagcagaagtga

SEQ ID NO: 68403 - DNA, 2419 bp, Heterodera glycines
gcacccattgccacggccggacgacatcttcaatgctctccgtggcgcgacagtctttagtcaaattgattttaaagacgcttatcttcaagtcgaacttgacgaggagtcaaaacaacttgttggtctgaacacccatcgtgggttgtttcaataccagcgattaccattcggggttaagtcagccccgtccatttttcagaaattaatggatgaactcacgtcggggttggaaggtgttttcgtctacttggacgatttcattgttgcctcaaccacgaccgaaaagcattttcaaatcttgtccaaatttttcaaacgtttacaggactggggtcttcgtgtcaaaatcaacaaatgccagttcctgtgcaccgagctcaaatttcttggccatgtcatttcagcggatggtattcgtcctgaccctgatcgctcacggtcaatcaaggaaatgccagcaccgtctgatcaacgaacgctcagatcatttttgggggcaattaactattattcccgatttgttagccaaatgagagacatcagagctccactggacgaactgttgaaaaaggataaagaatggaattggggaccggaacagcagcaagcatttgaaaacgcgaaacaaatcatcacgtctgaccttttgctcactcactacgacccgtccaaaccaatcgtagtcgcagctgacgcgagcagcaaagggatcggagcaacgatcagtcatgttttcgccgatggaaaagaaaaagtagttgaacatgcttcacgatctctgtctccggccgaaagaaactactcgcagatagagaaagaagcattggccatcattttcgccgtgcaaaaattccaccgcatgttgtatgggaggaaatttacactattaacggatcacaaaccgttaattagcatttttgggtctaaaaatggcatcccaatttatacagcatccaggcttcaaagatgggctttgacactgtccaattacgatttcaaaattaagtacatttccaccaaagattttggacaggtcgatgttctctctcgattgatcatgcagcaccgcgaggcacagcaggacgacgactatgtcatcgcaacggcacaaacaaattccgatttcaattcaagttcagaagattcaattgaacatggcacggctgctgttgagtatgttttgcatgcaacattggaccaattaccggtgacagcaacagaagttgcagagaaaacaaatcaggacgaagagttgctagaagttttgcaaaattgtcgtaatcattggccaaaaacggcacattcttcccctctttctgcattttacacacagcgcgcacgtctcacagaagttgatggttgtctgctcatgggcgaccgtgttgttattccgagttcattgcgcaaccgcattctcacggcattgcattttacacacccaggaattgtcagaatgaaaagtttggccaaacaattcgtttattggccaagaatggatttggacattgaccggtgggtgcgaaattgtcaggagtgtctgtccgctgccaaaatgccaccgaaagtgccgttgagtccatggccctctccaagcgaagtgtacgaacgattgcacatggatttcgccggcccgtgtgcggatggaaataaatatttggttgttgtggactcgtacagtaagtggccagaaattttcaaaatgaagacgacgactgctcgaattttggtcgataagtttatctggttattctctcgatatggctatccaaaagagattgttaccgataacggacagccatttaaatcatttgaaatttccaaattttgcagagaacacggaattcggcacacttttgcaccaccgtaccatcccatgagcaacggtcgcgctgagcgctttgtggacacgctgaagcgtcagttgaagaagtgtggggaaaccgattcgcattgggtccaaaactcgttgttggcgtatcgcagcacgccaaacgcaagtctaaacggcaagacgccagctgaattctttctaggccgtccagtccgcacaattctgtcattagttaggccaaacgaaaagaaaaagcattcggacacaaccgataagcaataccggcacaaaatggcacaacaattcaaccgccattatgggacgaaagaacgcacgttttgcaccgacaatccagtgcaatttgccaactacaggaacggctcaaaaatgtggttgtcaggaagaattgtttccggaaatggtgttgtttggcgaatatattccccacagttaaacgcagtggttactcgccattccaatcagatcaggaaatcttttcccatcccgtacagagacagttcagaaccaaacgagcaacaagatcagaatgaacagcaacaagaagcacctcagtcaccacgtcat

SEQ ID NO: 68404 - DNA, 764 bp, Heterodera glycines
atgtcggaattaaattttcaaatttggtgtttctcgttcaaaactaatactgccgatggtagggccccccctttcttgaaaaaaagtcagtaaaaatatatttctttggcttttcaagggcaccaaacaagaatttttgactgttttcgacgaatttcgaatccctactagcattaatcatcgaatattttttagccagaaagtacaacatttcggggctgatcagtcggtgtctgaaaattccaatttcaaatttgtccaatgttttcttggccattgctcaggcgcgtcttttcgacttggaggtgggaaagacgatgatttctttatcttctaatttaagtagagttcccaagtttttgaaatggaattcattttaaaataaggggagggtggtggaaaatttagaaaattagggtttgtcgatacggctgagcctgtaggcgctacaggggaaaaatttaaaattttatgaaatttgatgttaaaatttgattccttaaaaaaatttacagcccttaattcagaaaatcagcaagaatataagcaattattgcactttaataagtactattaacaatattacacattcttagaatttttcgcatcaatgtttgcgttacatttgtcaaaatgcgggccaattgttcggatcagaggaattcttgcaaattgatcagaatttgctatgtgaattattcgaccgtgatcaattggtggtcagcaatgaatttgaaatttggaaagctgtaattttaacttaa

SEQ ID NO: 68405 - DNA, 455 bp, Heterodera glycines
atgatggaactgaaaatggtggcggagactgatcagccagcaaataaatgccttttgctcaccgtccaacacgcgtttcccaaatcggcaattttcacgttaatttcgctgtttattggacagaaaacactctcttcgcatgccgaagacggcgacgtttgtccgttacgcattggcacccgcgcactctccgccgccatccgtgccacttctcgcgggtcgagcgcaacgagaacattcggaaatggatggaaagtgagagaaagcaaagggaggaggggagggcacctcaggcttaatgtccgtgtgaataatgcggcatttgcagtgcaaataggcgagaccctgaaaaacagaggagaaaggcatttaaaatgtggaagagaaattgacattttgagcttttggcctttgtttttgtttaaataatttgtttattttttattagttaaata

SEQ ID NO: 68406 - DNA, 56 bp, Heterodera glycines; identical to SEQ ID NO: 67782

SEQ ID NO: 68407 - DNA, 1329 bp, Heterodera glycines
  unsure (1)..(1329): unsure at all n locations
cgatccctgtgccattttgcacttccnccgcccaagtcagaggcatacggagcaattctccgatctcaccccgaattctcaattttcagtttcacattctttggcagcggctgccgccgcttcgctgacgcctttcatgggttttgcgtccaacggactgtacggaatgtctgcagcggcaccgggactgatgtacggacagtacggcgcccaccaatacggacactttggcgggacaacgagcggcggaaccaaaacgaactcaaggtcaacaaaactgtgccgattcatggaaatgtgattgccaaagtttctcttttttggcatcgaattttattggccattttgctacacttttctatcagtaagcctttaagctagagtgcagagggaccgggaattttgagtttaaccgggactgggaccttttcgggttgaaaaaccgggaatttttggttgggaaaaccgggaaaaaaccgggactagtcccggtcaaaaccgggacctcggtactcagtttccgtgtttaggtcccggtcccgctgcactctactttaagccatttgacctgccgatcaaaataaaggttggccataatggtaaaccggggagggagaatcgaaccgtcgaactccgccggtgcctttgtgcctccgctttaaaacgttttatattccccttcgatcggatactctctatgatcagatcagcccctcccccctctttccttgattagttggtccttctctctctctctcctctttctttgatccctcctcaatctctccctaatcatttcctctttctgattagttgtatttccctgtttcggtttctccaggaatggtcccttccacccgtacaacaacaactccaatccctcgtcctcctccaactcttccgtcccttcttcttcctcctcttccgctgcgatgagttcgctttttatcggcggttcggcactttcgccctacaaattgccgccacaacagcacaatccgtcgtcctcctccattaagctcagtttcggctcggcttctgtcccttcggccgaccattcgttgctttgctcggcgtcactctccgccggtaaataattaattaaataattttttgccaataatccgaaaaacgcttcgaggtataaatcccaacgagcgacgaaaacagcggcgcattcgcacgacgttcacttcagcacaaatgcgcgagttggagaacactttcacggagacgcactacccggacatttacatgcgtgaagacattgcgatgcgcatcgatctgacggaagcgcgggttcaggtggagcacagagaaacaaaaaag

SEQ ID NO: 68408 - DNA, 453 bp, Heterodera glycines
atgacggggtttttctctaatggggtgatacattaggcagctgggaatcagtttttgcttgaagaaaaatgtgtttgaatgtgtaaggatttgaaagcgattaatggcagcaaaacacaatctaaccaggtcacagaaaaaaaaggcatttgtcacataaattggctcttttaggagagccaatttagtttttatgacccacaaggattggtggaaaatatttgaatttttcatagtcaattagattttttttttttttatgctattttaggcgaatgaaaattacatttttattgctgccggaaaatgcgtcagtggaaagatgcagtaagtagaaaatgcgtcattggaaagacggtcagcaatattagtgcaataaggtgctgtagaatagtattgtataacaaaaggacagaaatagtaaaaacctatgtttgtcaattttttaataaa

SEQ ID NO: 68409 - DNA, 73 bp, Heterodera glycines
atggacggacgttcggactttaacaaagtgctgagcgctgacaaaatgccagttcgtgcaaaggccgcttcat

SEQ ID NO: 68410 - DNA, 1028 bp, Heterodera glycines
atgacggtgttcccaatgattgcagagttttcgttaatgccacaattgttgtgctacaaatgggcatcggtgtactcaaatatgacttcatcgttgcgcaccttcgtgaggtgtttagcgcaaaaatttgaaatttattaaatttatatttttgttaattctatatttatatggagcaaatattaatgaaaacaaacacaaaaaggaggaatgtaaaaaaataattaaaatgagaatatttgtgtggattttggtctttgcaataaaaaattgaaataatagaattcataaatttgatcgctcattctctccccccccccccacaaattgaagctgttcaatgagttcacctccttccacgtgtccaccttcgtttgggctttgataatttttcctccgatggttttgctcaatttcattcggacacttcaacgaattgccctgctcagttccatcggcaatttgtttatgttcggcgcttacggcgccattttttatgttcgcttttttaaaaatttatttccggtcaatttatgtatatttaatatttgaattgtcagaatttgcttctgccgccctatcgaattgccgaattgccgtggtggaacactcccgcaggcattttggtgttttaaaaataattattaatatttttataaatttaaaatgtttttcccgttatgctttagtccgcctgcggttccattctctactgttttgagggccaagcaatggttctgccgatggagaacaaaatgcgctttcctggcgagatggtcagccgcgttggcgttctgtccactggcatggcactgactgcgattttcgacgcggcggtaaaaatcccaataaaaaatgccattctaaacccaacaataaatgttcaggtcggctttctcggctatgccaaatttggcgaacacatccagggatcggtaacgctgaatttggcacccactccgctgcttgtgctcgtccgtttgattttcaccgccatttcttttctcgattttcttcttcagcaatat

SEQ ID NO: 68411 - DNA, 839 bp, Heterodera glycines
  unsure (1)..(839): unsure at all n locations
atggcatggcacagtacgacagacattggctgtggcgtggccaaatgccaagatgcgcaatggaaactgtttgtggtctgcaattattggccgccgtaatttcaatttttttctttggaatttttacttaaacaaaccaattaattttgttttcggcttttcgggattggctttgtgagaaaagaaaaacactcagcctaattgactcattaatgccggtacaatttcaggggtaacgttttgggccaaaccatttacggctcgggtgacacgtgcagtgtgtgtgagtcggggtgggcgtgcgacttcggcagaaggggcctttgtgttcggcaaaatcagtgacaaaatgccaaacaaaaaatttgaagaaacaaagcaaaaaaaaggcggaaaaggatgatgctttaatgatgtgatgaacaattttaaataataaaaatatataattttatcaatttaattgtatagaaataaaccttaaaattacacaaaattacaattacacctataatattcttaaagtttatacacataaatttaaaattgttccccgaatcacttaccatgacgaaaaaataaagtaattgtcataattgcagcattaacgagtggatattgagtgattaatttggaaaaagtctttataggtattttgttttaatccaatatttatatagcaataatacgaccatatatcacgaggtttattttcaatatccaattagattattttgtttgaaaaatccaaaaaagggatgaaatgaaaatgcataaggaattttatttattagttaaaaaanagaagaattgaaaaaaataattatnaaaaagtaata

SEQ ID NO: 68412 - DNA, 690 bp, Heterodera glycines
atgaaggcattcttcgccaagaacatcaaattgacaaggaaggcgcaccaagacgaggccggccatttgacgttgccgcctttggagaaacaatttctcatctcaccgcccagctcaccgcccgtcggatgggtaagaaaaattgctatttccaaaatgttagggtcaaatgcgttttctcaaccagaatttagtatcatggcgcctgatgtaaaagaacccagaattattctgttatatggtgaaatgtttgcttttgcgtttttttttgggtcgtccaatttgatgagaacccacattaattcaaaagctgcctaataattttcacaattttttctgggaaaatggtacacaaaagcaagagcatttccaatgccttttctgttgtttcagattcaacacgctgaaatggcacccgtcgtttgcgatttcgatttaatggcgcgcctcgcgtcgctaactgtggacgaaaaattcgaattgttcgaaggcgacgaacaccaacgacgcccgtccattgttatcactccgtgtgaaaaggggggaggcggaggactactcgcaaaggacggaggccaaatggcaaactcagcggacgaatcggaagcagaaaaacagcgacaggccgaattaaggtcgaaagtgccccttccgcacacgccaagaccaccgactttgaaggaagagtga

SEQ ID NO: 68413 - DNA, 187 bp, Heterodera glycines
aatttgatgcgtttcagagcagtttctgaaaaaatatttatgaattaattttgctaaaaaaataaaatagtgaagctttaaaaattaataaaaaattttaaattcagaattactggtgttagcatcatagcagtgcttttccttgtctttttgatgctctcgcaaaatctgggtcgcttctgatcag

SEQ ID NO: 68414 - DNA, 487 bp, Heterodera glycines
  unsure (1)..(487): unsure at all n locations
tgacggcacattattattgtcaaaggtggaggtggaggaggacagtgaacgaagtgcatggaaaacggatgatgaagatgaaggtgacgatgacgaacatggaatagaggaggaagagaagttggaggaggacggaagaggagcaacaacagaagcaacaacacgggagggggacaacactaaaacaaacaaacagtagataaaggaaggaaattgaaaattttttaaaaaatttataaatgggtaaaaaatagaaaaatttttgattttttttagcaatttttggaaaatttttttcaaaaaactaattcatcattaaactttgaaaacgctaaaaaaatttttctaacaatatgaaattttttatgtgtaaaaaattaaaaaagaaatttcggggaaggggcaaaaaatattttgaaaaattggcttaaatncctttttaaaagcagttncctcgctctcctccctataagaaacccgaaataaa

SEQ ID NO: 68415 - DNA, 1015 bp, Heterodera glycines; identical to SEQ ID NO: 39970

SEQ ID NO: 68416 - DNA, 1092 bp, Heterodera glycines
atggtccaaaaaaaccatttgctcccacctatgatcccgaattccaaaatcagtttatttttgtacttttttcaaaagtcttataaaaatatagaataaacagaagcttatagaggaagaatttcatgtttttcaaaaaaccttttcagaacagcgctattaatttttttttctcaaaaaacgaatttttcctaaatttatgtaataacttcttcattttgaagatagaaaattctaaaaaagtataaaatgctccagatttttctctatttttaatgcttttttgcactttaattgattcatttagaagtgaattatgaattttcaaacattcgcctaaatttccaagggccaaaaaatgaaaaatcttttcaattcaaaaatttcagattaagatttaaattgtaccattatgcagaaagcaaaaaattttaagaatttatatagggaaaggggttgaacaataaaagccccccctcgattggaagccccccccccctcgaatataagccccctttggaggggggttgaacaatagaagccccggggcttataatcgaggaaatacggtatacatattttcttgtttagaaacaaaaaaaattcggttatttttttgcttttcagggacatactacatccatcattcagcgactttggtttcctggtgcctggccgtgtcgcccgttacatcggcgttcagggcgacttggacccgctgttgaccggcacagccgtattcgagatgtttctgcagttcatggagtcgcaatttctgcaccagcaacaacagaaggaggacgaggaggacacggaagattaagaaggagaagaagacgagttggaagaggaagaaaaggaagaggaaggagagaaggagtcaaaagagagaggaggaggagggcaaagcaatgtgcggactgagcaaggggagcaggacgaagtggcgagaaggtgaaaaacagggcattacctttaatttggagttcattatgtttcctccccaccccccgaaaaatcaacaaattttcaaacttaagagaatttttcggaaaaaaccaaaaaaaaatttccagcgatttcttgaataaa

SEQ ID NO: 68417 - DNA, 584 bp, Heterodera glycines
atgacgacaaaacagcaacggagcgacaacaacgacggcaccgcagcaacagtcgcaggacggcgccgcaacgacagcagcaactgcacagccgagtgtcaccaacacggacagccgaatgatgttcacgataaagtgagtggtgggagaagcggtgggaaaagcaaaaatatacatattttcgtgtttataaacaaaaaattttctgttatttttaattttaaatacttttaaaacacaaaaattttctgaaaaaatagtatttttttaaaattcataaaatattttagaaagactaaatgtacaaacgggacccacgcgtttcggcgctcgcgtttcggcgccagctctttttctacgatagcttttttctttgacatccaaatacaacattgttggtatcactcgaaagctcttaacatgctctattagccttaccaaaagcgaaaagattttcaagcctggaaaaaaatttattacgaaaaaacttcaaaaatttcgacttttcgcaattttcatgtataacttttttggaaattgtctaatagcgaagcaatagcttagaaaaaatttctgttaataaa

SEQ ID NO: 68418 - DNA, 673 bp, Heterodera glycines
atgttcagcggaaaaacgtgagtaattgtaattggatacaaaattattttggtttctctccctcctaacaatgatattcccaggactgaattgttccgattggctcagcggtacattcttgccggacggaaagtcgcagtggttaaatatgcgctcgacacgcgttacgacgagtcgcacgcatgcacacacgacaaacgcaaaatggaggcgattagtgcgacgaaaatggaagacgcattcgaggaactgaacaaattcgatgtcattggcatcgacgagggccaatttgtgggctttttccctccgttaatttatcacatttggcatttccatttgtgttagttcaaagacatcgtcaaatacgcgcaagaattggcaaacactggcaaaacagtgatcattgctgcactgaatggcgattaccggcaggaggttcaccgaagacgcacaaaaattaaaacaaaatttagtaaatcgattttagcaaagggttctatacacagcggcccaattttgggctccaagtacaattatgctggctttttcgtcttagtggtctgtgagttagtcaccaaaaggggggtcccaggttcaagtcctccctatgttgtgtgttaatttcaatttcttcttttaaagaagaaggcagaattattttttcattaataaa

SEQ ID NO: 68419 - DNA, 476 bp, Heterodera glycines
tgcgtcttcggtgaacctcctgccggtaatcgccattcagtgcagcaatgatcactgttttgccagtgtttgccaattcttgcgcgtatttgacgatgtctttgaactaacacaaatggaaatgccaaatgtgataaattaacggagggaaaaagcccacaaattggccctcgtcgatgccaatgacatcgaatttgttcagttcctcgaatgcgtcttccattttcgtcgcactaatcgcctccattttgcgtttgtcgtgtgtgcatgcgtgcgactcgtcgtaacgcgtgtcgagcgcatatttaaccactgcgactttccgtccggcaagaatgtaccgctgagccaatcggaacaattcagtcctgggaatatcattgttaggagggagagaaaccaaaataattttgtatccaattacaattactcacgtttttccgctgaacatgggtccttaaattaaaatattgaag

SEQ ID NO: 68420 - DNA, 304 bp, Heterodera glycines; identical to SEQ ID NO: 55978

SEQ ID NO: 68421 - DNA, 305 bp, Heterodera glycines
  unsure (1)..(305): unsure at all n locations
aaaattccctcaaaaataaaaggtctattgcgcaccgccctccctnatcatgctcgagagcatttgtatgtgtataaaatttatcaaaaaaagagatatccatttttctgggataacctctaaatataaaaatcctctgtgaaataaaatggcgattgtgcacagccctccgtctcatacgcaagcgcttttgtgaggtataaaatttctcaaaaaaagagatagacatttttctgggatagagtataaatttaaaaattccctcaaaaataaaaggtctattgcgcaccgccctccctatcatg

SEQ ID NO: 68422 - DNA, 447 bp, Heterodera glycines
atgtgttattatgctatatctttttattttatcaacgttatagttcatttttttattgcaatttcaagtgcaacgtcaccggtgagttgtttttttactttgccataattccccatttaaatttaataggttgaggacaatgcactgcttgcatttatgaaaagctatggtttgcacaagcagaatgaaattcagaccggtgaatattcggcgcaaaaatacgaagcacaccttggcattgtttattttatgagagagaattggcaatgtgccaaaatttgggacaaatttgacgaatttgaacagggagaatgccaaaaatatcgcaaatatttggagattttgtatgaatatttgttcaccgagtacattggaatgcccgcagtgaagcgaaaatttgtgtttgaaaaattcaaatttgaaattgaaggcccgataatttatgcg

SEQ ID NO: 68423 - DNA, 54 bp, Heterodera glycines; identical to SEQ ID NO: 53113

SEQ ID NO: 68424 - DNA, 431 bp, Heterodera glycines
atgcagcgtcaaaaggatggaggagtgccatgtgaggaggctttacaccaggttttgggactttacagagtgacaccccacccagcaacaaattcatcaccagctgaaaagctattcggtcgcaaattgcgtaccatgttggatttggttcgggtttgggatcacaagataattcgtgggttatgtttagggatattaaaagggcatgttctcaaaaacattgaaatttaaccaattccaaaaatcgcccgaaatgtctgtccggaaaattattcgaataatataattattttaattggtaaattacttttcacctgcctataaattaaatattttaaattttcataattatcaaaaacaatttttagaatataatgaaaccaaaaacccatgtttcacccattcagtctattccaaatttatttttataa

SEQ ID NO: 68425 - DNA, 1295 bp, Heterodera glycines
atggaaaaaataatgattgaatcgaaaatggtatcgattctccaaaacaatgaaacttttctggaacggtttaacgttgtttccatatctccaacaagttggttgatcgatttttttttgtttaaaactgcttattttttaagctgtctgttatgtatgtgaaaacgacacactttcgacatccgattttttcggcacaattttttcatttattgacggaaaaaactgtaaagaatcgtttacacttttaacttaaaagcacaatttagcgtggggcgtattttgcgcttgtgtttcaattgttgccgttttcgtgttatttttcaaaggcctccctttcttttggcaattccaagaaggagaaaggaaaatgacagaaaaattggaacaaactttttgtgcgattggttggacatttgcgacgtgcaatgggcgattcagcccaattccatcgctacggaaacccaaagacaatttggtgaacaaaaccctaatggacggtgagtgtttctttcggggggtttaatatgacctgaataatacaagattcggaaacattgttggacaacgaattgtctgacagtgcgagtaattacgaagaggaggagggggaagagattcacccgacaaaacgcatcaaattgtacttcgattctcctgacacccaaacggggcgacattcaacagaatgaacaacagattttcttaccattttcccggtcattttgctggtctcgatgatttactgaagataatgatctcatttccttccaattattgaatgtgaaccttttttgttgttgctgtaatttacagattaatttcctatctgattaatgatgatttaatcagttcgaaccgtaaaatattttttacatttaattaatccctttaatttttgttagtttttttaatatattttttcatggattcatttctaccaaaacccgaggatcattgtcgcattcaaatccttgtaggtatttcccctatatttattttttatgcgtactttttaggtgaaaccgttgggaaatttcagtgtgttgtcttttggtcgccttgtcaaagcattggagcggcggtttacttctgttcatggtgaaatcccatggaaccccaacaagaaaatcctttataatttgttttgagattttgctcttctaaaaagttaaattttcttccaataatttccgtcgttttcagtgtcttccaatgtcaattcgcaacgccaaattctgcctaaattggtcacggagttggatttggaattgaccaggtttggcgagtttcag

SEQ ID NO: 68426 - DNA, 1238 bp, Heterodera glycines
atggaaattttgaaaaaaaaaattttttttcctcaggaacttcgtgatgtgttggctgcccgtgagcagcgactggtgggcgaactgtcgcagtgccggaccgatggccaacgctattttgacgcacgttttgccactcttcatgcactgattgcggacagtgggaaggcgaagagcagcgcaaaggcatcgtttgtgagccgtatggagaagttcaacgccaaaaagacggacgatttggaggtggcgctgaccgcccgttttctgtgcgacaacaacgcatcatcggccatcagtgtggccatcagccaacttggcactggttggttttttcacattttaatcaagggacatccagtttcgattaatttgtcctgtttcaatttgtccattaatcgatttgtccgatttcgacacataattgagatgggttttcaaattctatcgtaaaatgattttatttaaaccaacatattcggaaattataaattgcaagttgggtggttgtttccccctcaaatatcaaaaaacttttttgggccatcatccattttggtgtcatttatgtacaactttgaagattatgtcacagaattctatcattttttttttgaattgatcagaatttcctggtttactactatggtctttaaaacaaagaaaggaaacaaactcaaaaaaacaatatgcaaatgccgtggttcgaatgcctacaagctgaccaattcaatttttcacacacacattttttgcagtgcccgccgtaagcgctgtcgagccaacgccgacgccggcagcagtcatcactcaaaatggggacaaccacaacatcaacaacaacaacaacaaacgttgtggtgaagcgtcgtccaacaaaactgtggctccggccgccgccgccgccgctgtctcaacaaacgccgcagcgccgccacacccaccgccaccagcgcgcaacgaaaatgtcgtcaagcggtcaaacagtccgtcaagtttggtcagctcggtgggcgaagactcgggcctcggcggccaaatcagtcccgtcaaccatggtatgtatgatgggtgtcaaattttccatgatgtaaatttcattcgtgggtttgggtgggagtccaaactgccgaaaagggataattgggcgatagccggtttttttttggcgggggtataactccttttataattgcccgaattaatgcccaaacacttgcagataagcaaaaataaataaa

SEQ ID NO: 68427 - DNA, 1899 bp, Heterodera glycines
atggccgccgtcgctgctcaaccgaaagtcgagaagaaaattatggacgagaaaattgccaaagttcgcgaggttgtcaagaacatcagcacaaatggtaagaacggacggcagagagtggcacttttgcagtttagtgggcccaaggaaaaggagtcactttttattgtgatttggcatttttatagaatggggtcgacaaaaaaatcaaaagccctccctttgattttcgacccccaactctgattctgtgtcggtccctagtctataaaaatgtccgtattttacatttttttagggttcagtgacttatctcatagacctaaaccgattttggctctgttgttaccttttggctttcaatcagtgaactaccctcagttttttaggccataactttgtttttcttgcttattgttaatcaatgctttataaatacaaaaaggagcaaatattggcaagttattgccttggaaactgaagatggtcattcaccgggtccattaaactcaatcaaaaggagggggcgtaccttgcaaagaaggaaacttttgaattctatcaaaaagtaaaaacaaaaggggtgagtgacccttttgtttgcaaaattttttaatattttgtcatgaaaatttattccctggggttcttggggtccaagacctcgaattagatgtcagattcgtgatcagcgacctctaaaacccccggataacaaaaattttcatggatttttatctcaaaaaaattttgcaaaacaaaagggtccccccttttgtttttgataaaattcaaaagtttcctctttgcaagtagcgccgcaaaaagagtgttttttcatttcttattaccattttcaacaccattcatatttacagacattgttttggccttgcacaactttgaattggacgtcgcgcggaccatccacgcattttgtgaaggtatttgtatggttttaaaactgaaatattgtttccatcggagtaggagattgatcagtggtttttatgcgattttgggatgtcctctgaggttttcaaggggcgctcgctgatcatgaattgcatcaaatttgtcctgtgtttatctggtctatatcttaatgtgtatgctttcattttttcgattttaaacaatggatttttgtgcaatggaaataaaaaaaaagatttaaaaatttatgaaacacacttctagggtaggaaaatgcgctgatttcaaatctgagcttggatggatttatatatcattgatttttttcatgataagggttttcgaaaacctcagaatagatctcaaaatcgcataaaaactacttaatccatttttatgtgaccagcagggctaaatgattttccggttttagcataactgtgaatctgctgaatattgaattgccgaatttttgtctaaaaccggaatcgtggtcccaattatattaaaaatatatttattattacaaattttaggtggttctgaggtggcactcggtgactgggaacggaccggcggtgccaaaaagcggaaccagaaaaagaagtcgtcgtccaagggtggtgcagccattgcaaatgcgtcgtcactgtcccaccaatccaacaattcgggtacaacaacgccgagcgttgcctcctcgttggtgaactgctccaacgtgtcgtcggccaccaatttggcggacaaattgttgttgacgaacggaagcggccccgccgccacggcgttgccaacgaacgcctccgtcggcgtcgtcacccatcaacaactccaacaacaacaaccatcgttgttgttgaatgagcggggcaatgatggtgttgcggattgtgaggagaaatcattttcaacaacacaaaatcatcaccacaatcaccaacaacagccgcagaagcacca

SEQ ID NO: 68428 - DNA, 99 bp, Heterodera glycines
atgacggacgagcccgaaacaaaggaccaactaatctacctgatcatcgtgtgcgagaaggcgcgacgcttcgacgacatggtggaggcgatgaaaaag

SEQ ID NO: 68429 - DNA, 465 bp, Heterodera glycines
atgaatgataaaatcgactggctcggccgcttcgcggcctcgcatcctattcttggctttttctccaatcgccgggactcaatccaccagcattcaatcactgggactcaatccaccagcatttcaatcactgggactcaatccaccaacattccaatcaacgggactcaatccaccagcattcaatcactgggactcaattctcctgcgtttcaatcactgggactcaacccaccaacattccaatcaacgggactcaatccaccagcatttcaatcactgggactcaatccaccaacattccaatcactgggactcaatccaccagcatttcaatcagtgggactcaacccaccaacattccaatcaacgggactcaatccaccagcatttcaatcactgggactcaatccaccaacatttcaatcactgggactcaacccaccagcatttcaatcaacgtga

SEQ ID NO: 68430 - DNA, 282 bp, Heterodera glycines
atggccaaatgcttcccatgggttcagctccgtctgatcgggcagccgtcgctggagttggacgaggactttgacgaggagttcgagctgttcaagcgctaccaaatgcaagtccatcgcgagagggcgtcggacctgaccccggacgcattccgtcgctttttggcctcgtcgccgctgtttccgagccccccgcacgagggacaacagcagcaacaggttgaaggagcggaggacattttggcattgatcagaacccttccgccgattctcccgatttaa

SEQ ID NO: 68431 - DNA, 2673 bp, Heterodera glycines
atgctcattaggtgtcagtgtgaaccaataaagccccagtgccctccgggaccgcccggaccaccgggtgagcatggcatcgacggacaacccggacagcacgggatgccgggaaaggactacacattagtctatatgccatccgcggtctgtcctgtcatggactacagccaatgcatgccatgtccgtccggacctcccggcccaccggggccacccgggtctcaaggccgtcccggctgcgagggagagccgggagaaggaggacgactgggcaaacacggagcacccggtaaagaagaatttgggaaagtttttaatcgggttttaggccagcggggcatggctggtgaagcgggacttccgggactaccaggtctgcccggacttcccggagcagcgggggaagacgcggaattcgccccaacgctggtaagagcatcgaaaaacaaaacgcaatagtcacccatgcctttaccatgtaattagcagaatttgcttggtttttagcccggtccaaaaggattgccgggtcagccgggccttcccggcttaccgggcgaggcgggcctcccgggcacacccgggacgccaggccccgagggcccacccggcccagctggacagcttggcctccccggcgcgcgtggatcagcgggcatccgcggcacaattggacttcccggcacagatgccggtggggggaatcaaacattttatttcgggtttcattttaagcatattgcccatgtccgaaccgatcgcccgtttatcgtcgacagaaataatggcagaatatataatattttacatattattatatactataaaattattcggaaaaaaataaaattttatttatcaaatcgcactaaaaattaattgggttttccattatattatatattttgttcattggatttcaataattttatatttttcgaggaaatcgagcttgatcaatggcattctattgaatttccgtatttttcgcaaaatctcaccggaattttctaaataaaaaaagttccggatccgtaaagaaattctcgtcactattttaaatttgaaatttaattcttatggcgaaatgttattatttttttgcatcgatttgctttccattccattcaccattcatttctcctaaaaccagccaaaagccaaataaatattccttgaaatttttttattgcaattatggagttggagccgatcatcaaacagaaacacaaattgccacgagaaaaggtattgtatttgtttagaatttttaaatttggtgtttttaatgttcaaaagagaaatccttacctcaatgtcaccagggactaagattttagcctcagaactattctttagggtatcttgaaaatctttttttacaaataaaagattgtttgattggtcagtttcccaacgacgtgtggcacagagagcgttatgcccgtgacagtctgataatgctcacctttggcagtgccacagttatcggtgtcatttacaccaccagaccgacctggtccaagtggcttttgaagctttctcgcaacagagttgggaccaaaggagcaggttctccaatttttacttcttttacacattttagcaactgacttcccaacctttgtattttttaattatttgttcgaattcgacctgaaaagaaagaaagacccgggtttgggttttggtctgcgaaatacagactggccaatgtgaagccctgactttcaaaatcttttttttcttgtctttcattttgttttttcctttaggttcgtttcgccccaaatgtgccgcccttcttgtgccattcgtcccgatgttgtccaaccgtgccaatcactccactttcccgcacaatttggtctccccaacagtgcatcgccgttttgtggttatttttttttacctaaattagatgccccccccaccccctaaaataaagacgacacatttttcactttcggtcatattaaaaaaagagcccgacgggcttttgatggcccgtttcaaaaaaacaccgggcccgtgccgcccggttagacgggctttttttgctgggcctgacaattctaaaagtccggtactttcctaaattccggctctattaaaaagcaaaacaaatagttgatacattattttatatttcagattgtcggccgggtcattgctctctccacctttttattcgccatgtatatttttcggatggatgagcgttttattaggctttgcgagaacattatgaaagagattgacgatgacgatcattgaatgattgatttggaagggatgaccaatgttaggctttgtttgtgctatcgagataaaaataattcataaacggacgaattattcaacaaaaaattggttcgaatgatgtgaaatttgggacggagctttggttggccgggcttttaaactttaaaaacaccgtcctcttctggtccccattttttggaaaaaatcctaaccgatttgccggcgaaattaggctttaaaagcagaatctgagcttcgagctttgggcaatcaaaaaaaaatttacctttaaagatttgtgggtttgggaaaaatttatttcacttgaaagtttgatcaattttttaaaatcacttctcacaaaaaagcattaaattaaaggatttaaaacccttttaatacgaa

SEQ ID NO: 68432 - DNA, 198 bp, Heterodera glycines
ttaacgaccttttgctcgggtttaacgccaaatttacgtcgaaaaggtttttccatgtcgcgaaattgcccaataaaatcaattaaagaattattgaaattatgtttcttagcattgaattttcataaatttatttagggttttttgcgattcaatgtccaaacaacagaaagttaatggcagcaacagttcaagcgg

SEQ ID NO: 68433 - DNA, 285 bp, Heterodera glycines
gatgactgattgtgagcatcactccgtgcccccgtccgcccctcccgtcgacttttgtccgtcttcgccccctccgagttatgcttcctctcccacggcaccgcgcaacaatgccaacgacagacagcagcaaaacactgcaaaaggctgctttttaccctcgtgtaaaaatgccaaaagagcgacaaaagagaatgacgcgggcggcactgaaccatcccagccgacttcggccactgtggtcgttccaatggccaaagacaaagtgaccattctatgccttgg

SEQ ID NO: 68434 - DNA, 220 bp, Heterodera glycines
ggcccttttcccgaatttggccccaattattcctcgccatatttcactcgcaccggcacttattcattcccgaatcattaccatttgcaaaacgaccgtttctacagtgccttctttcgcgcgtcttaccgtagtactgactacagtcccgagagtctctacagtagtcggatcgcttaacgctgaatgaaaataattctgctgctggtggatgcgcaaa

SEQ ID NO: 68435 - DNA, 60 bp, Heterodera glycines
tgatttgaatgggaaataaaagcacataaaaggagcgaatgaatcagtgaaattattcaa

SEQ ID NO: 68436 - DNA, 277 bp, Heterodera glycines
atggtaatattcgacaaaagtatgttatgatataaataaatttttgacaagtacaaaaaatatatatatttgaaatttctgctccaatatttttgcagcgtaaaaaatataattttattatcattaacactcttagttacaatcaaaatagttttaataaagtttgaaactaaaaaaaataatttaaacccagaaagagcagagaattcttggttagaggatctgatggttattctaacaaaagttaaataaaaaaatttgatcgatcgaaaataaa

SEQ ID NO: 68437 - DNA, 659 bp, Heterodera glycines
atgaatgagagtgagtacagttaatgtgataacgattagctttgtacaggcatcagtaatcttgtggacacactccgtgctgggattgacaccctctacagagcgatgaacacaggtccgagcacgtccacggtgcctaaaaagcgaagtgagtgggaaacattgacaaaaataagagagtgtggaataaatatgaattaaaatggttaatgcttacacatttttctaaacattttctcagagaacagcaccgcaccggaggaagaggagaaaaagaaaccggaaggagaaggcggaaatgagcacggaaaggggggcggcgaaaaggaaaagccataaatgttatagcaaaagagttgttggctttaaaaggaggatgtgttctctctctctccttttgttgttgctttttttccagtatgcataaagacaacaagagaatacggagaaaaattcatgaatatttacgggcggtggggacaaagcaaaaatatgcttttttaattgttaatcaaccaatttaaagccttaatagcgcccggatgggtttttttgttgcctgcctctgtcctcatcaaaacggagaacgaaaagcgttcattctttattatgtaaaaatgaaagttaaaaattatttgttttatttgcaggctaataaa

SEQ ID NO: 68438 - DNA, 61 bp, Heterodera glycines
agagcccatgaacagctgaatcgtatgcaagtaccgcccgttgctgtacgcctaacagttg

SEQ ID NO: 68439 - DNA, 904 bp, Heterodera glycines
  unsure (1)..(904): unsure at all n locations
aatcattctctgatgcccgcttcttccacagtgaactacctaggtttctcccgnctttgtncgancaaaccgtcgtccttttgccccacttgggactgtccacattaaacacggattttaaggaacaattcggcgatgtcaaggtgttcaaaagttgcggattggttcagtcatttaattgatttgctaatatttttatttattcccttttatttttttgtttcctcagtttgtctgcaccggcggaagctcaactcgaatgtcggaatatgcaaagtttttctcggcgatggccaatgttgcgtcgggtggaaatttgtgcaacagaacggacagattcgtcatgtttaagactggcccggtgctttgggcaaatgtgtgtgtgttttggaaccaaaaattcgctcaaactgtgccgtttttcgtttagcatggcattggcatgccatccgcgtccattttgctgtgtgaggtcagtcaccgtttgcacatagtcagacggagtactgtactcaaaatcacatttatttctatgtgcttactgtatgtcttatcttcccacctgtccctaaagctcttcaaattgctgcgtttggcctgctgtgccgatgtgctgttcatccgcctgggcacctgcggaggcatcgacgtgaagccgggcaccgtaatcatttccaacggagtggtaaacgcggccatggaaaaacacaaattcgtccagtggatccagggaaaagaggtccgaacggagcaaaaaactaaagaaaacaactgctgctaaaaggtgaaacgggacgcactgctcgacgcgcaattgggcgacgatcttttcgacacggccacggaaatgcatttgccagtggaccggggactcactttttgcaccgacgatttttacgagggt

SEQ ID NO: 68440 - DNA, 579 bp, Heterodera glycines
  unsure (1)..(579): unsure at all n locations
atgnagatggatttggtgcaaattgatttcaaaatgggcaaacttttgcaggccttacgaatgactggctttggtttgcacaaatcggttgcncagcataaatatgaagaattgaagagcaaaatggagcaaaaaaagagaggcggaaaactcggaataattgacgtgtgccaattgtggagttgcgcggaagacatcaaaaaaataagccaattaatgaacaaaaccatttcaaacatcaaaaaggagataaacaatgctgaacaattgttaaaaaggagcaaaaagttcgatttaactattattaactattaatccgattttagaagaaaaaaataattaaaatggttttataagtgagaatttccaattaaaattgtcaagctttgcatcaaagcaacaaaaatattatacattttgtttttattgatagtcaaaattgtcctagtcttttttatttgtatgcaaaacttaaaaatcgtttgatttctataaatttaaaataagagaatcttttttgaattttttaaaacatagtttttttcaaatccaaataattatattatgaatcattgcata

SEQ ID NO: 68441 - DNA, 411 bp, Heterodera glycines
atggtgctgattagccaaaaacaattcgatgagctttccacgcagtccctgtggaggcctcagctggaaaaagatgcatgtggcgtcggattttgtgtgagcgttagaggcattccgacgcataaagtgagagaccatttgaaaggcatttaatcgagagaataaataaacggaaatatttttgaaaataaattcaaactgttcagatactgcaggagggtcgagtgatgctcgaacggatgggtaagttatcttctaaaatccccctttccactgtccatagatattttctgaatcaattcaaatttcagtccaccgaggcgcctgtttctgtgacgatgattctggcgatggcgctggcgttatgaccgcaattccggacaaactgtacagggacgagctgaagaaaag

SEQ ID NO: 68442 - DNA, 632 bp, Heterodera glycines
atggttacggaacagaatggcgctacttttgctgttgacgttgaggaaattgcggctgggcatcacgttacgcctgtggacatgacaacagctaccagcaaacttcagcttgaggtgtgttcattgattccaattacatttttacttaaattttattcaatgaaaacttaattttcggctgccgaagtgcgaaatccggcgaataaaccgaattggtcatcgtatttgcgctctcaattggtgcctcaaaatgagtacaatttcattattgaattggaaaaggccaaaaacaagcaggagagggacgaagcgttagccaaggacaagacgaattcggcacggagtattatcaatttgatcaccgaagttgcgaaggatcagctgatccgttacgttctcacccttttcgacgaccttttgcaggtctttcatttccatttaaactttaattaaaatcgttttttattgaatttaatttatttttaaatatatttaatttaattcttggttgttttcaggaggacaaatcccgggtagagattttccatgattatgcaagacggcaaaaacgaactatttggtcgtggttccaagggattttaacgcgaaatgacagtttcattgtcaaccaa

SEQ ID NO: 68443 - DNA, 947 bp, Heterodera glycines
atggtatgtgagaaatgtaagttaatggggctgccttgttttttaaatatttctattcataggcactaagaaactatcaaagttagctactgtccatgtggagaaaagtgaccaaactgcgaaacgagtgacaaatgaaaacaaattgttgagttcgaaacaaaagtgagtcttacggacatagaaaattgaaaaaatggcttatattgctaaatttgacatgattcctttttggttatttttacaaaaactaattgtaagcgcaaaagctttagtattcatgtgggaacagattttattcgatttgctcatgtagttaatttttttttaaagggtgtttttattatttaaaaagtgagaggcccagttaggttcatttctaatgttgaacgtttttttttagattcaaacctgcaagtgaggaatttaagaaatgcagaatctgcaataagatgacacatcatatttcagcgtattattgtcaaggtttgggatttttaactgaaattttgtttttctcttacctagcaaaaacatccaatatggcttgattggctaaacaatagctttagataatttattacattaatctttttattgtttctatgttttcagactgctcgtatcagaaaggcatttgtccgatgtgcgggagaaaacaaattgagacagcaaaatacagacaaagtctgacataaacttgtttctgatacctattcaaacgagatattttgtattcatttgaaatcgcaagttttcgtatttcctttgttagtagatcaatatttttgtcatattggtaaaattttgttttgcgcgaattggaaacggatgttaatttctgaaaaaaaaacaatttaatgttctaagtggtatttaaaactaacagtatttaaccgaagaaatataaaagcttagtgaatccatattaatttatttgaattaaa

SEQ ID NO: 68444 - DNA, 828 bp, Heterodera glycines
atgagcgctaaaattatcagagtgccgaaaatcgcatgtgatctaagcctagcaaaaaatggtgtaagtaaaaatcgtaattacgctcaaaaagcttctcaaacaattttagcgcatccaattccttctacaatcgcctttatacatcccattatgaacgctaaaattatcagagtgccgaaaatcgcatgtgatctaagcctagcaaaaaatggtgtaagtaaaaatcgtaattacgctcaaaaagcttctcaaacaattttagcgcttccaattccttctacaatcgcctttatacatcccattatgagcgctaaaattatcagagtgccgaaaatcgcatgtgatctaagcctagcaaaaaatggtgtaagtaaaaatcgtaattacgctcaaaaagcttctcaaacaattttagcgcttccaattccttctacaatcgcctttatacatcccattatgagcgctaaaattatcagagtgccgaaaatcgcatgtgatctaagcctagcaaaaaatggtgtaagtaaaaatcgtaattacgctcaaaaagctcctcaaacaattttagcgcttccaattccttctacaatcgcctttatacatcccattatgagcgctaaaattatcagagtgccgaaaatcgcatgtgatctaagcctagcaaaaaatggtctaagtaaaaatcgtaattacgctcaaaaagcttctcaaacaattttagcgcttccaattccttctacaatcgcctttatacatcccattatgaacgctaaaattatcagagtgccgaaaatcgcatgtgatctaagcctagcaaaaaatggt

SEQ ID NO: 68445 - DNA, 93 bp, Heterodera glycines
atggggagcaaaaatccaacgcagaataaaagtacaggctatagggaagctattcccgaaggattcggtctccccataaatctgggcgcatcg

SEQ ID NO: 68446 - DNA, 51 bp, Heterodera glycines
aaaagttaagcctaaactttttggcctgtttaaaaaggaattaaaaatttt

SEQ ID NO: 68447 - DNA, 3706 bp, Heterodera glycines
atgacagcccccatccaggcattaatcagggggtgtgccagcaaattgggagcattattgggtaccgaaattccacctgacctgggaataaatgccctaccgaatcaatgccaaagaaggctgtacaaattcagaaaccttctgaatgacttagaaagggtggtacaaaagattgaagataatttgggtttggctaatgagtatattggtaaactgagtcgagacaatgcaatccgtaaggaaacggaaatgcaggaattaatgcaggagttacaaattaatgagaaacaaaaggcagctgatgttctcattccaattttgagggacaaaattgaggcattagaagagaggttagacataactcacaacacggatggtgacactacttccggcattggccctctcaaggagcgtgccaatgcgtaaaaatttgccaaaacctgagcttaagagatttgatggtagtccatctcagtggataccattttgggattactttcgtacaataattcatgaggactctcatgtcccaaaaattgataagttcagttatttagactcatgcattgaaggcaaagccagtgcaatcattcagggtattccaattagtgagagtgggtatgatgatgcaatagatttacttttaaagacctacggggagaccaaacgtctaattcgaacgttaaaccgggaatttatgtcgcttccaattagtgagtcattggaagacgacgagtccttgtatttgaagtctgaaaagatttttcgacaactgatttcaatgaatcagaatgtcgaagacggtatgtattacagtaacctggagggcaaaatgtctccagcagaggtgttagataagtactgtgttatcaaggatgccgaagaaaatgatgattgggatacgtcaaagtttcggaatgcattctcacgtgcattggaccaaataaagcataggcaggaattaaggaaaaatgtgattgagcccaaaagggacaaacatgaactgaccatgtctttcacggcattttccaaaaatgataagtaccaagggaggaataaatttcctcaaaggaattcggatcaatcgccccctcgtgggcggaaatttgaaccaaggaaatttcgtgatcagaggcacgataatagtgactcatcagtcagccattcaccaatgagggataggaggaattctccttatcccaaaagggattggtcaagttcaccagagcgtgaaaaacggaaaaaggatgagcagagaaaatgccaattgtgccaaggtgagcacagtgcgagtaaatgtcctaaatatatggatgccctctcacggcgcaacaaagtattgaaaatggaattatgtttcatttgtctaaggactggtcattgggcaagtcaatgtacgttaaagggatataagtgcaacatttgcaatcgggcgggtcatcacatctcattgtgtagatccaaagacatacccaaggataggaggaatagtagttcagaaagttcaccagttcggtcgaagataaatacgactcaagacttctcagagtctgaagaagttgaaaaggaaataacatcggtcacttcgtgtgttacaagtaaaacaacgaaattgtctttgctgaaatgtaaatatgttaccatttataatccagaaaatccaaggcaaaggaaaaggattttggttttcatggacgatggaagtcaaaagacatacatttcgaccaaattggctcaatttttgggtttgaagccaattggtaatcaaaggtttgaactctcaggtttatcgaatgtcgaattgggtaaattcgaatctccaatttatgagtttggccttaaaaagggcaactttgacattctgatgaaatgtcgagcccttgataaaattttgaagaaaattccggtgattgaactcaatcagctctctcaggagcaattacggaaaacaaaattgaaggtaccagaggtatatggtgagcctgatttaattattggaaacgattattataatcgtttgagcattagtgtcttagaggaattacaatcgggactgtatatcaatgactcaaatattggtcaatttttgagtggacaaggaaaggttcaattctttaagtcattaaacggatctcaatccgacatatcatcgtcagtcattcaccatactgtaaaccaaaagtgtggcaatgatattcaatggattattggtcaagtatcggactccaatcacgaaggttcagtagaatgggaactgaatggtgaccaactgagtccgaatgatttaaataaaatgattatggactggaatggtctagaacatgtcggtatgtctgatctcaattcagataagcaaaacgtgagacaaagaatgattgataaaatatcattcaatggggataggtatcaaacagaattgttatgggatgaagaattggctgctcaattgccaacaaattatgatatggcatttagacagttaatgtcaaatttgggcagacttagaaaaacaccggacttgcttcgacaaatccatgaaatcataatggaacaagtcgaaaccgggtttattgaagaatgtgagccattacctattgaagaaaggtatttggtaggaagtaaggttcattatttaccacatcacccagtggtaaaggaaacgagtgaacatactaaggttcgaattgtgtataatgcgtccgctagatgcagaggaggtctcaccctcaaccaagtgttagaaaagggagataatgattataatgatttagcaggcattttaattcgaagtcgaattaaaccaattctcttgacatgtgacatagccaaggcatttcaccagattttgatacatcctaaggataggaatgcaatgcgatttctgtgggtcagagacccatatgtagaagattctcccctcatggagtatcggtttacgagagtcacgtttggagtcatttgttcgccagctcatctctctttgacaatcaaacttcatttgtccaaatacaaggacaaaaaagtaagagaaatagagagagacatttatgtggacaacataatacttggtttagaaagggctgaagaaattcagtcatattactctcttctcaaagagattttttctaaggcaggtatgaatgtgagagaatttgtgtccaactgtaccaaggaaatagagaaattaccaagtgaagaccaagtggtaaaaggaggagtcaaattgttaggaataaaatgggatatcaacaatgacactctggtcatacattttcccgtgtttaagtctgagaagttgacaagaaggaaggtcttagcacaaattgctaaaccttttaatccgaacggatttgcggccccagcaattttgccagcaaaattatttcggcaaagggtagaaacgaataaaaagctcaaatgggacacctcgttgtctaatgaagagctaaatgaatggataacactgatgaaagactgggaaaatcagtcaataacagtaccaaggaatatcattccgaaagaaatgattaaaaattgtaagtgtgaattgcatgcgttctcagacgcatcacataaggccatgggaacggcaatatatttgagagtcattaatcaaaatcaaataaaggccaatctcatatttggtaaaagccttgttgttccagcaataattccatcaaagtatcggaccattccgattttgtaa

SEQ ID NO: 68448 - DNA, 197 bp, Heterodera glycines
gtgttggcaattacgactgtgtaccaaatggcaccgcgaacagcacacttgttgctgtttacatggaaccgttgttccacattcggctgtacaacatggccatgttcgcttggatgtgtgccgcaaccgcttcgtttgcctttttgtattggaatgggcggaggaaggcaaaaaggacgacaacagcgggggcaaag

SEQ ID NO: 68449 - DNA, 403 bp, Heterodera glycines
aaaatgattcaataaaaatcgtaattacgctcaaaaagcttctcaaacaattttagcgcttccaattccttctacaatcgcctttatacatcctattatgaacgctaaaattatcagagtgccgaaaatcgcatgtgatctaagcagcctagaaaaaaatggtttaagtaaaaatcgtaattacgctcaaaaaggttctcaaacaattttagcgcttccaattccttctacaatcgcctttatacatcccattatgaacgctaaaattatcagagtgccgaaaatcgcatgtgatctaagcctagaaaaaatggttcaagtaaaaattgtaattacgctcaaaaagcttctcaaacaattttagcgcttccaattccttctacaatcgcctttattcatccca

SEQ ID NO: 68450 - DNA, 889 bp, Heterodera glycines
  unsure (1)..(889): unsure at all n locations
aattgccatggaaggagtatttatttgttgggtaatatatttttccacttgagattttttggaaccaatgtatttggtcagtattgtgacacctgcctaatatttctcgaacattgaaagactttgccaaaatgcccgcggggaagtgcttgagacgacttacatagacgaaaagcgaatgattctgaggtggcggttgccgttggtggaaattatcgtcgatttttttgacaaactcaaacttacaactagcggatttgcttcgtttgatcaaaaggatgacggtcagtttataccacaaaaaagtcgaagaatcgtgtaaacttgaagggagcaaagcgaatgattattattaaatttggcggaagggtcacccctcaaaaaaaaagcatacgtgcgccagggatatttaatagggatggattttaagtaaattttgttagaaaaaaatttgaaatttttcctcgtttccctttggcctgcgccccactcccccacctcttttacagccgcaccccttacgacggaagagtgtgggtgcgttacgacgaagcgggggggggggcgacgcgtcccttgcccatgtgtgcccaaattacacatttaaaatttaaacattttaatgcgagaccgcttttcagggtacagagattgtcggttagagaaaatttgcatttttgttaacgataaaccgattgacgaactttcggcactttgtcccggagtgaatgcaaaggcaaaagccgcggaaatagtgaagaaattggcggatgaaatcccacaacaccaattcgaagttatggtcaaagcgtaagtggcacgncttctaaagcggtggcacaacgaaccgtgagacgatgaaaaaggattttaccggagtgcttaaggg

SEQ ID NO: 68451 - DNA, 617 bp, Heterodera glycines
atggaatctttttgctgtgtttgtaaagcaatttatggaggaagccacaactgttctgtctgtaaattgccgtgtcacacattctgtggcgattctggtggagttgagaatgaaggcttcggcggaatggtcgtatgccacaactgcgtaaacgaaggaaatgcaccgatagcagaaggctcagaaaatgatgactacgaaccgcaaaacgaagagaatgaaggcacgcaggcaaaagacaagaagcgccacaggaataacgatgcgacgaaaaaactggatgcagtcgagtgggcgcaagagaactctatacattcagcagcaagaaagttcaaagtggacaggaaacagatcaagaactggatggcacatgaaaacaaactgagaaatcaaatgtacgtgacattttaatattttttgtgaccaaaaattttagcatgacaccgaatggggggaagcgcatgagacttggtggagccggtcgcccagttcaacgcccggacatcgacattgcaatggccgaatggatcactgaaaaacgaaaaaataaactgcctgtgtcaaggaacatcattcgacgaatggcgacgtcactattcatagacactgacattaag

SEQ ID NO: 68452 - DNA, 805 bp, Heterodera glycines
atgaaaaatttaaaaacaaaattgaaagtcagtcccatgcttaacaaacaaacaaatgctttcaaaggcccttccaaagtgagaagccccgtggaagtcgccgacgtcgaaattgggcctttcaaagcaatgctaagatacatttatttggatgatttaaatggattaaacgatgacactctgtttgaagtgcttttcgtaggtaaattttaaaatatttaagctttaaaattttacaaatataaattaagcgaaaaaatataaagtcaatgggctgatcaaagcttgtgccgactttcccatttggaaacttcgcaatgttttcatcgcatattctaaggccaattcccttggggagaaggtgacaatcataattacttatttatcaaatcaaatattcatggccactttcgaatgtcaaaatgatattttggtaattcggctgaagttttgtgaacgccccggaaaatgccacaaatgatatatcagttgttacatcacgaagagttaagcacgaaaaaatggtctccaattgcggaatgggtttaaatgttcagtttaaaaaaaagttcgagccaaaaaagttggaaaatctggtttttttgatgaattcttctggccataacttttttgaaccttaacgaaatttttcaaaattttgcaggctaatagaggatacatagggctatcgaatgataccaacaatgttggatttggttggcaaagaaaaaagttatagcaaaaacttgtgctcgtacgaaaacggccccgaccccatttttcatgcttaactctttgaaataaa

SEQ ID NO: 68453 - DNA, 205 bp, Heterodera glycines
atgttgacgtccaatttaaaaattttggtaatttccttttttattgctttcattttgaccacgactcaatcacttggacaaaacgatggggatactaacgacggcgaaggcgatgaagacgacgataacccattggtgaagagggaggacaatgtcgtccttttaaatgcggacggtgaaaccgatgttttaaaacagtcgccag

SEQ ID NO: 68454 - DNA, 74 bp, Heterodera glycines
tccaagtggggaattgaacccaggcgaaaaattatgaaaggtagaaagtttaaccactacaccacatgtgcatg

SEQ ID NO: 68455 - DNA, 845 bp, Heterodera glycines
atgccgcaaagcattgacgcgctgaaattcgccgatgagatggaccaggaggaggagcagctgatcagttcgtccgtcaacgcccttctgaagaattggcgccgtcagctgcgctcgggccaacagaacactttcattccgttgcttccgttcggcgtttgatgagaaggaaaaaaccaatttaaaacaatgatttttgatttttcaaatatttcatttattcagtgcattttttcaaaaattttacaaagattttaatgcccacaggacagccaaaatcagtgttaattgttccgacagaaggggtacgctattaaaaaacaccaaaaagagccatttccaccagtccatgattttttggggcggcatttgtgccatcggtaagattcccctggtgttaatcaaaaaaaacaccaagataaactcggcagtcgatcagaacaccatcctaagggacgtagtgtatcctggggcataagggcactttagaaaaaaataattcgtccttcaacaggattggacaccggcgcacgagccgaaaacatcaattcagctgagtgaaatctgtttcatggattttgggggccagacatttggccctcaatttgcaaatttgaatccacttgacatttccttttggtcgtttatggaccagagtctgaacaagcgattgcaccaaattaggcgctgaaggaggcttttcaccgtacctgggacgaaattgccgaaaaaataggtgcggacattttggttaattttcggaagcgtttggacgcatgtatctcagcccatagtggctactttggacttttgatgtaattttctaataactaagaccctattaa

SEQ ID NO: 68456 - DNA, 825 bp, Heterodera glycines
atgaaagatgaagaggaatatcaaaacaatcgtgttcggcctttcgaaattgatcagacaaggggcattgccgatcgaccacgtcttaaaaaatacatcgaaaatgactcagctattaggcaattggtaattgcttatgacgcgaaagaagaaaaaaatgacgatgatttgatccgacatattcatgcattgcaataccgtgtggggatgaagggattcgaaggatgggattagaatattgttgaaaatattaattttgttgcgttgttaaaaattagtatatgtttgtttcgcttatatcaaaataggggggggggggggggcggcgcaaatgtcggcggcgcaagtgtcattttggctgggcggcgcaagtgtctgcggcgcaaatgtcacatcaccgtgccgccattggcagcgattggaatttatttgtacggcgcactgcccgaaaccaaaaacagaacaatggcggagattgagcacaaaatagcagaaatgatgaaagaaaaaagcaaacacagagaagagaaaagagactggaaaacgaatttttattgttcaaaatgttttttttatttacatttaaaaatagtaaaattaacaaaacaatcaaaatgaaatgacaagagttaaaaaaggataaattcaatccataaattaattggaaagaacagacaaaacaaaaatgagagaagaatttgtcttaaagtatttaaaaaaataatttcatttttaagtaaataagaaccagtttagacggaaaagatgtcaaaaggaatacaatcaaaaggaataatttaagcaaaaaaaaaagaaaaaaataaa

SEQ ID NO: 68457 - DNA, 234 bp, Heterodera glycines; identical to SEQ ID NO: 64376

SEQ ID NO: 68458 - DNA, 769 bp, Heterodera glycines
tctcgttgctcaacttttggagcccgaacagttcgccaattccgaggttttcttcaccaatttggccaatgccaaacggaggagcaagtgcaaaagttgcaggagatactcaaaccgatgatgctccgacggttgaaggaggacgtggagaaggaactgcagcccaaggaggaaacaatcattgaggcatgtgccagcggtgccaatgccaatgtagttacaaccgcattccggcacttttcgctttagacgggatcaggatcccatgggagtttctcgggatccttcccgatcctttttttccttctacggcattaatcgggaccggatttcatcgggatccctctcgatctttttcaaaaactatgtatatataccggcattctggcatttttaggctatgttaggggtgtatccatccgaattaaggcacgttgttggtgtgccaagggtatatccacctgaattaaggcactttttgggtgtgtcaagggtgtacccacccacatttcgacagtttttaaaaaatttttggcaaaatgcgcaacttcggtaccacatttgatgtgtgggtgccacaaagacaatggcactactctgcaattttttgtgatgaaatcccctctaattttaaggtccaactctccaacatccagaaaaaatattaccgcgcagttttggagcgcaatttcacccatctgatgaagggctcaaccccgtcactgatcagcctgaacaacacgatgatgcaactgcgtaaatgctgcaa

SEQ ID NO: 68459 - DNA, 788 bp, Heterodera glycines
atggcagcggcgcaaatgtcggcggcgcaagtgtcattttggctgggcggcgcaagtgtctgcggcgcaactgtcgcggcgcaaatgtctgcggcgcaaatgtcggccaatcggcggcacaaaaaacagtgcgtaagccttcggagcaatcaatggatttaattaatgacttttaatgtctatcgaaaagagctctacaaagaatcccggcaaatctttgcgatttcacaaagcggaggaatggagcacaacaaccaaaaccaaaggggaaataaacgccacaggcgtttctggctcccaaaattccactaacattgctaaatttgacccaaaatcaacaacatgtccactaaaattactatttatttaaaaagtaaattgaaagaagcttatggagattttggtgccgaggtgatagccgacgaaaattttaaagaccacgattatgacaaatagaaaatgtttatttataaaataaatatttttcatgaatatatttaatatttttgatgtatatgtagctattatttcatgaaaaaaattatttgagaaaaaatgaaaattttttgaattttttcaggacccgttactcggactcggtttaaaaacttggacccggacccggcttttctggacccggcaataccccggacccaatttttgcccaaatacccggacccggccaaccctagttaagattggatcttacaaaatataatcacattatacaaaatagtgaatttttttaaattattttttaatttatatttaaaaatttaatcgtatta

SEQ ID NO: 68460 - DNA, 4143 bp, Heterodera glycines
atggacaaaacgctcgccgaaattttggaaaaattgacgcaagcgatcaagcagcagagcgcgtcgacatccaccgcaactcagccggcacaaaacatcactttgccggacattcacccattttcaacagataatgccgaagaatttgaggagtggttggagcgcttccaatttgcatttgattgcgcggtggcaaatatggcggacgaagccaaactcaaattgctgatgactaagctcaacccgtccgccttcggcgaatacaagcgctactgcctgccggaggaaatcaccaaatttgactttacggacaccaaaactcgtctgatcaaattattttctcatcctccttcgttagcaatcgatcgctacaaatgcctgcgagtgtgcagagaggacggcgaacaatttgaaatttttgtgaaccgaattaaggcagccctccgcaaattccgtttttcggaattaaacgaagaggaattcaaatgcctggttcttcttacgtcgcttaagtcaccaagcgacgcaaaattacgccaacatatcctcgcgcgtctcacagcagagggcacaaagacgacaaaaacgtccaaattattcgacaaagtcatcgaggacttaaatacacagctaaaaacggaggcggaagcaaaaattttggagcagccaaagcccaaaataaacgcaattcagcatggcaaatcatcgccaaataagcaccaaaatcgcggaaacggtcgcccaaatcaaaaattcacgggcaaatcaaaggccaaaataccgccgagcaactgctatcgttgcggagaattgcattgggcacaggattgcccaaagaaggaaaatatatgcagcaaatgcaatcgcagaggccacatcaatcggcaatgcgacaaaattcgagcatttcaccaaaataagggcagaaatttcaacacaaatacggtgatgctccccgcggcttacatcaattccgtccattcatcaaatctgcttaaagcaccgatcaatgtgaacggcacaacaattggtttcatcctggacagcggtgcggaaatcatcatcatcaatgaagatgattacaacgcaatgggccgaccaccaattcaaatatgttcagaggaagcacgctttttcgacggaaagcggtgcaaattcatcggacgcgggaccgccaccttccaattcaacggaattcagacaattcagccgttttatgttgccaaatcgggatcattgaatcttttgggcacaccggcaatggaagcgtttggatttctggaagaaatacggcgaatgatcaatcccgcccaaatcaatcaaatttcgtcaaatgatgcggacaaaatccaacaattcgtcgaaatattgccgcaaaaatatgagcaaatattctcagatggccttggctactgctccaaaatgaaagccaatctggtgctcaaggaaggcgcaaatccaacgttcaagcgcgcccgtccagtgccatattctacgctgccaataatcaatgcagaattggatcggttggagaaaatgaacgtcgtcacaccagtcgaacacactaactggtcagccccaattttggtggtcaagaaagcgaacggaactgctcgtctgtgcgctgatttctccaccgggctcaacgactctctccaattaaaccagcatcctctgccattgccagccgacattttcgccacactgaatggcggaaaattcttcacaaaattggatttgtcggatgcatatctgcaaatcgaactggacggcacttcaaagaaattgtgtacaattgctacacaccggggacactaccaatatgagcggctgccatttggagtgaaatccgcccccgggatttttcaatcggtgatggacaatatgttctccgatttcccattcgcattggcttatttggacgacgtcatcatcgtcagcgcgacatttgatcaacactgccaacatttgaaccaaattttcacccgaatttcagaatgggggttcaaagtccgaatggacaaatgttcatttttcaaaaatgaaatcaaatatttgggcgtgatcattgatcaaagtggacgtcggccggacccaagcaaaatcacagcaattgcggaaatgcgcatcccttcgaatgtcagcgaattgcgatcatatttgggcatggtcaattattaccaggaatttgtgcgaaatttccggtttattcgacagccccttgacgaactgctgaagaaggatgccaaatgggattggtcacccaaatgtcaaaatgcgttcaccaaaattatttcaatgctacaatctgagctggcattgacgcattttgatccaaatctgccgatcatcgtcgcagccgacgcttcacaacatggcatcggcggcgtcatatcacacaaatttgccaatggctcaataaaagccgtgtcgcatttctcacgatcactcacaccggctgagcaaaattacgggcaaatagaaaaagaagccctggcattggtggaagccgtcaaacgctttcataaaatgatcttcggcaggaaattcacattgctgacggatcaccagccactcaagaaaatttttggcaataaagatggtgtcccaaagcactcccacaaccgtctcgtccgttggtcactcattttgacggcttacgactttgaaatacaatacgtcaaaacagacaaatttggacaggcagatgcattatctcgcctaatttccgtccaaaagtcaaaatccgacgacgacgaagtcattattgcctcattcgaagtggaatcggcattggacagaaatttgatcaacaatgtcaaccaattgccgatcaccttcaaaaatttggcccaagaaacggcaaatgatcaggcacttcaacaaattcgtcaatttgtcaaaaatatttggccagaacctaaaaattttcagccaattgaagggctggacgaagccaaattcattcaattttatcggcgccgcgacgaaatttcaatcgtcaaggactgcctgatgttcggcgaccggacagtcatccccaaatcactgcagaagcaaattctcaagatgcttcatcaaggacatccgggagtcaagcgaatgaaatctttggcccgaatgcatgtctactggccaatgatggacgcagaaatcgaaacgttcgtccaaaaatgcacttcatgcgcagctgtcgccaaaaatccaatcaagacgacactgcagtcatggccaaaatctgatggcccatggaagcgcattcacatcgattacgccggaccatttcatggaaaaatgtatttgatcgtcgtagactcattttcaaaatatccggagatttttgaaatgaattctacaaatgccatggccacaatttcaaaaatgcgctcattgatcgcgcactacggcatcccggaaacaattgtttccgacaacggcactcaattccaaagccaccaattccaaaatttcgttaaatcgaacggaattgaacacatttttacagcgccgtacatgccacagtcaaatggtcaagctgagcggatggtcgacacttttaagagggcattcgcgaaaataaaaggggagggagttgacggtaatgtgctcgacacttttctactcacctatcgcaccacgccatcagaaactctggatggaaaatgcccggccgaattatttcttggccgaaagcctcgaataggcctcgacctcctccggcctccgctgtcaattccaattgtcaaggacaataaaatggaggaccaattcaatcgcaaacacggcgcaaaattccgatcatttgaaatcggacaattggttttcacacgtcggcacaattcagcggaatggcgacacggcaaaatcatcgacaaaaagggtgtaatttacaccgtcgaattgccaaacaattctcgcggccgatttcatgccaaccaaatccgcgcacgtcaaattccggatgaggacatcgaagacccgctcgatgtgatcaatggcacttttggcctcccaattccattaagggaccaaaatttggcagaagtcccgccagccaatcaatcaccgccagtccgccgttatccgattcgaaatcgccggcctgttgaccgccttcaaatcgaccccagccgatcgtcctat

SEQ ID NO: 68461 - DNA, 642 bp, Heterodera glycines
cgccgtatgccacagtcaaatggtcaagccgagcggatggtcgacacttttaagagggcattcgcgaaaataaaaggggagggagtcgatggcaatgtgctcgacacttttctactcacctatcgcaccacgccatcagaaactcttgacggaaaatgcccggccgaattatttcttggccgaaagcctcgaattggcctcgaccttctccggcctccgccgtcaattccaatcataaaggacggtaaaatggaggaccaattcaacaggaaacacggcgccaaattccgatcatttgacattagacaattggtcttcacacgccggcacaatacagcggattggcgacccggcaaaatcatcgacaaaaagggtgtaatttacaccgtcgaattgccgaacagttctcgcggtcgatttcatgtaaatcagatccgcgcacgtcaaattcctgacgaggacatcgaagatccgattgacgtgatcaatggcacttttggccttcctattccattaagggaaaataatttggaagaaatcccaccagccaatgatccaccgccagcccgccgatatccgacacgaaatcgccggcccgttgatcgccttcaaatcgacccaagccgatcgtcctatgtgtga

SEQ ID NO: 68462 - DNA, 906 bp, Heterodera glycines
atggctaatgctgattcgccgatactaatttctgatgaggacctaagcgacgacgagactcatttgagaaaattattattgtcggaaaaacaacaacaacaactacgtgaacaacaatttaaccccgatcggccctactcatcgactgtgcattctttgccaatcaaccatgtccaaattatgaccccagcgcaagcagaaaaattaaaaagggaacagcagctagcactaattaatcagaagataaaggagatggaagccgcaaaaaagcaaattgaagaagaagagagtgctgaggaagaaggacgaattttaaaagaaaaggcatggaaagcggaagagcagagaaagagggcaaagagggaattggatgaaaaggtgaagaaaagggaagaagaaaagaaagcagaagaaaaggcaaaaaaagacaaggaggaggtcaaagcggcatttaagaaaattggaatgagtaccgaagtggggggaaaagaagatgaaaacaaaccaaaaaagaaaaaatcgaagaacaacaaaggaaaggacacggaaaatggaaatttggaggccgaaaaactcaatgagggacatagagaagcgaagaaagatgcagaagaaaaggcgaatagaaaagcagaagcgaagaaagatacagaaaaaaaggcgagaagagaagcagaagcgaagaaagatgcggaagaaaaggctaacagagaagcagaggagaagagagacgctgaagaaagggcgaatagagaagcagaagcgaagaaagatgcggaagaaaaggctaacagagaagcagaggagaagagagacgctgaagaaagggcgaagagagaggaagagggaaaggaagcggcagtagaaacaaaagagacgcagaaagcacggcaaaatacacagtga

SEQ ID NO: 68463 - DNA, 1188 bp, Heterodera glycines
atgagctcaacattcaaatcgttggcaaaaacttggggattcgaacatcaaaccacagtgccctaccatcaatcggccaacggacaagtggaacgatataaccgtaccattgtggacatgcttgtcacaagcacggaaggaaaaaattgggcggcagcgttaccattaatttgcttcgcttacaattcttcaattaactaccaaatcggcaattctcctttttacgtaatgcatggtttcgaccctagactcccaagtgaagtgacactcggaaaagtggaagatcatttttcggatatggcagtgtatgtgcaggagttgacaaaacgaatggaagaggttaagacaacagtaaaagaaaatctgaggaaatgtgccgatcaaatgataaaacaacaaaaatggacaaaagagatcccatggatggaaggaatgctggtactgaagcggagaattgacaaaagaaataaactagaacaaaattacgatggcccttttcgaataattactgtagaaaagccaaatttgacactcaaagagatgcatgcagatgctatggggtttacggtacacatggaccagtgcaaaccgtatttttcaaaagaggaacaaattctggtaccaaacgaagagccgaattcgggatccaagagaaaaatcggggacaaaaacttggaagatacagacgaagaagaagagaccgaaataaatacaataagcatggaaatgcttaccgaatttgatgatggaaataatttgaacaagcacggattattattttggatggaaataattttggatggtattgtcatcaccgccctatatccgaaagactcttttgaattttcatcaatcccgaaatctatggttcaatcccagtgggaaatacacaagaccaaagaaggagatgaatatttaaccgcttggatttttgacgaaaatattcagctttttataactggggaaagggaagacttaattattgggaacggaattcaagcgtggttaaatcaaaacgggaatgtaatttgcgaaaatggagaagcaacctactgggagacttatttggacatggacggactcatttataaaaacaaaatcaccccagaattttggataacctataatgagcccgaaatgtgtaaagaatatgaatctcgccatgctcctcttcaacgatttttttga

SEQ ID NO: 68464 - DNA, 570 bp, Heterodera glycines
atggctccattggcgacaacccaggcggcggcaccattcgtcgctccgacccattctgcagccccgcccaatcagaaccagccagtgggagcggctccggatggcgtgagtcgccggctgttgggctctatcaatcgctcgttgatggacctcctgcaagcggcccacgtccagagaacagttttggaacgtttgttgatggtcgtagaggcccaacgatttggccagcaatttggtactgtgcgtggcggggacggtaggcgcggtaatcggcgttatcgccgtagtggaaatgcgggaggcggaaatgcgggaaattcgagggcaaatgggggggcccgtcccactcgttttcaggaaacaagaacggccgtaggcccagtgggagtggtcgaacagccggtgcttggacaatctgctggtcaaaatgttgcttcaacttcggaagaaatgccatccgacacttcatcgacttcggctgtcggggtttgagggttgaccgtcctcccgctcctgctgcgggggcgggaggctgtctacgccatattttttgattatttaaaaaacaaa

SEQ ID NO: 68465 - DNA, 451 bp, Heterodera glycines
atgagtgctcctttccgagaacaaattcgccaagcctacgaagaggcacaagacattttgctggaccaaaaggattttcctctccccgctcgccaacccgaacacacggtaaccctttaccacgccgaactgcgttccatcctttccgaattggacacagaattgaaaaattccgaagaaattctcaaagaggtaaatgaaccgtacgaaaaatggatgtccctccgcacaagtatgaccggtaatgaacgaacccaagatggccccctctacgatgaatttgtcctaactgtcccatttctgagtgccatcacaaatctccgtaaatacatccgttcccttcggtcccaaagggcaaaaatcgaacaaagcataaccactgaccctggctcaaacaaaacattcccatccttggtacacctccccaaaaccaccctccctactttctctg

SEQ ID NO: 68466 - DNA, 945 bp, Heterodera glycines; identical to SEQ ID NO: 40024

SEQ ID NO: 68467 - DNA, 796 bp, Heterodera glycines
aaacaaaaaaatcgattttttcaagtgtccgtttggggtactcaaacaattatggggagcaaaaatccaacgcagaattaaagtacaggctatagggaagctattccggaaggattcggtctccccataaatctgggcgcatcggttcggggggactgccccgaaaacaaaaaaatcgattttttcaagtgtccgtttggggtactcaaacaattatggggagcaaaaatccaacgcagaattaaagtacaggctatagggaagctattcccgaaggattcggtctccccataaatctgggcgcatcggttcggggggactgccccgaaaacaaaaataaatcgattttttcaagtgtccgtttggggtactcaaacaattatggggagcaaaaatccaacgcagaattaaagtacaggctatagtgaagctattccggaaggattcggtctccccataaatctgggcgcatcggttcagggggactgccccgaaaacccaaaaaaaaattttttggataaaaattatttaaatgaactgactagataatatttaaaataggttatttctcttcctttcagtatccctgcaaagtttggtgcgcttctgatcagtttctgaaaaaaaagttaagcctaaactttttggcctgtttaaaaaggaattaaaaatttttaaaaattttattcatctccctttttgatagaaaaagcatcagagtgcctaaactaacatgtaaataaaatttggtgcgtttcagaaccctttctgaaaaaatatttaagaattaattttg

SEQ ID NO: 68468 - DNA, 330 bp, Heterodera glycines
taattaaatccattccttcgggggaccgtgccgggtgccgcggggtaagcagtgctggttcgtttcatcacggcaccgaaccttttggctagtcagcaatcgttgcttaacttgccagatcggacgggtgcgcatgattccactgttccaagcaccccaccaaaagcaaaacgatataaccaaaatataaggaaaaattttttctccatcttcctttttgatactaaagcatcagagtgctaaaattaagttgtaaataaatttttggtgcactttagagcactttctgaaaaaaatatttatgaaacaaaaaaatcgattttttcaagt

SEQ ID NO: 68469 - DNA, 1290 bp, Heterodera glycines; identical to SEQ ID NO: 40026

SEQ ID NO: 68470 - DNA, 225 bp, Heterodera glycines; identical to SEQ ID NO: 59154

SEQ ID NO: 68471 - DNA, 941 bp, Heterodera glycines
gaggcggtcgattggacgaggaaatgaattttttacccaatgccaaattaaactatcatcggagagagaaacgggccgtttcaccgattgtcgcgcaaaataatcggacggagacaaaagcggcaaatgttgccgaattgccgacagaaaacacatttggtggcggttttcaagtggttttcccttttcacatcacatttctcattcacttctcttcaggttgtcattcaaactccggaggttcccggagaaaacattctgacgcgggaaggactgcaaaggcacgtcgccattttggaagaaatctccaaattcagcgtggaaatgttcggcgagtacgatttacacatttaacccaaaacaaataattttccattgaatttgtcttctttttagaaaatggcatttgtccgacatttgctttaaaccgcccccgccagcctctgccaaagacgaattggcccagtttatgggcgacatcatgtctcagattattccctgcgtttggatcactcccatcgattgcttttgggagggctccaaaccgcttggtccattcccagaatacgacctgtaagacattcataaaatcggattactattatgatttagaggtccttttgcccaatttgtccctttcgtgccaaatggaaaactttcatggaaaacgttgaacccggaagctctgttaaacacgacgcgttcttttgttgatgttggaatggttggcgaactgttcgaacgtgtgggtgctttggtttactcgttttgctagcataaaacaaataatttaggccggcattggcgaggcgtaccaagacaggccctgcatcgacccgttggacccggactgtccgtcgacagcacccaatcacttcgaccgttgtgcggcatatgaacatttttcaaaatggaactctgaactaccaccggaccgtcgt

SEQ ID NO: 68472 - DNA, 321 bp, Heterodera glycines
atgccatcagataaatatgagcgaaagcggaagaaggaattggatttcgacacaacacaagagctgaagaaaaagcgcgacgacgacgatgaatttggaaatcaaacgcatcgacggcatcgctcgcgcagccccaaaaagtacggaaatgggttcgacctaaaaggcttgaaaaaccgcataattttcttaaggtcgtccaggcataaaaagcatcgcgacacatcgccgggggacgacggcgaaagagcgggagaggccgggtttgacaccacaattctgaaaggttggcatttggcaaaacaaaatgcatttgtttag

SEQ ID NO: 68473 - DNA, 588 bp, Heterodera glycines
ccagaagtcatttttttgccagtacatttccctggacattggactctaattatccatgatgttcagtgcggtacacatattctcgattctttgcctactccttatggcaggttggattggcaactgacggaaaaaattggaaagatcatttctgacattttgccgtcaacagtgttgaccgggatttttaatgccgtaaatcttacggtacaacacgatggtaacagctgcgggtacttcgtgtgcctatatgctgaatcatggctcatgaacaatcgcacgtttgttctgccagatttgtccatcaattatgaaaagcggcgcatattgtggcacattaacgagctgtataactctgataatgttccatatcatccaagggaaggggtacctactccgtgcccaattgtctatcgacatgcggatgaggctccatcgacatccaaggccgctgagccagttgaagtagatgatcatgatgatataatgatcatcgaaccacaaacgagtggacaagcagttgttgccattccaacacaagctcaagtggcaggtgaaaaccaagaggacacgcgtggattggagtag

SEQ ID NO: 68474 - DNA, 182 bp, Heterodera glycines
aaacgggcgcgaagcgcccgtcatgaggccgccaagcggccaaatgttctcaaaaaattaaaagacgggcgcgaagcgccagttattaggccgcgaagcggccgaatgtccccaaaaaaattaaaaacgggcgcaaagcgcccgtcatgaggccgcgaagcggccgaatgttctcaaaaaat

SEQ ID NO: 68475 - DNA, 1597 bp, Heterodera glycines
aagaggttcaacagtgattagaagaggtacaaaagtgattagaagaggtacaacaatgattagaagaggtacaacagtgattagaagaggtacaacaatgattagaagaaatagaacagtgattagaagaggtacaacagtgattagaagaggtacaacagtgatatgaagaggtacaacagtgattagaagaggttttggaatttttaaaaaattatcagcgatttttaggccgcttcgcggcctcagacgggcgcttcgcacccgttttttaaattcggtgatttttaggctgcttcgcggcctcagacgggcgcttcgcgcccgtttctaatttttgttgtgcttttcggccacttcgcggccgttttttaaattgtgttgagtcggacgggcgcctcgcgcccgttattaaattttgatggactcagacgggcgcttcgcgcccgtttctaatttttgttgtgcttttcggccgcttcgcggccgttttttaaattgtgttgagtcggacgggcgcttcgcgcccgttattaaattttgatggactcagacgggcgattcgcaccctttttgtggccttttttaggccgatttgcggcctcgaacggccgcttcgcgccgttttttaaattttataacagatacaaaagtgattagaagaggtgcaacaatgattagaagaaatagaacagtgattggaagaggtgcaaagtgattagaagaggtacaacggtaattagaagaggtacaacagtgattggaagaggtgcaacagtgattaaaagagttacaacagtgattagaagaggtacaacagtgattagaagaggtacaacagtgatatgaagaggtacaacagagattagaagaggtacaacagtgattagaagaggtacaaaagtgattagaagaggtacaacaatgattagaagaaatagaacagtgattaaaagaggtacaaaagtgattagaagaggtacaacaatgattagaagaggtacaacagtgattagaagaggtacaacaatgattagaagaaatagaacagtgattagaagaggtacaacagtgattagaagaggtacaacagtgatatgaagaggtacaacagagattagaagaggtacaacagtgattagaagaggtacaaaagtgattagaagaggtacaacaatgattagaagaggtacaacagtgattagaagaggtacaacaatgattagaagaaatagaacagtgattagaagaggtacaacagtgattagaagaggtacaacagtgatatgaagaggtacaacagtgattaggagaggtacaacagttattagaagaggtgcaacagtgattagaagagttacaacaatgattagaataggtacaacggtgattataataggtacaacggtaattagaagaggtacaacagtgattggaagaggtgcaacagtgattaaaagagttacaacagtgattagaagaggtacaacagtgattagaagaggtacaacagtgatatgaagaggtacaacaatgattagaagaaatagaacagtgattagaagaggtacaacagtgattagaagaggtacaacag

SEQ ID NO: 68476 - DNA, 707 bp, Heterodera glycines
  unsure (1)..(707): unsure at all n locations
cctcaggacgggcgcttcgcgcccgtttttaatatttatgggggatatttggccgcttcgcggcctcaggacgggcgcttcgcgcccgttttttaanttttacgggggatattcggccgcttcgcggcctcaggacgggcgctttgcgcccgtttttanatttgttgggaacattcggccgcttcgcggcctcaggacgggcgctttgcgcccgtttttaatttgttgagaacattctgcagcttcgcggcttcaggacgggcgcttcgcgcccgtttttttaatttttgggggacattcggccgcttcgcggcctcaggacgggcgcttcgcgcccgttttttattttgtggggccagacgggcgcttcgcgcccgtttttaaattttacggggatattcggccgcttcgcggcctcatgacgggctctttgcgcccgttttttaattttgcgggggacattcggccgcttcgcggcctcaggacgggcgctttgcgccagttttttaattttttgtggggcattcggccgcttcgcgacctcaggacgggcgcgtcgcgcccgtttttttaaatttttgggggacattcggccgcttcgcggcctcaggacgggcgcttcgcgcccgtttttttaaacttttgggggacattcggccgcttcgcggcctcaggacgggcgcttcgcgcctgtcttttaatttttt

SEQ ID NO: 68477 - DNA, 197 bp, Heterodera glycines
cggaattgtatcattcgggaaacgccgtgtttgagggcgcgtacaacgatggacacgttgtgctcatacctgatggtgaacaaagcaacagtggataagtgatcggcactcatctccaattgtgatcggaaaaaagcgatatctaattttgtattgtacataaataggttattcggacaataaaactgtaatgtgca

SEQ ID NO: 68478 - DNA, 270 bp, Heterodera glycines
cagctttcattaattatttatgcattaatgctcgaacctcgcggattacggcttgatgctgatggctttgttcataatctgcagtgaaagattttcccttaaataatgtttttttcatcttttaaattttatgttgcactgaaaaaattaatttcctttttattataagatttttacttaaacagaagaatctattttattatacctttttttgatgatgctattgcaaaccaaaatttttagtaataataataatatagtataagcaaa

SEQ ID NO: 68479 - DNA, 251 bp, Heterodera glycines
atgaaagggcggcgtcaattggataccgccgccgcgaagcggctgtttaaatacgccgatgagatggatggatgcgatggacaaccacccgttgatgaatcgactgccgcttgctaagtgtcctgcaccgaacggcacggtcggtcggaaatttttttttgcgtttttccgattccaattttttgttgtaattttttcaatttttccagtatttcgaagcgccgagatggtcaacgaatgaggagggatga

SEQ ID NO: 68480 - DNA, 161 bp, Heterodera glycines
ccattgcggtcaattacgtcgtcgtttgtcatcgggcatcgcgtcgcaacaccgaggtcgttgagcgggagaatgaacggacgggcgagtggctgacgctgcgttggcgtgtgaccgcggagcctgtggttgtacgccagcggagcggcacggatcggcgc

SEQ ID NO: 68481 - DNA, 1686 bp, Heterodera glycines
atgtcggaccatccaaatgttgcgctggccgacctgtaagccgcccgaatttaaaatttcacaaaaaatcggattttaaattttttcaattttcagcagctgcgtggcaaacgacgtttggctggacactctgttttggattgaccgcgtggaggtgggcacgaagtttgcactgatcgacgcacgtttcggcaagctggtggccacgcatttcaacctgcgcaagtggaggctgggcgagctgggcgttcatcgtgcaccaagcggatgggaccggggcggcacggcggctgtcaccgttatggacgacaacgcgttgatcaatcgactgccgctcgccacgtgtcctgcaccgggcggcgtgattggcttcagtgccatctacatttggtcttagcgaacaaaatttttttgcaaatttttaaaaattccctaattttccaggtacgtcgacctggaagtgatcgcatttctgcagtgcctgcaacgtgtcatcaatcgcggcatcgctgtgcagttcaccatccattcgacggacctccgctgctgggcggtgatggcgcaacgcatttggccactcatttcgcacgccgtcctcgcactgaacgacatgaaagccgtcaacttcgcgctgttgcgtcgccatgtgtcgccgaatgtgctgttcgactgtgctaaccttcgtgccatcaccaacacgcacatgttccccatccgaccgccgcccagcgctgtgcacatcaatgccctgctcaacccgccggacgagttcgatgagaagccgaagcacaacctgttccgctggctgcacacaccgcgcaaggatggccgtccgaaaattgtgaccattcgcaagtggcgcaaaccgcaatgggcttcgttcatgccaagcttaatcacggtccgaaagattttacggcattttttgcttccatttttttcatttttctaatcgattttacgcgtcccatgccatccacagtttcttaggccataacttttttcttaattggtcaatgcttatattcttggtaccaatcaaaagcttgaactctcgggatcttataaatccaagaaaacagcaattacttgcattagaaaataaattacaatgagaaaacatgaaattcaaggtttttcgagtattttcaagaataattttttgtctattgcttttagccgagaatttagttatacaaaagcttctgtagactttaagctttcgtttgataccaagaatataggcattgaccaagtatgaaaaaagatatgcccaaagaaactgaggatgatagtcattcatgggacgcgtaaaaccgtatatttgcattttttgattccatttttttttgaatttcaatcattttacagtttttcaacgcgagtgccgtccctgtcaacttcctcgtcatttgtcacattgcatgcaataccaacttccagaagatggaacgggagaatgaagagacggacgagcggctgacgccgaatgcgcgagtccctgcacatgccgtgattgtacgccagcggaacggcactgatcagcgcacagtggcgaagtggaagtgggaggcaaatcgaatattggacactgctatgcatcaacagttcggattttctattttcagtagccgcatggcaaacgacgtttggctggacactctgttttggattgaccgcactgag

SEQ ID NO: 68482 - DNA, 1750 bp, Heterodera glycines
atggccaacgcaatgtacgcggcacgggcgcgcgcggccaaggcggaaaagcgtcaagcgcagctgcgcaaggcggccagagcaagggcaggaaacgtaagtttagattaaaaaaatttaaaaccgaaaataattttccccaatttttttcccacagaccgccaaatcgcgacgagccgagcgctgttcaatttgctggggccgactgagccgaatcacgcgtaccacgatgggctgccaccatccgctgcaccgacgctgcctctacaattgggtgcgcgtcaacttgttttgtccgatgtgcggctacaactacacgcgcgggaggccccgtgatcgccatggacgacgcaccaggggactccatcgtatgacgccggatcaggtgcgacgtgaaatggaccgcatgcgtcatatcaggcgctgatggaggaggaggagaggtgggttttgttgaggtgtgggacgggggcagcagggaggacgagtgtaatttttggttctgtttcagtttggtgttttgtgggggagggagggtaataccaccgccgatggtatcccaccccccttttcgaaaaaaaaattttcaaaattttttagagcggttttcaaggtcggggaatacgattctaacatccatttgggccgtgtgttgggggagggggcggaggacgtgcaatttttggttctgtttcagtttggtgtgttgtgggggagggagaaatgaaaaattcagaatttattggactcaatttatttttaattatcatttttttgaattttcaggcccggaaacgagaagtcgtcgcaatcgcatggcaaacggcggaaggatggaaagaacggacgacggatcacacaatgaatgattgccgagtgtatttattgatgtatttgtgatggatattcactcatttgttgtctcataaccaagtcagaagaacacacgcattgtttgtatcacttaccattatatttgtactgaattgaatgcataaaattgttgagcacaaatttgattccaaattttaaggggggtcaatttttaatctcaaatcttatggtcgtgtgaactcatagagcccccggctcaagtacagtttatgcgcccaatcaaattgttactttaaattgctatttttttcaaaaatcccgaaaatattgatttcttcaatatccgattttgtcaatgataagccgtgccatcccacatattgattttaagcgcaggtcaacagaaatagagagctatccgaaacatggccactggatgaaaatttaattggacgcacaaaaatccattggacatataaactgtacttaagccctaaatttatcataaaagcatacacaaaacaaattaaaattaagttgatcaccaccacaacaaaacaacaattttataaacgtcaaatgggctcaaattcattctcaaacacagaaattcaaattgatcgatcacttctcaaggaatctcgattcgattccactgatcataaaagtcccatccaatcgcttccttttcccattttgcccatttgctttcgtcgcgcacaattggacaacggatcagaagaaaattgcgggtatctttcatttctttcaacgtcaattgttcccgagtcaattcgttggtcagatcgaagagctcaacggaattagcagaaggcggcagatgaaactcaatgacgacaatgaaattgacggaagaagaagcattggcaaatgcctaatgggggaaattggataa

SEQ ID NO: 68483 - DNA, 438 bp, Heterodera glycines
atgttctacggttatggcaataaaattgccaaattgttgatgtttgtcaccaattttgccattttcctcatcggcgtccgcttcttcgttgcattttcggtaaacacaaataattgcaaaattttctttattaatttggaaattagaagtaatatattgacttttcagcccaaattcggaaccaagtttcccgactttgacagtgaggcgcactttgtggatgaattggacaaggtatttaactgggcgaaaattggttaggttcttataatccattgggtgaaatttgagaacagagtttcccaaaaaattgtagccatttaaaaaaatgaaatatttgatgttttcgtttaaaattgaatttgactaccaacaaaatggttttgcatgtttaaattatacaacataattttgtcccattccgaaccctggattcga

SEQ ID NO: 68484 - DNA, 488 bp, Heterodera glycines
atccgtgctgtcccggcagtcaaaaagtggtttcgctgatggccaattacgttggcactttcgcccattccttttccaagtcatcgctttgtttggatgccaaaagtgttgcgggcgcattgaaaggccaactgatcggctgctcgaagggcggcgacgcaactcttttggccgacatcgaagcatctcttgccaaccattcttctggtattgatggactaatggatcaaatccattgccaaattagccaattaacttattttattttaattatttttatattttccgccttttagatgagtgtgcccacagcctcggcttcgtccgtgccatgttcgccattgccgcctccgcttcttcccatgccagcaacaacagcgaatggcaggcattgagtgcccagtttggtgggcaaatcagtgaaattgactcgaaatgtgccgagtttggcattagcattgccaaagtgtcatttgacggccccaagg

SEQ ID NO: 68485 - DNA, 471 bp, Heterodera glycines
  unsure (1)..(471): unsure at all n locations
atgacattctcattattaccggttcaagcaattatcatntacgaaagcgctctcaattggacaacaagcgttcatattttgcctaatgataggaggtccagtatttgtctcgtagaattgtttaaaaaatggcattctcattattaccggttcaagcaattatcatttccgaaagcgctctcaattggacaacaagcgttcatattttgcctaattgataggaggtccagtatttgtctcgtagaattgtttaaaaaatgacattcttattattaccggttcaagcaattatcatttacgaaagcgctctcaattggacaacaagcgttcatattttgcctaattgataggaggtccagtatttgtctcgtagaattgtttaaaaatggcattctcattattaccggttcaagcaattatcatttacgaaagcgctctcaattggacaacaagcgttcatattttgcctaa

SEQ ID NO: 68486 - DNA, 1365 bp, Heterodera glycines; identical to SEQ ID NO: 8548

SEQ ID NO: 68487 - DNA, 2527 bp, Heterodera glycines; identical to SEQ ID NO: 8549

SEQ ID NO: 68488 - DNA, 2688 bp, Heterodera glycines
gtcgaaccgattggtccctgtctgaaaaatcaggatcccattgaaatacaacaaaaagcattccccactccgtcattaaggtcaattacacctttcggatgttcgcccataattcgtacggtgccagtgaacccgcgtcggctccgtccgcttccgtcccgtgcgccacccctccggacgtgcccttctcgaacccaatggaagtgcacgcccagggcactgaaccggacaatttgggtagttttaggaataattataatgctttaacacgaataaaagtgatccgatggacgcctctatcaagaaatgtttggaatgcgcatggactgaaatatttggtgcgctatcggcaaatggacgactcagcaccgacggattggcacgaattctttgtggaagatccatttgcagtaaaaagaagaaaacactgcttgaaaggggcacacatcttttttagaatcagaccacgattagggaacagcccacctttcggccttttcttgtccaagtgcgcgcagtgaattcgcgcggcttttccgcgattgaacccgaaactgtgctgggctggtcgggcgaagacggtcggcacaaatcccaaacggaaaatgccaaattggaaaaaagctgccccctttcagtgccattggaggcaccgcgcggactccgattggttgcgcatcgaaaccattcgacggtcgaattgggttgggaggagctgaagtcggcgaggtgactgtgactgatcaattgggccatttttagcccaatcatttggccatttcagctctgtccgtggccatttcgttggatttcgcgtcagtttttttttgttgccatttcacccttttttctccgcccatttcacatttctttgctcattgatcactctttgtcagttggaccattggccttctgtccgtccctttctgatcacttctcaaattgtgccgaatatttccaccgtggctacaatttcggggcttcaggcactgaccaattacgaggccaaagtcaattttgggattcttcctttccgaaaattaaaaccttttgcgcgaaggtgtgcgttttgaatggccaatacgaaagcgaagggtcgaatttgctgaaattcacgacaatcgaaggcggtaagacactaattaggcaattaatcgttgacaattaattaattgactaattagtccccctttgacttgcttcccgttcctttagcgccctccaaagtgcacaaatttgcgtgtccattccgtcggctcgcgctcccttctcgccacttgggagccgccgctccatcccaacggaaatctccgcggctttacctcgccttcgaaagtgccattgccccgtttcctttgttctgccgattgtttcgtcctttgtttttagacctttcctccggcttcaccgaagagacttttgtgcttcgtcgccaactcttttaccttcacgagtctctgtccccggagacgcctttccgcgtcgccgtttgggccgagacgggcggcggagagggaccgcgcacatggcgaaacacgcggacatggcccctcaggggtaattaagggagggcagactaattagggtaattagcattttgacgaatggcccacccactcttccagaccccgacccgcccctcttctccatccactccctttcccccaccattttgcgcgtccgttggtttccctccggaaacgcttcctccgccggccattggcgcatgtcgggctcctctttccttctcaactacacgaaaaaaggcattaactgttcatttaaatgaccaattttcaatttgaattcaattttcttttatattttaaaatgtaaattttaaaatttgtaatcttttgtcattttattttttcaattgttttctctcttaattacccccctccccaactttaataggcacctcccaatggcatcaaacggtgccaattgtgttgcctcaagtggtgtttgatttgcggaatttggccgagggaacggattatgtgctaattggggaggcgcgggaagggccgaaacgccggagggcatccgaagcgctagacattcgcacggaaagcagcagagggaggccaccgttcagcaacggtacggtatttattgtcacaagagtactgtaagcactcatcacagtgtttgctcaaagtagtctttcttttgtttgtgtacagtacccttccctccttttgcacagaacgcttgcgcagtgccgcttggtttttagccgttctaatcgcttgcgcattgactttcgcactgctcgcggtcgcgtgcgtagtcgcgcaacgaaatgcaggtcaacccgaaggctattaattaaataattaattaattgtcgaaattctcgaaagtttttgacccccctaaaaatggcgcaaattttccgtttgtttcgcttcagtctccgctttttgtcagatggcattccgctcggttttatggcatttcggcggcgcgagaaacgctttgggcccgcgttgcgcttccgcacgccctcctcctccacgggggaggaaggagttgggccccgcggacgcgttggattggctggcggagggcagcgaagcgcacaaacgctttttggcggaggcgcaacggcgattgagcggagcaatggacagcaaagaaagagagaaacggcaaaagacaagggagaaaggggagagagac

SEQ ID NO: 68489 - DNA, 438 bp, Heterodera glycines
aaaatggtctaagtaaaaatcgtaattacgctcaaaaagcttctcaaacaattttagcgcttccaattccttctacaatcgcctttatacatcccaatatgagcgctaaaattatcagagtgccgaaaatcgcatgtgatctaagcctagaaaaaaatggtctaagtaaaaatcgtaattacgctcaaaaagcttctcaaacaattttaacgcttccaattccttctacaatcgcctttatgcatcccattatgagcgctaaaattatcagagtgccgaaaatcgcatgtgatctaagcctagaaaaaaatggtcaagtaaaaatcgtaattacgctcaaaaagcttctcaaacaattttagcgcttccaattccttctacaatcgcctttatacatcccattatgagcgctaaaattatcagagtgccgaaaatcgc

SEQ ID NO: 68490 - DNA, 391 bp, Heterodera glycines
atttgccccccgaggttaagcgagacacaagtcaaacggttcaacgaccagaacgacccgtgcaaaattctgcttgcaaccgatgcaattggaatgggaatgaacttgaacatcaaaaggtcgcttttctttttaaattgcatgggtcaattaatctttgatatttttcagagtgattttcacaacattgaaaagtcgtgatggctctttgctccctgcgtatttcgtaaaacaaattgccggcagagctggcagatacgcatcagcatattgcaccggcgaagcgatggcgttggatgatgctgatgctggactgcttgagaagctgatgaatgaaccaattgattccattgaccaggccggcattttgccttcattcgaccaaattgag

SEQ ID NO: 68491 - DNA, 375 bp, Heterodera glycines
atgcacgcgttttgcgctcgagctatttatcatcgggcttgtcaatccaaagcgaaacaacaaagatggtgttttgaacgaataaagggcataggttattttgaagaagtgtcaaagaacatgcagcaataagcctgcaaaatctaataagtggaaaatacatgagtatagaatttattttcagaaagtgtctacagacttttggaaaaatatatttgcaatttatcaacaattttgagaagtgagttagaaatgataaacttcacgattcaaaccagttttcggtgctctaattaaccgcgataaaaacattcgaatcaattaaatagcttctgagataataaggtttatcataaaatttcatttaaaaataaa

SEQ ID NO: 68492 - DNA, 375 bp, Heterodera glycines
atgcacgcgttttgcgctcgagctattcatcatcgggcttgtcaatctaaagcgaaacaacaaagatggtcttttgaacgaataaagggcataggttattttgaagaagtgtcaaagaacatgcagcaataagcctgcaaaatctaataagtggaaaatacctgagtatagaatttattttcagaaagtgtcaacagacttttggaaaaatatatttgcaatttatcaacaattttgagaagtgagttagaaatgataaacttcacgattcaaaccaattttcgttgctctaattaaccgagataaaaacatccgaatcaattaaatagcttctgagataataaggtttatcataaaatttcatttaaaaataaa

SEQ ID NO: 68493 - DNA, 65 bp, Heterodera glycines; identical to SEQ ID NO: 56492

SEQ ID NO: 68494 - DNA, 59 bp, Heterodera glycines; identical to SEQ ID NO: 52421

SEQ ID NO: 68495 - DNA, 59 bp, Heterodera glycines; identical to SEQ ID NO: 52421

SEQ ID NO: 68496 - DNA, 59 bp, Heterodera glycines; identical to SEQ ID NO: 52422

SEQ ID NO: 68497 - DNA, 59 bp, Heterodera glycines; identical to SEQ ID NO: 52422

SEQ ID NO: 68498 - DNA, 588 bp, Heterodera glycines
atgaaaagtccgaaaaaacgacaatcaattctctcccttcaagccgcaggtataccggcaaaacggcctaaggttttgttggtcgatgaaaaaatggaagaggcgaagtgcacttcatgggctgacaaatacaggtggtggtgattcttataaaagctttttaaatataggcgatttttttacatttatcattcgacacattcctccagaatgttaaaaactgacaaaaaattaaaaaccttttaattcggttactttctctacagaccgacttcactcaaacaactgattggacaacaaactgacaaatcttgcgccaacaaacttttgttttggctgaaaaattgggccaaaaataatcttaactcaccgccttctgctgaaaagaaaaaaggcatcgtctccagtacaaaacaaaaaaagaaataatttgtttatttagctcgtccaaatcaattccaagctcaggttgacggagccacgtttaaagcggctttactttccggccctccaggcattgggaagacgacttgcgcattgttgtgctgtaaggagctgggactggctttcgtggaaatgaacgcgtaa

SEQ ID NO: 68499 - DNA, 1201 bp, Heterodera glycines
atgctttgctctgtggacttttatgaagtgagtgagcgtaacgcgtgtgaccacagcaaattcaaacccgacaaaaccgcgtccaaaaaattgcttttctgtcaaaatccgatggattttttttgttgatcaaattgaaattcatttgctgcttttgtcgcgttgagtttttatgttcgccaagtgtcaaaaagcatttcctattattgcgtcgcttaatttgttgttttttaagttcttcgtctttcggtatgccttcccttctgtctttggctggtgtgcttctgctgcgctctcatcccgtttgctgatcaattggacgaacttctggacctgcttcaacttccgcgcggattacacaattgtgccgttggtcactttggtgagtttgtgtgccacctttttgccatttgattttgtggcattttccaacttttaggtgctcagcattgtcttggcgtgttcatccgtcttcgagattttcttcatgaattcggtgctgaaaaagaagtgccccgtgtgtgcttatgcttcaaccgacgactacgatgatgatgatgattatttggtcacggaatgtgccatcgactgagcttaagcagacacgaaatcgggaacaatgctgatgccaacaaaacataaccaatgcgatgaaacaacaatgtgatggataagacatatgatcgatataatctaattctacgtaaactgttgtattccgttgtctattccattatattagtagatgtatgtatatgtatatatgtatcagattatctatttcaaaaccataaactgctgtattcaatgtgttgtgtattgtatgttccattatattagtagataaaatcttgattgatgtaaagtttttagtaagaatttattcccaattagttatccgaagtgtgatcactgatcagatagatgctcactaaatcttttttgcatcatcattttatttatttttaatactatgtatcagggatgtgccgagccagacaaaatccgattccgattatggccaaaaatccgatacggttttaaaaccgattacgattatggcccaaaatccgattaattgcgattccgattacgattccgatttttttaaaataattttttcccaaaaattttattcataatcaaaatcataaattttaagattgtgatgcaaaaataagtttgtccacattctcaggca

SEQ ID NO: 68500 - DNA, 1217 bp, Heterodera glycines
ttggcgtgccgtgcctcttctgttggtcgattgtggtgcctccattctttggttcttttttgaccgtgtcaaaaaacggcgacgccctcccaaaaaagaaatgtaaaaaaataaacaaaaattccgaaaaaattcttcttttttgcagctttatctgcgccgattgttggcttttggtgttcgactttcttgcgccttctcaacttggcctcgaaattgcactgatcagccgtcgatttgacttctacgttgatgaacacttcaaaacgcgcaaatggatgttgaacaaacaattgctaattacatggaaaattgtcggaaatggccccaagcaaatgcaaattgacgatgccgatggaaatccattgccaatcccgcgaaatccgttgccgaacaaagtcatcggattcagacgcattcagatcatgtaacaaactgattagatagaaatttttcataattttctgcacttttcagttacatcgatcaaaatgtcatcgaatttctccaccgttttcaccgtcttttcggcacttgtgcaacagctttggacattaccactgaaaatgttcgcattttggactactttttgctccacatttggccaatgttccgcgcttccatgcatctgatgattttgaacaccatcttttttcgccgtttgcgtcaattggccccgtcttcgctcagcgattgtccatcccttcgcgttgtgtggttggatgacggcactttccccgaatttccgcccgatgacagtgccatggcgtcggatggccaagcggtggcaaaatgggtgttgacgccccgtccggatggtcagcccaagttgctcaaatcacctgttaattcaccggatcaatggtcgtcaacgatagaacagttcaaagcggtcggtgattatcactgggcattttattcgttttttgcgtttttttgtcccatttttaggcattttccaatgcttcttctccggtttccttttcaattaactttctgccgtcttctccgcttaactccgctgtgccattcgatcggatcaacgaagcgactggggagcaattgacactggaacaatatgacacaaacaatttttggctcgaccgttgtccaattggatgggatgataagaaatgggacaatgtgtggaaggaattgggtgctgctcgaacgaactcaattgacattcagatcgaagatggcggatacgacgacgg

SEQ ID NO: 68501 - DNA, 468 bp, Heterodera glycines
aagacggtcacagttcgctggaagtgctgtacaaatgcacggcgtgcggcaaagacgtgcacagaacttatgagtgcatcagtacgtacagtacagcaatttttaccgtatcccctctcaattacaatacatacaataaagtcccgtcgatttaagttgacgtcacttacaattggtcgggcggacgacaccgcgacacctttcgctaccgtaatcaaacgtacagtgtgtggggacagtacacggaaaatgtcatgaaaacggtagtgcggacgcggatgaccatgaacaactttgaggcggtggagcgcaaattcgacgtgatgagcgttgttcagacggacaattattacaagacaagcgatgaatggaccaacgatttgattaggcgtcttgaataattgaggcagaggccaaatggcaacaacaatttttgtgtattatatttgtgtatttctcgtatatact

SEQ ID NO: 68502 - DNA, 184 bp, Heterodera glycines
tcaaagtgacgaaaaagtgtgctcgacacctccgacggggcccagttatcagcggaatgattgatatttaagaaataatgaccgatctttttgagctatgatgaattggattgattgattgatgatatttttgtttgctctttaaactgcctattgacgctgaccattaaaaataggaatttga

SEQ ID NO: 68503 - DNA, 65 bp, Heterodera glycines
atgttgtgcgaaattttggaacgcgacgaattgcaaatccctgaagaaattcaatgtggaatgca

SEQ ID NO: 68504 - DNA, 93 bp, Heterodera glycines; identical to SEQ ID NO: 53399

SEQ ID NO: 68505 - DNA, 369 bp, Heterodera glycines
atgcacgcgttttgcgctcgagctatttatcatcgggcttgtcaatccaaagcgaaacaacaaagatgctgttttgaacgaataaagggcataggtattttgaaaaagtgtcaaagaacatgcagcaataagcctgcaaaatctaataagtggaaaatacatgagtatagaatttattttcagaaagtgtcaacagacttttggaaaaatatatttgcaatttatcaacaattttgagaagtgagttagaaatgataaacttcacgattcaaaccaattttcggtgctctaattaaccgcgataaaaacatccgaatcaattaaatagcttctgagataataaggtttatcataaaatttcatttaaaa

SEQ ID NO: 68506 - DNA, 311 bp, Heterodera glycines
atgaaaattattgccgaggctcgtgacggaaccggagcgcattgttttgacaatgttgatcaaactatggctgtgttcgcgttcaaacttcgcttggccaactccgtccataccaccgctcattctctgcgtttgttcgtttttaaagaaggtagagctgcttttaagtgtcccaatattaatttttatgccttatctctgttttaggaactatcccaatggaggacaacagaattctcgggtactacataaccagcgaccgacatttgttttaccagcgtgttcaggggcaacagaacaatccgaattga

SEQ ID NO: 68507 - DNA, 71 bp, Heterodera glycines
gtgtccgtttggggtactcaaacaattatggggagcaaaaatccaacgcagaattaaagtacaggctatag

SEQ ID NO: 68508 - DNA, 91 bp, Heterodera glycines
atgagtgaaaaattccgccaggacatgccaccccagggaggctatccgagcttccacgttcatcgcacgttaccaaaatcgttcctttcac

SEQ ID NO: 68509 - DNA, 457 bp, Heterodera glycines
  unsure (1)..(457): unsure at all n locations
atggcaatattaaattattatccaccgagctcaaacaggtgggcagtgaaattgatttaatttattcacgttaagcatgctattatagtttatagacgtttcggtctaagcacaaaatttttgatcgcgtaatttcggggaattttgncntanaattcagtttaaattaacctttttgatgcaaacctagaaaaatcaaaaaagttacttcaaatgtaaaattaggcaattttgcccaaaatcaataaattaaatccaaatccgttaattatggaaaatttgaattttgattacggtcttttgccatttgattataccccgattcatatatgaacaggtgtggaacagaattaaacagctcgaacgaattgaatcaaggatttcaacaactcctacaagttcatttgagtttattcaagatgaaaatggcaagttgttttaaaaaataattaataaa

SEQ ID NO: 68510 - DNA, 884 bp, Heterodera glycines
atgccgcgctattgcctttttggggattcggtgaacaccgccagccgaatggaatccaacggaaagggtaaaattgggggggggggggggaaacaaattcatttcccatttcagccggcaaaattcacatttcatcgagttcaaatcgcttcttgaccaccgtaatcggaggatatgtgacggagccaaggggcgaagtgattataaaggtaattagggggggggaaaggcttttgttaattaattgcctgattaattcattagggcaaaggtgtgatggagacattttggctgttggggcgaattggcgaagtccatttgccggaagggccatccgtggcggaacggaagagcccagcggaaatgcgctgattgaccggtaattaacggtttacctcagttgggcgccagcatgtttttctactataactttctataacttttttctttgtcatccaaatccaacaatgttgctatcattcgaaagcttaacatgtttagaaactttttctaagatattgcggtacttatgcactttacagaccataaaaaataaaattattttttaaatcatataagaaatttatagggggttttcggggtcgctgatcacgaatctgatatccattttgaccaattcgaactccgaccacgtattcgaataaaaaatcaaatatatctatgagctctaatatggtgttaaggagctcttgaaggtgttgatagcgcatcttaactcgggtttgaccaattccgaactccggacccgaattcgaacaaaaaaaaattgagtttttttaatcaagaataattttttcagggtaaaagcttctaattcattatcaactatttaggtgtaaaacaatgtttcaattcttaattaa

SEQ ID NO: 68511 - DNA, 2340 bp, Heterodera glycines
atgccctgcccaaggctggtttgcccagctgaccgtgttcgagttctttgtgttcctcaagctgctcagctggcccattttgttcgcgctgttcgcgaggacagcaaagcgagtggaggaggaggccgatcagatttggaagtaccagctgtactcgctcaccacctcgtttaggtgggacggcaattccttggcgccatactttgggaagaaaatggcattttcgagagtgtcccgttaatctgatcacagtgcctactcttctcccacattccatcctttttccattgtctcgccgatttcatttcttaccgtaaccccaatccgtaatctgttgccacagtgtccgtccgtgccttcccccgcctttcactccgctgtttcttctctctgtcgccttttgtcgctgcggcgggggcggcgccttttcgtgtctgcagcgccgcaagggaattgcgcaatgtttggccaccgatcacccggactttgggggacgggcgccgaacagtccgcagagcaaatacatcgtggtctacaaaaacccatcggtgagctgggaaaaggacgcattgggcttttcactctttcatattttatgagttggccattgatacggtagtatttttggtccttgcctggtactgtacattcgttcgtttttcgaaatgccctcctccatcgttaaaaaggtgcccgtctcgcggggtcgcccactctgcggctattggcgccgtttggccgttgcccaatggaaaagcgcgacggaagggacgccggcggagggaaggcaccaaacgcagcaacaaatagcggacaaagcccatctgctaatcgcattcagttgcttacagcaacaggtggacaaaaacaacggcacgacaaaaggggcccagcgatggaaagttatggcgacggaaggaggcgaggaggaaaagccgacgcgactcgaagtgattgaataggggataaacagcggacgagggaaaaactgattggacgggaaaagactggtcggacggggcaagactgattggacgggaaaagactgatcggacgggaaaagactgatcggacggggaaagactgctcggacggggcaagactgatcggacgggaaaaggacgggaaaatattggtcggacggggaaagactgatcggacgggaaaaagtcggacggagtgggagaaagacggtttccttctttaggtcccagcttcggaacgcgattggctccaacttcagcctcattatcgtcccaattcgttttcaaaagcggccaatcagttcccggcagaattgcaaaagcacgtggatgaccattcggccaagggactcatcgaaattgggcggcagtggcgccagcgctgtcttcaggcgattttttccgccattgacgagtgcaaacagtcgccaaattcgaggagggctaagcggtcgattagtctgaatggtgccggaattccgctgaatcccggcggacggaccggaatggccggaaggggcaaattcgcgcggtttgggcccaatcggatgctgatctacgcactgattagacgaattgtggacgaagaggaggaggagaacgactgcagaaaagaagacgaagatgacaattgtgagcagaacggagcggaggagattcaggtggggacgagggatgggtgaagatggcattttgaatggcatgctctatatgctggggtcacatgtgaattagcaggggaagatgggccagagatttaaggcgaacaaatttccaacagacagtgcgcgagagtgagggagcggtaggggtactgtactgttgtggttactgactgtaatgttggttttcttatttttttaaattttcattttccatggttttcggcaattccaatatcccaaaaggtgctcgtcctttccgcctccggccttttgccgtttcgctggcgcttttcgcccggtcatccgatggtggacgaacacttggcacaggtgctgctccaactcggcatgtccgacccggacattcacacgctgagcacgaagacggcacttggggaaggcgagcgggacggaggggtggcgcacgtgtgcacggagagggcggagacggcgcagggcaaagagacggacaacgcgtgggccgaagcgcagctgtgggcggtggacctaaggcagtcccccaacaattcgaaattcgattttaatcatttaaattttattttgaaaaattccagcgccttctcaagccttcaccagcaattgccggacggaggcgaatattcgtggcgatctcttcggcggttggcgccggagcagcgccgatttgcggagagggcgttgaaaatgttccg

SEQ ID NO: 68512 - DNA, 780 bp, Heterodera glycines
atgggtgatgatggggagataaaccatcgacaaccacaaaagattacagctgttggcgctggaaaaggaccgcccgtttggaaaattccgaagaagtccacaagcaaaaagggaagtgatggtgctgggaaaccgagtcgagagagccacaacaaccgggagagccacaacaaccaacagtcggattcggcagccaaggggggatacaacggtttgaacattgacggactctttgaggagattgaacagcaaaagaaccaacggacgattaacgaaaatggcggcaacagaaaagaacataacgaagtggcggacacggacagtggcaacaacggtgtgcagtgggaaatgcaatgtaaaactaaatagcgcaccgatacaatgacagcatttattgcttttgcagcggaactctgttcagccaacggacgtgatgacttggtccggtcgccatcacttgctccacaatcttcgccgaacaagttgcagaccagcaaaggcattccaaaacaggagtgtgatgatgagaagtcgcagggatttttcggatctcataagtcgtcgacatgtaagttttgtctgaaaataacttgttttcattgtctatatagtaatatttcatccgttataactcaaataatatgtctcacgatcagtttgcctaaattcggtatttcagtaggactggcgttgtacaaggctgagaaggagggacgcgaattacgatctcgtcatttgcgcagcggacagtctccacaaaatgtgccaaactcatctgtg

SEQ ID NO: 68513 - DNA, 141 bp, Heterodera glycines
gaatccgactgttggttgttgtggctctcccggttgttgtggctctctcgactcggtttcccagcaccatcacttccctttttgcttgtggacttcttcggaattttccaaacgggcggtccttttccagcgccaacagct

SEQ ID NO: 68514 - DNA, 234 bp, Heterodera glycines
atgcgcttcgttctgtccctcgcccttttggcacttttcgtcgtccaatgctccgccgacgactcatcgccgtcctcagaggcagctgatgagaatccctctgctgcccatgccgctgctgaaccatcagcggcaggcgatggagtgccgccgccaccgccgtcggccgaaggggcggcagccgaacgaaagaagcgcagcggagggaaagtcgcaccggcactaatcctttaa

SEQ ID NO: 68515 - DNA, 443 bp, Heterodera glycines
aaaattggtctaagataaaaatcggaattacgctcaacaagcttctcaaacaattttagcgcttccaattccttctacaatcgcctttatacatcccattatagcgctaaaattatcaaagtgccgaaaatcgcatgtgatctaagcctagaaaaaaatggcctaagtaaaaatcgtaattacgctcaaaaagcttctccaacaattttagcgcttccaattccttctacaatcgcctttatacatcccattatgagcgctaaaattatcagagtgccgaaaatcgcatgtgatctaagcctagaaaaaaatggtctaagtaacaaccgtaattacgctccaaaaagcttctcaaacaattttagcgcttccaattccttctacaatcgcctttatacatccccattatgagccgctaatattatcacagtgccgaaaatcac

SEQ ID NO: 68516 - DNA, 738 bp, Heterodera glycines
atgtcggcacaccaaaaagaggaggaggacaaaaatgaaaacattgttgcaaataaaaatgataatttcgaaagtgtggcggcggccgaagtttgtttttgtttctgtccggtactgttctgtccggtgaccaaaaaaacccatttcacaaagtcaacattttagggatggcattccgaggccccaaaaaatgttcggaaatcagaattaattggaaacacgaaatttccgaccctaattagaaaaaattatcaatttctctaaaacataattttatttttccgtaaaaacttggactttgctttgttagctgacagcaaaatttttgagtattaaattttaattttttcaatttttttttcagaaaagaggagtgccaaagcgcaaaaaacgccgaaagcgaaggcgcgcctcgtcctccgaggcggccagggacgaattggacatgtgccggacggttcagcaaagatatggcgccaaacggaaggttggctttgtgcatagttattgtaccatttttaaattttttttcaaaaatttttattttttgcggcgattttttcaaaaaacttttggggaacaggagtggttcggttaggcgccgccttgaaaaaattggaaattttcgacagatttggaacagatttcaccaaaattttgctaattttatggatttttagaaaaattttacttgatttttttgggaaaatgggtttttttttctaatttggcaataaa

SEQ ID NO: 68517 - DNA, 510 bp, Heterodera glycines
ctcgccgcattgacctttattcaaagcaatcgcaatttgtggtcaccggacgaaggggaaatgggggaaggcgatttgccacttgaaggtgctgggaataacaagaaaaaaacccgttaattaataatttatatttgaattaagaggaattggccgattgggtgcaggcggagacatcggacggacaattttactattggcacatttacacggggggtaagtgttttacattggaatagatttaggaaaacggaacttcatactgtaatattttattaagaaactcgttgggaacaacccgagaaattttacacttctgcccaatacgccgaacgttatgccaacattgtggaagagacaactgaccagagggaagtcggacagtgtgccaattccgcctacgatttaacacaatcatcggtattaaaaaaagttctgcaaattagaaccgaagaattacgaagaatttgtccatcgccggcacaagtcagactgcttgtcctgaactga

SEQ ID NO: 68518 - DNA, 384 bp, Heterodera glycines; identical to SEQ ID NO: 66175

SEQ ID NO: 68519 - DNA, 598 bp, Heterodera glycines
atgatgataattttatcaacaaaactgatcacattgtccgttctgctgcttccaattttgcttggcattgccaatgccgcgggcatcggcgacagacaaaaaagggcggtggaggaggaaggacgaaaaagcgtgagcgaactgtgtgccatccatgaacagaagttcaaggagttattcgaggttgaaagaggaagtgccgaaaaggaagaagttttatggatggaaaaaattgaaaataaagcggacaaagaggaggaaaaggaaaagcagaaagaaaaggaaaagcgggaagagaaagcggcagaagagagaatggatgctaaaaatgaagcatggcttagcactttgttgggcaattatttgtgccaaaaattgcgggggaaaggcggggagcaaaatgatgagaaattggattatgccattgagaagaatgtgtggacaacgcccgcaactgtagatcctttattagcctgcaaaatttcaaaaagttgcttttctaaacatttttgaccatgtcccgacttgctctggggtcgggccaaaatgaattcacggtgcggggttcaggggcaggcagggacgagactcggaatta

SEQ ID NO: 68520 - DNA, 790 bp, Heterodera glycines
atgctttgctgtacagctctctcaattcaggcgattcggtgattaaaaaagatgaatttgtccgcaacattaatttcagaaccaattcgtcggccttttgcttttgatcatcagattgttgaaaaaatttcgtaatattttgttgcccctaaatactttaaaaattatagaaacttttaaatttagtacttctttgtttgctttttctttggttttttcccattgctcaaattcgtcataatgcttcgaccttaaatgatcccataatcctttagtcgacgatttcttacacgaaaaagaattatgacaaaggttacataaagccgtttccgatgtttgtgattttttataaaaagaacaaaattcaaatttcttataacttttttgccttttccccaacaaaaattccattcttagaggtgtatatttaaccccgaccccgagtcggggttaagggtcggggttcggggttggaagcgtcggggttcggggttttccccgaaaatggccaaaaatgtcggggtcggtgacgcaaccctagataaaagtgacaaaaaatgttctcgtgtcacgcggggccaagcagtgatcagcggaatgaatgaatgaattattgtttgagaaatgataggtcctttcttgaattattaattgaaattgaatcagttttttgtgtgatgggcctgattgggaaggttttttttgataaatgtatcaattttaaattgaagaatctttattattgttttgatttaaattacttatctctatttttgtttaccacaataaa

SEQ ID NO: 68521 - DNA, 487 bp, Heterodera glycines
atgaatacggcggacaccgttttacatgaaatatttcggatcaaccaatcgtatacagaattcgatttgttgcagcagccaatatcttgtattatagcgacatatagtacacccgttgggacaggtaaaaattaaaagtttattttaaaaaatatattttttaaggatttaaccctttggattattgtgaaattaaagagttagggagaatttgtgtcaaaaatatggacaatttttgtaagttaaacaaaaaataatttagcaccaaaaaattttaggtttattttatgccttggttttaagcagattttatcaattaattaacaaaaatgacgaagagaaaatttcgatggatcaatttcgtaaaattataaagaatgaacagagacaaagcgaagcagtaaaaaaattaattattgatgctaaaattaatatgaatgaaaaaacctatggtttaaatcatttgcaaatcgttcaggatttttgg

SEQ ID NO: 68522 - DNA, 1364 bp, Heterodera glycines
atggccagcgaagaaattgatgaaaaaagcaatgagaaaaaatatacgcttaaacaggtaaacaaattgagccctaatcgagcccgaacgggcacgggatcgggcgcgcggatttttgaaaatttgggacaatttcaacagaaagttttccagcgacgctggattacgcaatttttttttattttaccaaaattgccaatgttaggtcaaattttaaaattttagggaattttgtaggcgttccggaaatttttttttttttttgtaactttaacgaaattgttctctgtttaagattgaattgaatggcggctcaattggcggctacggcactcctcagccccttaccgcacttcatcgccgaatgctttccaatgtcggcattgacaattcaatatcggtgatgccggaaaatctgaccagcgaaatgttggccacggcaatgtacagagcatggtcagtttaagagagagagggaaaagaaagagatagagtgggtaaaaaaggaaagagagaaaagagagagtgacaaaaaaagagagtgacaaagaggacgaggggattagagagaaaaggggtaagagagagagagacaggggggggagcggggacggtaggggtcagttgcgtctgagccaagcataaagcaccataacttttttctttgtttgtcaaattttataaatttggcatcattcgaaagctctacatgtttagaagcttttgataagatattgctaagcgattgaacaacttataaaaaagttgcaacatgaacactaccaaaaagtcagaatttttgcatattttaatttataacttttttatatgtcggtatgtctttgtgatttttggatagccgatagagcttgttaagagctttcgaatgataccaacattgttggatttggtcaacaaagaaaaaagttatggtggtctaaacttggctcagacgcaactggcccgtttcgagcgaggaggtaagaggttagagagagagagcgcaagatagagaatattatgactcatgataaagaggagagagagggagagaaagagagcgacatggagaggagagagagattagagagaggagagagataaaaaaagaaaaaggatgagtggatacgagataaagggcgaagagagagagagggagaggggggggggagcgggaaagaataggggatagaaagagagcgtgagaccgagagagagagagagaaagggggaagagagtgagagatgaaaagagaaaggagagggaaaaaccgaatctgtcattgagttaaaagtcaaccgattgataatggtaaaggttatacttcagcatttaaatggttattccttgtttttttaataaa

SEQ ID NO: 68523 - DNA, 264 bp, Heterodera glycines
gattctttttgtccacccaaaaattcgcatttttttgctcgtcgaagcgcgcgcaattcaatacgcaatggaacgcatttttgagggaaagccaaagccgaaatgcgttttcctcacattggaagagggaattgaccggtgaattagttaaatttaattaattcgatttttaaaatgatataataaaggctaaagctcaactcggacaattttttgattttggatggcaaattcactgttgccgtttcaatggcccgcaatgcc

SEQ ID NO: 68524 - DNA, 204 bp, Heterodera glycines
atgccatatgccattaattatggtactcttatcactagggatgggaaatttaggtaaataagattcacggaatttaaaaatgctgatttttctgtttatttagtaatgtttttaaatcttgaaaatttcagggaaatatttttccgtgaaattttcaagtttattaaacacgggaatgtttataaaaacgttttggatacataa

SEQ ID NO: 68525 - DNA, 163 bp, Heterodera glycines
gaagtgaaatattgtgtggaaaacattgaaagggacgaaaatgttttaatggagcgaattcgcgacgcaaaagattgggcactgactaatgggctgacttttccggtgccaagaagtaaactgaaatgtgacgcatgtggcaaaatcaatgaagtataatgtt

SEQ ID NO: 68526 - DNA, 438 bp, Heterodera glycines
aaaatggtctaagtaaaaatcgtaattacgctcaaaaagcttctcaaacaattttagcgcttccaattccttctacaatcgcctttatacatcctattatgagcgctaaaattatcagagtgccgaaaatcgcatgtgatctaagcctagaaaaaaatggtctaagtaaaaatcgtaattacgctcaaaaagcttctcaaacaattttagcgcttccaattccttctacaatcgcctttatacatcccattatgagcgctaaaattatcagagtgccgaaaatcgcatgtgatctaagcctagaaaaaatggtctaagtaaaaatcgtaattacgctcaaaaagcttctcaaacaattttagcgcttccaattccttctactattgcctttatacatcccattatgagcgctaaaattatcagagtgccgaaaatcgc

SEQ ID NO: 68527 - DNA, 307 bp, Heterodera glycines
cacccggaagttcactcgttgcaacggatccaatccaattgggtcccgctgatcagactaaaactgatcaattttgatcatgaaattgatattgtgttcgcttcaattcctggagagcagcaaattgatgccgatgatttacggcagcagaatattttgacaaaatttgaagaaatgatagaaaaattagacaacaaaatcaaacagctaaaagaagaagaagacagaaatgatcaagcctcattaacaaatgccaaggaacaaatactaaagtcactccgatcactcgctggtaattaattaatga

SEQ ID NO: 68528 - DNA, 625 bp, Heterodera glycines
atgaccaagaagaataataattttcataaattacttttgctactcaaactgtgggcaaaatgtgagttttctaaaaaaatacaattgcaaaaaaactcacaaagcgattttacttcataaaattggtcttttacattaaaatttagctaattacatttataataatgcaatgggcttcttcaatggcacatcgttgggcgttttggcggcaaaaattgtcttactgtatcccgaagcgacagtaccatttctgttggaacgtttcttcttcacttattattcatggtcaaactttaattaattaattaaaagcaattgatgaattcagggaatggcctttgcccgtacaaattgccgaaatccgacccaattcatcattaaattggaatgcatgggatgagcaaaaacatttgttgtcccaatacggtagcggcggtgcgtacagtaaacttatgataccggtgatcactcccggcttcccggaaagtaacagtacatatctaattaattggcaaacaacaaaaatcatcaaaaatgcacttgatgagggtatttctttttttattatacataaatttaaataattttgaaattttgaaattttttttattaattatcaaattaa

SEQ ID NO: 68529 - DNA, 1299 bp, Heterodera glycines
atggcgcgtgcgtttgcttgcacccgcgtgatttctgtcaaattgcgtgtactccgtgtacaggttgcacgattgacctgctctccggtgcggaaaagctgcagcagcagcaacagcagcaagcgagtgcgatcaccttgtccgcaccagcaacagatgacccggttatgggtcgcgcttcggctaacagcagcccgcagccgcaacgctcagcgcgctcgggtgcgcctgccgcgggtgagacgctgtgcgtgcgactcgcgctcagcaacgaagtgccaatacggtgacgcgcactcaaaaaaattttaaatttttttttttttacaataatagagctgtgcttctttttgcggaaggaattttcgcgtcagaatgttatgcaatgtgattttaaaaaaatatttaaattaaattttcattaaaaaaaattcaaaaaataatttaattgaagcaaaaaaaaaatttggaaaaaatttattttttaaatttattttgacaaaaaaaataattttggttttgattgtatttaatataatttttattaaaaaaatataattaaattatattaaagtttttttttgtttaaaaaaatttctattaaataattttctttaaaataataaaaaaaattaaataaaataattatttttattgggaaataaaattattttttaaattttttgaacaaaaaatttagtgactttaattctttttaaatatttaattaaataaaacatgattaaactaaataaacaaaagttatcttataaacacaataaaattttgtttgtaaattgctaattttatattattttattttaattattaattattggcatttttcaagccacccgaatgggaaggaaagtgccgacatggtggtccgattcaatccggccaaaaatgtgttggccgaactgttcatcaaagtgtttgccggcttttccatggagtgatttttaattgtttaattacaaaattattattttaattacctaattaattatttgttcactaattaatgaattaaggcgccatttgcgtgtttttgaagtcaatcagctgttgccacgttttgtgacatttgtccaaatggacccagcctttggaggtggttattttattatttgacaattataaaaataatttattaattttatatatttttaattgctaaagaaataattcttcagagatttgtttattttgtaaaattaaatataattaattaaaaaaaagcctaacgaatatactttatggaggtattaactaagtttttgcatcaaaaatttataa

SEQ ID NO: 68530 - DNA, 749 bp, Heterodera glycines
aaggctaatgccgaggctaaagccaagaaagacgcagaagagaaggctcagaaggatgccgaggctaaagccaagaaagacgcagaagagaaggctcagaaggatgccgaggctaaagccaagaaagacgcagaagagaaggctaatgccgaggctaaagccaagaaagacgcagaagagaaggctaaaaaggatgccgaggctaaagccaagaaagacgcagaagcaaagaaaaaggatgaagaaatgaagaagcaaaaggctaagcccgaagaaaagcctgaggcacctgccgaagccgtagccgtagtgccggaagcgaagaaggcggaagagactaaggaaaagctgaagcaggaagagaaaccagtgaaagtgccaccatctccagcagaaaagaagagaaaagacgcagaagagaaggctaaaaaggatgccgaggctaaagccaagaaagacgcagaagagaaggctcagaaggatgccgaggctaaagccaagaaagacgcagaagagaaggctcagaaggatgccgaggctaaagccaagaaagacgcagaagagaaggctaatgccgaggctaaagccaagaaagacgcagaagagaaggctaagaaggatgcagaggctaaagccaagacagacacagaagagaaggctcagaacgatgccgaggctaaagccaagaaagacgcagaagagaatgctaatgccgaggctaagccaagaaagacgcagaagagaaggct

SEQ ID NO: 68531 - DNA, 526 bp, Heterodera glycines
atggggagacggcggcggttcgatgggagtgggattacgaaattttgggcgattttaacagaatcttcattagggtggatggtgtcaagtgcattgggtgagtaatagaaaagcatttgattttgtttaataagtcaaattacgctgaatttaggtattgtctccgtaaggagagaagctggacaaagcatcgaaatggggggagccttctgacaatgaacggtcaaaagaacaaaaaaagtgatcagctgctgaaatggactaattgggaaatggtcgatcataatttatcaatgataaaacgtaatttatgaaaaaataacagatacatataagtgcaaaacatagtatttttgttgagaaattttcccaaaaaatgtcgaaaaattgaaaaaaaagtgacaaaacgccaaaatagtgaattttcactattttagggaccgggtcgtttcggcgccgacgattcggcgacgacgtttcggcgccagggtcgtttcggcgccgcgccaagccagaaatttaaaaa

SEQ ID NO: 68532 - DNA, 244 bp, Heterodera glycines
atggctgcgctccgccgagcccccatctcctcctgcttgccattcctcatcttgatcataaattttcctccaactattcaggcatggcagttgaagcgagcggaagacaaccttttgttggcttatgacccaatcgcagaaaattatgtgggtaatcagcagtgctgttcgagagtctcgggtcccgacttgagaaaagactcgggttttattggtctcggtctcgagtcgagaaaagactcag

SEQ ID NO: 68533 - DNA, 457 bp, Heterodera glycines
atggctaaatacggtataagaactcgtttttagaagaaaacaagcaatttctagagaaaaacgaccaaaaaatcaaaaatttccatttttgcttatttttgacataaatttaccaatttttaagaaaatttaaatttaatcaattttttcgacaaaattttgctaaaaaatgtcttttcggaaatttttacggcctttggggtcaaaactgccaatttatctgatgggggccgttctaataggggttttttgaaaaaatgcaaaaatatgtacataaaacatggacataatgccaaaatatggaaaaatatggacataaatcacgaaatatggaaaatatggatatagaactccttcctagaggcttcaaaccaagctaaaaacatgtttttcatgcgtttcaggcctccaacagtccaggaaaaaatatggatttccatattattacaaaccctag

SEQ ID NO: 68534 - DNA, 1464 bp, Heterodera glycines
atgaacacaacggcaccaactgacattgacctgtttctttttttcctcggcggtgccgttgaactgttgaccaattttgttggcattccgttatccattgccaatttgattttggtggcacgcacatcggtcatccacccgaacatgaaagccattctcatcttccagagtctctttattatcttggtaaattaaattcaattaaatcaaagtatttaaataaaaaacaagaaatgattattattctaaatttaagcgtggttcctgtcgttttgtcatttgtcttttcaagttcttcctttgggacccaattggtgcagaatctacgctatttttcccggcacttttaaaaatgtatttcattggcatttatgctcgtaattttgtgccccatgttctggtcgttgaacgcattttgtccactttatttgtccgaacatatgaaaagaatcgtggcaatctgttcagcattctgtggatgccttttgcggtgagataatcgagacttaattgccaaattgataacgaattataacgaaaaagtatcttcaaattcaagtacaccaaaaggaatttttgaaaattttgttaagcattaagaatacataagcgatcaaaaattctatttgcagttgatcatcccaatttatattgccaccacaacatcttcaccgcatgatcataaccaaccaataacgaatctgatcacaactgccgtccaattgctggtcggaagcattgtgttaggcattttctaccaattaagccgatacaattccaaaatttatcaaaaaatgttccaaaatattggctcgaataatctgtcaattcgttatcaggtaatccatataaattaattatataatcattatttattttgaaagctctctgaaaacattcgcattggcaaacagctaataccgccactgtttctgaatttgggcaacattttcgcgggaacaatgattttattatgggactttcttgatttgccattttatatttatatattcaatttggctgcgattatcaactcaattttcggccttcttatcgaatttttcattataacgtaaacaaatgtaaaacttaaaatattaatttaatttaaaagttttaagatgccatccatttttgaatagggatttgtgccaatttttgaaccgtattggtaaaatgtttggatttaatcatttggcctataatcatcgaattggtgatgcaactgtaacatttggcacaaataatactgctccttctttggctgctgtcaatggcattgctcaacggaatttgatcagcggaaaagcattgattgataaccaaacaaaaccagaagatcattttgccatgctgaaagaagcatgggagaaggggccgatgaaatgacaaaatgccaattcgcaaaattaactgaaaaactatttaacatttttgaatttccgttgtgaattaatgcattta

SEQ ID NO: 68535 - DNA, 604 bp, Heterodera glycines
atggacaaattggggcgactggtgcagatgtgtgccacgttcccccatgtgaccttcttttggcttccgccgccattcgtccgtgatcgacaattcgaacacgaaacactgatcggcaaaatgcgagacttctttggccaaaagaagaacatccaatttgtggccacaacggcgacaggccgttcgcttcttgaaatttggcgctacggcaacggctacaacactgatcatgtgtcgcctgagggagtgatgaaagagaagggactcaacatgttgaaggcgtggcttttgacgcaagtcaaggaatttccgggtgatcaggagttgggcattgagaagaagaagccggagagtggagagaagggaaaaggagcggggacggcagcagatcgacaacacggccgcaccgagccgcctccattccgacgcgacgggcccgtctttcgccgctcgaacagccgaccgttcgttcagcacccgtactcgcgcaccgccgttgatcgccaccctttccgcccctttcgcacgccgaatttgccgaatcccaatcgccgtcactttgatcgctgaggacatcgctcgttgcaagccgaggatgtgataa

SEQ ID NO: 68536 - DNA, 180 bp, Heterodera glycines
tgtaacaagtccaagtacgacgggatcaacaggttcaactatgacgacaacaacaacgacgaccactaccaccaccagcagcacgccaacgacgccaaatgggacgacgacgaaaaattggagcgaatcattagcggctgctgttggcggaaagaccacacttgtgctgatcatcgttgg

SEQ ID NO: 68537 - DNA, 189 bp, Heterodera glycines; identical to SEQ ID NO: 40111

SEQ ID NO: 68538 - DNA, 1923 bp, Heterodera glycines
cgaatttcattttatatgaccaattttggcgaggaggtaaaagaaattgggaggcaaaggcgactcattaaaaggccagtcacatgggctcggccgccgcgttggaacttcgagatttggtctacggacagtacagagaagtgggcgtccttctgtggcgcggcttttcgttggaccaatgcatgaaccaatgctatgggaacgaattggacgaaggtgggcgagcaaaacaacacgaaaataaacccgacaaatgctaattttacgcaattacttccgtaaacatttcgaaagaaactgacagtccattgaatgccatctttgccaaattcttttttgtctccttttgctgtgccattttctcctcttcaggcaaaggcaaacaaatgcccgtccattacggatcttccccgctgaatttcgtcaccatcagttctccgctcggcactcagcttccccaagcagttggcaccgcttacgccttcaaattggccaatgcgcaacgatcggctgacgagaaacgcgtcgtctgcgtttattttggggaaggggccgcgtcggaaggggacgcgcacgcggcgtttaatttcgctgccgcattggtgcgaaagaaggaaaattgtgaaaaaaacaaaatttattacagaaattttgattagctatctctctcgaaatcattaagcgttgtcccgttttgttcttttgtcgaaacaacggatttgcgattagcacacccgcttctgaacagtacgcgggcgatggaattgccggcaaaggcattggttacggaatgcacacaattcggtagaaaatccattgaaatgagaattcaattagggggggggggtgagtttgaatttggaaactcagtttggataaggaattttgtgtcaatctttgattagaggagcctaacaattttattctaacattttcgccccggaaatttactaaaaatttttcaaatctgagtttttcataaacagttttaaattaaagaaaccatctctcttaactttaggagaattaaatttgatttaatataattaacctttcgtattaaaattcggttttcaaaatgactttgtttgcctttgtgccttagggtggatgggaatgatccgttcgccgtgtacaaagtcacttcggaagcccgaaagttggccttggagaacaatccggtgatgatcgaagcaatgacttaccgcgtcggccaccactcaacttccgacgattcctccgcttatcggtcctttctttctcttccgctcgctttttggttatccaaaaaaacactgatcagacccatggaagaagtgaaagaatgggccgaattggaccctccgatcggtcgctttcgacggtttttggaacggcgtcaatggtgggacggtgcgttctttgttaggctttgcattttgttaatttgccatttatccattcacaaaaacatatttcgttagatgcgcaagataaacaatgggttggcacggttagtgaaataattgttaaaggaatgaaaaaagtgaccattcccaaccctttggaggttcggcgagaagtgatgaattcatttgcgaaggcggagaaattgaaaaagagagcgcccgaggaattatttgtcgacgtttacgcagaaatcccaaaacaccttaaggtgggggaggggggggggggggggtaaattagcaaagggatgtgccaaagagagaattttgaaaaataaaaatacttttcatttcataatcgtagaaaactacaaaaaaagaatgcaatttctgttaaccatttaaatttttaataaaagggagagaaaggcaaaaagaaattgtcattttgcaggatcaacaagcgcaactgcgagaacatttgtctgaatttggaagcgaatattctcagatggagcattttcaaaaataatct

SEQ ID NO: 68539 - DNA, 1658 bp, Heterodera glycines
  unsure (1)..(1658): unsure at all n locations
atggcctggacctggatccaggaaaaatccaggcctggatccaggtccaggtcgaactctaataagaaatattggaaaacgagaatggcgcaggtaggctcaaaaaagaacaattttgagatttttcttaaatttaatataatgaaatttgttgcaaaatttttcaaaatatactcttctttgggttggtttgttttgaaactaacttttgtccaacgcgataaatgccaggccgaaaaagtatggacgtacccatggggatgggttgcgaattctttaaaaaaagtgccgacactttttccccagcagatacttcccaccgtcacttttctcccccaccaaattcgacttctttatcccccccccctatttttccatttcgaatacctttttggttcgttttttggctgtcccggaccaattcggcctgctctgttcgtattgaagaaagcaaagtgcgacagatcgttcttttgtgtgcaacaaaattgatgatggagcgaaacagcgaccgacaacagctaaaaaagggcgaaatgagaaaagaaaagcccatcgtttctcagcggaatggctgcccatcaccgacctgcactcgtaaataacggaacattcgtttttcaacagatttttcacttcgtccgttcctccctggtaatatcggaccactgactcagccccgtcgtcagaatttgaggcgggaaagttgggaatctgtgaagctgagtcttttgagaaattaagtgacatttctgaaggataagagcagttttagattcattagtcaatcatttgatgacattaacggacggtgagaagaacttctcacaattcgacttggttcattttcgaaaatggcgaattgcgcctttaatttatttgttttacttttgtgacttttcttacttaagcaattctttctgcgcaacagcaacggtacagtattttagaaagaataattttaaattttattttaaatatcaaaaataatgtttttctgttttctaccgtataccgaattcggtgactctcgattctaccgtagttcactttaatttgaattatatgattaaatttttagtttttatgccattaatgagaattttaatcatttttatttaggtaataattttttaattaattatttttggctaaagtttaattatgatgaatttatttaaattccgagacatcgttttattacggaccattgcttttcctccgaattttgtattaaatcgtggaattaattaccgggaaaacagcaccatcggatcaaagcaaagtattggaaatgcagacgaattcaaattgcgcgaatttggccaaaaatacctcggcaaaagagaagttggtctgctaatagaaaaagcaacaaacagttgatggacaattaatatgttatttttatcatattcataagaacttcccaaaaattaatggattcctacaaaaacttaattaatttcagcaatattcaggtgaagttcacagagaaattggaatttcgaagcagtgccaatgaagtgccaatgccaatttaccaatgcattaattcgcgaggagaatttgttgacggaagcgaagagtgtcctctgccgaaggttttaataagaaaaagtccaacagaattctctntttcaggacattgcagttaa

SEQ ID NO: 68540 - DNA, 358 bp, Heterodera glycines
atgggatgtataaaggcgattgtagaaggaattggaagcgctaaaattgttggaggagcttttggagcgtaattacgattttactaacaccattttttgctaggcttagatcacatgcgattttcggcactctgataattttagcgttcataatgggatgtataaaggcgattgtagaaggaattggaagcgctaaaatcgtttgaggagctttttgagcgtaattacgattttacttacaccatttttttctaggcttagatcacatgcgattttcggcactctgataattttagcgttcataatgggatgtataaaggcgattgtagaaggaattggaagcgctaaaattgtttga

SEQ ID NO: 68541 - DNA, 439 bp, Heterodera glycines
aaaatggtgtaagtaaaaatcgtaattacgctcaaaaagcttctcaaccaattttagcgcttccaattccttctacaatcgcctttatacatcccattatgaacgctaaacttatcagagtgccgaaaatcgcatgtgatctaagcctagaaaaaaatggtgtaagtaaaaatcgtaattacgctcaaaaagctcctcaaacaattttagcgcttccaattccttctacaatcgcctttatacatcccattatgaacgctaaaattatcagagtgccgaaaatcgcatgtgatctaagcctagcaaaaaatggtttaagtaaaaatcgtaattacgctcaaaaagcttctcaaacaattttagcgcttccaattccttctacaatcgcctttatacatcccattatgaacgctaaaattatcagagtgccgaaaatcgc

SEQ ID NO: 68542 - DNA, 642 bp, Heterodera glycines
atgggcgaagcattgaaaaatagaattgaacaaattcccgaagaagaaaaaacaaaaggaaaaacaagaggcgaaatattaaaagaaaaaattggggctagtaaaccaatagaggaagaaattgtaggtgtcaaaacacgtggagaatcattaaaggatttaattgtttcaaaacaaattgaaacagtcttatttaaatatttgaaggagcggcggaaattttcaattgattttaatgaccaaagaattgactttattgagttgtcggctcaactcggctacattctcgggttcgaagacccgacaaaaattctgagtggagctatagcaaagtattattgtgacttaaagggtggtatagacagcctttgtgtgtacattaatggaatcactgagaatgtaatagtaggggaccaactcgcttcacttttgcgaattgttgtcgttgaaggaaaatttggagacgtgattgagagtaaaggaaattaacgagattgaaattgaaattaggactagggagggaaggcttattccattccaatggggtacaacattacttgtattagcatttaaaaaatctattgtattttagtatttaaatattcatttttacattatagtatatattaataattgaataaa

SEQ ID NO: 68543 - DNA, 377 bp, Heterodera glycines
atggaatatctgaacaaaacgaatgaaagactgaaggcgacgggtaaagaaaaaaatgaaaataaataaataaataaaaattaataaaaatgacaaaatattttagcatattattaccgccattcaaagactgctttggacgaagttcagaagagaatcgccgtaatggaagtcatcgtgggcctgctcatctttctgattttcacttcgccatttgcttattatttttcgttttagccatttaatttatcatttttatggcaatctccttaaatttgctaccttaacaaatcacttttcttttgtctctcttttttatgtaactcattcagctaaaaattgaaaaaaatgaaatagtctctccaagtgttttttaa

SEQ ID NO: 68544 - DNA, 748 bp, Heterodera glycines
aagagagaggtggtttctctacacataggccaaggtgcactaaatcaatttataattaattaaaaataactattaaaaagcgggcgttcaaattggcaatgcttgctgggagttgtactgtctcgagcacggcatcaactcagagggccgatttgtggacagtgaggagggtccggccgacaattcagtggacacattttttgccgagacgcgaattaagcataaaaataacgttttaatgtctttaattgtttcagataaatacgtgccgagggcgttgttcattgatttggagtcgacggtaattggtaagaagaataatttgggatcaaatcaattaagaattaattaggggaattattagacgaagtccggggaggtgcctacagacagttgttccatcccgagcaactgatcaccggcaaagaggacgcggccaacaactacgcccgaggccattacacggtcggaaaggagctgatcggagtgtgcatggacagaattcggagtagtgaagcgaagaagggaaagaacggcattccaaccatttaagaagtggcggagaactgttcaggccttcagggatttctcctgttccattcgtttggcggtggaacaggcaaaagaatggcacaaaacaatgccaaaggcaattattaccaattaggaagcggattctctgcgcttttggccgagtgtttgacggtggaatacgggaagaaggccaaatggaattttccattatccg

SEQ ID NO: 68545 - DNA, 1273 bp, Heterodera glycines
atgaagcaaagttaaaggggaggcgcgaacgccgtcccccgcactcaaaaatttagctgtgggcctatcccagttcgggaccgccctgcgggtcagccccgaccgaaagtgcaatggtggagcctcgccacaggagccctgccttggtgatcgcaggaactccccagccaggtaagtttaaagagcagcagcaagtccaaaggacaggccgtaaaagaggggaaggggagacggggtggaaagatggggagagatggatagaaaaagggatgaatgggtactctctcccaatgactactcgtctcttttcacaatgatacgtgtgctttttccttcccatgctcgtctgtcacttggataaaatattatgcactcttttgcacgctgtctttttcttttccttagaaagaacaacagcagcagttagagattatgatgcacaggatggcaaaaagagggaagagaccatgagagaaagaaagcaaagaaatgagagatgcaaaggaaactcatctcaattctgatcaatcattatcgggttaataaatacagctttgttgattcactgctttaaaaaacccacaaaaacccaaacaaaaattaaggaattaattaaggaccataccctaaggcaaataaaaatgcataaaagatttatattctacgaacaaaaaatggtttattcatatgaaaagcatttttttatttaaaaaatccaacaattaatttgtacccaaaaatttattcatttgtcgacatttcaaacaaatttcatataataaaatttagtgtggactggtaggatacggtttttgagcacattttttaaaaattagaggacaattagtgtatagtggtgccggcaggcaccgccccagaaattttggaaaattaaaaaaattatgacctggtttgatactgcattttacgaaaaatgattgatttacttgtaccaaatcaacaataaaaaaatagaaatctagtctctttctcattttgaactggggaatatattttaactatttttagcattgcttcacagcccgcggcaaaacttcaagcagtccaacaacaacaacacccgcctcaccagcaacggcattgcgacaacacaccgactacgccagcaacaagcgcaacaagttttatggcgatgtcatcggcaacacctggcacccgaaactgtagcaacggcacttcacaatgttcgatgagcatggcggggagcacagcagcagcaatgggggcaccagtgatgaccatcacttatcgg

SEQ ID NO: 68546 - DNA, 1149 bp, Heterodera glycines
atggctctctcaccgccaaatttgcctattgaactgctccgtcttctgctcctcctcctctttgtcttcacttcaactgtctgtggtaaaaataatttcgacggaaaattattgtggggcataagttagctgggaaattcttaaaaactgtcacattttggcattgttcggtcggtagccatgagtttcctctattaaacaaattttgaaataatttataatttaccaatgctaattgagaaaaataacaaaatttgcatgctcttcagcaagttttgtaaattttttttgcagaaaaacgatcaaattggctttttttgttgttaaccaaatccagcagtcttggtatcaatcgaaagcttaacatgtttagaagatatttctaagctattgcttcgcgattagacaattaccaaaaaagttataacatgaaattccaaaaaagtcgaaatttttgagtttttttcttaataacttttttagaagctaaaatttttgtttgttttttgtaaggctaatagagcttctgaagggctttcgaatgataccaagattgttagatttggtcaacaagaaaaaaagttataataaaaaaactgaggctggcgccaaaacgtcggcgccaaaacgacccagtaattttaggcacaaattttgtccccaaatgacctggacggacttgagcgatcaattgacgatttcaaagtgtttttggcagagcaggaccggatgagtgcctttctctcaaagaaacccaaggcccatcttctactcttccactttgtgccatttgcacgacaacatcaattcattggccttttggatgagcagggtgaaaaataaattgcttaattagcacaaacttttaatattttcaaggtgatgaagcgcttcattcggtgtggcgaagactcgaacaatggtggaaatgtatgcctgacgcggaacaaattttgcaacaattggagcaccatttcgtcaacaattggctgctggacaccggaaggattgacgaattgaagcgggtttgttttttcaaaaggtttcccttttctgaattctcatctttagaattatgaagaaaggaagggcgaggatgacacggatgaagaagcggcggaagaaattgattacgaatgccaaattgat

SEQ ID NO: 68547 - DNA, 485 bp, Heterodera glycines
tttcagttttttgttcaaagagcaccgctttgacgagccgttggacggcgcgcactttcaatggacagccatttacgacgacgacagcccattttttggccatgggtttggtgactgtgtatggtttaggtgttaggaccttgagaaggagaacatgttcaaatcggactacgtgcgaccagcgggaattaagcccaggggccgacccaaacaacaaatgccaaatttattgctgtaacaatgccaattctgtagtaacagtacaccaccgtctgctcgtacttttccgttttggggatctgctgatcggcgcccttattcggacaaattcatttttacggtggccatttttgtcggtaattaattaattaattaatcagtggtaattaactcattagccattcattattcattgctaattttaagcactcgttgccagttggcactgaatgattgacagaaaagaagcaattgttgtgatgata

SEQ ID NO: 68548 - DNA, 397 bp, Heterodera glycines
atgtgtgaaaacttcttcgacgcgtgcgcaccgcacgcgtgggcatgtctgacgcatgagcacatgcaatacgcgatgatgcgcggcgccgcgaggggggcagagaagcggcacggaggagatagcgtacaacgacagatggcagagcagcaccagcagcgagagagcggacaagagggagagtgcggcggcggcaaagaagcagagtgccgcgcgtttgcgctccaattggtgcacaaattggacgcattggcatacaaaacggcggaggggcagacaactgaagcggcagaatgtgacgaggacgcgtgcgacgccgcgggcgcggaagcgtcggtgacgcccgaacgcatgtgcgcgtggatgcaattcgcaagtgcctacagcgggctcaccg

SEQ ID NO: 68549 - DNA, 651 bp, Heterodera glycines
acacaagtgctttgcaaaggtcggcagaaaattggtcttgtttattttcttttgttgtcaaaaaaggctgatgctgaatgcttttctttttcgaaaatcgatccaaattcttgcgatgttttgccgtttcattgtgttgctttaaatcccagtattgcgaacatggaatctgtgaaaaatcgtcatgttgctgccgttgttattgcaagtcgtcgttgtctttacctgctgttcgcaaacttgacaaaaaattattttgccattgtcggtataaattgctccgccgccaatttttctgatccagtcacgaataaatgcagattttgattgaattttgggcattttagttagatatttcctttaaaagtatggattatttggtatatttgaagaaaattagtgaattttccttttgtaaattaaaaaaatcgcgaaataagggcgaaaataagggtgaaatgtcaaaataagggcaaaaacttattttaagggcgaacacccaaaataaggatttctaaggtcgaataagggcgttaaaacgcaaaatttttgaacaaaaaatgtgtttttcgtgcatttctcgtcgagttaaagccgcagaaaaaataaggaaaaacttaaaaatcccatccctagtaatgagtgctctta

SEQ ID NO: 68550 - DNA, 438 bp, Heterodera glycines
aaaatggtgtaagtaaaaatcgtaattacgctcaaaaagcttctcaaacaattttagcgcttccaattccttctacaatcgcctttatacatcccattatgagcgctaaaattatcagagtgccgaaaatcgcatgtgatctaagcctagaaaaaaatggtgtaagtaaaaatcgtaattacgctcaaaaagcttctcaaacaattttagcgcttccaattccttctacaatcgcctttatacatcccattatgagcgctaaaattatcagagtgccgaaaatcgcatgtgatctaagcctagaaaaaaatggtcaagtaaaaatcgtaattacgctcaaaaagcttctcaaacaattttaacgcttccaattccttctacaatcgcctttatacatcccattatgagcgctaaaattatcagagtgccgaaaatcgc

SEQ ID NO: 68551 - DNA, 548 bp, Heterodera glycines
atgactgaatacgttaattatgacgagatgcataaggcaatggaaaaatcatatggaaaattatgcgaacggaattacatcgatttctctgaattgccggtgagtttaaaaaaattaattaattgttccatcaaccttaattaatgttatatctagggttggtcacgaccggttattaaccggtacccccggttttcggttatgccggttttcgacccccagtttacggtttcggtttttggcgcaaaaaagccgggttttggttcgatgaaattattagaggtgcaccgtgacccacggtcacgattcacggtaccaattcacggttattccgtgaaaaatttacactggataaattgaaaatttacgaattacatattgttttcatagagaaatttggtcattttttgggcaaagttgctaagaaacagagcaaaattttcaataatttcccccggcggcgcctatcctatcggcaccgccggctccctcccctattcctgaaacttttttgaacaaagccaactacctatattggagaggaacaa

SEQ ID NO: 68552 - DNA, 785 bp, Heterodera glycines
ctgatcatctgctgcagatgagtgagtcatcgcccctttctccgccggcggaggcggcgcatccaatcgccccgggcacacttttccaaccgatttccgttgccggcggcaacaaccgcaactccaccgggtccacgaacagcagtcaagcaagttccggcttcgaaagtgccaaagtaggcccaatgaatgccaacgggcacacattgattgacgtccctcttccggattcagagttccagttcgcaccatttggcaacttcgaccagttccggcagttgttcatccggcatcggttcgtcgaccgctgcagctgtcctcccccattgttccgtctttccccccaacgcttcgcccgaagctcccgccagcgcttcctcccgcctctcttccgctggctcttcaactcattgtcgttcttccgcttacttttccatctccgatgggttggattcgtcaattggccctggcgggactttgacagtccaaaaaaggacaaaagaaaaatgcccccgagtaaatatcaccgaaatgatggccaagggcataccggtaatatccaaccgaaggctgttaaatttataatgggattaaaaaaggaggcagagatttatgctgagtggcttcaaaggctgtgcctttccgagtatttggccctgtttcttggccagggctatgatttgccgacattggcacggtcatcgccggaggatttgacaactttgggcattacgcggcccgaggaccggaaaaggcttttccaagacatccagacttggcgaaat

SEQ ID NO: 68553 - DNA, 610 bp, Heterodera glycines
atggcactatggctgagttgttgttgtgccatcatcacctttttcacaatggcaccgctgattttacaatggcaccattgcgaggcagcatatgatcaggaaatctttgacactatccaaatgatccacatctgccagtttattcatgaccacatagcagaggagggcgaagtcgaaaatattgccgtcattacatgcggcaaagaaattgaggtaatttgtgagttcccggctaattaattagtgtattaatatgttttttcgcaaatataataataataattaaaaaaggccaattcaattaataatttgattgacttaaataaaaagatagaaagttttgatttcgacattaaattacgaaaatttaaatgtttttctatttttttaagccaatggcgaaattattacgtaaccaaaccgaaaagtatttgatttaatgggttggcccaatttcatgctgctcagcaaaattggcaaaacaaaaaaaatctgtttttttttgtcttgatcgttttggtttttgatcagagccgagtttccttctcatgactcgagcccacgaaatgtttcgcgaatgtacattacaaaaatactaggcataaataaa

SEQ ID NO: 68554 - DNA, 728 bp, Heterodera glycines
atgtctggttcctattttgttttggccgaatttattttggccatcattttccactcggttgcaattgtgcaaatctttctgctccttcgctcaaatgtgcgcaagaatatttcgttattcttcatggcattgttgatcaattggttgtgtgccgcacttttgctgttaccatatgaaattcatgcaatcattatttggcacccaacggaaggtgatcactgatcagtgaaatatgtttaaattcaaagtctccaaaatcaaccattaaaatattaaaaggcaaaatgctaattaggcaataaaactacgcatttgcgtgcaattaggcaataaaactcctcaaattagggtgaaaatttttcatttttccgattcattatgaaatttaacaaaaatttgtttattgattgtgtttttttcatttccaattttaaaactgatcaatttttgtaactggaccgttttgtgcaaaaaatctttttcaggtgtgctttacgatggtgccacacttttcttcatagcgctttcggcacatttgctgctctcaaccatcccaatgtccgtgtttttcatgaccattgaccgaatttgtatcatatgctttgagcataattatggctctcagatcaagcgtgtgttaaaaaggtgcttccttagcgctttggctgttggcattctgttcaacttcatcggaatgctctcggcaatgccggtgccaaccaacacgg

SEQ ID NO: 68555 - DNA, 934 bp, Heterodera glycines
atgaatggggaggacgacggagcgagagacgcggagggatccgctgggatggtcgaaattgaacaccccgacgacgaaaaattgccaccactcgtcaaaattcaggtaaaatgacgcgcaaaaagcaaaggcaattaaaccatagaaaatcggaaataagaaaggatgtgatatccttataatttaggcccgaaaagtgaactgcaaaacatccgagggacaattgcatttggtggattggtatttgagtacgtttgttttaaaccaaatgaataattaattgttagttggcttttttgttttagtgcaacagagcaaacatttcaagcggatttgggaggagcacaaaagcaaaaagaaagggaccaatggccgttcccgcaaattcacttttcacatggaaaacattgacgcggagacatttcgacgtgttttggaatggcttgttgatcatgacggtgaggttattaaggattattaagttgtcaatggttgaccaatcggtactttttggggcaattgtgaagattattggtcccagaaaaaaaagaataaaaatttaaaaaaaaacaatttttaggggttatttgatgcgctgagcacgaatatcacatccatttcgaccaatttcgaaccaggacccgaatacgaacaaaaagtcgaaaattcaatttttcgatttcgcacttttattctaaaattgattaaaactagcagaaaataaatcacatgtaattttagcggcaaaaataagtcattttatgtagattcgaacatacataaagtaaaaatttaaattttcgactttgttcgaaatctggtccggggttcgaaatggataccttattcgtgatcagcgaccttgaaaacctcagggaagacttttatttagatgatttttaaaaaataatttatttttaagtaaaaaaataaa

SEQ ID NO: 68556 - DNA, 602 bp, Heterodera glycines
gcgcccactcggcccattgttgccccgcgggatttgcgtaatgacccgactaattaccaccaaatctttttaatgaattgatttcggatgtgcgcgggaggaggaacggtgtgtgagtgaacagaatggcatttccctttccacccaaatgttcccgacgcaccatgcaacaaaaagagtacaaaaactggcaaaacttaatgtaataaaattgcaaattaatattttagcgtttccacggcacaaaaatgccaacggaatgccccgacggcactttctgtggttcatcgacggacatttgctgtgcccactccctcccgacaaatgaaggcgaacaaacgacgaccttcggctgttgtccgttgagcaaagttcgacagacaaaaaacgaaaaaaaaagacaaatccatcaaacttagggaatttgctgcaaggaaagccaaaagtgttgtccgatgggttacaaatgttcagcggaagggtgtgaacgaatggaagtgagagaacgaattgtccgtttgtttttggacaaaaattgaaacgaaggaacggagagaatgcaaaaacagacacaaaaagacaattgattaagcagtcaaaaa

SEQ ID NO: 68557 - DNA, 256 bp, Heterodera glycines
gacggaagttcgaagtgtcctccccgtgcccacgtgttgtccgctcggcgacggattcggacgccgtcgaaaagacttttggcgactcgaaactaacgctcagcaaagcgtaagaagctcactcattggcatccttttttcatccgttttcgatatcctacggctgctgcccagctgaacgggccgtttgttgcgcggaccacgtccactgctgtccccacgggacgcaatgcaacgcgagggggggcgagtgcga

SEQ ID NO: 68558 - DNA, 671 bp, Heterodera glycines
ggattgagtgttttgttgaagcgagatgggggtgctgatgaggacgacgaagtcgtcaacactcagccacgtcctcccgcccctccccctccacctccaccaccacctcatcacccatctcaacaacaccaccgtcgccctcccagccttcccgatcagcaatcttcctcatctgacgatagtcatccgcctcgtcctcctcgtccaccacgtcctcagcgaacaaagaaaaaccatcaatcttctctgaaacatggtcgtttgaaccaatggcagcaaaggcgtcgtgacttacaacaacaacaaccggtagtacgtgatctcctcgctgaagcagcagctgctccgttacctgaaagtgacgatgaacaaatgctggaaggtgggtatctgctgccaacaccatcacaaaattatggagacataccagtattgcctgactatgcagatgaaattgaggaaatggacaccgcccaacaaagacttgcaagcagaagaaagttaaaagaggagcagagactagataaaaataaaaaatataaaatttactattcccctccaccatctcccacactaccacccgtgtacaaacgaccagatcatcctcctccacctcctccgcctcgttctatacccaaagttgaactgaaaagggatccacaaccaacaaa

SEQ ID NO: 68559 - DNA, 957 bp, Heterodera glycines
ctctgtgcctacccggtggagaagaacaccatccggccgcgtgacctcagaaggtttgttcatttctgtttaaatcccgctaaattctatgtaaatttggaatgtggaaaaaatgaggccgaaaaaaggctgtccgtcacacggacaggagaggggttgtcccggaagcaggacaaaatgccacaggcgaaacatcatagctgtaatagcctaatcgaaaaataattttcttttcgaatgagaagttttatttctaaaatgccgaatttccaaaaattttgaaaaaaatttttttacgatattgttatatctatttttggttaagggtgctcggcaactcactctgggaattaaaccacccagaggacgccttgtacgagtatgaaaaggctgatgagcagccaggggatgaagaggaagagggggaagaggcggaagaggaagaggcggaagaggatgatggcggcgcggcggagggaagtggggaaggagaagaagaaggggaagaggaggaagaagagccggaagaagagccggaaaatggccagagatttgattatgtttttaaaaaaaaaacattttgatttgtgtttcgttttttttgttggaaaaaaaatttgttgttgttgttaccacaatcggaattatatttggttttgtggttaatggaagaatttgcaagaaaaaagaagttaatctccccccgtccatcaaattccacatataaaatctgctcaaaatttgcttttgattaacccatttttagcgcgcgtttgggtgttgtaaatttcttatagcctcgctctataaaattgttttatttgcctaaccattttccacaatgcgcgcccgctgtcagtccgtccaccactcggccaacaactgctgctggtcatcacacgctcggacgccgcgttaactgtcggaaaaaatatttatgtaaatttaggaaataaa

SEQ ID NO: 68560 - DNA, 411 bp, Heterodera glycines
atgaaaattggtaagatccaaataccttaaaaaaagaaaataaaaaatccaaactttttaaaatataggaaaaaaagagaaattggtcattaaaatgcagcatttctgaaaacttagcacacaaaaattgatctttagctattttaggcacatttttttttaaaacaaattttaccctaatttgcagaaaatgataacgaaaaatgtcgtttttgtagatctgtttttgaaaattttaagaaagccaacccggaacgagaatggctctcgagcctgagatgataaaatgccgagaatttctcgactcaaaaaccgagaatctcacccatcatcatattaagctccccttcattttaaattataaatttattaaaatatttgaaaattctatcttcatgtaatctgattgga

SEQ ID NO: 68561 - DNA, 227 bp, Heterodera glycines
ttatcaaaaaaaggagatagccatttttctgggataacctataaaatataaaatccttctgtgaaataaaatggcgattgtgcacagccctccgtctcatacgcaagcgcttttgtgaggtataaaatttctcaaaaaaagagatagacatttttctgggatagagtataaatttaaaaattccctcaaaaataaaaggtctattgcgcaccgccctccctatcatg

SEQ ID NO: 68562 - DNA, 304 bp, Heterodera glycines; identical to SEQ ID NO: 51570

SEQ ID NO: 68563 - DNA, 209 bp, Heterodera glycines
  unsure (1)..(209): unsure at all n locations
aaaattccctcaaaaataaaaggtctattgcgcaccgccctccctatcatgctcgagagcatttgtatgtgtataaaatttatcaaaaaaagagatagccatttttctgggataacgtctaaatataaaaatcctctgtgaaataaaatggncgattgtgcacagccctccgtctcatactcaagcgcttttgtgaggtataaaatttc

SEQ ID NO: 68564 - DNA, 2517 bp, Heterodera glycines
atgggtctttgtaagtgcccaaaaaggaaggtcacgaatttgttttgcttcgaacatcgcgtaaatgtgtgcgaattttgtctgctttcgaatcacgaatcggtgctcttttttattctttcttttttgcttaatgctcttttagtgtgtcgttcaaacgtacctttcttggcttaccgacagtgattatgatgccaattgtttgctctgtttcggcatgtttttgttttttatttttttagctttgaatttcagaatcgcttagctccaaagagacattgaggttgaggtgtcttcatttattccactgggactgctttgattcgcgggctcgtcagttgccccaaacgacggctcccgccggtaaattttgctgtgaatggattgatttgactttatttaatcccctctttcaggttacaaatgtccgagttgtttggtttgtatcattttgtatcaattgcagtttgtacgaccataaaattaaataacattgtgcttcctaaagttatgaagagttaaaattgttattttattttatgatcagataactgtaatagagccccatttagacatttcatttaacttttttttctgtttcaggaatgcattttcccatccgaaaaccaatcgtcaccagttgttgacaaactcagggccaaacttcagacagtcaattggggtcgctttggtcttggccttcccagtgtttgtttgatataacatacctattttaattagttatttaacacttacattctaatagagtttaaatttaactgaaattcaaatattattttagtttttccttttgtttttagatccccgaaaatgagcaaaaagttttggctgccaaagtcattgaaatcgcttcgaattctaatcaccgaagcgatgaaaatgtcagcaatcgtcacattgaagctcacacacagtcgccaatgatcgccaattctattacttgccatgaagatccattcgaagcgaacactttcactggtaatcattttgccagaaatgaaaatgattttttatttttagcgaggtccaaatttcccacgaattcaaatggcaattcttcgaacagaatttttatcggtaatgaggacgactcaaaatatgcgaaggctgctgcggcagaaaaaaatattcggtcagtttttttaaattgaaaatccgcattaaaatagcgaatgtgcacgttgcacaaattgaatgcctaaatttgctcaattttcgttgtttttaacagtgttttctcttaggaatcgcttcgttcggcttccccgtcctctcaaacgtgtgttctttgccttactcgtcatcgctttcctttacttcttcctcggcttgtttctcaccggcaatgactcgtctcgtggtgctggcgatgatgaccctttgttcgacccccgcgccaatccgaacataaaagtggccaaagaacggtgataaaacatacgagacaataatttattaatgggacactttttggtgaatcgactgttcaatatttattatatatgaaaccaattatccttttgcttggacgtggggaacggatttgatccttttttaattgtgattttgccgtaatattttttgattagaaataaagagattgtgagtagattttatcatgaataaaatcaattaaaattaaataaatacaaatttttacaacaatattttatcactgtaaattcactgctctgaacccggacttaaacccaaatagaagaccaatggttaaagccggatctgggattcgtaattataccaaatggagaccccaaaaatagcccatttaattttacatttttttagacataaaacccttttttctatgtccgcccctctctctgtctttctctttgtcccgccaccgtcgcgcaccaccgcgtggccatcacttggaatgattgtccgatttcattttcaatttgctctccgtccaatgccacaaatcctcccatttccggcgctggttgaattcgacacgctttcacaggcattacctttagggtgggttatttataagtaaaaactaagatgagagaacctcaaaggccgggtcttccaaatgagcagaggaatttatactaaaattgacataaaaacaataataaattttgaaaaaataccttaacaaaattcgggccatgtgtgctcgggaacggagattcttccaacgaacaaacgaaaggtaaagcaccgcttcttgaggtcgggcggagggaacaaagggaatgtcggagcccaaatgagagagggcggagaggaggacgaagcagaactcgcctggagggaggcaattagcaatcagagcagaagctacccaagacgaagaattaccgtcaattgtgagccaatgggacggaattggctcgttcagaggcggcatctgccaattaattggactattcgtccgttctgtttatctatgccatgtaatagtggttaatagtggcacacctgctcctcctcctcctcccctccggcatcttccttcccctc

SEQ ID NO: 68565 - DNA, 872 bp, Heterodera glycines
atgacatttataaccagacaaacggaggaaccgatgagaacagcaaagggagaaaagggacaatggcacggtcaacagaagccgagacgaactttcgacacagaagcgagacgcactctcgacacagaggcgagacgcactctcgacacagaagcgagacgaactttcgacacagaagcgagacgcactctcgacacagaggcgagacgcactctcgacacagaagcgagacgcactctcgacacagaagcgagacgcactctcgacacagaagcgagacgcactctcgacacagaggcgagacgcactctcgacacggccatgcaaattattgctgccattagcaaaagtctgcccccaactccacctgagtctgctcgcaaaatacggcacccaacacaaagtccactaaaggggcatttccaagtcggtcattcgacgaccattccgaaaccatttcgactcgcttccaggtgaagtgttgaaaatgcataaaatggcattttgaattaataaaaaggtcaccggtgccatgccgattcgctaaaaggcatttggaggcgatgttggaggagcggaggcgaaaggaggaggcggagaggaggagggaaccgttccgagcaaagccagtcccccaaagcacttatcgagcggattcggacattcgcatcggacagctgaaaaggaagcgcactctttcactgccggacaaagcgaagcagcaaaatgtgccaatgcgaggccaatcggtgccactttcgacgtacatccgaccgaacagcgcaatggaagagacgcggaagttgcggagacagcggagggcagtggaagaactggcgaaggccacagggccgagaggaatggaagtataa

SEQ ID NO: 68566 - DNA, 631 bp, Heterodera glycines
atgtgtggaaaagcggtggaagttggacgagagaatcgggcggactatgcgctggtggcaaagtgcgtaatctttataaataattgctgatgggggttaaggcgggtaataattgcctttctggccccataaaaaggccgattttgagtagttagttttttttagggcgctgatcacaaatctgacaaccatttaaaagcttaggaatttgcctgtgtgttaaagcctttgttatttttcgcttttaagggcttacgctcgaatggcaaacagttacaaaatgaaggacgaccccaagaaggcactgcacttctacgaaaaggcattgtcggaacatcgcgacccggacattgtgaagaagcacaaggaattagcgaaggaagtcaaagagatggagcagaaggcatacattgacccggaattgtcggataaagaaaagaacttgggcaaccaattgttcaagaaaggcaagcaatgggagaagggacgaaaacattgggaaggaaaccaatccgaaattgggaatggcaaatcaatggacaatttggcgttgtgtctttaccatttcatcccttttaaatttttgaggcgattaccccggggctatgagacattacaacgaggcgattaa

SEQ ID NO: 68567 - DNA, 67 bp, Heterodera glycines
ccgggactcaaatgtcccgctcaggccaaaaaatttttctatttccgggaaaaaatcgaaatttttc

SEQ ID NO: 68568 - DNA, 317 bp, Heterodera glycines
atgcattttaatttcaatcatcagaaactgctcaaatttgatgtccgtccgcattgggccaagtattatctgatgaaaccttgccaatttctgcccaattatcctcgccttgaggaatttaggtaaaaaataaaataatgcatgctaattacttttatatataaatgttaaaattgtaataattgttaattagccactgtgcataagaaaattatttgcagacaattggcagaagcaatggacccagcgcataagtttcgaaacaaattcataaaagaaaatgtttttaatgagatataagaaatggaaatgtacca

SEQ ID NO: 68569 - DNA, 768 bp, Heterodera glycines
atgcttccaataaaattttgctttttcaaattatttctttattggcaatttacgctgattctgagccagcaaatttcgtccaaaaaagaatgccgagaatttgaacagaatttattggtattgtttggaggaaataaagcattttctggtgccattgaatttgaaccccttgaaaaatggaccaaagaatgtttcgctgattggttttgtgaaaaaatcaaaacaaaatttgaaaaaagtgctcaaattaatggcgaaattgaggaaaaaatgtcaaaaatgcaagccaaattttgtgaagaaaatgaaaaaggaaaaagcattgaaaaagcgatgaaaagcgttgaaaaagaaacggaagaaataatccaaaatatgaaaatcgaccaaaaaatgcaagaaaaaatgcgaaaaattatggaagatggcataaataaaaatgcattaatcggagagaaattgaaaaaaataatggaccatttcaaaattcaatcattttcggatttgataaatggtaaaagcattagttttggatttattaaccttcaaattcaggggtatttcaaattttgttcggtgaaacggaaaaaatcaaacgcagtcattgataaagcacaaaaggtacagaatttgtgggttttgtgattgattcttgaacagaaatcacaaatcaccttttatttcggggtttttgtgcctaatgtgcctatttcgccatttttggcccttttttcaggattttcagaaaaatccttaaacaaaaatgca

SEQ ID NO: 68570 - DNA, 263 bp, Heterodera glycines
atgaaagtaagaaaatgaaaattttctttttttaaacatattttcagggaagggggaagcgtagggaacgaactgctccaccaattacccaaactctgtttgtcataatcgttctgagtcgatccacaaaaaaaactcagtgattgataaaataattaaatttaattatataaatcgatgtcaatgaatttaattatacgattaaaatttaaacataaattaaaaaagaaaatataaatttcaccatttaaaatgcttccgaa

SEQ ID NO: 68571 - DNA, 750 bp, Heterodera glycines
ataatgttcgtgctgcattggtccacttcgttggtcacatttttcgtgttcattgtgctcttcgtgttcatcaagcacaacaaatcgcacatcaattggggcacgtccaccgaggcaaaccgttaccggcgcgcactgaactcgttgctgaaaatttcgcgcacggaggaccatgtgaaaaactacaggccccagttgttggtgctgagcgggaacccggtggcccgtcaggtgattagcatttcgaaggacagacagaccaactgctgattttcaaggacaagggcggggagggggatgttcaggaaattaaggaaaatgatatacggacaatttgtgcaaaatattgggtccccccaaataatgaaaatgtaacaattattagggggtataattaagagaataataaattagtcgcaaattattaattggaccaattcagaaagcttaattattagtatgggaataaattgcccggtgggtgggactcaaatataaggaaggcctcaaaagaatggttgttacagggagtgtgcgactccctcaaaaaaatttcggaaatcggaattccggcggctaaaatttcgtccatcgtatatcggaattccgagcccaaaattcggaaattggcaatcggaaatccgcaccctacacatccctgctgtcttaattgttttttcaaaattcacctcaggcacttgtcgactttgcctactgtatctcaaacggtagaagcttgcttctgtgtgg

SEQ ID NO: 68572 - DNA, 1569 bp, Heterodera glycines
gggatgggatgttcagatatggcattctgacaattgctgcactttgtcttacgtcaatttcgtccaatatgatcgcatttaatttcacccaaattgtgatgagaaggaccaattgggagaacgcgtcctttcccaagaattcgtccattttgctgaaggaaagtgacgtgcatttgaaggtaattagtggttggagtgatcaaacggggaaacaaactgatcaaaaaaattgaaaaatgaacacaaaagactgatcagccttgaaagtggaaaagattgatcagtaaaacatgagaaatcgtatgaaaaatgagactgatcagagccaatgatcggtcagtgccaaaaaaggaaaaaatgccacctctttctgatatgatatcccaaatttgccatcggtctgatcaacctccactctgttgtcaggaggacgtgctgcccgggctcgtgctgaacagcagccacgtggtgcctccgacggtgccctattcgtcgcgggaaaagtcggcgctgctttacgctgtcggcgcggccagcatcgtcagcacttttccgttcagtgccctgtacacgcgcttcggcgctcgtttcgtgttcttcggcgccggcgtcgccagtgccgtggccaccgcacttttgccgttggctgccgcccgcggcatgaccgcctttctcctcgtccgcttcgtccaagtcacctccccccataacccactttttactcccatttctttttcttgccttagggatttgcttacggcgcaaatttcgcggccattggtttcatttgccatcggtgggccaatctccgccagcacggactgtttctgtataaatgaaacagcaaattcactctttgctgccccttttcagctcttgtatgaccagttttacgcctctttcccaaactctcacaaataccgtggccggatttgtacgtttttgcttttccgtgcgatatctctttatctttcaattgctttcggtctcagctcagctcttccccgtcctttggttggccttcggtttattttggccatgcgatggtcgcccctttcctttttggcctttggctttttctctacacggactttcccgaaacacacaaatgcgtcggacggagggaaaaagcggccatttcggaaggaaaaagttcggccgaaagagcaatcagcggaaaagtgccgtactggtgagaaattaaactattttttggcatttatttctaatgcccgtcccatggcaaactacaatattttaatgtgctaattccttagacctcgcttttggccaagaaaagtgccaataacagagcaatatttgaaaaatcagcaaaattattaatgaaaatggctcacattttccaaaatagtggctgctcattgtcagtctcgccttttcctcctctttcctctcagtgccattctccaaaacaaagttgtgctcgtcgtttggctcaattcctttgctgatatcgtcactattgtgttcatgaccacttatatgcccatttacgtgtccaaagtcctcccgtacggcgtccgcgagacgggcatttggagtgcgctg

SEQ ID NO: 68573 - DNA, 782 bp, Heterodera glycines
atggggggaggtgacttggacgaagcggacgaggagaaaggcggtcatgccgcgggcggcagccaacggcaaaagtgcggtggccacggcactggcgacgccggcgccgaagaacacgaaacgagcgccgaagcgcgtgtacagggcactgaacggaaaagtgctgacgatgctggccgcgccgacagcgtaaagcagcgccgacttttcccgcgacgaatagggcaccgtcggaggcaccacgtggctgctgttcagcacgagcccgggcagcacgtcctcctgacaacagagtggaggttgatcagaccgatggcaaatttgggatatcatatcagaaagaggtggcattttttccttttttggcactgaccgatcattggctctgatcagtctcatttttcatacgatttctcatgttttactgatcaatcttttccactttcaaggctgatcagtcttttgtgttcatttttcaatttttttgatcagtttgtttccccgtttgatcactccaaccactaattaccttcaaatgcacgtcactttccttcagcaaaatggacgaattcttgggaaaggacgcgttctcccaattggtccttctcatcacaatttgggtgaaattaaatgcgatcatattggacgaaattgacgtaagacaaagtgcagcaattgtcagaatgccatatctgaacatcccatcccggcaacagcacactctagtcgaactttcgttgtcattttcagctttttcccgccttcttccgccaattgagtga

SEQ ID NO: 68574 - DNA, 558 bp, Heterodera glycines
atgcattttgcacagattgagaagtttggcaatgtgatgctcgtgcagggcgatgacccggcctattttctggccgcccattcctgcgacattgtgttcgtcgaccgcgaaatgccttaccgaaccgcccatttgcttttccgccggggcagtcccttcacggcacttttcaacaaagtgattttgggaagtgtttgaagggtaacattggcaaaaaacaaacgcactctctttggaggtaatcgaaagtgaaaaagtggccattcggcgctcttacgaccgttaccgaatgctgcgcgagatgatccggaatcaggaatgtgaagagaagatggcgaagagtcatctctacaagcccttgggtcggtggtgcccttttcactctttagagccgaaaaaaacaaattttaagggtttgtgccgatgttcggactgttggcaatgtgtggcattagcagtggcaccgctctgctgattttcgccatcgaatgcgcaattggcagcagaaaaagcaaagaaatttcagatgaaattgaagaggagaggttcagaaaatga

SEQ ID NO: 68575 - DNA, 621 bp, Heterodera glycines
atggcacggcgttctcggcgccattgccaacggtaagcctttcactctgggcaattggcattggtcacattttcgggtgaaggcactgtggacacgggctgcctgttttatcagaagtcgccgccgcggatggccgactttgattattctctgccaatttattcggtgcgtttcgacttggaaataatttcataatctcgccataaattccgatttcaatttcccctaatttgtcagactctttcccgaattgccatccgtgaccacaacagttttccgttggctgaaatttggcgtctgttccatccgttctccgtcgacacgtggttagccatcgtcttgttcattgccctgcacagttttgtcttcatggtcatcgaaaaaatcgaatttttggtcaaccgccgcactgtcgcacaaatgccaatatttcacaatgttattaattagtgtcttttaattaattaaaataataattaattaatagcgttctatgtaattaagaaattaaatatcagtcaatttgtaatgaatgttaatttatttattcaaagatcctttggcgccttcttcgccttcaattgctgcagccaaaatcggtccgtttggccaccgtttcgg

SEQ ID NO: 68576 - DNA, 538 bp, Heterodera glycines
atgccaacgcttctgacaaagttgtgcgcattaattttgatttgtcaaattacacttttggcttcaacaaatccattggaagaagcgcctcaaaaaagtttggccaaaaagcgtcttaaaatcctcgtctattcgcccacaattggatggagtcacatgcaatttatgggctcaattgcggacactttggtcggggcaggccacgacttggtaaatcaaatgattaatcaaaagttgatgaactataaaatttggggaagtgagaaaatttttgatttaagaaaaaagataaaaattttttacgaaattattttgaaaaaaaatcttagttgctcaatttatttgcaagccattgatagcgcatttagttgacaatttggggaaaaaacgtaaataatgcttttttatgccggaaattaaatattcaaaaatttcaacatatatgaacaatttttccacaaaatttcaaaaaaatttagcacatttttcgcgtttcaatgaacaaaagggccgaggcattgcccaaggaagtgtttaa

SEQ ID NO: 68577 - DNA, 602 bp, Heterodera glycines
atgaatgttgaaagaataaaaatgaattcaaataaagtgatttcttcatatcgataagataaaatagaaaaaaaagtagaacaacggaattaataaaatgaaattaatttattttaaaattttcattaatgaaataaacaaatgctgaaaaatgaataaacgacgaagtgttttcaatttagtattatcagtctcaaaagtaagttatagtttcagattttttttaataggaattcaaactacagaacacaaacatgtgattaattgtttgaaaatttcgggaaggaatgcatgtgactttgttttggatttgataatcctctttttctgatttatattattttattttaattattttttaatttttactgatataatattttaaaaatttattattaatatatttttaactttttgttgacttcacacgattacgataaatgccgaaagccgatcgttagggggtgtaaaaaattatcggtctcgaatctcggcgagtctcgaagaccgagacccgaaaaaagcccgagacttttctcgagacggagacactcgagcaccaaactgaaaaggattcggcggatgggcaacacgacagaaaa

SEQ ID NO: 68578 - DNA, 926 bp, Heterodera glycines
attttattcatctccctttttgatagaaaaagcatcagagtgcctaaactaacatgtaaataaaatttggtgcgtttcagaaccctttctgaaaaaaatatttatgaaacaaaaaaatcgattttttcaagtgtccatttggggtactcgaacatttatggggagcaaaaatccaacgcagaattaaagtacaggctatagggaagctactcccgaaggattcggtctccccataaatctgggcgcatcggttcggggggactgccccgaaaacaaaaaaatcgattttttcaagtgtccgtttggggtactcaaacatttatggggagcaaaaatccaacgcagaattaaagtacagactatagggaagctattcccgaaggattcggtctccccataaatctgggcgcatcggttcggggggactgccccgaaaacaaaaaaatcgattttttcaagtgtccgtttggggtactcaaacatttatggggagcaaaaatccaacgcagaattaaagtacagactatagggaagctattcccgaaggattcggtctccccataaatctgggcgcatcggttcagggggactgccccgaaaacccaaaaaaaaattttttggataaaaattatttaaatgaactgactagataatatttaaaataggttatttctcttcctttcagtatccctgcaaagtttggtgcgcttctgatcagtttctgaaaaaaaagttaagcctaaactttttggcctgtttaaaaaggaattaaaaatttttaaaaattttattcatctccctttttgatagaaaaagcatcagagtgcctaaactaacatgtaaataaaatttggtgcgtttcagaaccctttctgaaaaaatatttaagaattaattttgcaaaaaataaataaaaacgaaagact

SEQ ID NO: 68579 - DNA, 456 bp, Heterodera glycines
atgcgattgttctttattttaacaggtcattatcattatcggattattattattttttttcatttaattaattttaatttattactttattaataattaacttttagcactgaatatcgccgcgtgttcaaaaaagaatttcgcattttattcaatcgtttttgcaacacaaatggtcatttttaataaataaaattttataaaaatattaatctatttgtatttaacttttggaaaataaaacagtttttaaatatttttaaacaaattttaaattaaaaattttttagctgtccaaactattgacacaatccaagtgcgaagtgccaacacaaacaacaacatgaacaacatccgatcaagccaacagatgaatgtgcattcgatcaatttgaatcgctattgaaatggacttatatatttttttattttcttttatcgttttttttttaaaaa

SEQ ID NO: 68580 - DNA, 717 bp, Heterodera glycines
tcccgaaggattcggtctccccataaatctgggcgcatcggttcggggggcctaccccgaaaacaaaaaaatcgattttttcaagtgtccgtttggggtactcaaccaattatggggagcaaaaatccaacgcagaattaaagtacaggctatagggaagctattcccgaaggattcggtctccccataaatctgggcgcatcggttcggggggactgccccgaaaacaaaaataaatcgattttttcaagtgtcaggttggggtactcaaacaattatggggagcaacctctaacgcagaattaaagtacaggctatagtgaagctattccgtaaggattcggtctccccataaatctgggcgcatcggttcagggggactgccccgaaaacccaaaaaaaaattttttggataaaaattatttaaatgaactgactagataatatttaaaataggttatttctcttcctttcagtatccctgcaaagtttggtgcgcttctgatcagtttctgaaaaaaaagttaagcctaaactttttggcctgtttaaaaaggaattaaaaatttttaaaaattttattcatctccctttttgatagaaaaagcatcagagtgcctaaactaacatgtaaataaaatttggtgcgtttcagaaccctttctgaaaaaatatttaagaattaattttgcaaaaaataaataaaaacgaaagact

SEQ ID NO: 68581 - DNA, 228 bp, Heterodera glycines; identical to SEQ ID NO: 65316

SEQ ID NO: 68582 - DNA, 486 bp, Heterodera glycines
atggccgaccggaggacaattgagcgcttcttacgtccgccaccgccgccgcaaccgcagcagcaacagcctaaaacttttttggttaaaacattaaaaacagtcctgaaaattcgggaaaaattaggaaaaaatttccaaaacatcgattgcctggaccttggcaatttgatcagcagtggtgggttacaacattggcacggcccgacacaggtacagccacaacagcaaggcttactgtaataatttaaaaatataaaaaaatttcagagaatttaaaaaatttcctcttaccaacagcagcaacaactggcatcagcaaaatgttggttctggtcaatgtttgcaaacagaatgaccaacagaaatgggaatgtgaagagcaattgcattttattttttaaattttgttttttaaattttctaaatttaaaattatttaaaatatatttttatttattattatttttgagggggggggggtaa

SEQ ID NO: 68583 - DNA, 142 bp, Heterodera glycines
cgcgaagcgcccgtctgaggtctcgaagctgccttaatagcccaacaaatttagaaacgggcgcgaagcgcccgtataagcccaacaaaatttaaaaaacgggcgcgaagcgcccgttcgaggccgcgaagcggcctaaaag

SEQ ID NO: 68584 - DNA, 1446 bp, Heterodera glycines
atgtgttagggccaaaccaaatttaaaaatgggagaatgaaaaacagagtgagtagaaatctgtaacttagaaacaaatttattttcattcatgtattcgtttttttctcaaggttgccaatttcctggagaccttagcctcacagtttagttttcgtttttccaaacaccaatgaggctaactaaattttcaaaataattattggagaaaatcctcaaaaatgatcctattttgttcgaaatcgtttgattacaaactctattaaaaatgattttttaatttaattttaattttttttaaaggcattcctccgatcatttatttggcactgaacaagacggtccgtcgtgatgtgtacatcatgatgatgaagccgttgtccaagctgttctactgctgtatcaaagcaccagctgatccgagcaccacccgtctgttcaatacggtcacagtccgtcgaatggcggctggcggcaaagtggtgccagcctcgtccaatgtgcacacagcgaaaatttcaaattcgaatatgaaatattagttttttttttttggcattgtgttagtggcataattcaaaaaaaatgcgagttaaaatctaagtgtgttgattttccaggattgtggtcattttaagttttgacattactgaagaacccaaaaagtgccgatttttatttaatgtattttttgagtcaaaatttttgggcttaaaaaattgccacatttatccttttactaattacgccgctggattagcaacttttcactaatgattttaatgattattcaccgttaattggatccaaaaaatctaacccaaccgtgcccaatgtgcacacagcgaaaatttcaaattccaatatgaaatattagattttgagtttggccattgctgaaaaccccccccaaaaagtgctgttttttaagattgtgccattttttttagtgttggactaatattttaaagtatccttttcagcaaatctcattaaaaattacaaaaaaaatttcgacagcgcccgtctgcactgccgaatcccaaaaactcctcgaattgttttcaaattttgcaggaaaaaactttataattaaaaaaaaaaattaaatttgagagccagttaaagttgaattaatttaaacagttttatgcctttaaaaattcgaaatttcaaaaatcaaaaaaatggaatgcactttttgggtcaaaatttttggttttaaaaaaatttaccaaactcacccatttactaattacgtccctggattagcaacttttcactaatgatttttcatgttcattctccgttaattgatcccaaaaatcttacaatgttgttaatgagaatatgtttgaattttatgtataattgcttcgtcagcacatatccagtcaatccctgtttttatcttaaaaaaggtgtgcatatttaatatttgcttaa

SEQ ID NO: 68585 - DNA, 934 bp, Heterodera glycines
atgcatgattcaactattgaaaatcttcacaggacaaataatgcaattgagggatggcatttggcttttaggcaacgctttgctggattgcatccaccattctctaagtattgcagcactaaacttcgaaagaagttaatttatttagatttatcagagcactaaaagtggaggaggaattccaacagaatcgcattcgaccttatgagttggaccccacaagggggttgagcgagaaaaggaagaaaaaatatgaggaaaatgaccgtgctatcaaagaattaattttgcgatacgacaatgatgatgaacgcgacaatgagactttgcttcgtcatttaaatgcattacagtatcgcctcgcagagtggtttcatgaatggggtgaaatgtaaaaaaatgacgctcgttgggccttgagcaagccattggaaataaaaaatttatttttgtgtattaattgatgtattgaaaaagttaaatattatgatgaagagaataaaatatcttattcttaaattgataaaatctaatagtaatatttattcaaaattacataaaataaatttaaatgaaatgtagggcaaagccgcaaatgtcgggccgcaaatgtccgattttagcttgggccgcaaaattcagcaaaaaattgggccgcaaatgtccgaaaatggcccttaagaaatgggccgcaaatgtccgagccgcaaatgtccgggccgcaaatgtcgggccgcaaatgtccgatttggctggggccgcaaatgtccgagccgcaaatgtccgggccgcaaatgtccgggacgcaaaagtggggtaacccccaaaaaatctcgttttgaaaaaagttagttagactcattggccttcgaaaaaactaaaaccgcgaggctaaggtctctagtaaattggtaactcttggaaaaaaaataaa

SEQ ID NO: 68586 - DNA, 198 bp, Heterodera glycines
atgagaaaaaagtggaacagcacgttcaccatcaacctctcggaaaagataggtactgtaaaaaacataacccgtaagttcaaatattttttagaaatcggcggaaatataactttatttttagtttttatttttagttcagtgtttgaaattaaaatttatggcccagatttgctccagacttttgaaagtaggtga

SEQ ID NO: 68587 - DNA, 422 bp, Heterodera glycines
  unsure (1)..(422): unsure at all n locations
atgtcttccgttgggccattcgtaacatttgcncaattccattcgtcgcttntcgttcttcttccgactccaaaacggtgcctttccaatattcccatgcaaatggtccattgtttcgacgatcgtttcgatgtcgccattcattggctcatcaaaaagccatcggtcaaacgccgtcaaaacatttttaatgcgaaaagaatgcgacggattcttcaaatcagagatttttagaatatttattaaatggaacttaagaaaattaactcacaatttgcaacggaatttccttttccgttttatccgttaatttttcgccctttggacttagacaagaaaaaaggcgaaagtgagcaatgaaagctatcagaattggcaaaaaagaaagaatcattttcgaaagagaaaacatttagaaaata

SEQ ID NO: 68588 - DNA, 339 bp, Heterodera glycines
atgccggaccggaccggactggtattttcaaaaatgaccggattcgggatccggtctctcataatccggtcaatccggtaatccggtcaatccagattttcaaattgccggatccggaaccgaattccggattggtaaaaatttatatttcacatgttaatttgggaaaaaacccttaaaatttcatctattatatgtagaaatttggtgcaccagaaaatgtcgtcatagaaaagacaatgcgccgaaaaaaatatataaaatttcaatttttcaaaaaaaatttaaaaaatttattttaaagttttttatttttgaaaacctatgtttaatgaaaaa

SEQ ID NO: 68589 - DNA, 411 bp, Heterodera glycines
atgaaaaagcaaacactgctgatgcgcaaccaaattgagcaagtttatgcggagagggacatcctcactttcacggacaatgtgagttgacaaagccatgggacggaaaaatgttactgtttcagcctttcgtggtgtgtttttacggttccttcgagaccaagcagcacctttgcatgctcatggaatacgttgagggcggtgactgcgcttcattgttaaaagtccctaaaatttgttttcaattgtaccaattcatttcagtccgccggaactttgcccatcgaattggcccgcctttatgtggcggaaacggtgttggccatcgaatatttgcactcgtgtggcattgtgcacagggatttaaagccggacaatttgctaatcacttccatgggacacataaactga

SEQ ID NO: 68590 - DNA, 318 bp, Heterodera glycines
taattaaatccattccttcgggggaccgtgccgggtgccgcggggtaagcagtgctggttcgtttcatcacggcaccgaaccttttggctagtcagcaatcgttgcttaacttgccagatcggacgggtgcgcatgattccactgttccaagcaccccaccaaaagcaaaacgatataaccaaaatataaggaaaaattttttaaaaaattttttctccatcttcctttttgataagagagcatcagagtgctaaaattaagttgtaaataatgcgggggtgagctttagagcactttctgaaaaaaatatttagaaa

SEQ ID NO: 68591 - DNA, 470 bp, Heterodera glycines
atgagaaggataatttcttggtcaagtttcaaatgcgaattccgtcgccaaaaagtgacgggtaatgttggaatttggtccgagtaggggtcgttttggtactaaaatgtagtgacattaaatttacattttaaatcgaaattagctggtttacttgaacattaatatatgcaatttaaaaaataagtgaaaatagtttattggattcgggatttcagaaaaaaaaataaatttattgatcaaaatgctataataaaaataatcaaattaaattctaaatacagcaaaatatttgcctaatcattttaaaaatttattttaattttcgaaaaaaaaacttaaataaaaaattatatttaaaaaataataatagaaaattttttttcgtattaattgaatttttatttttaggtaaatcaatcgcgacgtatgatttcgaggaagcggaggcggaatcttatctttgttaa

SEQ ID NO: 68592 - DNA, 3038 bp, Heterodera glycines
atgacaaatcgactcttcgctcatttctcggagcccctactttactacagtcggttcatcaaaaagatgcgcgaacttagggcgccattggaccaactttttgggaaagacgaactttggaattggggtgaagaccagcagaaagcttttgaaaaagcaaaagagatcatgttgtctgatctgcttttacccacttcgacccctcgcttccaataatcgtcgcagctgatgcttcaaaagatggaattggagcgaccataagtcacattttcccagacaaaacggagaaggtcattgagcacgcgtcaagtgttctttcagaagcacagcggaactacagccaagtcgaaaaagaagctttggctcttattttcgccgtccaaaaatttcacagaatgatttttggaagaaaattcacacttctgaccgaccataaaccgctgatttccatatttgggtccaagaaaggaatcccaatttatgccgccagtcgactccaaagatgggcacttattttgtcaaattacgaatttgacattcgctacatcaataccactgcgtttggtcaagtcgacatgctttcacggcttatcgcgaattatccgcgacccgaagaagatattttgattgcaaaaatttgcaccgaaactgaatgtttcatcggcacaattttgcagtcacgaattgatcaacttcccgtcactgcaaccgaaatagcagaaatgactcaaaaagatgaaattctacaaaaagtggcaaaattctccaaggaaggatggtcacaaaagtgtaatgaccccgacctcgcaccattctttccaaaacggaacgaaattttgcaaatcgagaattgtctgctttatcaaaaccgagtcatcattccaacagtgttacgagacagaacgttgaaagcgcttcacatggcacacccaggaatagtgcgcatgaaagctctcgcacgccaacacgtatactggcctggaatggactcagctatcgagaaattggtaaaaagctgcgaagaatgccaaatcgcccagaaagcagcaccaaaaacattgctttctccttggaatgccaccaaacggccattccaacgtgtgcacattgattttgccggcccatgccaagatggccatgtttatctacttttactggattctttttcaaaatggcccgaagtttatcagatgaatacaatgacatcaaaagcaacgatcagtgttctccgattaatcatccatcgacttggcatcccagaagaaattgtctcggacaatggacgacaatttcgttcgtcagagttttccgaattttgtaaagaatttgggattcgacatacgttcacaccgccatttcatccacagtcaaatggccaagtcgaacgctttgtcgacacctttaaaagggcaatgcagaagtgttcgaaaaaggacaaaaattgggctgagaaaatgctcctgtcctatagaacaacaccgaattctgcaattaatggacattcaccggaccaattattctttggtagaaaactccgcactcaattgtctcttacacatccgacaggaaaagtcaatgagacaattgacaagaccattttccatcaaaaacaggaaaaataccgcacaaaaatggcacaaaatttcaatgaaaagcatggagttaagtcaaatgagtttcttccgactgacccagtgcttgttttgaattaccaacatggtaagtcacattggctccaaggcacgatcatcgaacgcctaaacaattcgccgacttatcgcgtaaatgtgccaagactcggacgaaacattcatcgacatgccaaccaaatgcgccgtcgatatgtcttcgaagaaagtttaggatttgttggtcccgcccaggtggcaaatgacccaaatcatcattcaccggcacatcaaaaccatccaacaccggcacgccaaaacacgacaccgaaatgccaaaagcggaagcagcccgacgaaatccacccaactactgccaattcaccaccaatggcattgagacgctctagtcgcaacaccaaaccgccgatccgcttctcgccaggctgacgccgttcaagaattgaggagggagatgttggatagtgaataatttgaatttatggcgatctgacttattgactttatttgttatttctatgtccatccgccccctccctcgtccataaaagtggacacctcctcccactttttgttctttcctttcatcattcatttatattttatttcccaatttgccctccgaccgaatcaataaaattatttatttatttctttttctttgtgtgttctaagtggaagaacacaacagtcctcaatcattctcagccggcctgcttagtcctcgtaattattaaattagaattttaattaataaaaacaattatttataaaaatgaaaacaaatatgtatcataaaatcaagaaatgcaacccaaaaagatactagaaatttcaattttaataaaatattcaaaaataaataaatgtccaaaattaattatttttattcttgaattttttattttttagcccgcttaattttaattagtcatattaccaaaaatatttgagcattctaagggggcttaaatccaggcccatgaataaattgagtaaaaaaaatataataaaaaatacaagtttatcaaatctaataaaacttaaacttaaaattaaaaaataaatgaaattgttcagtttatttttaataaagcaattggttcgccaagctacttttcggacgaatcatactcatttatggtgttatcacctgaggtttattcaccaaatgttgcatcaaaattatcaaacagtatttttgtgagtttctctatttgaaatattttatttaataaattatttatttataatgataaatttcagttaattttatttttggaaagagaggcatatttaatttaattaatgacgacaaccaaattttcaaggaagtaaatgtttgggttctaagaataattttttcttagaattttttgttacatttaa

SEQ ID NO: 68593 - DNA, 280 bp, Heterodera glycines
atggatgaaattgctagactaatcaaaggaaatgtttcaagggtaaggaaattgattttgttgaaaaaatgaaataaattattttttagattaataaatttgtaaaatgtgaaaatatttttttgaattatacttgaaaatttataaattaagaaattgaaaaatgccaacgacaaaagattctgcacatccgggcatcgattcggacacatccgaacatttttcaacccgaagggtcatgaaacttgacgaaaattatttgtatttataaattaattta

SEQ ID NO: 68594 - DNA, 630 bp, Heterodera glycines
atgggtagccgccgtatcggagaaatggtatttctcggaaaaaagggaaagtgttcatcggctgttgattatgttcaagcccgatatatcgcgcaattggttgtaagttgccttctttaggacaaagcaaaaactaccgatggacaacaaagtgaaacggcaaattaaagcattgatcaccgatgcataaggggtcgctagtcaaatattggacgattaccgtgaactaatattaacggtttggtttttattaaattatttatatgcttatattatataaaattttcaaagacttaaattttttatatataaataattttgagttaaataattttttggttgatttttaaaaataattctcaaaatcttattgacatttaattttttaatcaattattcgagtcaacttttttagggtgccgctgatctcgaacagacgaggtttctatccttcacagaaatttaccagtaagtgttttaatttaattctaaatttagtaaatatgaccagatattaacgttcaggcatttggggccaccaatggaagaagactagcaaggatgagcaatttttgataagtttggccttttaaaattttcgagctataatattcaaaaagttagaataaa

SEQ ID NO: 68595 - DNA, 304 bp, Heterodera glycines; identical to SEQ ID NO: 53844

SEQ ID NO: 68596 - DNA, 228 bp, Heterodera glycines; identical to SEQ ID NO: 65316

SEQ ID NO: 68597 - DNA, 1358 bp, Heterodera glycines
agagtggttgtctgtctggaggacaccatccacattcacaacatcagggacatgaaagtgtgtggtttgtaatgttgtactggctttttttgaaaaaaaagattaaatcgttcacgattactagtaaatgccaaattccccccccccctctcccccagtgaatattgtattgatgctgcctaattttatgcacattagctttctcccttgggccaaacctttttcaaatgttttagatatcccttcgttcagataatgcacatgctgaaagacacaccgccaaatccgaacggaatcgtcgacctgtccatcgcggacagcaactgttttctcgcttttccgtgttcgtccagcacgggccatgtgtaagcgtgcacattttgggaaactattttaatatttaaaagtgatttgcccttttttaagtttttttttaaatttttaattccaaacaatgcaactgggctaactaatgatagggcgtgaaaagaattcgagagcagccagttagagacagacaagacaattactatagtagcgacccttttgagttttcagcgccatgtccctggtgtcctagtgtattgcattgattttgcttcttttcaggcatatattcgacgctgagaatttgaacacagtgtgccaaatcactgcgcacgacggagtgctcgcagcaattcgtttcaatcccgagggtaacaaaatggcgacggcatcggagaaggcactttttcacccgaatatgtctcttgtttcagggttttctaatttttagggcactgtcatccgcgtcttttctattcccgacggagagcgtctgtacgaattcacgcggggcgtcacccgctacgctcagatcaattcattggcattttcacaggactcgcgtttcctttgcctgtcctccaacactgaaacggtcggttcaatcaaaaaaagggaatttgacgggaaacaatttgaatttttattcccattttttttttgtttttttaaggtgcatttgttcgctctccttacgccgtttgaacagcagcaggcgtaccaccaccactcgcatcaccaccagtgccaaaagtggggcggcttccaagcatttcttttagcttttcatgggctatttaaaaataatttgtttttctcccccataaataattggctgttaaacttttaaaaaattccaatgtaaatgtttttcaggtccgatgaaacttcccaagagggtttaagcagttgggtcagttatttgtcgcagcaggcaagcgcatatttgccccaacatgtcaatgagctgatgcttcgcgaaaagaagacggcgccggcgcgtctgcccattctcggcactcttagtagag

SEQ ID NO: 68598 - DNA, 168 bp, Heterodera glycines
atggacgaagaggaaactctgaaattgatcgattatgacggtgccactttcataccggtggggcttttcgaaaacccgagaaaactggcaaataaagttgtgccacgtgagttttacgtggccaccccaacgtatgtagcaatcgaatattatgaggaggatataatg

SEQ ID NO: 68599 - DNA, 1306 bp, Heterodera glycines
atgataaaaagaggtacaaaaatgattagacgaggtacaaatttgattagaagaggtacaaatttgattagaagaggtataactgtgattaaaagtggtacaaaagtgattcaaagaggtatatcagtgattaaaaaacgtacaaaagtgattagaagaggtgcaaaagtgattagaagaggtacaaaagtgattcaaaaacgtacaaaagtgattcaaagaggtacaactgtgattaaaagaggtacagcagtgattaaaagatgtacagcagtgattaaaagaggtacagcagtgattaaaagaggtacaacagtgattaaaagaggtacaatagtgattaaaagaggtacagcagtgattaaaagatgtacagcagtgattaaaagaggtacagcagtgattaaaagaggtacagcagtgattaaaagaggaagaacagtgattagaagaggtacaaaagtgattaaaagaggtacaatagtgattaaaagaggaagaacagtgattagaagaggtacaactgtgattagaagtggtacaacattgttaggagaggtacaatattgtttaaaattaaataaataaggaaacgtttttattaaaggttaaaaatcgagtgcattttaatttaaaaattttttaataacaaaatactcttttattaattaaaaacaaccttggaaattattaattgaatatttatttaatttgaaattaaatgaattttttttacaaattcaaaaataaataatgaaattctttaatttaaaaaaaataaatttaaataatttaaaagaaattttcaaattaattaaaaacattgtaaaataagccaaaaatacaaagaaaaataatgttacaccgtccggattcgaacctgctgcccccccccccccccctcagaacatgtcccagaatccccaatcacacagggattctgaggtcttgacgatgtcaaaagtaaaatctgatcacgtattcgtgatcagcggcccaaataacgcctaaagacatgtttttggaagatttttggtgaaaatttttttcacttaaaaatcctggtcacccccctttggtcccgaatcccaaaagcacttttatttttgtatcttttttttaaaatgtgatagaaatgccaaataaaatttatataatagagcaaaaaattgcggatttttgtagtattttacttttacagtatgacttttcagaaccgagttatgaatttttttctgaaaaatcgaaaatttccagaaattctggaataactttttttcttttgaacattataaaaccaaataaa

SEQ ID NO: 68600 - DNA, 225 bp, Heterodera glycines; identical to SEQ ID NO: 50965

SEQ ID NO: 68601 - DNA, 682 bp, Heterodera glycines
atggatatttacagggaattactgaaattgaagaaatgcgttcaaagcttttggctggacttgaggaaagattcggtcatttggagaatgagaagtgtgtacatatttttaaatttcttttaaatttcttttttagattacatgctctttcaacattcttggaccctcggcgaacaactgagtattaatggctctgagcgtattacatctgaacatgttgaaactgtgtcgctttttgttgttccacctcctcccaaacaacgacgtacattacttgattccttgtcagaaatggcctcaaccagcaaatcttttggtaatttttaaaagatttcttttattatgcatataaaatttaaagtgcaaatcgaatcgacatttgacgatgaactcaaaaaatattgttcggttgatttgattgggcaggaattggaccctttggattggtggaaaataaacgaaggactatttcccattatcgctgcgcttgcaaaacgatatatttcggccccggcaacaacgattggaagcgagcaacttttcagtgttgcgcgtgatgtgtttgactatcgtcgatcaaaattgaaggctgaacatgccgaaatgctcatttttttgaacaaatcaattccgaaaattcgattttattgatttaaaattttgcttttttattttttcttta

SEQ ID NO: 68602 - DNA, 479 bp, Heterodera glycines
cagcacacagccacgggcaaaagccgcctgtttcacgcaacagcccggctgacccgacctttagagccaattcttttcccgaagttacgaatctaatttgccgacttcccttacctacattattctatcgactagaggctgttcaccttggagacctgctgcggatatcggtacgatcaggcaggagattcaaatagcttccctcgcattttcaagggccgtgtggagcgcacgagacaccacaggaaccgcggtgctttacgggcgcaacatccctatctcaggctgagccacttccaggcacgcacaccctaaaccagaaaagagaactctggctcggactccacacgacgtctgcgagttcatttgcgttaccgcgcaaaacagctcttgcgaaccgtcatttccctagcctggcgtgggaatgttaacccacttccctttcggcaaccggatggaccaactgcgcaagcacagaa

SEQ ID NO: 68603 - DNA, 124 bp, Heterodera glycines
tgataattacgtgatgaagccaagccgtgagggcggtggaaacaatttttggggcgatgaaattccaaaaaagttgcgcgaaatgagccgtgccgagctcagtggccatattctaatgcaaaaa

SEQ ID NO: 68604 - DNA, 752 bp, Heterodera glycines
gaaaaagtttgatgacaaagacgcaattattttaattgtcgctggtaaattataccgaaactatgaacaatatcagctgaattatttgatggaaaatgtttcaaaaaataaaataaaaattgttcaaatgtcattaacagaagccgctgaagagtaagtaggcattttacaaataataatttaagcataattaattcttttaatttatttgagtacgctaattaattagccaatccaaaatgtgtgctaatttgttttaaaaaaatcgtaaaatagcactctttttcaggctaacgcaaggcaatgaccattcattgctttatggcacacaaaaagttgcaattgctttctaccgatcaatttcttccctgagagatgaacgcattttcaacgctcggcttatgatcgaacgatcaacagcaattgtaagattttatgttgcataaaaaaaaattttaattatgtaaaacgactgtaaaagttaaatttaacagttttaaagctacaaaatttaaaaattatcaacttatattcgtttaaaattgtttattttgtaaaaataacaccaaaaaatccaaatttaactaatttttgtattaaaaaatcaaaagcaattttctaatgaaaaaaagataatttaaaatcatatttaattcatttgtagaaaataccaactgtggcaaatgcacttgcaagtcaaaagaagattcagcaggtgattttatgaattttgatataaataacacattaaa

SEQ ID NO: 68605 - DNA, 696 bp, Heterodera glycines
atgacggcaatggtaagtgattggtaaagtaattttgctttttttattggactgatcgaatcgaaaacgtcggggggggggggctaatcgctgtgagagtcggtgttggtcgtgcggagctaacccccgccggtggatttccgatcacactctctcttttctgatcagtttctttccgatgtctacgacttgtgcgtccacgtgcggtctgtgcgcgacgggcgcgtgcgcggacactcaggacggatgcatcggactaaggcacatgtgcgaccagaaggagttcgaggaggacatgcaaaagtgcgcacgcacttgcaaattctgcacacgtaggaaataaatatttaatttttaatttggaaatgattgaagtgatcacccttccccacagcaaaatgtgctgatctgaccaacgattgtcagatcgccgatgaaagttcgtgcgaaccgccaccgcccgatcacttggaagtgaatgtgtgtgatttgttcagatttaatcacaattgattcaaaattcgaattcaaatttgcacatttcagccctattacgaggaaatggccaaagtgtgccgcaaacggtgccatttatgtgacaaagcaatgccattgaacaaacgaattgcaaaaaaagtggcggacagagccaaacgcattaacgatggactgagtgacgaggaaatgaatgaatga

SEQ ID NO: 68606 - DNA, 4081 bp, Heterodera glycines
atggccaacggtttcaattatggtgattacgatggcgaaataacgcttgactttgaatttgcacgacctttggacattgatgaagaagaaggaaaggaagatgaaaacacagaggaagaaaatagtaaaaaggaagaaaaagaggaagatgagaaagttggtaaaacagagagttcggacagacaagcagacagcgttgaaaatagtgaagcaaaaaaagaaacaaagacagtgcaaatgaaaaaaatggtgaaaaagctaacgaagcagcagacagagaaggaggagaagctgatacagtatttgtgtgaggtcagacagtgcgactcgcaaaagacggaagagtgctggatgaaactgttcgacgcactgaccgcgttggatgacgaggaccgttacgataacatgcgacagtattgctcggccaacaaatcatggatcagatactgtagcaacatggcaatgtgtgatgacattgatgtgagtttaaaagttgaacggaaaatgctctgctggggaattgacactttaaagccttataattagggctataaattatatgcttttgcatattttttctgcgcatatgctacgaagaaaggggctcaaaaatagcatttctgcgataaaattttttgatttggtgaagttttttagtgcatataaaagcatattttgagggttttcgagaataaatgcatattttgccattttttcatttttagagcatatttaagtcatttttggcaaattttcataagaaaaatgcaataaaaatgaaaaatacacccctaaggatcgactttttgggaattaaaaaatacacccttgaaaatcgaaaaattttgaactttttgtaagaactttttaaaaaaaattgttgatataagaaaatgtaattttgttttagcatatacttataatttctaaataattaaatttttgatttttcctttaattttttggggagtttggactaaaaagactgtcccaattcctctgcgctcatttccgtttcactcttggctggaaatggcttaatttctcggtattaatgagttttaaaaatatttaaaaattaaaacagtccctctcggcaacgccaaacactaaagtcgaattacataatttaatttttaacattttgaagctcttttatatgtcgatatattctttttttatagaaagtcattgtgttcaaaaagaagacggaagaagatgaagtgataatagaagaagacgaggaggaaaaggaagatgataatgaaaaagaaaaagcacaaataaaggaaagagaagaagcaaaagggaaagagaaaaaaacaaaacaaggaaaaagcagtgacaaaaagccgatgcaaaatgaaggttaaataagttaatctcaaaattttaaattacctaccacacgtataggagtggaacagttttatggttaatcgaatttctgagcctttttttggccaggttttcgtatttttcgcaaaattcaaaaaatttggacggataggggtgggacagttttaaatttctgcgccttttttgaccaaatttccgtatttatcgcaaagttctaaaaacgttggaattagcctattggaccggcggaactctaatttttcaatttttatattaaaaacgaattccagtctcaagtgaaaagattgctaagccaaaaaaatcatcaacaaagccaccatctgctgctggtgtcaaaaagaagccgaataaagaagtaccaccaattaaccttatggatgaaccgtatgttggacaaccgcaagcgctacagtattcggtgtcaaacattggatacggtaatcaaatacaggaaccgtatacaactcagcgaaatgattcgctcatgtatacaactgggtcaccaatgctaccgcattcgatgtcatctattggaccaagcatgacactgtcagactccgtttacccaacaccaacaaacaatataactccataccaaacaggttatgaacaaaacaatataacacgaaatttaattaaaaaataattattttttaatcacgcttaaaaggttacgaccgaactatgaataaatatttgaaattattaattgtattttaaataaaaattgaataattcagtaccaagtgtacaacaacaacaccaacatcaaatacagtacccaccgacgcaacagtattcgatgtcatttaatggagtgccatctccgcagtaccaaacttacacatcattcagcatgccaccgaactcaagtcaatacagagatattggtctgccacagtctcatttagcttcaactgctggtggcagtgggtctttagcaccgctaaaccaatatccaccggtaatattgttaaacattttcaaaaatttatgattcgaatatatttttaagcgttttaaaaatttatgattcgaatatatttttaagcgttttaaaaatttatgattcgtatatatttttaagcgttttaaaaatttatgattcgaatatatttttaagcgttttaaaatttatgattggtatatgtctgagaaattttggattttgatcaaaatctgactttaaaaaactctttagaatcaaaaattgccagttttttttcgtttgggaaagcactgtggcaaatgctttcaattttgttagggaattttgttgaatggcattgaaaaagcataaaagggtgaccaatttcttcattttagcaacccggaatggcggggccaccttcatttgttggaaatgatgctaatgctatggtgaataataactatccaagtagcagtgaccaccacaagcagagatcacgtcgccaaaaaagaggcgaccgaagtccctacgatttctcaatgtataataattctgataaatctgcttctactcaatcagtaccatcatcatcatcatcaaggagacaaaaagcaaggacaccaaacattgtacagaaagcaaatgttgtaagtttgaaaaaaatttaaattgttcgcctaaaataataaaaagaatccaattacatatgggaaatttaccaaggtttctttgatttacatataaacccatattgaccagaaaagaaagaattggttttgataatgcctaaaatttgaaaaatgtcattgtgtgattaaggacacccctaacacaaataaaggactaattagtgcaaaaaattaattattctcttaaggaaaaaaagattgaaacgcctgaagaacacatgagcaatcacctgaaaatgtacatgcaatgtgtgaagaaattattgacggtaagtttaaatttgtttttgattttaatgaacacttaattagcaactctatgagaattaattaaaaaaaccaattcccaaattagttgaccttttcaaatatttttgtacctttattgtcttatttaacactttcatgatgactaatcaggcagactaattttaaataaatatccttatttaaatttttactaaatgatccattgttttttttctttccaaatttaacacttttaacggacgccagtttttcatcaaaaacaaaaccaaatttttagaattttttttaggaacatctgctggtggacaatcggaatgaagacaaagtgtccaaaaatttccgtcaactcctctacggagtgatgttgccaaagccggtgttcatagcccagcagttgaacatggcactgaacggaatgccaaaggatggcattgacattgcctcgctgatgtcggcaccgtcctactcaatggccaacccatttgtagcagcaaaaaaaattattaaagacaaaggattgagtgaaaagagcacaaagaacaatgagatggaaacgaaacaacacaaaaaagggatgctggcgcagccgccaataaagcaggatttgcgggttctgttagaaattgccagcacacagagcaggtggccaacaaaggggggaggactgggcaaggccaaggtcgggcgggtacttgggattttttacaattcacttgaaaacctacaaaaaaattatttaaaagggcgattacttggattttttgtttgacttaaaacccccaaaaaattcgatttttaattaattaataaa

SEQ ID NO: 68607 - DNA, 873 bp, Heterodera glycines
atgaatcctcagcaaaagctcactcataccgcggtgattggacgggcagtgagtagcagtggtcggccgggcacttggcaagatttaggatgggtaagtcgtacaaagtggcaacatcctgtttagattagtatagatccagagaatgatcccttgaaaataacgtatcatggaattcaatcttgtctcccgaattagaattaagtttatttgcatgaaaattactggatatcatgatctcaaactgattttaggcggttcagaataccaaaaaagtttcactctaatctagtgaataacattggaatctattttccgaatttaaccattttcatggatttttactgaatgcaaattctgatccaattataagccaaaaaatctagatttccagaccctgcctgactcagaaatccttcagatacttgaatctaacgaaaaagacaacttcaatgccatcgaccctaatttgtttgttgatccgagcacaaaacgattttggctccaatacggctccttttggatgggcattttccaagctattttttctttcccaaaataatatccaatgcaaaaaagagatattttatcaattgtaatctctcatctctaatggattaaaaattttgattatagcaaaaattagatttcaataatcaagaattttgtaaaactaaaaaatagatttcgtttcaaaaatctgctaacttttgagtttttgagtatatttataatgaatatttttgaaatattttaaaatttcattatttcacttaaaataatgatgtaatgagattttaaattaatttaatagacaaaacttggaatcaagggtttttgtcttcttcaaataattacaatcaatgaaataaa

SEQ ID NO: 68608 - DNA, 268 bp, Heterodera glycines
atgcagaaatatttatgcttttgtcaccggaagcgacttgacgagcggacaaaggtagacagacagcccggaggaaagaaataagctaatcctgtggaggaacaatgaaaatttctcaaataattaaattttataaatttgttgaattattcctaaattttccccttttcaggtaaatattttcccgaatttccatttcattgtcccatcggtgcgggtcattagtcaaaaaaccgtggttggcgatcgacgaaaagtgcaaatttga

SEQ ID NO: 68609 - DNA, 611 bp, Heterodera glycines
atgaatagtgaagacactaaggaaatgtggagaagaatagattgcttttatgctggtagaagagacgaggtcaaagatcatagtgagtaggatacgcatcaacaaaagagaaaataaaacacaatcaattctcattgagaccatagacaacaaaattaacctttttctctttttttactcattaaacttcattagaatgaaaaatagaatttgaaaattttaaaaataaaatagctataaatgaacattggggactcgaacccatgacatcacatctataagggcaggcacactaaccacttgaccaccaagttacttgctcacatcccttttaataaccttttccctttctttctttttttgaaaaaatcctgatcaaaagtgcttgagctccctttttagggcacttcccggacccggacccaaacaattttggtatcattcgaaagcccagactttgtagactgaggcaaattgtttcgattttcgatttgactatttttaaggtatgcaaaaaacgttcaaaaatggaacatctcaaaaaagtgcaaattttgactcgtttttcgaacacagttcgaacaattcttaaccgattgggatgccgataa

SEQ ID NO: 68610 - DNA, 328 bp, Heterodera glycines
acatcgccgatcagctgctggcattcagcgacgcgcacatcgctttggtgttgaaccgtcctgagaaaaacgaaaaactgagcgaattggccacggaacactcggagaatgtttcacagtttgacaggcattttttgcatttgaaatggtaacaattaattatttgttcagtttcggtaccggggacaatgcgcggattacgcgtctgctgggcaaatcgttgtgcgatggcattgtggcatttcaaatgggccaattcgaacgcacattcgacttggtctatccgatccgaacgcaattgtacaaaatcagtgggagcaatgcgcag

SEQ ID NO: 68611 - DNA, 414 bp, Heterodera glycines
gctgttcccacttcgatatgggccgccaacgatgatgacatgtacaagccgaagcagtacgaccagcaggaacagccgaagcaagcggagcgaccagcagcagcgtacggcgctaagctggccgacgacgacatgtacaacccgaagcagtacactgaacagcagaaggcagcggcggctggtggtggtggtcgaccgacgtatgaagccgcacttgccgacgatggcttgtacaatccaaaacaatacagtcagaaaccacaacagcaacaacaaactggggccgacgatgatgacctgtacaagccgccgcaacaatacaatcaacagcagcagcagaagatgggccgaccgaaatcgtatgaagatgagcttgacgaagatgatttgtacaacccaaagcaatacaattag

SEQ ID NO: 68612 - DNA, 77 bp, Heterodera glycines
ttttttcctgagctccccgtggcctgaaacgcacgaaaaacatgtttttttgggctgttgttaagctacttttcgag

SEQ ID NO: 68613 - DNA, 95 bp, Heterodera glycines
atgcgcacgtcccttttgatccccctcagccttttctctttgatcactttgctgttcattgtcagctttagtgaagcggacatcgaaatggacag

SEQ ID NO: 68614 - DNA, 291 bp, Heterodera glycines
atggactgacaatgagtgcggtaaatgggcgagaaaggaatgacggatggatgataataaacaaattggcattcactgaaacattccattcattcgtcagcatttaaaaatgttttaatttaaattaatttataattaacaggcgcaatttattatttgattttattaaaaacaaaacaaaaaaacatgctgagtaaagcgcgcatcattgtggaacagagcagttcaaaatttttgtcattttattataaaatgccacttatgtttctacctctttttaggcaactcctt

SEQ ID NO: 68615 - DNA, 138 bp, Heterodera glycines; identical to SEQ ID NO: 50950

SEQ ID NO: 68616 - DNA, 681 bp, Heterodera glycines
tgaaaaaaatatttatgaaacaaaaaaatcgattttttcaagtgtccgtttggggtactcaaacatttatggggagcaaaaatccaacgcagaattaaagtacaggctatagggaagctattcccgaaggattcggtctccccataaatctgggcgcatcggttcggggggactgccccgaaaacaaaaataaatcgattttttcaagtgtccgtttggggtactcaaacaattatggggagcaaaaatccaacgcagaattaaagtacaggctatagggaagctactcccgaaggattcggtctccccataaatctgggcgcatcggttcggggggactgccccgaaaacaaaaataaatcgattttttcaagtgtccgtttggggtactcaaacaattatggggagcaaaaatccaacgcagaattaaagtacaggctatagggaagctattccggaaggattcggtctccccataaatctgggcgcatcggttcggggggactgccccgaaaacaaaaaaatcgattttttcaagtgtccgtttggggtactcaaacaattatggggagcaaaaatccaacgcagaattaaagtacaggctatagggaagctattccggaaggattcggtctccccataaatctgggcgcatcggttcggggggactgccccgaaaac

SEQ ID NO: 68617 - DNA, 270 bp, Heterodera glycines
tcgggagtagcttccctatagcctgtactttaattctgcgttggatttttgctccccataattgtttgagtaccccaaacggacacttgaaaaaatcgatttttttgttttcggggcagtccccccgaaccgatgcgcccagatttatggggagaccgaatccttccggaatagcttccctatagcctgtactttaattctgcgttggatttttgctccccataattgtttgagtaccccaaacggacacttgaaaaaatcgattttttt

SEQ ID NO: 68618 - DNA, 214 bp, Heterodera glycines
  unsure (1)..(214): unsure at all n locations
aaacaaaaaaatcgattttttcaagtgtccgttntgggcttttcaaacaattatgggggagcaaaaatccaacgcagaattaaagtacaggctatagggaagctattccggaaggattcggtctccccataaatctgggcgcatcggctcggggggactgccccgaaaacaaaaaaatcgattttttcaagtgtccgtttggggtactcaaaca

SEQ ID NO: 68619 - DNA, 302 bp, Heterodera glycines
atggtggtgacggtttggtggcacaaagtggcggttggtccgaggtaagcccgagtttgaaaaactcataaaacttttttcctaggttggaaaaacgggaaatttttggggctaaaaaaaattgaataaatttttgcacgcgaattattactcaaaatcccaagaacaatttatcacaaaagaatttttttttatgtaaaaaaccttttcgatatttaaaaattttctttttcagttttttattcatttcaccggcggcgctctcggaggcattgtgggcaccagcttcacttatcctttag

SEQ ID NO: 68620 - DNA, 1336 bp, Heterodera glycines
atgcatttgccttggacatttggaatcattcatttttttagatttatttatactcttaaaattgaaagtgttgtgatggaaagtaaaacccggattcgaaaaggcaaatttcgaatttacagaaaatttaaaaattccgaagctccttctttcatttttttttctcgaaacaaagtcacttatggcgatttcaaggtcggagaatccgattctgacaactatttcgacccaattccgaactccgaacacagtctcgaacaaaaagccgaaaattcaatttttcgaattcgcatttttggtctacaaatggttgaaaagtactttattgaaacagtgatgatttttagtttgtttccttaccattaagccggttttaaatcaaaaatgcaaaattcgaagttacgactttttgttcgaaaacgggtccagggtttggaattagaccgaaatagatttcagaatcagatatcccgacagtgaaaacccttaaaatgactggggaccagctcggctactaggtatgcagtgttaaaatttttcggggggattaccccttcacaaacaaacaaaaaattttcgctgacccgacgaatttgttgagggaagtgctgaccaactctgtcccatttcgttgttttggcacttggaaagtgcagaaaaatgggagttaaacattgaaatatcatttttatccacgccgaaatcttaatttcttgaaaaattatcattttttgttgtaaaacgaggggggggggggggtgggggtaagaaagccaagaaaatgacatgagaaactgaaaagaggtgtatgtttaaatggaaaaataggtaatttgatatgcaatatttcataaattacatggatttcgattaatgtaaatcctaactaaaataatatttagtttaacaaaaaacaacactaacaacaacaaaaataacaacgacaaaaaatcaaagtgaaagttgagcaggaagcaacaatatgtaagcgaatggtggtaacaaaaacaaaaaaataatctgtcaaaatctatgatgaaattcaaaaaaaacaaacaaaaaattttaaatgaaaaatttttataggcggctaggcgagagttgggtagggtataattaattgccgatggacagacaatcttgatcgattatcgtgccacactgcgattttttcgtgcaaagaactgcttcaactcctcatagcagccgatcatgacggcacaagcgggtgccacgcgcgcaacacgcggcacggcgcctggggcacaaagagaattaaaaacaacaaattatcggtgaaagcaaacaaggcaattttgttccttagccctagaca

SEQ ID NO: 68621 - DNA, 1273 bp, Heterodera glycines
  unsure (1)..(1273): unsure at all n locations
atggcnccgcttttggctggcactgtcgcccgcacgatggccgtgtcggtggtgtccccgctggaattggtgcgcaccaaaatgcaatccgaacgtctctcctatagcggtaaaaatgcctaaaaatagccaatttttcgaggaaaattttaccaagaaatgataaatttgcagttttttttttcttgtgagaggggcgtaacaaaaaaaattttagagtaatcaaaaaaaatttttttttttttttgcaattttaattgagtttagaattgcgaggtgcaattgtgcggacagtcaaatctgatgggtacatggcactgtggcgagggtggacagcgacaataatgcgtgacattccattttccggtttgtcgaaaaaaaaatttttttttgtataaaaatattgttcaaaatttaataataattgaactaagattttttttaaattgtccaaaaaaaccgctgaaaattaaaactaaagttttctctggaaattctatgtttgtaaatattttttatgtaaaattttctcatattttaaaaatgtaaaatttatgggaatttcctttttttctaaaatttgtaaattatcattaaaattttttttttccagccatctactggtccctgtacgagttcagcaagccccgtctgatgcaaattgcccaccgccaacagccgaactttgcgctttccttcgcctccggcgctttgtccggctccgttgctgcccttctcacattgccatttgacgtggtcaaaacccaccaacaaatcacgttgggccaaattgatggtgcgtttaaaagtttttcaaaaaatttaagtgagcgaagaaatttaaaaggaaattcgtcaattttagagttttttgtgccattccctcattagcggacacagctgggagagcacaccccaatctctcctcatttgtctaactgtctttcctcttattttcctattttctctagccgtccctctttttctctttaactcgtacatgggggagggggtgtaccattttgcccattttttagaaaaaaatttcgacgattctattttcttgcgattcaaaaaaaaaaattcttgaaattttctaataaaaaatttatgaaaaatttttaaatttgcaaatttttcaaaaaaaaaactttcccagctgaacggcatgcacaccatgagaaggcagcaaaaatgtcgacgcgtaacaccaacatgttcggagtgatgcgcgagctggtcaacagcaaggggcttggcgctctgttcaccg

SEQ ID NO: 68622 - DNA, 1407 bp, Heterodera glycines
atggaccatctttgccgagtttgtggcaacagagcggccggcattggcactggcagtgaacagtgcgaatggttcaaccgaccgggccatttcagtggcacgctggtcggtggtgggtttttcaggcatttttgggttcccctgctattcgacatttcattatttaaggaccatttgggatttttgcggcccaaatttaatagtcggccttttgtgccaattcctggtgtaatttgtcccaaaaattggggaccagtcaaccaatttggtttcagtaccccaatatctgacagaaaaaaatttctgtcatcttttggaccttacaatcagttttatctcgtcctgatccgttttggaaactatggttggttgcatcttattcaaaaaaattttttttcaggacgctttcgtgaaaattgttcgaattgagggactccgttcgctctggtcaggattgtcgcccacaatgtaaaaattcagcaaattaaaactggttttaactcgaaaatctttggctaacaaaaaggacgaaacatgatgggataagggcaaatcttattaaaaaaaatttgcaaattttggcaaagtaatgtttaaaatttttttttactacaacttcaaaattgttcataaaaaaatccaatcaaaatttttttttaacaattttagggcttttttttgaaagtttttaagttttggtatatttttttaaattttctcgcgtgcggttggaactaaagcatgtacttactcttttttgattaatgattgaattaaaaaaagtgcccttttaaggctcagtgccatccccgccactgtgttttacttcacaatgtacgacaacatgttgtgcatgtggcgcaacgcattggccagcaacaaaaacaacagcactttcagcggtgccggtgagtgtaaattagaaaaaaaaaatttttttttttttttgctgcttttcggcagtcaaaaatttgtacggaattttgccgaaacctaagcgaaattttttttttcattatatacctatgcactaatttcagcgttcatggccccgcttttggctggcactgtcgctcgcacgatggccgtgtcggtggtgtccccgctggaattggtgcgcaccaaaatgcaatccgaacgtctctcctatagtggtaaaaatgcctaaaaatagccaatttttcgaggaaaattttaccaagaaatgataaatttgcagttttttttttcttgtgagaggggcgtaacaaaaaaaattttagagtaatcaaaaaaaaaatttttttttgcaattttaattgagtttagaattgcgaggtgcaattgttcggacagtcaaatctgatggatacatggcactgtggcgcgggtggacagcgacaataatgcgtgacattccattttccg

SEQ ID NO: 68623 - DNA, 56 bp, Heterodera glycines
gtcccggttcccggtcccggattttgaaaagctcaggtcccggtcccggtagggca

SEQ ID NO: 68624 - DNA, 748 bp, Heterodera glycines
atgggcgaacacggcattgagttggacagacggcacgtgcaattgttggccgatttgatgacttaccggtgagcacggggagcattaaaaattaaagaaaaattttgaaatttttcagtggccaagtgttgggcattacgcgtgatgggctggtcaaaatgaaggagtccgtgctgctgttggcctcatttgagcggaccattgaccacctgtgagtttgacattcagacctttttttgggccttggaaaccgggaattattttatttgcccgattttgggggggttcgtgcctgatttttcaggaggattttgctcggtttactatttttcattcaaatttagggactaatttcttaataaatttattaaaattcttgggatttttgtcaaattttatgatgaaatatttttctagaaattttcttttaaaaaagttttaagttagaattattttttattttcggggagggcggaagagtcggggggggggggggcgctgagctgcaccgcaaaattcccacacaatttttgtagttacgaggccgccttctttggccaacaggaccgaatttcgggtgtcagcgagtgcatcattattggcacaccgatgggcattggtaccggcatgttcaagctgttgcaggtcaacgaatttttttatattaccttgcatgtattaaaaaaaaaattttttttttttttagaatcagaaacccgtcaaatttgtgcagcaaagtgacaaacag

SEQ ID NO: 68625 - DNA, 250 bp, Heterodera glycines
atgatgcgatctattgctgaagagaaaggcggtttactttcttcgacattccaatttcttgtacaaagtgattcgagtgaattaaggtactttcgttagttaaaaaagtaatatttgcttgaagttaattgccaattaaaagatcattggcgcttttagaaaaatgattatgtttcaagttcctattcatgaaaaacttattcttttgcttctaggagtccctgatcacgaatctgaacatctattttga

SEQ ID NO: 68626 - DNA, 1082 bp, Heterodera glycines; identical to SEQ ID NO: 40225

SEQ ID NO: 68627 - DNA, 330 bp, Heterodera glycines
atgtcgccttatgggcacggaaccgtcgccgcggggtatcagcagcagcagcagcagcaacaacagagtccgttcgccgcgctcaacttcatcccttacggtgccgcaccgcccgagggcatcgaagaacggcataatgccaaccacaacaacaaaatgatgatgatgaacagcaacgagcgtaaacgacacagcatcaacacgactgcagcagcagaggccgcactgatgggcacgacgggggtgcccgaattggagttgggcccggacggcgccaggggcagcgtgtccctgcaaatggcttacgagccggccaatttggcattacag

SEQ ID NO: 68628 - DNA, 434 bp, Heterodera glycines
agttcgatgaaactttttaaaatataagcctaaactttttggcctgtttaaaaaggaattaaaaatttttaaaaattttattcatctcccttttgatagaaaaagcatcagagagccttatttaacttttaattaacatttggtgcgtttcagagcacgttctaaagaatatttatgaattaattttgcaaaataatatataattgatgaaaaagtcagaatttcgaaaaattttaaaaacaacaagcgttggcattttttcaggttaagttagtcctttacaatggagaaggcctgcaaaatttggagagttatatcgattttagtgcgctaagttcgatgaaactttttaaaatataagcctaaactttttggcctgtttaaaaaggaattaaacatttttaaaatatttattcatctcccttttgatagaa

SEQ ID NO: 68629 - DNA, 646 bp, Heterodera glycines
aaacaaaaaaaatcgatttttttcaagtgtccgtttgggggtactcaaacaattatggggagcaaaaatccaacgcagaattaaagtgcaggctatagggaagctattccggaaggattcggtctccccataaatctgggcgcatcggttcggggggactgccccgaatttcaagtgtccgtttggggtactcaaacaattatggggagcaaaaatccaacgcagaattaaagtacaggctatagggaagctattcccgaaggattcggtctccccataaatctgggcgcatcggttcggggggactgccccgaaaacaaaaaaatcgattttttcaagtgtccgtttggggtactcaaacaattatggggagcaaaaatccaacgcagaattaaagtacaggctatagggaagctattcccgaaggattcggtctccccataaatctgggcgcatcggttcggggggactgccccgaaaacaaaaaaatcgattttttcaagtgtccgtttggggtactcaaacaattatggggagcaaaaatccaacgcagaattaaagtacaggctatagggaagctattccggaaggattcggtctccccataaatctgggcgcatcggttcggggggactgccccgaaaac

SEQ ID NO: 68630 - DNA, 152 bp, Heterodera glycines
ttggatgagacagtggccgagagtttctacggcggtgtgctcgcattatattcaatttcgcaaataattgcttcaccgctgctcggctattggtcaaatcgtgttcaaagtcataaattacctctgtaagttgtcataattttaaattacaa

SEQ ID NO: 68631 - DNA, 589 bp, Heterodera glycines
agctgcaccgagcccattttgagcatccgccgcctcccaacctgcgcaaatccaacttcttccacttcacagtcaatctgtacgaccgcgacaatcagcccattgaggtgggccgtcagcaaaaatgccaacaattggctggatttactgttttggaaagtcctacctattcagggttgaaaaaaattccggctaaaacctgctcatttgtgtgttggttgagtcgattaagcccgaattttttagtaaaaatttggcgattgccatagaattggcggctgtcatttaaaatgccgtcatcaaatatacagaataccggaaaaagcttgtttttcggataaggaacaaagatggattcagaataattttaactctctcatatttcaaagtcagtcaaaccctaaaatacaaaaattggcacccatcgccggggtcattaactcattaattacactcaattaattactgtgccaactcgctcagattgagcaggccatctttgccggctttgtggagaaggaaaaggaagtgcacggggagaacacgcgcaacggaattcattatcgcgcatctctgcttttcgctaacg

SEQ ID NO: 68632 - DNA, 118 bp, Heterodera glycines
atgactcgcgcatacggtaaactccttggtccgtgtttcaagacgggtcgaacagatgaccggcttatacaccgagaacgcacaactgagagtccgagatggaccgcattggttgctg

SEQ ID NO: 68633 - DNA, 475 bp, Heterodera glycines
atggacggcattgtgccaccggcggatgaggatgaacaggtgccaactatggatgaagaggagacggatgaggaagaggaagcgatgccaccaccggcagttgttgaggatggagcggtggaggatgaggaggagggtgccaatgccatttctgacggggagacagggggatatgggaatgataatgatggcatggcatttttgggggtgttattctggattggacagtaatatgcgcacggcatttggcggggaaaatgaggacggcatttttggggtgaaaaatatggcatatttttttgatgacttggatagcatttttgtatgtcaaattgcaaaaatgtcatttttgatgggcttgaaacaattatgattgggaagaaaatgccatttttagacaccaaatcaataagactcaaggaatgatggcattttttctgaagttaaggagcgaatttggcatttttcgattaaa

SEQ ID NO: 68634 - DNA, 1104 bp, Heterodera glycines
atgtggccacccccaattctttttgagcggacaaatggtgaagagtccgtttttgtaatttcactgcgcgcacgcgcacttcttgctgaccaagacccgcacgagatggtccttttttaattttgaatttaaattaaatatttaaatggatttttaattaaatggttttaaatttattttagcgagaaaatgtccgcgcctatttttcggaacattgtgacacgattagcgaagtccacgaatgcgatttgttttttgttcaactgaatggaggcgaaggctggtttccggaggacgatcaaattgtgagttttaaacagcatttaaaaatgatggtgtttggacgtttcctaaattggacaggccaataaaaatgctatttttaaaattaaattttatattatttttaacattggcaaataattacataaatttattaaaattaataattgtttccagttttttgcccttgttaggcaatggccaatatgagttttttgggaaatgactagcaccacaaatatagccaatgtttttagagttaaaaaaatattttcttattttgtattattccttatttttcttccctccccctccggcatttagcaatgggattttgccattctgcaatttgatgatcacgtgaaaaaacgacacaaatttgatcgcataattcgatgggtcaattccggactgaaggcggtaaatttgttaatcttttttcttagatatttagttctaatgaaagaatattgtatcaatcaaattaattgcgggatttgtgagattaatcaaacccatgagattccgcaaaaattagagttcaaaccttgcagccgggatccgcaactctaccttattaacttttttaaaaaattgaccccaaaaagcgttgtttatttattttttggacaaaatttgttttatttttagttttttgagatttttccaaatttttatttgaaagtatatcgtaaattaaaattcagggctcaagttgcagctgccctatgtttttttcattctattttagattgaagaaaaccgagtgcccgcatccccgagggaacgttcggattcggacgaaggatttgattaaataaa

SEQ ID NO: 68635 - DNA, 920 bp, Heterodera glycines
atggatttcgatcactcaccgactttgttcagtgaaactggatcagaaacagaaaaaagtgaaggaaatgaagaaggcaccaaaagggagcagaaggagaaagacgcatcaacaaaacaaagtgagaggggaaaagcacaaaaagtaacgaacttaattggaaaggtgacgacgaggaagaggaggaggagacggacgagtcatcaacagcagaagagaaaggaggagaagcattgtcagaaagggaagaatgttggaagagaatggaagaagaggaggaggatggggaagaggagggtgaggaggaggaagaggaggagggggaaaaggaggaagttggaagagaaaagggacagagaggaagagggaaagaaaaaggaaacggaagagatggaagaataaagacagcagagaatggaagaggaggaggaggaaaaccaggaggggaaaacagaccaacgactgtccgttcaatgaaaaggaaatgcgccaacacttcggccggtggtcctctgttccaatatccttccgaggtcagtcgaagggccgaaaaacgaccgaccgaattcgattcacagatgtacgccgctggagaacaattttccagagaagtgaaaactaaaaatgaaaagagttacaacaaaattttaggaggaagacgcacagcaaaaaacacacggaaacaaacggagagggccacggacgacaatcagccaaaaacaggtgggggaggggagggcgagggaggagaagcgggcggacggacggacggacggacaattaagctggacattctgaaccgaatgttcgacaacacattcaaaccaacgaagcacgaaagggcccaattggcacaagactcgggactgagcatgagagtcattcaggtgaagcgaaatgggaaaagtgcgaaggaatga

SEQ ID NO: 68636 - DNA, 582 bp, Heterodera glycines
  unsure (1)..(582): unsure at all n locations
atgttgtccgacaattggtccctccgagctgtngcaaaatggacaagggaatgtcgccgcagatccctggtgccccatcagtgccgaagtaaatttgaggtcggcacagaggagcctgaaaattacaattggcattcctgttatttttatttcacatttggactgaaatggtccgctagtcccggaaaaatgaacagatttttggggaattgggtggccaacattaccgatgaccatcgtaattttatcgttgcagccacctacctcatcgcctcccttatcgcccgccaacaccaacacaatttgggaggcaaattgctgctgcagtttcagatcgccttaatttatcaaaaaaaaatcactttgactgccattttcccaacgctgttcgtcccgcctgaacctgaagtcggcctcgagcatggcacgagcattgatgcaaacaagttcacacgtctgtccgtcccccatccgttgacagtccgcccacttacaagttcccaccttcagacgcttcaccgctctcgtcggtccccaaacgtcaagtccctggccggcgaacgaccgcttcacgggctttga

SEQ ID NO: 68637 - DNA, 65 bp, Heterodera glycines
tgcttcttgagaatgtcgacgattacgcaggcgaacattgtgaggccctcgggaaattgcaaagc

SEQ ID NO: 68638 - DNA, 332 bp, Heterodera glycines
atgtctaaaataaagtcaatagggtaattacaatccaattttatcaaatttttccagcagctcttcagggtatttatttcttttttgagatctgatctcctaaaatttttgcaccatcacctgatataaattttttaaattaattacatagaacactttattaattatcatagttattaaggttttgtgatagctaatgtcgtacaaattcaattaaaaaaattttcggatgctttattcagataaaatattatataaggatttatccagtattaaagttggtaaataattgctatattttgcttacaagggtcctcacaacaaataataaa

SEQ ID NO: 68639 - DNA, 76 bp, Heterodera glycines; identical to SEQ ID NO: 51235

SEQ ID NO: 68640 - DNA, 156 bp, Heterodera glycines
ttcataaatattttttagaacgtgctctgaaacgcaccaaatgttaattaaaagttaaataaggctctctgatgctttcactatcaaaaagggagatgaataaatattttaaaaatttttaattcctttttaaacaggccaaaaagtttaggctta

SEQ ID NO: 68641 - DNA, 1839 bp, Heterodera glycines
tttagtagcgtttgatttttattttttttttgacagctctaattagaaatttctaaaggattcgttgggaggcgaccgatgtgcgagattcggtggtactcggaattggctcgataaatcccgaatgtttcgagtaggatgctttccttttggctgtttttacactgattaatttagatttctactcgaagaatttaattccaaaggcattttgagagagataaatgaccgtaaaaacgaaacaaatgttcgacgccggaagcgaaaagatttgttacgactacaaattcttcggatcattgaatttaccctttttcgtgactttttgaagaattgtgctattttcgagcgaaattctggcactttgcctcagtcattgctcgaattgttcgactccatccgttttcatacagaaaatgacaatgtatggatatcatgtaattgcatctaaattctaaaaatttcatataaaaaggaccgcgacctgaacgttttgaccagtttgagactacattttgccaagctcatttcactgatcatcaacggcacgccaagtgagagagaaaaaattggaggttattaattctgttatcagttgaacaacgcgagaaactgttaccaccggacataaaacgttcgctgttctttttgtttttgtcgtggtgcggcagaaccattggtacaatcgacaaaaggttcggttttcttgctgattaaagtcattttacttttatgattcagaaagggcgtcgatgttggcatttctgttgaacaccatgccattcgggcgatgtgcgcactcgccacccttggcccaatgttcgaatgtccgggcagaatttgtgaagaagaagcaatgttccgttggttggaaacacttctctcgtcaacgaattcaattgtcagaacaattagcaatgtcaattatcccatttttgtaaattaattttcacaggtcgatgaaatttgtgagcagatcctttgccatattctccatttgaatgaacataatccgcgggtcggttttttctgccgttttggtcaataagccattgccttttagcttttggagcttgttgtccaaatgtgttacaccaaaaatgacttggtcggcatccgttgtttcaatgcaatttcaatgcttttctcacaaaggttttctttgtcaatgctgcaatccaatttgaattggttttgtcttattttagggaattcccctgcgagtacatttctcttctgtgtctttgccaatccttcgcttcgtccattgaattggcctccgtccgtcaaacggcctttttgctggtccaattgttgcgtcatcaattccttaacaacactttctctcccacaactctcacgccgataatggaaataagcagcagttttgcaacaaatggacagtcagaaatgtgagaggaatcattgcagaaaagttaaaactgttctaatttttagcactttcccgactaatcagtttggcatcagcaagagtttgtcctcccaataccctcagctgactatgcccatcttttcaggcaattcctttcggtcatcaattacttttcatattgaattggttccattttcagaaatttgctgtcgcctcgaatccgcccgacccaatcggcaattgtcgttactcgccattttgcccgaatggctgcggaatgtgcactttgtggaccccaactgtgaccttgtttcggtctctgttctggaaacggatgatgaagctgaaaaaagcggcactagcgcagaagaagaacaaagtgtcgcactgaacggatgcggatcggaagagagcactcagctgatcctcaacaatttgctttatct

SEQ ID NO: 68642 - DNA, 3427 bp, Heterodera glycines
  unsure (1)..(3427): unsure at all n locations
gtcgaggcgatgattcgtatnttgcaatttgctgagggcacttagtggcgtttgtgagacatgccttccgtccatattgaaagtgatgatcatgtggtacgagcatcagcagcgtgtttctataaccgaaattgggtaacctttttttgtttggtttgttttaaactgttcaaaatttagcgatgctcgcgacagggcaattaaacggacattggcggccagttaccttttttgcattgtgctcatcgaaattcttcctcagctgcattttcacccatgcggatgtgacgagcagatcaattttatcatcgacaattcgtttaaacaaatttcttaccgagacccgtaagtcaaacacaataaggtcttaccggaaatgaattatttggaaaatatcctacacttagagcactttttggaaacaattatgacaacagtcttttggtggccgagctgttcgcggaagtcatcggcattttgtcccaaagtcattcgaaacaaattcaaaaaacttttttcgaccacctcaatgagtacagaaaggacgccctcaccagctcaattgctttacggtccattatatctcttctgatgggaacgaagtttttcagagttcaggcaagttggcgaagatattaatcatatttgaaacacaattaaatgcattttcagactaaccaagtgtcggaatttgaaattggagtgggttttctcaacgaactcggctcttattttttggaggtggatttgaaacaaaaggatttgaagcatgcgttggctggacttctggttgagattcttctgcccatgacagcggtgggttttaatcacccgggatatttgttttaaaaaaacaattcattaattttaactccgtcaatttccaaatttttattacatttacaattagtttttcgaaaggacaaaaatgggcggattaaagaaaaacaacatgttttttgttttttcttatctttcatttttagcaaatcagaacagaaacgaacattccttcactgatttcttttgttgacaactttacggcccaacctacgaattagtgaacaaaaaacagcacaaaaatggtatattttccctcttttttgggtcgttttttacctgtccattcttcaggcttcttaccctcttctcacgtgtcttttgtgcattagtcaagcaaattcttccttttccacttgggttcaatttttgaatttgactcttgcaaatttgaagaacaaagattcgatggtttcccgaatggcactcgaatcgctctatcgcctcatttggtcagaattcacttttcctcctcattttatttattttcttttagggtttacataattcgaataagttgtgaagggaatacggcgacaaggagccgtgagttcatttacaaatttatcaaagttaaaataaaatttcactcttatttgcccctttttattgcttttttaggcctcgaaagcatttgcggaagtcttttccctcgtggctcgcgaaacttagttccgcgtgatgccccgctgaacttttttgtcaaaattatccattttattgcacaattcaaagttgactttgcatttaaagtaatgtttttggatgaaaaatcaaaaagaataatattcaaattactgtcaggagattattttcgatttgattggatgtgcgcgagcagcctctcgccaattggccatttatcccgaacgaatgaatgtcggtctgcgcgctttgatggtcatcgcggacggtctccagcagaaagagagtcccccgggaatgtcgagatcacttggtttttgacttattaaaattgtttaaatttttccgtttaagcgccaaatactagcgggacaattcatcgaacaaagcgcaattacatcaccaaacctttgtcgatggatgttgcccgggccattggtctagaacaatattatccgcactgtaggaaggcatttgatgccattttgcgaacattggacggacaaattggtaatttacaaaaaaaaacaaataggaaattaaacgatttgacaggccgaccgctgatgatgacagcgccacaaatgcgggggaaggaatacaacgatttaatcggcgcggacatgaaagccaaactggacttgtgattgcacattttagtcaaaaaccatattcaattagtcaaggtttcggacgtgcattgcggccattcctcgtcttcttccggacccaatgtcccaccaggacttgattgactttttgactcgaatgtgcattcatgtcgacgaagaacttcgaacaacggcgtaccaatcgcttcagaatttggtcaccgaatgccccgaatggcgggaggacatcattcacaatttcattcgctttttcatcagttcgattcaggtgggtgactatttcgatgtcatttttacatttacttttaaaggatacttttcctgctttgattgagtcaatggttcgtttgctgttgcaacttctcactgtttggaaggcgaacattctcatggagcagcaacggaagaaagtcgaagagtccactcaaaacctttcggataattttacgaagcattatccgtccgccagcgaatcgacagcgcagacgaacccatcgatggccgagaaagcaacgccaagccaacaaaaattggtgatgcaagcagcggccaatatcatcgccacgtccacatcctcaacgggcaacacaacttcctcttgctctggtgccattgtttcccattttttcaacttttattttggttcagatgggtctccccaaatcatccgttccatcatttcctctctttccttcgctgataatatcaatcccacctttgttttgcattgtgttgaaggacttggcattgctttgctgtgtcaaactcgtctttcaactaaaaaggcggtcattcaattacttagagaggtcaaacaattgatagaactgttcaaaccatcggtaagttttatttggtcaatacaatattttgttttcaattactaacaattaaacttcagaatcatgaaatggcggtcattgacattttggattccgcgactccgtacgttcttgacaaatacgtcgtgcatcttccggcgctggaaaaggttttagcagctaatattaataaattaattgtgcttttttattttatagaaaaaatggccaaaagatttcgcattggtttgtgagcgcatttcgatgttggagacagacgcgaatttagtgaatgtggccaatggcaatgagtgagttgacggccttgaagcattttaaggcattttatttgttcatttcccattgtttgggtatatgcaatgggatccatgggcctgcgctttgtcgggttattgcgagaagaaatttttgcccactcagtgctcaacagcttccacggtcagctcgtcatttccacatattttttta

SEQ ID NO: 68643 - DNA, 1005 bp, Heterodera glycines
atgccacgtatcatccagcttcaacaagaagttgttgataaaattgctgccggcgaaggtctttaaaacttaaattcctattttaaagcacttcaattttttaatagttgttgttcgaccaatgaatgcggtaaaagaattgcttgaaaatagtttggacgccggtgcaactgaaattcgtattgaaatcattcaagggggacttgaactcattagaattcaagtaaatcattatgaattattgaaatctcaagggggacttgaactcatttgaattcaagtaaatcattatgaattattgaaatctcaagggggacttgaactcatttgaattcaagtaaatcattatgaatctatcttcgaaatgatatttcgaatgaaggacaatgggcacggcattgcccgggaggacatgtcattggcgtgcagtcgttttgccacctcaaaattgcatgcggctgaggaattgcgatccattggcacttttggctttcggggagaggctcttgcttccatttcgattgtggccaacagcgtcacgataacatccaaaacacaatccgacaaatgtgctcatcgtgctttatatcgcggtgaattttggatatttacccggaatattttgaaaatattttaaaccaaaaaggcaggtgggaaattggagtccgattgttcctccgtggcgggtcttcaaggcacgactataaatgtggatcgcctttttcaaaatgccccggcaagaaaagcagcattacgttatccgaatgaagaagcgaatagaattgccgatttattagtcaaatacgccatccaatttccgtgagcaatgcaaaaaaaaaatcggcgaaattcattgttattttcactaaatgcagctcagtcagctttgttttccgtcgtattaacagcggaggaggaggcggcagttgtggtgactttcgcacaaatggaaacggagaccaacacagcacaattcgcacattactccatgccaaaatgtccaag

SEQ ID NO: 68644 - DNA, 49 bp, Heterodera glycines; identical to SEQ ID NO: 51181

SEQ ID NO: 68645 - DNA, 177 bp, Heterodera glycines
gttctccacaggatacttgtaaagcgattggcattatcagcaacaacccggagtttgccgatgtgcgtagcctggaagggctttccccgaccaataaacccagtgtaccgattctggcaattcctaccacagcaggtactgcggcagaagtgaccattaactacgtgatcactgacg

SEQ ID NO: 68646 - DNA, 650 bp, Heterodera glycines
atgccacggcgcgctttgctttcaatccaaacggacattgaacaggcggcgaaagcattgagcacggaaacggtgggccaagtggcgaagccgagcaaacgtataaaacggaatttaagttggaaaaaattggaaggaaaagcggaaccgaaagatgcacagccaaaccaagaacagaatctcggtggtagtcaaaaagaaggaggagcggagagtgttgaacagaacgcggagccaattgacgcgatggactcggccccgccggtccaccaacgctttgagctaatagggattaattggacaattaaaaagacgattaccaaaataagaggaatgcctcaccgcgtacaatgtgccataagtcctcagacagaacaaccacgcgggaaggaaagggtcgcggagagaccagaaacagtgggggtgccatgtgtggctgaactcgtggcattcggccgtcagaattcgcagcccaaaagtgttggcggcaagccgcgacaacacattggtcattatgaaaagcaattaagaaagagaggtcattccgaataaaaagaatggcactaattctgccgaaccattaaaactaaaatatatggaaaatcggaccaaatcgacagttatggcaaaaaaaaaagcattggggaaga

SEQ ID NO: 68647 - DNA, 198 bp, Heterodera glycines
tcggatttgttgaagaggaagggcaagggagaccaatattggacaatcagcaggtgaaacaatgaaaaactggctcattatcaagtttcgcttttaagcaaattcaccaaaatcgacgggccccctcaatttgcggctcaaaagttttggattgtccgcccaaaatcccactacaaatgtgcgctgaaggcgactaag

SEQ ID NO: 68648 - DNA, 761 bp, Heterodera glycines
agaattagtgccattctttttattcggaatgacctctctttcttaattgcttttcataatgaccaatgtgttgtcgcggcttgccgccaacacttttgggctgcgaattctgacggccgaatgccacgagttcagccacacatggcacccccactgtttctggtctctccgcgaccctttccttcccgcgtggttgttctgtctgaggacttatggcacattgtacgcggtgaggcattcctcttattttggtaatcgtctttttaattgtccaattaatccctattagctcaaagcgttggtggaccggcggggccgagtccatcgcgtcaattggctccgcgttctgttcaacactctccgctcctccttctttttgactaccaccgagattctgttcttggtttggctgtgcatctttcggttccgcttttccttccaattttttccaacttaaattccgttttatacgtttgctcggcttcgccacttggcccaccgtttccgtgctcaatgctttcgccgcctgttcaatgtccgtttggattgaaagcaaagcgcgccgtggcattttggtgccgtatctgctcaatttggtcactccgctttttctttttaaaatttaccctgtcttaggcctccgaagcactttttcgccaggcccaaaatcgccgatggatttgccgttctccgccaccttttccccattttcaatcgttgcttttcggcatttccgtcgcttctgccgttgctcttttgtc

SEQ ID NO: 68649 - DNA, 2859 bp, Heterodera glycines
tttcttcacatcagttcgaagcgattcgggaaagaatgtgccaattgtagaagcaggtgaaccaacagcagaacgacaataatcagcatggtaaatacggtagtgatactgtatttttgtaaatacaatttaaattttgtaataactaataaataaagttcagtatttttcagtttctgctgatcagttcgaagcgattcgggaaagaatgtgccaattggagaagcaggtgaaccaacagcaggaagagaaggagaaatacggtaaattttgatttagaattgtacatatttttaatttctttaagctgatagccttatacaacaacaaaatgccgaacagtcagaattttgcgccaaaatcgatgaattgtcggaaaaatttgggcaatttaaggaaatgcacgaagaatttgtaatgaaaattgatgaggtggaaatgatttaaatttttaaaatttataaaattcaaaactaaattattagaattcaaagaataacaaaatctgacttaatttttaattttcgttaaacagaaaatagaaacaaataatgacaattacataatattatttttattttttattgtcacagaaaataaatgcgaatgccgaagttgccaatgccacccaaagaaaaagcactgaattggaagaacaacaaaacaaattgaaaaattgtgttgacattttgaactaccgattcggaaatggtgaaattgcaaaattaaaaaattaaattaatattaaaaaattaaattaataattaaaaggaaattctgtaaaaattactgtttaaaaattttaaaaaacaattttaataatttgtccctaatattttaagcacttattgaccaaatcttggaattgcaaaatgaacagaagacaattttgggacgattgaatgaaatggagaagaaacagcaaaaggacgaggaaaaggaaacggaaaattacggtaagtaaatgaatgcctactgtaacgaagcatttttaatcttttaaaactaatttcaaaattaggcgaactgaacgcaattttggaacggattggcattgtttgtgagtgaaaattggattaattgttaatcattttaacttattaggaacaataatttttttgctttaagctgatcgtcttttgcaaacgcaaaatgagcagacgaaactttgtgccaaaattgatgcggttgaaacgaactcatacgaactctttggcaaaagtgaatgtgaaaatccttataaatttttgataatttattatacaatattataaaacaaaaagacacattttattaattgggatacaggtaaaacttggactcagcccacccgaaaaaatgacatgaatttgttataaaactgcttaatattgaatattattcacaaaaatgtatgaaaaagtggcgacatatagtgaaaaatttttttttatcaacatttgaaatttttcaaaaaaacgtcatttttgagtgaatttatcaagaaatatgctgttatacatctatttaatactgtaattttagcaataatgggtgataatattcaaattaatgcaatttggaatagacgcaagctcttacatttttttggagatgagcaaaaagttataaattggagccttgaaaacggcttgttaacaaatgtgcgttactgctatggaaaacggccgacacggcaccacaaaaaggaaatgcgttttgacaaaaacagaggcagggccggctcattcatatgcagtacttgtagagcagaaaaagctctttttgttgattcgtggtttgaaaatgcacatatgccactgtcaaaaattttaaggtctttttttttgttgtttttaactatattttttatattttatgaataattattatttagtattatgtactcatttgcgcatcaagagaaatacaaaaaatgtattattgaaacaatggaaagtgaaaatgacacgatgttaggaatggacagtgtcgcggcatggtttaaaaaaattataaaatcaaattaattatcaaattaggtatcactactgccgggaaatgattgttgatgattttttggaaagagaacaggagcgaggacaaatcggagggcgcggctcaatagtgcaattagatgagagcaaatttggaaaaagaaaattcaacagagggagaagaattgaaggccattgggtcataggtatttaagtttaataatattgcgctaaaaaaccgccgcacactcgactacggcggccagtaggtggggcgagactacgggctactgaagaagtccgcgcgtgatccgcaggcggaaagtacgtgttctacaaagctgccacatggctgtcccttttgtctggtatgttgtgtgccactttttatgggcgtaagtcggtgccggaaagagtccaaaggagcgaccatttctcaattcttatcagtgatcaaggctaactccgtttttatctgaatctgcccgaattttttaaattttattttggggtttcgaaaaaattttaactctaatttacagtaactaattatatgtttcggacacgtagcaaatatctacggtaatctgccactttttgttcagtactcgccgaacttatcgcattggtcggcttccccatctgcttctatctgtccattcattcatatggacttcgaaattgggagtttgactggtcttacggtgtcgcttggggagcattactgtaaggaagcaaaaacaaaaaatatataatttattaaaaaaacccctaattaagctttgtatttggcgcacttttgttgctgatctgtgacaaagagcatgaggaggtgtactacaaggaaaagacaatttacaatccgccaaacggatttgcatga

SEQ ID NO: 68650 - DNA, 1047 bp, Heterodera glycines
agagaaattcgtaccgaattggagaaacagaaactgatcacggaaaacattgtgttgaaggcgaagattgtcaatattgagcagcaccaaatgaaacagaacaagcaaaatgggaaagaggacgaacagcagggcgaaaacggtagggaaaattgatcatacggtagcagaaattatcaaagtaaagggcatttacaaacaagaaaaatacagtacataggttactgtaagttttgtttgcttttacattacttccaagagaaatatgttttaaattttgtaatagctaataaataaagttcagtatttttcagtttctgctgatcagttcgaagcgattcgggaaagaatgggccaattggagaagcaggtgaaccaacagcagaacgacaatcagcatggtaaatacggtagggtactgtaattttgtaaatacaatttaaattttgtaataacttataaataaagttcagtatttttcagtttctgctgatcagttcgaagcgagtcgggaaagaatgtgccaattggagaagcaggtgaaccaacagcagaacgacaatcagcatggtaaatacggtagggtactgtaattttgtaaatacaatttaaattttgtaataacttataaataaagttcagtatttttaagtttctgctgatcagttcgaagcgattcgggaaagaatgggccaattggagaagcaggtgaaccaacagcagaacgacaatcagcatggtaaatacggtagggtactgtaattttgtaaatacaatttaaattttgtaataacttataaataaagttcagtatttttaagtttctgctgatcagttcgaagcgattcgggaaagaatgtgccaattggagaagcaggtgaaccaacagcagaacgacaatcagcatggtaaatacggtagtgatactgtatttttgtaaatacaatttaaattttgtaataactaataaataaagttcagtatttttcagtttctgctgatcagttcgaagcgattcgggaaagaatgtgccaattggagaagcag

SEQ ID NO: 68651 - DNA, 622 bp, Heterodera glycines
atgtgccaattggagaagcaggtgaaccaacagcagaacgacaatcagcatggtaaatacggtagggtactgtaattttgtaaatacaatttaaattttgtaataacttataaataaagttcagtatttttcagtttctgctgatcagttcgaagcgattcgggaaagaatgggccaattggagaagcaggtgaaccaacagcagaacgacaatcagcatggtaaatacggtagggtactgtaattttgtaaatacaatttaaattttgtaataacttatgaataaagttcagtatttttcagtttctgctgatcagttcgaagcgattcgggaaagaatgggccaattggagaagcaggtgaaccaacagcagaacgacaatcagcatgggaaatacggtagggatactgtatttttgtaaatacaatttaaattttgtaataacttatgaataaagttcagtatttttcagtttctgctgatcagttcgaagcgattcgggaaagaatgtgccaattggagaagcaggtgaaccaacagcagaacgacaatcagcatgggaaatacggtagtgatactgtatttttgtaaatacaatttaaattttgtaataacttatga

SEQ ID NO: 68652 - DNA, 473 bp, Heterodera glycines
atgagcacaagcacaccaaacatatcactcacaacattcggcgacatcacttcagatcaaagtaacggcaaaatggcatcacaatttaaaaaattacaaaagttgccattcatagagagaggaaaagaattttgaaattaaaaaagggatatacataattaatttaaaaccattcaaatgctttgccatttgaaagaaggcacaaaaatttgaaagttataatttaaaatgtaatattcttcaaaatcactaaatacgatacaattccaaaaatccttctcccttttcagatcatctttggccctcttttgcactgtccgacgatgaaaatgatttggatcggttgcagggccagcgaaaagcacttgacgcaaaaatagcggaattggagcgacggcaaatgataatggagggcaccgaagcgacgccaaaggcaaaaggcaatttcgaaccatcgacgaacaatggaaatg

SEQ ID NO: 68653 - DNA, 96 bp, Heterodera glycines
aagcctaaactttttggcctgtttaaaaaggaattaaaaatttttaaaaattttattcatctccctttttgatagaaaaagcatcagagtgcctaa

SEQ ID NO: 68654 - DNA, 373 bp, Heterodera glycines
gcacaacccctgtcgccacgggatttggacgaattggaaacgtcaattgatcaatttcgaacattcctcaacgatcagccgcggatgcgcactttgctagccttaaaaccaaaggtccacttgctgttgaaccattttgtgccgttcgccagacaacaccaatttttggcacttttagacgagcagggtcaaaaagcattttgaaatttaagccctggattttctaggtgatgaagcattgcattcggtgtggaggcgattggaacagctgtggaagacaatgcctgatgaagaacaaatgcgacaattgttggaacaccattttgtgtcaaattggcttctcgacacaggaaaaatcgacgaaatgaagcgg

SEQ ID NO: 68655 - DNA, 375 bp, Heterodera glycines
atgtggttgacaatcagatatggtgccaaggagtgcaaaattgaggttgatattggcggcgaaacggacggtgaccaacaaaaacagtcgaatgagggaggagaggaaaaagtagaggaacaaaaaaatgccgacgaaaaacagacaaaggttgcagaaaaggaagaaatggagggcggaggaaaaaacgaagagaatggcactgattgtgaagcggcgaagccaagcgaagcgaagcagcaaatgccaacaaatttgggggaattgagagagcgaatttgtgcggagaccggttacgaaaatggcacaatgaaactcatacacaaaggtaaaatgccaatggcagtgagaaaaacgatggctgggtttggttga

SEQ ID NO: 68656 - DNA, 469 bp, Heterodera glycines
atggcggacagaaatagtgaattagagaaacaaaaaaaggtgaaaaaagggaaagattttaatattaattttatggaataaaaagaatattcaaaaacttaaaatgattttattaaaaataaattaaaagatgaattattttaggtgcttttagacttccgacaaaattcttgggatgctaaagcatgtcacgaggacctcgaaatttctagtgacaattctttgactgtcaaacgaaagggaactaatttgggtacttattgggaattaatttaattacttattaaatctgtcttattaaacatctaatttatttattatttattttcttcaacagctcagtatcgttccgtctttgctaatcatccaatttcgctgagcattcgtttccccgacattttttactttaaaatttcaatcaaacaaatgaaacggtaaaattaaatttgcagtagaaagttgaataata

SEQ ID NO: 68657 - DNA, 421 bp, Heterodera glycines
atccatgacaaaaccattcggcaagtgctcttcttcaagcagctcagctggcgattgctcaaaattgaggcgagtgcccacccgaagtgcggcgccgacgagcaaagggaaccgttgagaagcaaaacaaattcaccccttcgtttgctcaccgtcgacggaaaatgtcgcatttctatcaaaaaaagcagtcaaagtgcgttgcttttttgcgattgtattacgttgtgttctatagattgttctcttttggccggtaaaatcgaactgattctgaaggagatccattggctggcgacgatgctccacctgaggatggccatcgactttcacaaacacttggtggacctggccaactgtcagaagaaagcagattccgtcacaccttttttgggacaacgacagaacccgttcacggtag

SEQ ID NO: 68658 - DNA, 303 bp, Heterodera glycines; identical to SEQ ID NO: 60644

SEQ ID NO: 68659 - DNA, 304 bp, Heterodera glycines; identical to SEQ ID NO: 51570

SEQ ID NO: 68660 - DNA, 784 bp, Heterodera glycines
atgggtttggaggaccgcgaagtgtccattgaatgcatcaaaggcgcactgtttctccaaatgtttcaggaagcagtgaaagaaaaggcggatgaggagctgaaagcattaaacagtaagccagcaaaggttttccattgctaattccgggaccaggtcatttgggcgccgacgttctggcgccgacggtttggcgcctatttttgagaaaatcgaattttgcctttttgcatggcaggcgccaaaacgacccttgcgacaaaacgttggcgccacaacgatacggaaaccggataaaacataaatttttttcaatcccagatagccctaacagtattaaagttaagaaaacactgtcttctagtttatttttataggagcattttatttctgctgtttaaataattagttatttttcaaaaatttacttactatcaaattatcagacataatcacttttgatcacttctataatgctgtttaggcttgaaaaatcttaagtttgaacccgattttggacataggcgcaaatgccctggctcaaatgtggggtaaacattgttaagcaaattagcaattttttaaaaattcaaaaattatatattactgagaggcggaccaagcgtctcaaaattttctgaaaaattccattgaattccggtttcatccggattctaatgaaattacaatcagccagaaaaaaaaattcaatttgtaggatattgttggtttcaagatcacctagtaaatcacgaaaaccatatttctacaaaacaatattaaa

SEQ ID NO: 68661 - DNA, 1846 bp, Heterodera glycines
  unsure (1)..(1846): unsure at all n locations
atgttccattctgtgcggaaatcgtttcgctcaaaaagttcaacggacccgaacaaaagatatggttttatggaccttttaaaggaaatggaggatacaattagaggaaatgaatttttcatgaaaaaagtgaaggcgattacgaagaaagccggaattaaagaaggaggtttcttaattattgcaaataattaataagaaaagatgggggtctttctgaatcgtttgggcaacgggataatttgtagtgatgctcgagaccgaaaatttcccaagactcgagaccgaaaacgcggaagtcgagaccgaaacgaaaaaacccgagacttttcgtgagtcaagactgagactctcgagcatcactagtggtttgggcaccgccgtttgtgcgtcatagtaatttagaccctaccatttaagctacagtagttttgagtgtctatgtttgtgccacggggtcccgcgttagttgggcgccttaggttagtgcactcatatgaagggatgggaatttaaggcacgaaaaatctacaaaaagtcgactaaaaaagtaaaaatttgtcaaaaaatcaggaaaaagtcataaaaaacgctaaaaagtaaggaaaaattaccaaaagtgaaaaaaaaaatttaccgttttggaggcggagattttaaagtaaacattttgcctgaaagaatctgataaagttgggcaattgtttcaattcccttagtcttctgaataattacgaaaattttctgttggatttctattcaattttcactgatcgaaccttttcaaattttgccataaaaagtgaaaaagtcccccaaaaaatgataaagtgccaaaaaaacataaaaatccaaaaaagtagaaaaaattcaaataaaaatgcatgttagaagcttcttgaacaaagtgtaggacagtttttaagtcatttgaaggtcatataaaatcggcaacaaaaagaagtcatttgactaaaatcaaatccctaattaattgtttaggattaattgtttaggaggattcggcgcattggaccaatattatgcaaaagaagctcgtctggtttttgccaaaggatcgggccaagattttctgcgcaatatcattgacctcagccagtggatgactgcgaaggaggtgcgcgagtgcgcggaaaaattcaaatggatacgcgggctcaacgccaaggagtcgtgggacattgaagtgaacggaagtggaaaagcgtcatcagtgtcggctgatcttcgcaaagaccaaagcgataaagctattaatgatcggcataatgaagataatgcttatggtggtacttttggtagtgaacgtggtggagaagacgaagatggaagtggttctggtagtgaacaacgtgagtatgacgaagatggaagaggttctggtagtgaacaacgtgaggatgacgaagatggaagaggttctggtagtgaacaacgtgagtatgacgaagatggaagaggttctggtagtgaacaacgtgaggatgacgaagatggaagaggttctggtagtgaacaacgtgaagatgacgaatatggaagtggttctggtaaagactgataaatcttaggaacagagagagagacagagagagagaggtgaagagatagaagattaagttagaagtgaaaattttagtttttatcccaaggttttcgttttttatttctatttttgtccgaattttgcacattcattttnanttggataaatgtttttttgggattgtttagggtggttaaaaaaatatatttttgaaaattaattgaaaatttatagaaagtggtaattttttgntngnaatttatttttggtagattttaa

SEQ ID NO: 68662 - DNA, 1129 bp, Heterodera glycines
atgaacacttggaatttattcattttcaccaacagaacagtgatgaaatgggaaatgaacaaattgaacaagtggccaattggggtgatgaaaacattcataaaaatgctcagaatgacaaaaataaagaaaatggtcagcaaaaaaagagaaataattaaaaaatttgatgcaattaaagaaaagttaagggaaaaaggacaaaacacaagcaaagacaaagcaaaaattgaaatgaaaattggaaaattattaggattaaatcgaagtttaatatataaatggaaaaaagaattaaatttaaataaaaacaaaataaaaaagaatttttatgatgagaaaaagcgcaaattcattgaacgatttgatgaatttaaagaattatatggccaaggcaaacagaaagaatttgcgaaggaattgggcatttccaaacaaacatttataaaatggaaaaaagaattggtgccaaatgaccacaaaagtaaggcatttttgttttaatcatttaatataaatttacatatattcagaagaaaacaaattaagaaagatgaagcattatttgcaaataaaagaagcaaatccgaaaatgagcgacgaaataattgtgaaaaaatagggaattggatggacaactctgaatagatggaaaaaggaatttggttcattttaatatgtgatttttgaggtagcctatcaaagataataattagtattattgtttgtcataattaatggcattttacatttgtttgtatttaatggtcgtaaaatatgacaaaagctacagaaagtttttaaattttttttcaataaccctaacttcactagtatgttgttaaattttttaaaatttttggttaatttcattttattaattattgttccaaaatattgcatctatcattcaaaaattcccatctttactgaatggaaaggagtcattggtcatttttcagttctaaacacaatttaaaccataaaaattctcatttcgccagaattttcataaaaaatgctggaaatgattttacaaaaatgtaaaagttatatcaaattcaaaaatgtttaagaaacattattaacagtgataaatgtgcttcatttgatttaccaaaacaaaata

SEQ ID NO: 68663 - DNA, 273 bp, Heterodera glycines
atgaataccatcatcatctttctgatttcattttcctgcatttttctggcacattttctccaatttgttcatgctgctcctaaagtgacagtgtgcttcggatatggtgaaccgttcacagctaaagcttatttggggcatgtctttaagcgtaattatgatacacgtgctgttcaaacatacaacgggaaacaatgtgtgaaaattaatgcacaaaactggtcgcaatctgatggtaacgctgcaatctttttcctgcttgaaaatggaacg

SEQ ID NO: 68664 - DNA, 76 bp, Heterodera glycines
aattactggagttagcatcatagcagtgcttttctttgtctttttgatgccctcgcaaaatctggttcgcttctga

SEQ ID NO: 68665 - DNA, 998 bp, Heterodera glycines
tcagtacatcgacatgatgagtcatgctgagtacccttcgttcgactactcatccatccgttcagggattgtagcaggtgagggaggacataggacgacacgtgctaacgccaccaacaatctgctggttttaattggctaattaattggcttttccttaggcgcgccgtgccccgtcactctctgctccaggcaataaaatgacctcctccgaattgttttctttgacttttatttgtaaattcaagattggtcaatgagttgggcatgaaggatcttcaagtgtgctatgggaccaccgaaacttcgcccgtttcgtttatgtcaattagggaggatccgccggagcagagaattcgcaatgttggccatattatggaccatttagaggtgattaggctcaaactctcgctttgacccctcccccttttgcccattcccttttcaggcggtaattgtagacaaagaaggacgagtgaccccccgcgggcaaagaggcgactgtacgtgccaatcccaccccccccccattttgcccattttggcattacttttccctttgtttgagtgtttgtcagaggctattcggtaatgtacggctattgggactcggtcacgcacggctcgtccgaagtaacaaaggaccgttggtataggacggggtgagcagaaatttttatggtttttcccgaaaaaccctttatatatttttaatttaattttgtgtcttttgtccgtgggtcttttgatgagagcacactttctttggcattgccttccctctccagtgacattgggctgatgcattcctccggcaccgtctcaattgttggccgttccaaagatatgatcgtccgagggggagagaacgtttatcccactgaggtgatttgattggtctctctgattggtccttcaacattatctcttctgtccttcttcaaggtggagcagttcatcgacagacaccctggtcagtcattccttttgccctaatt

SEQ ID NO: 68666 - DNA, 342 bp, Heterodera glycines
atgcttttacaaaagaatgggcacgattacgtgctttgttcgtcgggcttcaaccgtcaaacacaatttttgcaacaactgtacaacctttgcagccgatgataatgaaaatgaacaatcaaaatcaatcgccaactcggattgacaattttttaccaaataattaaaaatcatttagcataaatagggctaaatgtatgataatatatataattatattttgtaattattaatgaatgaaacatataaatatacaatttcttctttaaatacttcaaacttcatgagattttcttaatgtcttgatgagttatttagcatttttggtgtaaaaagaataaa

SEQ ID NO: 68667 - DNA, 506 bp, Heterodera glycines
atgggacaaaatgaaagagaagaaatagtcgtaaaaacggaacaaattgaccaaaaagagcaaaatgaaaactcagcaacagttgatcaaatgggtgaagaaatgggaaactatccaaatgatcaacaaaaaagagaaataataaaaaatttgaagcaattaaagaaaatttgagagcaaaaggaaaataccaaaacaaacacagaaccaaaattgaattcaaaattggaagtgttttaggtgcaagtcgtaaaaaagaattaaatttgaataaagtcaaaatagaaaatattcattttgttgatcaaatggatggagaaaatttaaaaagtccaaatgaaaaaattgaaacaattcaaaaatttgaacgaattaaagaaaagctgaaggaaaacggaaaataacaatggaaaaacagagttaaaattgagacaaaaattggacaattattaggcacaaatcgcgacaaaatacaaaaatggaaaaaagaattaaatttaaataaa

SEQ ID NO: 68668 - DNA, 544 bp, Heterodera glycines
atgacaacacggtgcgcacctccaccaacgaggtggtccagttcacgtttggcgacgacggcctcgacccggcgtacatggaggcgaaggacggccgcccggtggacttccaacacatgttggcccaagtgcggaacaccaactgcatcagtaccaggtgggcggcgaaagggtgatgtactgcctcgcaaaaaaattctttttttcatgaaaaattcggtaaattttgacactgtcaattttcatatgtcataaaaaatttttttttaatgaatcaattaaaaaaagagcctacgtaaacaatttaaatgtgcagtcattaaaacagtttatacatcaaacataaaaaaagagttctctgtaaaataattgaattttgggtcattggttcttgaaaaactcaattcatcccatttttatgcttgaacattttcttctctaaaatgtttcttcccattcgaaaatgttctttcgattaattttcaatatttttgcaatttttccatcactcattttggattttcatttttcatttgccaataaa

SEQ ID NO: 68669 - DNA, 369 bp, Heterodera glycines
atggccaactccgtccatgctgaacatcaccagccgggggctctcagcacaattggcgatgtcaacggcgatttcgggctggtcaaagacttcacatcactgctcggattcgattgcattttgccggtgatgagagactgtgaacagaatgaaaacggcagagaagcagaggaagagggagcaaaggaggaaaatgaggaaaacgggggaacgaataagcagattctgctgctgaggaagaatgattacggaaggacgaaagtgtcgcaggacggggagggaaaacggcacgggggaagagacgagggccatggggcgccaagggggacgggagaagcaccaccagtggcgacgacaggggcaagtccg

SEQ ID NO: 68670 - DNA, 630 bp, Heterodera glycines
  unsure (1)..(630): unsure at all n locations
atncgctatttccatcttgccgttattcttctcatcatctgtcggggctgtcacgccgagggagacccgccgccgacggagccaccggctgctggtgatgacgggccgctgaacatggaaaacttcgtctgtgcaaagaaggacacgaaacacggcttcatcactcagaaggacgggatgatgtgagttacaatatccaatgaagccacggattaattgctttccaacttttcagtgtcatggactcagaaggagttcccccggatgcatcgttgtattatttccagcagaaaaacgaaggaaaactcagcattcggatggctgtggaagaggagtgcaaagatgccttcgacaagaatgtccaattcaccgttgataacagttgtgagaagaaaccggtgagactcgcattttgcatcgactaataaagagatgttttaacttgtttcatttcagaatgacggaggaggaccgtgccctgaatctattcccaattgcaaattcttcgacatcgtgtgccctatcacaatgagagcggttatcgacccttccgacgctggcgtcttcaaagccaaacttaaagatcttgcgaacctttcaaaaacgtgcaaaaaatggcagggattcgtt

SEQ ID NO: 68671 - DNA, 776 bp, Heterodera glycines
  unsure (1)..(776): unsure at all n locations
ggggagcaaaaantccaacagcagtaattaatagtacagagctatagaggaagctattcccgaaggattcggtctccccataaatctgggcgcatcggttcggggggaccgccccgaaaacaaaaaaatcgattttttcaagtgtccgtttggggtactcaaacaattataggggagcaaaaatccaacgcagaattaaagtacaggctgtagggaagctattcccgaaggattcggtctccccataaatctgggcgcatcggttcggggggactgccccgaaaacaaaaataaatcgattttttcaagtgtccgtttggggtactcaaacaattatggggagcaaaaatccaacgcagaattaaagtacaggctatagtgaagctattccggaaggattcggtctccccataaatctgggcgcatcggttcagggggactgccccgaaaacccaaaaaaaaattttttggataaaaattatttaaatgaactgactagataatatttaaaataggttatttctcttcctttcagtatccctgcaaagtttggggcgcttctgataagtttctgaaaaaaaagataagcctaaactttttggcctgtttaaaaaggaattaaaaatttttaaaaatttattcatctccctttttgatagaaaaagcatcagagtgcctaaactagcatgtaaataaaatttggtgcgtttcagagcattttgtgaaaaaaatatttatgaattaattatgcaaaaaacaaataaaaacgaaagact

SEQ ID NO: 68672 - DNA, 909 bp, Heterodera glycines
atggcacttatttgtttggcatcattgcctctctcttttgttgaagaccaagccttgaaaaatttattgtcaattttagctccaatgtacaaaataaggtctaaaacaaaaatggtctttaaatctttaaaattttagaagtcgtcggcattttacaagtgatgtcctgaggaatttgtatgcgaatgtgaaagctcgcgtaaaagaggacattcggaaaacagacttcatttctcttacaatcgatggctggagttctcacgaaggaaaacattcgttattaagtgtcacagttcattacattgacagtaatatggaaccgacttttcgcgtgatggaagcagttccaattaaggttcggttaaggggtttttacttaaaaattttgcagacatttagggcagtcatactggcgaaaaaatgtgtggtttgctgagccaagttcttaatgattatggtgtgaacgctgaaaaagtgcaccttattgttcgtgacaacgaaagtgcaatgcaaaaagcgactcgtattgctggttttgaatcactgcattgcactgcccataattttaacttggttattttgattaatcaaaaatttcatgattatcttttctttatttagtgtgtgtgggatgggattaaaaagctgtcaatcgatgcgttattagaaaaaattaaaaaatcaatcagaaagatccggaagtcacgggttttgggcgatgaattttcggcacttcaagacgaaactggcataccacagcgtaatttagtcaaagtaggcgccaaatctttttttatatttcaatgtattttttagggaataacggttcgatggaacagcgtttttttaatgctcgaaagattttacgaaaatgaggaagccctggtcttaatgccggcaaaagactaa

SEQ ID NO: 68673 - DNA, 387 bp, Heterodera glycines
atgtcgacaatgttttgtgtttcatttcaatttacagttattagcggtctaaagacatgcgcaccaattaatatgctttttaattcatttgtatttgaaggaggtaaatacttctggtattcattcaatccactttctaacctgaattactaatttaaatcattatttagtttgataattatacacttaatttttgtaatctttaattcatcgcaaatttgaaatattttatttaaatatatttatgattattttagactatttctttattttttcgtaaaataatcaaatattttttaatttttgaatttttccaattcatattttcaccaaactcatttttcaaattaaaattatcgaagcttttctagatattttaatacatca

SEQ ID NO: 68674 - DNA, 925 bp, Heterodera glycines
atggatgatgaaacgtgcttttgcagtggcgctctgtaccccaagcctggtgaggcccccgacgggtcgagaatggtggttcagctaaactgccgctgcacgggggcctaccacttggggtgcatcgccaagcacctcatcaagcgtggtggcaaatgccccacctgccgcaccgagacaattacggagaattgtcgtccaacagagcgctgggtgcagttgatgcgcgatgcaggagatgtcagcgagcaggaggaggacatcgtctttttagacggtgagtttgatgaattaaaaaatatttttaaaaattcaaaaataataatttttatcaaattgtagaggtgctacagccccaaacaccaccaccaccagcagcagcaaatgatgtggcggaaggcacggcgcaggcgagggggcgcgggcggcggacattgcgcgacaattttcggtaagccaagaaaatttttttaattttcgaaatttgactttttttaatttaaattgatttaattaatttttttttaaattccccaacagctatcggatctcggccatcgtcaccagcagaaaaagcctgagtgcgtttctcgcgaactgagggtccactgggagggattttccttcgagcaggattcgtgggaggacgaggcggccatccgcgcggtaagaaatcattaataatttaattattatataaataaataaaaacaaaataaattccagcaagcgccattgatatatgtggcgtgggaggccgcccacgacgcggggcacacaccggaacacaggagggtgttcccggtgcgccccgcgtcgtggatgaccaacgttcgagtgcagagggatttgggagaggccgaaagggcctatcccgggcggcgcacggcggtgcgacaaatttttggtaaaatgaatttaaaaa

SEQ ID NO: 68675 - DNA, 953 bp, Heterodera glycines; identical to SEQ ID NO: 40292
  unsure (1)..(953): unsure at all n locations

SEQ ID NO: 68676 - DNA, 689 bp, Heterodera glycines
atgccaaaaagtgaaatagacggaaagggcggacaagtgccaacggaaaacgaaagcgcaagcgaagggacaacgacacaaaggacgacggaggaaggaaaagcggaggaaaagggaagccaaaggacgacggaggaaggaaaagcggaggaaaagggaagccaaaggacgacggaggaaggaaaagcggaggaaaagggaagccaaaggacgacggaggaaggaaaagcggaggaaaagggaagccaaaggacgacggaggaaggaaaagcggaggaaaagggaagccaaaggacgacggaggaaggaaaagcggaggaaaaggaagggccaagcagcgaagaatcggctgaagaaagtgtgatgaaagaaagtacaacaataaggacgacaatggaggaagaaaaactattgggggaggaggaacagagcaattcaaagcggacaacgaccaaaagagcgacagcgaaaggggcaaatttgaaacggaaagtgcccccggggctaaagcataacagacgaagggtcacaatgagaacgccaatcgccgagggaaagcgccaaaaacaattcgatgaaagtgggggagaaaccggtttacctcagttcggccccaacgtgtttttcaactataacttttttctatgtcattcaaatccaacaaagttgatatcattcgaaagcttaat

SEQ ID NO: 68677 - DNA, 946 bp, Heterodera glycines
atgagaacgccaatcgccgagggaaagcgccaaaaacaattcgatgaaagtgggggagaaaccggtttacctcagttcggccctcacggttcggccccaacgtgtttttcaactataacttttttctatgtcattcaaatccaacattgttgatatcattcgaaagcttaatgtatttagaaactttttctaagatattgcttcgcgattagacaaataccaaaaaaagttatacatgaaaattgcgaaaaactcgaaattttttttccaggcttgaaaatcttttcgctttttgtaagactaatagagcatgttaagattattggattacaaataaaaaagctatagtggaaaaacacgttggtgccgaaccgtgggccgaattgagcgagtccgggagaaacacagaaagggtggataaaaaaaccattgttcagtgaaaggcgaggcacaagcactttacgactacgaagaggcaaaaagcggggaggacggactcacggggaaaaaaagcgccgcttcaaaacttttcgaagtggaatttttggcatggaaagacaaatttttgcgtgggctgaaagtatttgcaggcacttttcaattatgccgaaatattgcagattatttaaaggaaaggaaacgaaacgcacgacaaaagcgaattccgaaaggcgagacgaaagaatgcaataacggactaatggcacaaataatggccagtgccattattgaggacagttcaatatcgaaaaggctgatcaaaagagcactcaaattttctttcccagaatcgcagtttgacatcatttgcgccgcaggaggtgccctttccctttttaatggagcagaaaaagacggaacttcaggagtgctcagttatgccatttatggaagaagacattgccaagtgaaacggagaagtgtgacttgtttggcatttgaataa

SEQ ID NO: 68678 - DNA, 119 bp, Heterodera glycines
ataaatcgccttttgctttgtttttaattgcccattttattgttgcgcttttgtcgttcgaattggttgttcaaaccatcacaaatgttttttgcaaagggctttgttctgttcggctt

SEQ ID NO: 68679 - DNA, 674 bp, Heterodera glycines
atggactgcatcgtctgctccataacccgggtcgactttatcctgagaccgccgtacacaatgtgcggtctgttgggcatcctaacgtcgttcgaaaagggagctaatatggactcggtgcatgtattagtcgtagtttgtgacccagcactcgaataaaagtaggaattttgaatttttcaaattatgattttttgttcaaatttagattaggaaatcggaattgatcaaaataattgaaggattcgtgatcggggaccccaaaaaccccagagaataaatttttatgactatcacaaaaaaaattttgcaaaacaaaagggtccccccttttgaaaaaattttcaaaacggccacttttagactagcgccgcaattttcatgtttttcatgtataacttttttggtaattgtctaatcgcgaagtgatacatagaattagattcgaaacatgttaagctttcgaatgataccaacaatcttggatttggatgtcaaagaaaaaagttatagcgaaaaacataaaattttttgaaaatctgcccacagatcccacacaagtacccatttatttatattttcaggaaaagtcattaatgctaaagaggtcgaaggaacaacaagtcttgctaactgtacgaccattaaaaacagcacaaatttttaaacaataa

SEQ ID NO: 68680 - DNA, 216 bp, Heterodera glycines
atgttcaacatcgaaggcccaccgcgagaccgagaagcggccgagtgagtaccttcggtgcaggaaaattattaaggaagagagttcattatttatttattttttgcataattaattcataaatatctttttcagaaagggttctgaaacgcacctaattttatttacatgttagtttaggcactcttatgctttttctatcaaaaagggagatga

SEQ ID NO: 68681 - DNA, 81 bp, Heterodera glycines; identical to SEQ ID NO: 58971

SEQ ID NO: 68682 - DNA, 52 bp, Heterodera glycines
tggtaacgacgaaatgcgtactggtacaaatatttgtttccaacaattcagg

SEQ ID NO: 68683 - DNA, 813 bp, Heterodera glycines
atggagccgggcaagacggagctggtgccgggaggagcgcgagccgaggcgaagcaggcgatgaccaacatcggagaacttctgcaggctggcggatcatccttcaaacacggtgtgtgagcaattctccaggattcatcgtcttcatgaattttacctcccttttttcagttgtgttcgccaagattttgcttgctgacatgagcgacttccaggcggtcaacgagacgttcaaaagctacttcaccccggacacgtaccccgcccgcagcctctgccaggtggtcaaaatgccgaagaatggacgcgtcaaaatcgatgtggtggcgatcgctgagaagccctagagctgagctgaagtgcgcaacagatgaacaacaaatgtacatatgtgtattgtatattgacgtgatcatgtattcgatcgtattgtattattgtatgtaataactgtccttgttctgatcatgactatgtgtatatattgtattgttcggttcgcgatcggataaatattcaaatggaaaattatttttgttaacccaaaaacagcttagttaatgagatggataccattcgctagattagtgctaatttagtgtgcccaagttttgcagatcccatacggagcctcgcactcttcttttggcattccttggcattttcttatgacataagttgttagcatttttctcatcttctttgtttcttgcaataattccgaggccccaaaaattttcggaagtcggaattccgaccccaaaaatgtcggaactcggaagtcggaattttaaaaaatatatatataataaa

SEQ ID NO: 68684 - DNA, 1064 bp, Heterodera glycines
atggctgctgctccgtccattcgtatcatcgcgacgtccaaggcgcctgctgcgacgggctacaggtggagcaaacaatggatgacaattgagaaagcacaactttatttgcttttctgcagtcaggcagtgctcgtcaacaaccagacgctgtacgtgagcggccagaccgggatgatgccaggaaagacggatgtggtgtcgggaggagcgcgagccgaggcgaagcaggcgatgaccaacatcggagagcttctgacatacgccggctcatccttcaaacacggtgtgtgagcaaaattcagcataaccatcatcgttgatttccgcccctttccagttatcaactgcaacatcatggtggccaacatgagcgacttccaggacgtcaacgaaacgttcaagaacttcttcaccgcggacacgtaccctgcacgcagcttcttccaggtggtcaagttgccgaagaatgcactcgtcatgatcgatgcggtggcggttgtttcgggccagtgaggagaagtgcagaagtgcgcaacagatgaacaacagatgtacattcgtgtattgtatattgacgtgatcatgtattcgatcgtattgtattattgtatgtaataactgtccttgttctgatcacgattgtatgcatatattgtgttgcaccgatcggataaatgcccattgcattctgtatttttgattctcgttagagttcgatcagaggttagcgaagagccattccagcaagttaaaattttccgaaatcgaaaatccggcaaattttcctgaaccattccccgctatgtcaaagggttactctttttttgaagttaatttgggtctccagcaattcaaaaaaccagattccctaagtagcaacttaatatgactaaaatgttgaatattattatccttttatccacctaaaaagcccaaaagacatgagacgcactttcctggacaacggcatttttgaaactgcccttgggcacacaaatacagccatcggcattttccattttacaaaaacaccctcaatttgatggaactcctcagcaaca

SEQ ID NO: 68685 - DNA, 1272 bp, Heterodera glycines
atggcatgggcggccactgctgaggaaatccgggagtcccaaatgagggctaaggcccaatatgataaacaaaaccgagttctggatatccaagtgggtgacagagttcttttgaagaattatatctctaaagtaggcacatcaaagaaattccacctaccatggagaggaatttttagagtagtgaacattgatggtgtaaaggtaacaataacaagctgtaatgccccgcaagcaaaccctagggttgtgcatatcaaccaattaaagaaatccttcgatggattaggtcctgcctgtactgttcccgaactcactgagaatgaaaaagatgcccttctcggtgcacaagctgaagaactccaaaatcagcctggctattctcacactcccaattctaatcctgattttgcctcatctgaaaacccacaaatgccaagtgatttcaatattgcccctgaaacctcagaaaatgcgacaaatccccaaccctcttacggactgcgaaatcgcatgtcccttcgtcgtcctcataaatttgattaaattttattctattgctaggctcaatacttttgaaggttctaaatcatttcttattttaagctaaatcgcattaaagctattattctgtgccttcaaatggagagcgtctctctcgaccctggtgaggagttccaggaggaattgacggaagaattagaagaggagttgttaggaaaagaagagaagtgggtcacggcccaaaattctgagaatgaggtggaaggagaggaaaagcagaaggatgagggtgaagaagttgagttaaatgaggacgctgagaagaagaaaaaggagtgggctacggcccagaactctacgaacaatgaaaaggaggttgagaagtgtggagagaaagaggttgaaaagagtaaaaagaaaatgaagtgggttacggcccaaaatcattctgaaggcttcggaaacggtggttttggagaacaaaccaaaaaagttgttgaagtgcttcttttggatctagagacatcggcgcagataagagaatatgtggtctgccaactccaaagcaaaggagttgtgttggtatacccaaatccttcggaaaaaaacaactttccgtacttcatctttcttccggatgtgtttgatggcaaatttgaacgtccattgttgcctggtgaccgtgtctttgttgaagattacgcttgggtggaaggaaaagagcatttggacaagtcaagatggatttatgccgaacaaattcgctga

SEQ ID NO: 68686 - DNA, 153 bp, Heterodera glycines
ggagccgaagcttggccatggattgacgacgttgtggaagaagtggaatgtgaatgctttgaagaatgaatgagcttatgtgggttctctgtggataatggaagtaatccttgtacctaataatgcaacaatccgagtaaaatcttttttgga

SEQ ID NO: 68687 - DNA, 1471 bp, Heterodera glycines
atgtctttagaaatcattccatttcaccgcaggcgagaagccttatcaattgagaatggatgtattatttatgctgaccgggtggtgatccccgcatcacttcagaaggaagtcttgcagcaattgcaccagggacacccgggaatgaaacgcatgaaaaatctggccaggcaatatgtttattggcctggaatggaccagcaaatcgaagactccgttcgatcttgccaagcttgcgctgaagaagcaaaagcacctgttaaaactcttcttcactcttggccaaaagaagacggcccatggaaacgagtgcatattgactatgcagggcctttctttggaaaaatgtatttaatttgtgtggacgcattttccaaatggccagaagtctttgagatgagttccaccggatcagcagcgacgattgacaaaattcgttatctgtgctctcggcatggacttcccgaaacacttgttaccgacaatgggacacaattcacttcaaatgaatttaaggaattcacgaggaagaatggaatttcccatctgttttcggcaccgtactgcccgatgtcgaatggacaggcagagcggtttgtcgacactttcaaacggacgtttcgaaagttgaaaaaggagggggtagcgaataggttggatacgtttttgacaacctatcgtaccactcctaatgagtcgctggctggaaacaagagccctgcagaaatgtttatgcagcgcaaaatccgaacgactttggatcttctgcggccgaaacggcgcccaatcatcgaacgtgacgaaacgatggaaaggagtttcaatcgccgtcacggggcacaaccaagagaattcatggtcaatggcaaagtttttgcccgacatcgaatttctcaaccatggaaagccggacgtgtcactcaaaagaaaggagtaatttatgacgtgtcattttccgacggatcgtctagtaggttccatgcgaaccaaatgttggttcgtcacacgccggactatgaggaagaccccttggatatgcttaatgatgcatttgggcttcctctggccccatcggtggtagaaaaccctgatggacaggctgaagttcaacttcccatgcgtgccgacacaccggagccactgaacgatggaccactcgacgaagatgtaccaagtatccccgaaggacggccgaaaagaaacagacgccctcctcagcgcttttcgccgggatgatggacaaaccgattctttttgatggaggaggtgttaggacgggtcatatttaaattgtatttggcattctgtcccctttgccacgtcatcattttgaccccattccaattgtccttaaatatcctcccatttctctcccctcgttgttcatcaccactcattcattttttttgtcatttcccttcacttgaccccaatcaatattatttgtgtgccttgtcctatttaatttgga

SEQ ID NO: 68688 - DNA, 3435 bp, Heterodera glycines
atggcactgaccgtagaacagcttttgcaggcaatcgcacagcaaaatcaaaacccgtcactttcaggcattgacttgtttgaattgggcgatgaaagcaccaacattgaggattggttgcagcaattctgcttcgcgttggactgctcagcgccaaatatcaaagatgagcagaaggtcaaacttctgatgacgaaattgagcaaggcggcattcagcgagtacaagaagtcgtgcctaccgaaggatgtgactgactacaatttcgccaaaacggaggagcaactcaaggcattgtttgccaaaccacagtcggtgtggatcgacaggtatgagtgcctccgggctttcaagagcgaggatgagaacttccgctcattcatcaatcggcacaagcgccttctccgggattttgagttcaaaaaactcaatgaagagcaattttattgcttaatgctgttaacagctttgaaatccccgaaggatggcgaacttcgaaagagaattttgggcaaattggcggctgatggcgacagggcaaaatacgataaggtcgtggaggacctacaaatgtatttgtccacaattgctgaagctaaatgcatcgagcagcagccagccccgccaaagcagattttggctgtaaagcaaaattgtgcagtgagaaccaaaggctttgaagcacgtggtcaagtgcaacagcagctgaaggtgtgctggcgctgtgggcgaagctcacattttccaagtgtatgtccgcacattaaagttgcgtgccggaagtgcagcaaagtgggacatttggaagcgcagtgcaaccaacaccaagcatggctgataaggcaagggaaaatgcaaagccgtaagcaaggcaacctcaagcttggaggtgtgctgatcaattcgatgaaccaaccgaaacggctgattgaatgccctattaaaatgaatggaaattttgtggaattcgcgctggactcaggtgctgaggttgtagtggtcaatgaagagacacatgaagcgatcggaaaaccgaagctaagtccatgcaatgttgaagcgaaataccacgacggaacaaaatgcacccttattggaaaaggggaagctgagttcgaattcggagggataatccgaaaagggcaattttacgttgaggcaatccgaaggatgcccattccaaccaatgtgtccactctccgatcatttttgggaatggttaaccactaccaacaattcgtaaagaatttgcggtttattcgccaaccgttggacgaccttttgaagcaggacacggtctggaattggtccagcgaatgtcagaaagcctttgatcaggtcattggcacgcttcagtcggaccaactgctcacacattatgacccatcacaagaaataattgtgtccgctgatgcctctgagcatggtatcggagcagttatttcccatcgttatgcggatggaagcatcaaggccatcgcgcatgcatcgcattcgttggctccggcagaaaggaattatgcccaaattgagaaggaaggcttagccttaatttatgccgtgcaaaaattccacaaatacctttatggaaggcattttatcctgcaaacggatcataaacctttgctgtcaatttttggcaacaaaaaaggaattaaatcctgcaccgccaatcgattgcaacgttgggcattgattttgctcgcttatgattttgatattgagtatcaaaacacatcggagttcggacaagcagacgctttgtctcgattgatctcaaaaacgacgattgaagacgacgaagtgatcgtggccaatttgatgaatgtggaaacggaacttttgaatgctgttgtaaagcaatttccgttgaattccgatcaaataattgttgagattggaaaagatgaagtgctaaaaaaggtcatgaagtaccttcgcactcaatggcccacttcaaagaatatgtctttagaaatcattccatttcaccgcaggcgagaagccttatcaattgagaatggatgtattatttatgctgaccgggtggtgatccccgcatcacttcagaaggaagtcttgcagcaattgcaccagggacacccgggaatgaaacgcatgaaaaatctggccaggcaatatgtttattggcctggaatggaccagcaaatcgaagactccgttcgatcttgccaagcttgcgctgaagaagcaaaagcaccagttaaaactcttcttcactcttggccaaaagaagacggcccatggaaacgagtgcatatggactatgcagggcctttctttggaaaaatgtatttgatttgtgtagacgcattttccaagtggccagaagtctttgagatgagttccaccggatcagcagcgacgattgacaaaattcgttatctgtgctctcggcatggacttcccgaaacacttgttaccgataatgggacacaattcacttcaaatgaatttaaggaattcacgaggaagaatggaatttcccatctgttttcggcaccgtactgcccgatgtcgaatggacaggcagagcggtttgtcgacactttcaaacggacgtttcgaaagttgaaaaaggagggggtagcgaataggttggatacgtttttgacaacctatcgtaccactcctaatgagtcgctggctggaaacaagagccctgcagaaatgtttatgcagcgcaaaatccgaacgactttggatcttctgcggccgaaacgacgcccaatcatcgaacgtgacgaagcgatggaaaggagtttcaatcgccgtcacggggcacaaccaagagaattcatggtcaatggtaaagtttttgcccgacatcgaatttctcaaccatggaaagccggacgtgtcactcaaaagaaaggagtaatttatgacgtgtcattttccgacggatcgtctggtaggttccatgcgaaccaaatgttggttcatcacacgccggactatgaggaagaccccttggatatgcttaatgatgcatttgggcttcctctggccccatcggtggtagaagaccctgacggacaggctgaagttcaacttcccatgcgcgccgacacaccggagccactgaacgatcgaccactcgacgaagatgtgccaagaatccccgaaggacggcccaaaagaaacagacgccctcctcagcgcttttcgccgggatgatggacaaaccgattctttttgatgggggaggtgttaggacgggtcatatttaaattgtagttggcattctgtcccctttgccacgtcatcattttgaccccactccatttgtccttaaatatcctcccatttctctcccctcgttgttcatcaccattcattcatttatttgtcatttcccttcgcttgaccccaatcaatattatttgtgtgccttgtcctttttaatttgga

SEQ ID NO: 68689 - DNA, 1698 bp, Heterodera glycines
  unsure (1)..(1698): unsure at all n locations
atggttggtggtgaagcggagtttcccgagaccccacggcacaccccgacaattgccatgctgacgtctcaccccagtaacgtcgagtcattcccctcgttccgcacggtcaatgacttttggagtctcgaggcgattggaatcaccgacgaccccaatcagaacgacgaccaggttgccatgcagcaatttagcaataccgtccgccaattgccgtctggccgttactccgttcgcctcacttggcgggaacctcggcctcccctcccctcgaattgggccatcgcatatcgccggctcctctcaacgaccaagcgtctgcaatgctctcctgagcttctcgaccgttactccgccgaactgacacggcaaatggacgccgacattattgagctgaccgggcgaaacaacgacgagcattttttgcctcaccacgccgtcatcaacccaaagaaactgaggatcgtcattgacgccagtgctcatgccaagggcaccccaagcctcaacgactgtcttcaccgcgggccagtgttgctccccgacctttgcgggattctcctccgcttccgttcagcgacaattcctgtgttggccgacgttcagggcgcctttcatgccatcgaagtcgaacccgaggacaggcgcttttgcaaaatgcattggctgaaaaaccctgcccgtcctgtctcaggcgacaatctcttgatctaccgctacaaacggctagttttcggcgcgacatgttctccctttatcctcgccgctgttctcctccaacacttcgacaagcacgagcacccattcgcccaagcgttggccgcgaatatgtacgtcgacaatctcctcatcgagtgcgagacggaggaggaagcaatcgacaagtcatcaatcgccaaacaaatcctcaaagacgccgacatgaacctcagggagttcctcagccactccccaaacgtcatgaagcaaattcccgaggacgaccgactcgacaaaacgccggccaaagttttgggcctgacctgggacaccccaagcgactgcgtcactttcagtctgccgaaagacacagacgccactgctacacggcgttcagtcctgagcatcatcgccagcacgttcgaccctcttggtctagtcgggccatgtcttctgcccgccaaacggctcttccaacggctatggggagaaggaaccgcctgggatgcccccctccccgacaccgaggcggcgacgtggagccaaaccctttctctttggcaaaaccaaacaatagtcatcccttggcactccattctcggcaagcaaagtcgcctacaactccacgtgttttgtgacgcctctgaacacacatttgccgctgccgtctacatccgaagcgagactgccgatagctccgaagcgaacctaatcttcgccaaaaaccgcctccggccacgaaccgcgaaccagcgcttcaccatccctcgactcgaactcctcgccatcctcgtcggaattcgcgccatgcgtttcgccgagaaagagctccggcgcccgatcaacgggcgacacttatggtctgactcccaaattgcgctctcatgggtgaagtccgacgaacccaaggcccaatttgaacagagaagactcgtcgagatccgacaagggcagcacaccactttccatttcgtcagaaccgaccaaaatcccgccgnc

SEQ ID NO: 68690 - DNA, 230 bp, Heterodera glycines
cctgaaagggcggctggcggctgggagaagagtgatgaatggtcgaaagcctgaaatgggcggctgacgactcggtgagggtttgtcgggagcctaaaagggcggctggcgacttgatttgagtgatgagtgccggaggcctaagatggtcggcggacagcgaagggttgagttgccgggagcctaaagggtcggctggcggcagagagaagagtgatggatggtcgaaa

SEQ ID NO: 68691 - DNA, 1827 bp, Heterodera glycines
atgtcggaactcattcgtcaacgtctcaccgccgaagtccgaaccctttcggacctcgtcaagcgcctccgacaaagggtcgggaggctcactgaattcaccaggatggcgccagaggaaatcccgctcgccgaggagaccaaactcgccaagggcgtacgaactgaccgacaattgctacagagaagcatcgaccgcgtcaatggcatgctacgagaatgttttgaccatattcagctgctaggcgacccgtttctgaagcaggcggaggaggaccttctggccgtactcccgaccttcgacgacgagcaagccgacccaaatgtcgaagaatggccagtcatcactcttctctctaaagcccagctcatcctcgacggcctccaagtctacatcgaggctcgattcgacacgacggacgccatctcttctcgcagcagcagtcgtgtttctgatcacggggccgacgacgaaaaccggatccaccgccaacggcaatccaccgacccaccgactcaggcacagccagcgaatgcacatcagccgtccaattcggctagagccgatcaaaccctattcaaccagcgaaccccggcattcccgcttaacctcacatttccccgagcatcgaatcgccccacccatcgatcggaacctcaccatggccacttccgacagtcgaccaatgacgacgacgcactccgggtcagccgaatcgaaatcccgaggttcagcggatcggcagaagaatgggtcacattttgggccgccttcgactttgccgtccactcgcgccaataccccgccttccaaaagcacctcctcctcctacagtaccttgagaagggatcgccaccccgacggatgattgaaggttacccaccgtcagacgccaattacagcacagtcgtgagcattctacgagaccgctacggcgatgtcggcaaccgacgggaccaactcaatgcccagcttctccacctcaaacccgcccggaacaacctcaaggagttgcgccaactccagcaagagatcgagcggatctgcacccaactttgcagtctcgagcccgagggggagctctcgccaatcgccaacagctcgctggtcaccaatctcatcaaaagcaaacttccaccaccggtactgcttgacctgatccgaatggagcgcgagagctacacttcctggacggctcgaaattggcgtgagggatttgcgacaatcgtcaccgacaaagagcaggtggacttgtgcgtccgcacattccaggacatggacatccagccccgcgaacgtcctcccgaacgggctccctctcgtccgggtggtcgttcttttcgaccaccaccaccagcgccggagcgacgttatttggagaacactcgggcctttcctgctctcgcccaacccgtctctgccaatggcatcagttgctccctttgtgagcaggagggacaccgtccgagtgcgtgccagcgatacaccaccgtcattcaacgccggcgacgacttgaggaacaggggcgctgcctgcgttctccgtcaagaccacatcactcgcgattgctctcgtcaagatcgatgttcgaaatgtcaggcgaacgaccatcacttcctcctctgcccgtcaatcgaccccccggggcgaacaaaccatcgacaagagaatcaagagcggaatggaaatgcgtcccgcaacgtcagtcgtgccacgggagccaacgccgaaccggtccgaccgagagcgactcccaccacaaccgcactgctcgtgtgcgacgagggcgaaagcattcccgaggcggtatgcgccgccgcctttga

SEQ ID NO: 68692 - DNA, 690 bp, Heterodera glycines
atggtcgcacattgcgataaaaggcttggccatctcagcactcatttggccatacgcaggggtgacgtgagtcatcaacaattattacacagcacaaaaaaaagaattcaatcgattgcgtgcgctaattgattttaaaaaatcaccaaaagcgtattcgatttgtcaacatttgcttattatttttatttacaccaacaccaatcatggacggtaaaaaagaaaaaaaagcgacaataaatctttttatggataattatgggaaaaaattggcgttctgtcacatttactttttatctttatttctctcacttttacgtactatctcttcattcttaataatgtaaagaacaacatttacttcatcctgtttaacttttttcctacttgttaaatccacaccaaattttgcatatcgctagagaaaaaaattctgcatcgaacgtatcaaatatttttttaggttatacatcccgtttttgtagtagagttcaaaaagtaaaaagttgaaatcagcagtttaggacttgagttataacgtgatgaacatttgaaactcgcacaacttttttctgagatgtcaaattgcttagcattcacttagaaaaagattctccttttcaaaatctttttttagataccaaatttgttcatttttgttgggaatgaagcgtattatggctgatcaaa

SEQ ID NO: 68693 - DNA, 572 bp, Heterodera glycines
atggcggaatgccgagaatgtaaagaaaatggaaggcccaagtatgaatttagcctctctgactccagcaccaaatcactcaaaatccatcttttttcaacaatccatgctgattcggaatatgtcaaaaatttccaacaactggagaagatgaaaaaggagtcaaaagaaaaagctgataagaaacagccgacgatcgaaaatctaatcggcacgaatttgaccagcagcggtagttttgtgttagtaaattttacggattttggtttttttaggcattttgtctgtggctgacaaacgaattatcagcatgataacctgtaacaatctgtcatttggtttgctatctgatccgacttttaaagctcagtgtaaatatgagctgaaggatgaaagcgattatcggtaaaagtcaaagcaattaaaaaattaaaaaaataattttttaggaaaagagttctcccggaagcatacaaactagtcaaggcaaaaatactcaaggatttagatgattgcgccaatctcagcttcacaattgattgttgggcaggtccatcagacaattttttaag

SEQ ID NO: 68694 - DNA, 229 bp, Heterodera glycines
acaaaagcaaacactcgatcgtcatttattttccagctatccaataatttacggacattgcacgcaatggcattgccagaatgttggccgggaaaatggtgaacagcgagtacaaaattcttttgcacccaattttttgtgacgccgtgaccagtcaagcttaattattttttgaaataccgcttcttgaagcctaaaattaccttaaaaaattgtctgatggacctgc

SEQ ID NO: 68695 - DNA, 270 bp, Heterodera glycines
atgatggccaatggacaaccaaccatattttcatctaggcatgtaagtatatacaatagcattatcgtgttattgcacaatttttgttgtgcaataaccatttatatttgtattatgtttgataatcaaaaaaaaaataaacctatgtaattagtaatttaaaaaaattaattaaaagatttggtgacttttttgggttatttttgagatatttcatcaattttttagaaagtttaaaattttataaaattctcgttttaaaatttttca

SEQ ID NO: 68696 - DNA, 489 bp, Heterodera glycines
atgatacaacaaaattcagtggtaattttcagtggttttatcgacaaaaataagcccattaaagtgcagttttcgtatcttggtactcatttggctgcatatctgtagtacggaaaaaatattaatatttcttttttaatatcaaaaaaataatttttattgtatttttaataattcccccagaaaaaatttaatcaaatttcgcagaattttattatgatacaacaaaattcagtggtaattttcagtggttttatcgacaaaaataagcacattaaagtgcagttttcgtatcttggtactcatttggctgcatatctgtagtacggaaaaatattaatattccttttttaatatcaaaaaaataatttttattgtatttttaataattcccccagaaaaaatttaatcaaatttcgcagaattttattatgatacaacaaaattcagtggtaattttcagtggttttatcgacaaaaataactcca

SEQ ID NO: 68697 - DNA, 1297 bp, Heterodera glycines
atggacaatggtgatgatggtgcatgtgcggacaacgacttgcgcaacgatgttaatcatcaacaacagcggttggacaaatcacaagtcgatggggcggatgaagcggactggacagctggccaagatgagggggacaaggcaaaaccaacggcggtagatgaacgtgctgaagaacatggtgatgcggagggtgatgaccaacaacagagcatggaagacgaaggcgctgctgctggtggtcatcaacggcaattgcagcagcaagaaatgggcgaggtgagtggcagtggcttttctaggcgctatcccgtcatggattatgaatcaataggcttaccaatgtgtaccgttcagttgtcagcacatggctctgcatcgcttgaacaggcgcgtcagacgcgtgcactattccattcccatttgcgtcgacttcgtcagcaacaacaacagcagcagcagttggatcaatcacaacttgaagaggctgaccaagctgcggatgaccaaatggctgaccaagatgaagcggctgccgccgtagaggaggaaggcatggatgaaagcgcgggtttcaattttggcgacctgctcaatggaacggaagtgatgcgttttgacccaaaattgtggcaaaatgatgagcagaacggcggacagcagcagcagcaaaaggaggaggcaatggaagaagaagaaagggaaggcaccagccgtgatgatggtgatgatcaacaacaacaactgcagcaccgtctacaactgaaatgggcactgatcacggacagtgtggcgccactcgctgctgagctggccgagtcactgcgtgccatcattgagccaaccatcgcgtcacgactcgagtaagcgcgcgaggggaattaatttgttgcgcagatccctccctggcggccaggcccatagccaaaaaaaaaaaaaaattcggaggggagcccgaaaaaattttcgttgggctaaaaatttcaagaaattttctctgttattttaaaattttggtcccattgaaaaaaggagatatttgtagcttattcgccaaaaaatgacttgttttgccatctcctctttttagggttttctaaaaatttgtgtgtcaattttcagaggcgattatcggacaggcaagcggctgaacatgcgccgtctgattccctacattgccagtgactatcggaaggatcggatttggatgcgccggacgcgtaaagcacgtcgaaactatcagatttgcattgcggttgacaactcgcagagcatgcagcacaaccacatgactgag

SEQ ID NO: 68698 - DNA, 99 bp, Heterodera glycines
ggaggaggtgactcatcgtccaattcatcggaaggagaggaggaggaggcgaacgaagaagaagaagagaagggacaaagtcgggagggagacgaatga

SEQ ID NO: 68699 - DNA, 305 bp, Heterodera glycines
atgccaaatttgctccaagttctgttcggaccggttgtttaccgcccatatcaacccaacctattggaatcgggcggtaacaagctgttcagcatcggtgctggtgcctacaacacttgtgttgtgctgtcgcccattctcgtgccgtacattgccttttcttggacccactcccatcacttttcttttgtcggtttgcatgtttccaattcagtcctctcacttttgtccctttttcagttgcgcttcgttttggtgttttatgccattgccttttccttccgtacgattggtcggctgacaaa

SEQ ID NO: 68700 - DNA, 675 bp, Heterodera glycines
atgatggtaaacaaatttattaaactatttgttttgcttcttctgatctctcccaccaatgaaaagccgcatcagaaaagagccttagtgacaattgcattgattggcgccttagcacaattgaaggcgtatttattagcgcacaccggagttatattaacagcatcaatgataacagcacttacaacattgtctctcgctgtatatgttaagctcaaacgtgagatattgtttttaaatatttagaacttatttattttctaaattatagattgccgatgtggcgatctgttaaaagatttctttcccataaccttcgtcctgaactcgtacgagttctctgtgtcagtggaggaatttacacccgacaacatttttgaaaaaatttcaaaagagctaggccggaatgttcagcaattttgctttggtttgttttaaattggtttaaattattatagaaagatataataaattcagcttctccttcggaaacgactcgaaagattaaaaaaagtgatgaagacatggggcttcttttatgcaacccgaagccaaggacggctggaaatcttcgactgcccctgattcaggaggctggaaatcttcgactgcctctgtttcattttttatgatatttcccgttggcccttgggaaaggcattttctttttttcaa

SEQ ID NO: 68701 - DNA, 684 bp, Heterodera glycines
atgctgtgggagcaaaacaacaggggcctcgaagaggaggccaagcaaaggcaaatccgaaacaaaattgaggaattgacggcaaaactggcagggaaacccagagaagaaatgggagaagaagaggcaaaggagttgggaaaggagaaggagcgctttgagaaccccccggagccgccaagagagcgcaggcctttctattccagcgccgtggcgcgctttgagtgccaaagcgaattggactcagcgtcgaaactaagaggaagagaagaaagaggggacagagaaaggaacttgggaatgagcgggaagcgcttgttcacaaacatgctcaaatcggccgtcgggacagtaaatgaccgtccctgtattccacccgagggattaaatcgcgaaatgcttaaaagaagaccgactccagcgccagtgccgcagtttacgacacgcagcgcggagaggagccccgtgaggaagacatacgcgccgtttcggaaagggatgccactggaacgcgcggaggaagctatctacaaaatccgcaagtcactgctccaggccgcggacgcgctttcagagctcgccgacgaactgttcccgcacggagaagcgcgagagaaagatgaaggaaaggaggacgaagaggcgcagtggggaggaccgggcccctctcattcttttatgtag

SEQ ID NO: 68702 - DNA, 522 bp, Heterodera glycines
atgactaatattccttcgacgattcgcccaatcgctactactaatattcctctgacgattcgcccaattactacgactaatattcctccgacgattcgcccaatcgctatcactaatattcctccgacgattcgcccaatcgctacgactaatattccgccgtctattcgccctatagctactacacacactccacccacaacccgcccgattgctactactcatattccaccgacaattcgaccaattactactactaatattcctacaacaatccgcccgacttcaaccattcatagccctattataatcaaaccaacaacgacaatcccgacaaccactattcaaacgccaactaaattaatctttaccacggctacaccaaacaccgtctctcctcacaccacaaagagtgcggatgacaccgctccgaccactgcgtcgtatcattccattcttgatgagcttagaggattggccgaagaagctgatgaggaaggcattttatttctccgacgataa

SEQ ID NO: 68703 - DNA, 704 bp, Heterodera glycines
atggaattgcccgctccaattttccaccgtttgcgacatttcgtgccgtcaattctcaaagattgtatatcgcttcgcgttatcaacacctattcctatggtttcttcatcgaatttccatgcgatgacagtgccgcggcatcggatggacaagcggtggccaaatggcttttcactccacgtccggacaatgtgccaaaggtgttcaaatgctacttggacaaggatgatgcgaatttgacgtccaaagttgaagcattcaaaacggtgctttcttttattatttcatatttctttaatcaatttttcccgtattttaggcttttgccaatgcttcatctcccgccaatttcattgtctccatttggtttcgttattttgctgacttcgttgtgccatttgaccaaatcaacgaattgactcgggaacaattgacactgaaaagaactgactttcactactgttttctgttggtccgttgtccaattgcgcgagacgaaagcaaatggacaaaatgggaagaggaagcgattgactggcaaagttatggtcaatggaatcgaattagcatttgtcctatttttgtggatgacatcggcgatgggtcagcgaatattttttcaataaatccaaatttatttatgtttcacttttttaggcttctcgacgaaattcccggcccaagtgatcaacagcagaagtga

SEQ ID NO: 68704 - DNA, 381 bp, Heterodera glycines
atggggactcaaatctcttggcattctaaacactggggactcaacccaccaactttcactgacattccaatcactgaaaatcaagccaccagcattccaatctctgagactcaattctcaggctttccaatcgtgggactcaacccatcagtatttcaatctctgagactcaaatctccggcattccaaacactgggactcaacccaccaactttcaatgacattccaatctctgggactcaacccaccagcatttcaatctctgagactcaattctcaggctttccaatcgctgggactcaacccaccagcatttcaatctctgggactcaaatctccggcattccaaacactgggactcaacccaccaactttcaatga

SEQ ID NO: 68705 - DNA, 669 bp, Heterodera glycines
atgcgtcgtggaagaccaaaatgcagatttggtcagttttaaagcgcctattttggggaaattttgtcatgaaaagtggatgtaatacccctatttgtaaacaatatgcaattttctgtcgcttaataattataaatttttagtccacatctattttttagctgtacaacgcttacacacaccctcctccccccgtagcgttttcctccgaaaaaaatttattaaaaaaataaattcttaaaaaaattttgaaaatatttttttaatacaaaaattttgaaaaattcttatcatttttaaaaaaattatgatgattgcttttttttcttcaatttttttttataaagaaatttttgatcatcacattaatttttgaaaatttttttaggcgacggtgaaccgccaaactatttgaatgtggacattaaggacggctttgtgctgaacacatggcttgacgcacttcaggtggctattgtgatccttccgatcgtcaaaaatcaaaatttaaacgattttttaaattttttttaggccagctttgctggtgtccaagtgttggccggcgatttggacgacgccatctgttcccatgccttttattacgcaatttggcgcaaatatgaattgttgccggaacgtttcaattggcattcaaaggcaccggat

SEQ ID NO: 68706 - DNA, 1170 bp, Heterodera glycines
taattaaatccattccttcgggggaccgtgccgggtgccgcggggtaagcagtgctggttcgtttcatcacggcaccgaaccttttggctagtcagcaatcgttgcttaacttgccagatcggacgggtgcgcatgattccactgttccaagcaccccaccaaaagcaaaacgatataaccaaaatataaggaaaaatttttaaaaaaatttttctccatctccctttttgatagaaaaagcatcagagtgcctaaactaacatgtaaataaaatttggtgcgctttagagcactttctgaaaaaatatttatgaaataaaaaaatcgatttttcaagtgtccgtttggggtactcaaacaattatggggagcaaaaatccaacgcagaattaaagtacaggctatagggaagctattcccgaaggattcggtctccccataaatctgggcgcatcggttcggggggactgccccgaaaacaaaaaaatcgattttttcaagtgtccgtttggggtactcaaacaattatggggagcaaaaatccaacgcagaattaaagtacaggctatagggaagctattcccgaaggattcggtctccccataaatctgggcgcatcggttcggggggactgccccgaaaacaaaaataaatcgattttttcaagtgtccgtttggggtactcaaacaattatggggagcaaaaatccaacgcagaattaaagtacaggctatagggaagctattccggaaggattcggtctccccataaatctgggcgcatcggttcggggggactgccccgaaaacaaaaaaatcgattttttcaagtgtccgtttggggtactcaaacaattatggggagcaaaactccaacgcagaattaaagtacagactatagggaagctattcccgaaggattcggtctccccataaatctgggcgcatcggttcagggggactgccccgaaaacccaaaaaaaaattttttggataaaaattatttaaatgaactgactagataatatttaaaataggttatttctcttcctttcagtatccctgcaaagtttggtgcgcttctgataagtttctgaaaaaaaagttaagcctaaactttttggccaatgtaaaaaggaattaaaaatttttaaaaattttattcatct

SEQ ID NO: 68707 - DNA, 1816 bp, Heterodera glycines
atgccgatccgtgccctgccgtgcccaactaccgccttaacacaccgcccgctcaattccgcccgtcccgtgccgttgacgtgtgccgagccgaccactcccgttccgtccccaaattgtgccgtccccattttgtgccgtcctcattttgtgccgtccccatttttgtgacgtccccatttttgtgccgtccccatttttgtgccgtccccatttttgtgccgtcccccattttccccccattgtgccgtccccatttctgtgccgtcccccattttccccccattttgtgccgttcccccatttcccccttcggtttaattacccaagtttgaggattccaataaagtgcattttgaatcgctttcccgcctcacttgacccccagcaattccaccatccccgattgaccgtcaagcgtccacccccaatcgccccagctctcgccaaatccgggccgttgccagccaacaaacacccattcagtaccggccgctcaatctccgaccgactccccgactcgcgctcttcatcccgtcccccccatttgtccatcaccgattgcggaaaggacaaagtggtgcacgacgacccggaacgccctgcgcacaacaacgatccggcattcgacaacaaatcgtcaaactactgaaacagcgaaaactcttcgtgccgcagcccaacttcaaaagtgagaaaactttaaaaatttttgctataaagggtaaccaatccccacactcaaaaaattcaaaatttttaaagggataaaaccctaacctaccaaaacacacacaaaacagtcatttttctcgaacaaaaaccgacaaacacacccaaaatcctattacaaatcaatcaatacccatcccattcagtgaaaagaacaacccgatcggcatctcgtgcaccgacaaacccaaacgaagttgaagaagaagaaaagaaggaaaagacaccaccgaagaaaagtgatcaaagatttctgatcgtaccgatatccattttttagtcattcgcactcattcgccttcggagcaaaccgaagtccaattccttgggtccacccccacctctgaaaaatccgacccggtcaccctctcgcctgagacccaaaaattactggcaaaactgaaagcatccgaaatcaaagtccaaaccaaacaactgaaaaaagcaattgactgtgttgaacaaaccgtaaaaaccaaccaaaacgccgacctcatccaaacaacaaacgcagtcaaaaaattcaactcaatccgtgagaacaccccggaccaaccgaattttcacagcaatttctcccccgaaattgacaacggttttttgaagaaactgactacgctcgaggacgagcggtcagaaatttggtcgaacgcggtcaaagagtgcaaaaagcaagaagaaagaagggttagatcggtcgaactccaaaccaataatatcttagaatcggtcgcaaaagcgattcgtgccgaggattttaacaggaaaatcctcgaggaattactcaaaacagtccaatcgactacctacgccactcgggccgcccgcgacaagaccgtcatctgcgcacagaaacttcagaataaccttctgcatcaaagacggttcctaactgcgcaagagcgaacggccacattcatccgcaaaacatttggtttgccgacaggcacaaaagaagtggacaattcgggagcaaccacttccgcagacggacaacagtgataattttttgtgatctgtgatccattgttgacaaattgtgatttattttgtgataaatatttaaaacaaaccggtgattaaa

SEQ ID NO: 68708 - DNA, 618 bp, Heterodera glycines
accattcctgtgaccaaggccaaaccaccggtggagtccgagtcgagcagttcgggagacgacgacgaagtgccggccaaaaaaccggcccagaaggcacagccggccaaagtgcctccgaaggcaccgatttttcttttttttttttaattttttaatttgtgtttttatttagaccattcctgtgaccaaggccaaaccaccggtggagtccgagtcgagcagttcgggagacgacgacgaagtgccggccaaaaaaccggcccagaaggcacagccggccaaagtgcctccgaaggcaccgatttttcttttttttaatttgtgtttttctttagaccattcctgtgaccaaggccaaaccaccggcggagtccgagtcgagcagttcgggagacgacgacgaagtgccggccaaaaaaccggcccagaaggcacagccggccaaagtgcctccgaaggcaccgaattttcttttaaatttttttaatttgtgtttttctttagaccattcctgtgaccaaggccaaaccaccggtggagtccgagtcgagcagttcgggagacgacgacgaagtgccggccaaaaaaccggcccagaaggcacagccggccaaa

SEQ ID NO: 68709 - DNA, 147 bp, Heterodera glycines
tggccggctgtgccttctgggccggttttttggccggcacttcgtcgtcgtctcccgaactgctcgactcggactccaccggtggtttggccttggtcacaggaatggtctaaataaaaacacaaattaaaaaattaaaaaaaaaaa

SEQ ID NO: 68710 - DNA, 141 bp, Heterodera glycines; identical to SEQ ID NO: 58837

SEQ ID NO: 68711 - DNA, 876 bp, Heterodera glycines
gctgtctctcgtcctccaccgccaccggccaagaaaacagataaaggcaaagtgcgtttacctaattggctatttattttatttgttgtttttgtttccattcaaaattcgtttttaaaaaggtcgttcctccgccgcgtcgtcctccgccttcgggtaagaaaccattcgtcaaagccaaagtgagttcgttcaggacgacaccgaactcgtactgtttttcgacaaaaaaaggcgtcataacttttgtcaaagtcgaccaaattaaacattcttggtatcttagctaaattttaatcaaattttttgaagcttggtatattgatagagaatttaagggctattgaatgatgccaagaatgtttatttggtcgactttaacaaaaagttaggacgacttttttgtcaaaaaacagtacgggttgggtttttaccgttcgttaatcatcatttgttcttgttatgatgaattcgtctcttttaagactctttcgcctcgttttccgtcaccgttcacgaaaaaggagccactcaaagtgagacactttgcccaatttctgtctctttctttttctcttccgtttaggctgtccctcctctttctcgcttcccctccatggaaaagaaaaacactgtgaccaaagtgagttttttcggatttgcattttttcctttattttctcaatttttccttaattgtttcagattgtgcctccttcaatgctttcgaaaccgcagaaaattgaaccattcaaagtgagagcgaatcgtttgccacttctctccccacaatttgcctgtcatttcctctgtttaagccacagtcatcgccgatggggccttccgaatccgaaaaaggacgcccgcattggaatt

SEQ ID NO: 68712 - DNA, 651 bp, Heterodera glycines
atgcgagcgaaggtatttttgggccattttcccctgctgctgttgggttgtaggggcgagcccagcgggactggccgagttgggacgcaatgcgataaaatccatccgtatttggaaataaattccggattaatcccacgcaaaatccctgcaatttcagtggcgtaagaagcgaatgcgtcggctaaagcgcaagcggagacaggcgaagaaatgagcggacggacggagagaaaactcagccgaacgcggaaacggaggcacaaaatgttgttgctgtttttttgttattgttgtcaaccgcccctttactcagataaaatttgttgcaaaatattgggatattcaatcaaattaatttttagcaaaaatccatttgttaagcattgctttggcaaaagatttggatggcacagtttgccgaaagacctagttcgagcatgattcgtttaaccgactcaaattctcattcccaaaaaatactatgtgatttttctggtggtctatttcataaaatgttatgcattgattatgatttttgtgttttgtgatcagttaaaagtcacatatggtagaatttttcccattgtcgggttcgatttacacgaaatcctgggactgtccctgttctttgacttcgtttgctccaaa

SEQ ID NO: 68713 - DNA, 760 bp, Heterodera glycines
gtggcacccctctgggcttgtactgtaagctgacagagatgcacaaggctggccaagtgtcgtttgccaatgttgtcaccttcaacatggacgagtagggaaaaacgggcgcatttattagtgccactttgcgtgatctaattcaaaccgaaccagcagcagcagttaaatctgctgatcggttttacgaggcgccatttgattttttgatcagagtccaaatccggcactttccaacagttgaaatatattaaccgattttaaatgaattctttagtcatgaattgatagaaaatgtcttttttgcttatcctaagatatgttggcattccgcgcaaccatccgcacagttaccacacattcatgttctccaatttcttccggtgagtacatattttgaaaggatagaaacattttgaagggaaaaatggatgaaaaatccttctaaaaagtgccaaagttgaagaattaccttatttgcctctgatcaattattcactgatcgcccccaattttccctttaggcacattgacatcgatccgtccaatgtttggtttttgtccctccgccactaattttgtgcccccccctcccctcaaaaggtgcatattccgaatggaaacgccgccgatctgaccgcggaatgcgcaaactacgagtaagaaaggcgacacgatttgctgttcaataaattgacgccttttcactattttaggcgttcaatcgccgccgccggaggcattgatttgtttgtgtccg

SEQ ID NO: 68714 - DNA, 974 bp, Heterodera glycines
atgtcgggggagaaggaatccacgccggggcaatacagattggtcgaagtgtctgtgggcggacagaaggtggaagcaactgctgcgcaagtgcctgggaaaatggcggaatttgtggaatggctcaatgctgaagacgcccaaacaaatgacgttgccacttttgcggccactgctcactataaaatggtataacaatgataaaaacagcccacatttgtaagttaaaattctaaaattttctgatagtaacgaaaatgatttcctggttatattaatttgacaaattcgctaaaagttttaatttttcggttttaactaaacaatttaatataccttaattaattttgtttcataaaaggacccactttctaatattcgtgtttttagtcaatgctttgtaatttttcgtttattttactttaataaaaataactctctcaaataacaatgcaagaaatgaatttaggccaaaattcaccctttttggatggaaacggatgcacttgccatgaacttcattttaaaaagaaaaggctggaacaccgtcatcctccctgacaaatatcgtcgtgcttattatgaatgttttgacactggttttaattgttaatttatattaataatttatttaactgatttgtattttaaaattaatatttaaataacgaatccaaatgaatttattttcaaaatgttcattcaaaaattagtgatggtggtcaatgaagtgaggatattttgagtaaaaaagtgaaaataatacatataacctcaaataattcgtaaatcgcgaaaattttcgagaaaaaatctttgggatagataattttttctagagaaaatgagtaatcccattgcaaaaacacaaattttctacgtaattgccttttgaatggtgggtcaacgatttatccgacttatcgccgctgagttagagagtgtcaaaattggacaactaaaaaatgaataaa

SEQ ID NO: 68715 - DNA, 330 bp, Heterodera glycines
atgagcagcgacgattcacaaatgccacaagaggagagcagcgaagatgcaccaacgcccccagaggactattttgacacccccgaggaccatcaaaaagcagtggacatacaaagaggcagagaagcgggacggaacaccgccggcggcatgcggcgcgatcgcgatgtgtccgcgtcgtttgatgatgacaaggacttcttgtacatcttggacaccgaagggatggacccaaaaataatttctgaacaagtagaatatttctgctgcaaaagaaaaggggataaaactttccaagaattaaattgttttgatggttgtatgcgatga

SEQ ID NO: 68716 - DNA, 445 bp, Heterodera glycines
atgaacgacacgaacagtgacgactcggccaaactgccgtcatttgtcctaaagaaagtgcccataaatggacatttttgtttcaaaaatgccggaacgaacgtcgcctgcgtctgctccccggcggaacaatcggccgccgattggccttccgtcggctcatttttttgtgttttgtgccaaagaaagcgaagaaaaagcgcaaaagaaattgcgaaagacagcgaaacgagcagagaaaggagggcaatgagaagaagaagcataagggaagaagaagaaacagcggattctgagaaggaagggaaaagtgcacagattttgaaaggattaattaactgcaaataacaaatcaaattcaaatggatgagacggatggactccaaattgactactaattttactgactaaaaattaacatattatattctgatttgaaaataaa

SEQ ID NO: 68717 - DNA, 144 bp, Heterodera glycines; identical to SEQ ID NO: 57282

SEQ ID NO: 68718 - DNA, 252 bp, Heterodera glycines
atggagaaggcctgcaaaatttggagagattatatcgattttagtgcgctaggttcgatgaaactttttaaaatataagcctaaaatctttcgcaaatttaaaaagcaattaaaaatttttagattttttattcatctccctttttgatagtgaaagcatcagagagccttatttaacttttaattaacatttggtgcgtttcagagcacgttctaaaaaatatttatgaattaattttgcaaaataataaa

SEQ ID NO: 68719 - DNA, 155 bp, Heterodera glycines; identical to SEQ ID NO: 60582

SEQ ID NO: 68720 - DNA, 851 bp, Heterodera glycines
atggccgacttcgaagggcgtgtcaaagcttaccgtttggtggattacacgacggtttctttctccatcatcacacttttgtatgtgtgcttgtcactgtcaatgatgaagagtattgtgttcattgtgggcatgaaaacggtattcgagctcagttcattccaagcatggcataaagataggatttgttagtacatgaacaaagttattgtataaaatcctgggatcgtcaattgagaggactcataaaggtagattggactcataaagtgcattagagccgttaagttttttcgaaaattttttcaaaaaattgctaaaaatttcaaaattttttaaagaaatttcaccgacgaaattttgggatacacccatttatccatatttatgcattttattcaatttttattatgctctttcaatttttcttcctccttttcagccgtgcccatggctatttgccgcgtccccggcgttcatcggcacaaaaaagtgctgaaaagaaaaaacaaaaggtaatttgtctctttaaaaattatttattttgtatatttctcaattttagccatacgccgaaccgatttatgcgggagaggttggaatattttgttaaaaaatataatttcttttttatttctcatgattaattcaggaaaaaatcatcattttctgtccaaacaaagcagcagacgatggtgagaaaggcaccgctgagaatgccattggcgatgacgcagaagaaaatgcggatgaacaacagtttggtgagccgccgatgttggcacgcgccacactgaacagggccgggcttgaggaggaggacgaggaggaaacggcggatgaggcttctg

SEQ ID NO: 68721 - DNA, 190 bp, Heterodera glycines
atggcaaagccaatcgttttgaatttcgcttcccagtcaatggatctggctgcattaggcccaattctgatcaaaaaggtttggcccaatttttgatttttaaaatgttttttaggtccgacgcggtgccaataagtgccaccgttggggaaaatcactttccctggcatggactgaaattttcatataa

SEQ ID NO: 68722 - DNA, 1795 bp, Heterodera glycines
atgccaactgttcgcgaaatactcgagagtctgcaaaagccaaccaaaaggcctcggatgccagcaaacgaagacagcgtaattaatgttgagaggacaaacgcagaacaacaggctgcgcgcacaaattaggacgggtgtcgacgatgaaacctttgaattactcggcacaaacgaagcgctcgatcgaatgacgaataggttgaaaaattcaaataaataaagatacatagtacacatcaattatagaacaaagaatccatcattgagtgacttcattgctgcgttcatcaaagacatcgacaattaactggacatcggacgcgcagaacagctccagaaaagtagaaaacgaccgcaacggtacattatcaaagaacaaaatgtggtgcggatccttgacgaggccgactttgaatctgaaggattggccaacattttgcatctgctcggactcataatgcagggatttgttgagggacttcacatccgtggaaatgaagagagtgatgaagaagaaatggatgatgccgatgcaaattgaattatgaatttaatatttttaactttctatatttcgtttgaattttataaaatttctttgcttcggtgtacttttataaatataagctaaatataaatctattttagaaagaaattcttcatggaaatgtctcttttaaggcattaggcgaaacatccgattttgggttggtaggcgaaatgtcagtaggcgaaatgtcatattttggattagtaggcgaaacgtccgattttgggttagtaggcaaaatgtcgagtaggcgaaatgtcagtaggcgagatgtccagtaggcgaaatgtccgtacaccagcaatgcaacgacctttttggggccggtggcgaagttttgtagattttacattcattttaagagattttcaagaaaaaaatgcaattttggatattttatgtggcattttggttatctttttaatagttaaaattgtacaaatttccaaaaatcgcttaagtggtatcttcactatgggtcaactccactgtgcagagaaaagcctagtactatctcgacgttactctttttctttgtaatttctctcactttggcgtactatctcttcaatttaattatgtgaaaaaaaaaatttatttcgctctaagaaacttttttttacattaacagaatttctttaaattttgcacattgatagagaaaaaaaaattctgcatctgtctatagtgaattcgtttttgtctatagtccaaatcaaaagttataaatttataataaataattatttcatttttattagattttatggcaaaaaaaatgtaataaacaagctacaaagcaaaaaaggggcggggcccaaaagcgttggacgaaatgggaggagagacgagagaaggcggaaaggcgagataaggccgatgggccaagaaaagtgagtttttccattcatttttcataaaatcctaattttccaaatttttagccgctccccagccgaacacatgcaaaaacgccacaaccatccgaagaagagccgtcgacatcagaggcaccggcgcgggacaacgacggacgaccaccatcaaatccaacaccgatgacaccgcaggaaatggacgtgccgtcggtggagatgttggaaattgatgtgtcatacccttcaactcctgccgacgacgaccaacaagccgaaccaatgccgtcaacatccacggcacgttgtgagctgatgacgacaccatcgacatcaaaaggcgccggtggcttcggtctcgacgatg

SEQ ID NO: 68723 - DNA, 1757 bp, Heterodera glycines
atggcacatgacaatgttacaataattaaaatatcagccaacaccaaccaaaatcgtccagccaatgcccttggaaatggcccagtcgatgctgtcgaaaatgagcctgccgatgccgttgattatggcccagtcgatgccgttggaaatggcccagtcgatgcagttgaaaatgagcctgccgatgccgttggacatggcccagtcgatgccgctgtgctgaaaatacgacgaaaacgtgtcccggcattactattggccgccgtaccgctggcaaaaaaatttgctgttgctcttttggttgctgctggaaaagaaattgggaaaaatcttttttcgggaagtaaaatcaaagacaatccagctgctgatggatatagtgattcgaaacaattttatgtttcggaagaatgcaagagggattttaattgcacctttttcgcttgccacccacatcctgatgcggaaggcgacagtttctgtcgcaagggcttcacgcgcaaatgttgccaagtatttaatttaaatttttaccaaatggaattagtaggtgaaccaatgaaattttgtatctttttgacaaaacgaatggatctattaaaagtccatgaattttatctgcctaaacaccaatcactggacactgtttgtcggcactatttttaggttgtgtagtataagcaaaagtaccatttttacaccagacgatctaattatttaatacataaatttgaattaattaacttcattttaggaatacaatgatggagaaaaggtaattgttcgaggaagattataatgcgagattttaatggctaaaaaaccatcaaaaagggcgttataaaaaagtaaaagtgaaaattctcaaaaaacaacccataattttgctcaaacccaactaaaatttaattcttgatatcatttatagccaaaaaaagttcactattagcctgcgaaatttcaaaattggaaaagagcttctggactagtcagctgacggcaactcagccgaagacaactcagaatgatgacaattcggcttatggacaactcagccgtacaataaaaaattacaaaataaagcctaagcctaggccttgccaagccattgtacgagttgcgtttcaaaattctcgtaaagctgagctgtccatgagtcgaattgtcgcatcagctgagttatctgtcagctgaattgtcctaggctgagtttttatttacaagctagtagaaaactcttagggctattgaatgatatcaagaattaaaatgtttgtattgagctaatttattgtagtttttgttgaaaattttcatttgatggcttttataacggcccagtgccctaatgattgattatctattaactttgataatgataaaactcactcatttttagaaattggacgaaaaactagtttgttttaattaattatgaactaaatgaacatttgaaatatcttttaaggaaaaatgtttttataattttccgatatgcggagaaagtggatgcgttagtgacagaaaatactataccattaaaagcaaaggcggaaaagttgagattatatctcatgcaaaaccaccgcctgaatgcgcttttgatgcggtattacttttttatgcaataaaaatgatgctaaatcatttgaagcaagcgtcgatggttggggtgaaatactattatccatatgactacggagagggtgttcagggggtaatctaccagcatatagtagtattctagtattcaaata

SEQ ID NO: 68724 - DNA, 1067 bp, Heterodera glycines
  unsure (1)..(1067): unsure at all n locations
ccatccgattcagcaaattctcacatattctcttcgcattgttcatccccgcacaatcagtgcgcaaatgcaacggcgcgttaaacagtcactcaacgaaataagccatctttgtgcaatttcactcatcgagaaagcaattcagaatgggatttgcattagcgaggtcagaggaagcaaactgtcaatgaatgaatcatttggttatttgatatcttattgcattacttttaattgcgtttttatttttttgcaggttttcgtggatttagtaggcaacaaagaagaagtgtatcaaacctttctcaatgagcgttttcctacactcaaaatcaccgtttccaaaaaagctgatgcaatttttcgcattgttggcgctgcttccattgttgccaaagtgacgagggatgacaaattggccgaatgggtctttgacgaaattggctttattgcgcctgaacgaggattggggtcaggatatccgtcaggtgaatatttacttaataacgtgaaaatgactgccactttagacccaataactaaacacttcattcgcactatggtggatcccatctttggctatccgtcgttggtcaggttcagttggaaaactgtcgaaagggttctcgagaggaaagcaatcaaatacacatggcaagttgggtggagctaaatggccacaattatctgggagacggtcccctgatttgtcgcactgggcgacgacctttttgcatttcaacgcttttttaataccagatatcctttctttttccaaatggaaaattcgctaatttaatgcttattatttgtaataacacttattacttcgttattgttcttcgtctaaaattctttactcacccaaagcacccaaaattatgttgggttctctataccgaacaaatatttgttaaaagaggaaaatatagatattttgaatgtccaatgctanttaaattttactagtattaaaaataaaaggctttaatattgtctcgtccaagagtttatttccccgaatacacccgaaaatttttaaaggaaaaaaaaaattttgatggaaa

SEQ ID NO: 68725 - DNA, 491 bp, Heterodera glycines
atgccacctaaactgtgagtggttttatcatggctttggccaattcacggatcaaatagaaaaacactgatcaattggtcaaaagttagggctaataaaaaagtttcattaattctttttatccactcgttaaatcattcagacttagatttatttttcggcatcattaaagacaattttttttaatttaggcaaaaaatcgtttttaattaatgtatttttacaaaaaatgaagtcttttagaatatattttgaagtttttttagtgaaaatgaaaaatatggatgtaaaacatggtttaatgttggcaaatattttgcggcaatattgggatgatgaagtaatattttggaaaaattaataaattagtttccgatttctgtggaaattaatgatgttttacaaaaaagcaaccgaatctgtcttaaaaaacctttatacataaaaaggtgatagaatccaaattaataagcatttaattgtaaaataaa

SEQ ID NO: 68726 - DNA, 48 bp, Heterodera glycines
atgcatatattgggatattttattgccggaattcaatatattaaatat

SEQ ID NO: 68727 - DNA, 702 bp, Heterodera glycines
atggggaacggaaacagtcaccaccaaaccgcaacacattatttggatccggcaataatccatgaacctccaccagctccgtacccggacatgaacatgatcttcaaatccattccaaaaatgatgcaggtacagaagggatccaaaaaacaacaattaatttaaatggattaaaaaataattaatttttaattattttttgaggcaattttcttttaaattttatttattttttttgcttttaatttaatttttatgaattaaaaaataagttaatagtaagtgttatttttggctatttgctttttacataaattttaatttttgctttttaatgaattttattgaattaaaaataattttaaatttactgattattttatacaatttgttttaaatttaaattattttccttttttatttctattttttttctgtgatatttatttaatctgaattaattcaaaggttctcatcattattatatttgttaaaattaattttagattgatttttttatattccattggttttgttatttttaaattaataatttttaaaattatttcaattaatttaaactcttcattaaatgtttcatttaaggtggccgatgacatgcacaggatgagcaattatgtaagcccttttccaaacatttatcaaaattaagccgaaaaattggaaaatgcaaaaattaaa

SEQ ID NO: 68728 - DNA, 924 bp, Heterodera glycines
atgtgctcacttttcttcgccgttttcaccgttttttctccgtttgtgcaacaaaattgtacattctcactgagaatgttcgtattttggagttccttctgctcagaatttggccaatgttcaaggacaccattcattggatgtgtttgaaccccatcgcttttcgtctaatccgtcaattggccccctcattgctcaacgattatccatcccttcgttttgtcaatttctttgacggcatttccctcgaatttccgcccgatgatagtgccaatgcgtcggatggccaagcggtggccaaatggctgttcacgcctcgtcccgacaatttgatgatgatctcattgtcagcattcaggattcagcgatggaacagcaatggttggcaaccatggaacatatcaaagcggtgattaattgatttttccaatttaattccttttttccttctttttcttgtctttttttaggctttttccgctgcttcttctcctggtgcatttcgcatttctgtttacttttcgctgccctcttcactttcttccgttgtgccatttgaattgaccaacgaattcaccggggaaaatttgaaattgtccaaagaagaggaagaagaagatataagtggcttttccctcattcgttgtccaattgggcccgatgataagagacagcagcaaatgaataaggaatttagtaaacgaaaccgaattgacatttttattggagacgacggagtcgacgatgggtaattaatacgattaacaattttaaaaatccaaatgcttatttttgtttttcttttcagtcttctcgacggttcgcccgggccgagtgatgatcactgatcagaacagcggaaatgaattgattgattggttattgatgcgattatgtgacccaatgttggcctttgctatttaa

SEQ ID NO: 68729 - DNA, 1174 bp, Heterodera glycines
cttcatctctgctgattgttggcttgaggtgttcgttttgcttccacgctctcagcttggctttggaattgcgatgatttcccaccgatttgactattttgttgacgaacactttaaaacgcgcaaatggaaattgagaccaattgtaattcaacacaaaattggacagaatggcgcaaaggaaatggaaattgtcaattacgatggaaacgaattgccaatcccacaaattccattgccgaaaaaagtcatcggattcggaagcatttcgatcgggtaaaaatgaatttgtaaatgttttgtaccaatcactctttcttatgttttcagctccatcgaccaaaatgtgatcacttttcttggccattttgaccgctttttcgccacttgtgcaacaacattgtctatcgatactgaaaatattcgtattttggagttccttctgctcagcatttggccaatgttcaaggataccatttatcagctgagtttggacatcatcgcttttcgtcgaatgcgccaattggccccgtcaatgctcaacgactgtccatcacttcgctttttcaatttaagcaacggcatttccctcgaatttccgcccgacgacagtgccaatgcgacggatggccaaacggttgccaaatggctgttcacgcctcgtcacgacaatttgatgaacaatctcacaatctacattgagaactcagcgatggagcagcaatggtcggcaaccgtggaacaaatcaaagcggtgattatttgattattcactttttaaaatatttcttggtatttttagtcattttcctctgcttcttctcctgtttctttcggcatttctgttttaattccgccgtcctcttcaattgattccattgtgccatttgaattgaccaacgaattcaccggagaaaaattggcactgtccaaagaagatgaagaagcagatttaagtggtttttccctcattcgttgtccaattgtgtccgatgataagagacagcagcagatgattattgaattgggcgaccgatggaaccaaattaacatttttatcggagacgacggagtcggcgatgggtgattaacaattttaaaaatccaaatgcttatttttgtttttcttttcagtcttctcgacggttcgcccgggccgagtgatgatcactga

SEQ ID NO: 68730 - DNA, 389 bp, Heterodera glycines
atgtcgcataatccgaaagaagcggagagagaaatggaaaaagcgatgtaataatctaaatttgatttttattttcatggtaatcattttgcttttccgttttcagcttcatctctgctgattgttggcttgaggtgtttgttttgcttccacgctctcagcttggctttggaattgcgatgatcagtcaccgatttgactatttcgttgatgaacatttcaaagcgcgcaaatggacaatgggaccaattgtaattcaacgcaaaattggacagaatggagcaaaggaaatggaaattgtcaacaatttcaatggaaaagaattgccaatcccacaaattccattgccgaaaaaagtcatcggattcggaagcattacgatcgagtaa

SEQ ID NO: 68731 - DNA, 881 bp, Heterodera glycines
atgaaggccttttttcataccatttttgaaggtgttctcgaaattgttgttttggtattttttaaattaaccctattttattttaagttttaaaaaataaaatccaaaatccagaccgtattttttcaaaaattttcattaaattatgtcttggggctgaatatctttgttactgtgaccatccctgaacaaagtgaaaaaaccaacaaatcatgttttcctcattgcacagtccaaatccgccatctatagctatgatcgagcttggtgcgaaagtctaggcaagaaaaaagaaaaagatcgacaagaagaagaagcagaagaacaaggggaagaagaagaagaagaagaacaccgaccagaacaagagcgacaagaacaagagcggccagaagaagagcgaccagaacaagagcgacaagaacaagagcggccagaagaagaacgaccagaacaagagcgacaagaacaagagcggccagaagaagagcgaccagaacaagagcgacaagaacaagagcggccagaagaagagcgaccagaacaagagcgaccagaaggagagcgaccagaacaagagcgacaagaacaagagcggccagaagaagagcgaccagaacaagagcgaccagaaggagagcgaccagaaggagaagatcgaccagaaggagagctaccagaaggagagcgacccgaaggagagcgacaagaaaaacagagacaagaggatggggaagaagaagacggggacgatgatgatgatgatgatgatgataatgaggatggcgccgtccagtgcaaagtgattttgcgaagaggaggcgaaggagacgatgatgacagtgctggagggaattcgggagggaatggtgcaaaggatg

SEQ ID NO: 68732 - DNA, 386 bp, Heterodera glycines
atgaagcgaaccaacgcatcaaacatcactccgcctcgcgcaaaacgttcaatggcacctgcactggacctggacccaaacactgttgcactcgcagagcaagaacgacaacgcactttggtgttcattggcctcccggaaagcaatgccattcgcccatcggaacgtgttcaggaagacagggaagccgccacaaaaatcctggaccatcttgaagttgaggcccaaccaaccgccgtctttcgactcggacggtacgacccgcaacgaacaacaccacgcccgctcaaggtggtcatgccaacaaccacacaccaacacatggcactcggaggatggaagcgcgagcgtgctcgactccgttctctacaaaacctgaaccgcct

SEQ ID NO: 68733 - DNA, 1781 bp, Heterodera glycines
atggacttatttgatgggcgcgacggtccaggacattttggccgaactgacaggtcagtctcgagagtagcactggttctaagttcaattcactttcaggacgcattgctgggaatgtttacggaaaaggtttttagccattttataggcggtaaaaattgacaaaaattcatttaggcggatccatgcatatgtacgccaagaacttcttcggtggaaacggaatcgtcggcgcacaagttccgattggggcgggcattgcttttgccatgaaatatcgcagccagaaaaacgtctgtttgacactttacggagatggggcggctaaccagggacagctgttcgaagcgacgaacatggccaaactgtggggattgccgtgcattttcgtttgcgagaataacggagtgagttgtcgtcgtcattttgggaatgtcttgcaaattcagttcggaatgggcactcccgtggaccgtgcctccgcctcgaccgattattacacgcgggggtaaagcggggaaatgggggaacggccaaatggattaatttccgtttttgtaaacgatgtttgcgtttctccaattcccagtgactatgtgcctggcatttgggtcgatgggatggatgttctgaccgtccgcgaggccactcgctgggccaaggagtactgtgacgcgggcaatggcccactgatgatggaattggccacttaccggtactacggccactccatgtcggaccccgggacgaggtgaatgaatgaaaagggaaatggcgtactgtgaatgtgtgtaactgtgtgttctgcagctaccgtactcgggatgagatacaggaagtgcggaagagcagggaccccatcaccagtttcaaagatcgcattgtcacggcgggacttgtcactgaggaggaattaaaggtggacgagctgtggccggggggggggggaggaaagcatttgcaagccaatgaatacacaaatcaatggtcattccatccccgcaggacattgacaagaaagtgcgtcaggaggtggacgaggcggtcaaagtcgcactttcagacgaaggcatggcgcttcattgtttccaccttattttgttgttttttcagttttacctccggaagcgctcttctccgatttgtatgccaacactccgccgcttgcggtgcgcgggacgactgccgacgcaaccgtcacacagccatttgtgagcacggcggaagtgttgagaaaaatggggagggagccgaagaattattgagagaacgaatagccaaagacgcattgatagttaggagaagcacagaataattaattgtttcattatatttattcgaagcaaactctcagaggaagaaagagattccttttcaaatggacagagtgttctttggttcaaggccaatgtttcttgtgtggtaaatggatttatgagccgaagattggagggggtggggggggggggggaattgcgcgaccgaatgagaatggcttcgcaattagctgggattgagtgcgttcaaaaaccattcgttcatcctccgcagattgtctgttttttattttgatcagccataactcgcttacccaaccaaaacgaacaaatttagtatctaaaaaaggattttgaaatggaaaatctttttctaagcgaatgctaatttgttagcaaacacatctcagaaaaaagttatgagtttcaaaattttatcaggttataactaaagtcataaactactgaggaaacgtccgaaaaaacgagatgtgtaccaataaa

SEQ ID NO: 68734 - DNA, 2634 bp, Heterodera glycines
cgcttcagctcaacctccactccgttgtgcatgcgttggtcgtcaacagttccacgcgtcaccaaactttggattacttctttcacattttgacaaccaatcgcaaattgtcccaactccacgcggacttttctcaacttgcaaattgtacttccgtgctgaacgttttctccgtcatccttttgctatccgacaaaattgtcattgagaaagtgcaaagcgattaccttttccatccgaagtgtcgcattgacacaaccgacgaatcacgtattaatatggattcggaaaaattggaaagttatcgcaaagaattaggtaaatttattacagccaattttttacaaaaatttttttttttttttggtttagcggaattgacatatgtgccaaatttcaacaccgaatgtttctatttgggcattgaattcatgcggataaggtgagaaagcgatggattggctcttggtccttttcggcattttctcttgcttttctgtttagtgtaaatgccatgtcaaatgcattttcacgcctcaaacgcttttacctttcggaccttcggcggagagtgcaggaaatggaggaacgaatgaacgcattgggaaacagtgccaacccggcgcaagtcacacgcattaaaagcgcaatgagaagggccaaggaaatgctgaaggcaacgaacattgatgctgatttactgacatttgttgacaattgccccttttagcaattcaatctcagtgcctattgctacgaatgtttgttgcacgaccccaatttggtggaaatgtgtgtgcttttcaccaacaaactgctcagaatgcttctccacccgattatgcctgttttgtaaggatccttccttttttctgctttaatttggtatttttgtttcagtggtcaaaatgaattccaaccggactttgaccgcttcttcgctttccccgagacctatttggaagttgccgtcgagtttctcactttgctcgtcaggtatttgcttggattttgttttcgactttttacttttccatttagcaagtccaaaatgagtcggattttcttaaagaatttgtccgactttccgaagcaagttcttcatttgcttctcaacttggagagcataaagaaccctttcattggttcaaaggtaaaacccccgcttcccttttctgaacattttgctctgttcctctgattttttcaggtcgtcgatttgcttttcatgctgtgccctttggttaaccatgatgcatccgtcttttaccgtcaaattgtcagtgattctcttgctgttgaaggactgttcccatccctcgtcaaattttattcggccgttgaaacaactggtccgattttcttttttcttctcctttatgctcccaaaaccttaggttcacacactgaatttttcgacaagtttaatatcagaaggaacattcaagtcattttcaaatgcatgtggagtgatttgtcgcatcgcgacagaatggtccaatacgccgggtgttttttctgtttttttgtttatattttttatttttccattcagtgaattttctccgagttttgttcgtttcatcaacatggtgctcaacgacacaacttttcttctcgacgaatcgcttgacaaattgaaagtgatccacgacattgaatccgttatgagcaatgagaccgaatgggacaaactcagtcaggaggagcagcagctgaagacggaccaactcagagactcgaagggacaagtcaaaatgtggatccaactcggcactgacaccatggaactattcgttacgctgaccagcgacgcgccgcaaatatttcgcaacgaagcgcttggggaaagagttgcggcgatgctcaaccacaacctcgtccaggtgggctggagggggagggaagggaaaagccaaaaaaagaaagcccaaacaatgcacggcttttttagttgtgtggaccgaaatgtgcgcaactgaaagtgcacgacgcaataaatcgcttcgaatgggacccgcgcacattgacacagcaaattgtgaaggtctacatcaatttgggctcggaaatgttcgccaagcaaattgcgcaggatgaggtgacctatttcagacttttttatttgccgggacgcaatcccccaaaaaaggaaaagatgaatttttaaattgcaattagacattctctgatctccccaatttagcgttcgtacaccccggaagcattcagcacgataattgaaagatttaaaatgaggaacattcttacgatcaaccacttggaattgtttgcaaatttggcggaacaggcagaagcagcgtacaaagagaaaatgatgttcgaggaggaattcgaagacgaagtgcccgaagagttcaaaggtgtggcgcgagtgatattccccggaataattcgcctttttgagatgcgcttgtctacacgatgatgagcgacccggtcgaactgccctcgggacagatttgcgatcgcaaaaacattctgcgccatttgctcagcgacccgacaaatccattcacccgacaaccactcaccaccgacgaactgagaccgggtgggattcgtggggatgttaaaccaagggaacattccgagctgtaactaggaaaatgc

SEQ ID NO: 68735 - DNA, 53 bp, Heterodera glycines
gttccctgtctcttgtgaagatatcagattattatccaccatttttgttttga

SEQ ID NO: 68736 - DNA, 82 bp, Heterodera glycines
  unsure (1)..(82): unsure at all n locations
atgattgttgtggtcgaagtacaaattgaagaaactttttcattgcttcgaacccanttcgaaagccacgggaagtgtcgga

SEQ ID NO: 68737 - DNA, 387 bp, Heterodera glycines
taattaaatccattccttcgggggaccgtgccgggtgccgcggggtaagcagtgctggttcgtttcatcacggcaccgaaccttttggctagtcagcaatcgttgcttaacttgccagatcggacgggtgcgcatgattccactgttccaagcaccccaccaaaagcaaaacgatataaccaaaatataaggaaaaattttttaaaacattttttctccatcttcctttttgatactaaagcatcagagtgctaaaattaagttgtaaataaaatttggtgcgctttagagcactttctgaaaaaaatatttatgaaacaaaaaaatcgattttttcaagtgtccgtttggggtactcaaacaattatggggagcaaaaatccaacg

SEQ ID NO: 68738 - DNA, 795 bp, Heterodera glycines
atgctgatcaaaaaaggtagcaacaccaagttgatcagatcactccttcatggtgatctgatcagcccattttggctgggaacgaggggtaaatttcaaaaaaaatttctagggggttgggaaaatttttctggaaattttgagtaggcccattttatagagcacaaaatttgctaccgaattgcctttggaatagtgggtctacgatttaggcccgctgagatacgtcgacttttatttcggtgcctataaaaagtactgtatttcttaagaaaatagtgcattttacactacgtcaaaattgaagtgcccatacctcagccgctataagtcatagagacatgcggttttttgaataatcagcggccaattttccaattttgcgaaggggtctccggccatgtaaattaatgtaaatcaatgacctttttttgctttcaacaccgctttttacgcggcacgttttttccaagacttttgggggacaaggagggccggcggtgccgataggcgccgccgggaaaaattttgtattttttaatgcgatttgttaacagaatttgtaaaaaaatgaccaattgattaagttttgggtttttaggatgcttaacatgaaagaaaaaagttgaaatattttttaaaattaaaattttaattaaaatgatggtaaagaaaatgtgaggaatattctatccaagtggggaattgaacccaggcaaaaaattatgaaaggtagaaagtttaaccactacaccacatgtgcatgtgtgtactcccatgactaaatgaaataaa

SEQ ID NO: 68739 - DNA, 66 bp, Heterodera glycines; identical to SEQ ID NO: 53774

SEQ ID NO: 68740 - DNA, 249 bp, Heterodera glycines
atggaagagacagaaagtggaagagaaagtggaaaaggaatagaaagtttaagagaaagtggaaaaggaatagaaagtttaagagaaagtgaaaaaggaatagaaagtttaagagaaagtggaaaaggaatagaaagtttaagagaaagtggaaaaggaacaggaagtggaagagaaaatggaagagacagaaagtggaagagaaaatggaagagacagaaagtggaagagaaagtggaaaaggaatag

SEQ ID NO: 68741 - DNA, 2268 bp, Heterodera glycines
atgcaaagtttgggaaatcgccaattggtgagaattcggcggaaaaaacagccacagaccaacaatcaaaagacgaaacaacacaggcgaattccatgcccacgaagaatatcgaaacgatgcaaagagaggaggaacacattgtttggctttctccgttcattcaatcaaaagacaaatgcttttagaggggcgtaaatcgaattgaggaaaaaacactcggaaaggaagaaaatggggaaaaagagaaaatgaaactgaaaagcgaaagggacaaaatcgccgcgttggaaagagcgttggagaaaagcgtaaccgaatacacggccaagcggaacgagcagacggagcgaattgcgcagttgggccaattgcgacgcgaagcggagaaaagtgcgagtccattggacacgggtcagtcagtggccaagaaaacaccgagaaaagaaacgaccgttaaagggtttctcgttgaactgcacaacatcaagacggagttgctgcactccttcagacagagcctttcctctctggacagactttgtgtggaaacaaatgacaaaatggaatttctgaatggactcaaattggcggccctgagggaaggagagacatcggccgaactgaacaaaccgtcatttgacatggtaagagccaccattgtcaggcatagtgtggacgtgtaactgtttaaggaaagacggctccatctgattgagagggaatacgaaaatattatggaaaaaatgaaaaaagcgcgaaaaatgatggacagattcgaagggtgtcgcaaaaagcaaatcccgaggtgaatttattaatataaaccgcgccagcaaccaagggagaagggatgaattcccatcacatcccaaatgaaaaatagctaactttttataaatttaaagtttctccggcggcgcctaaaggcatcggacgactaaatccctcaaatttttcaaaaattttgacctgaaaatgcacaattggcaattttggcgaaaaatactaaacatgctattttgacacatagtgcttataagttcaaaaattatttaacaaaaagttaaaacttttttgggttcagaaaagcaaaaaaaaaaattatgcttaaggaggcttatataaactgaaaatatgaaaattcatagaacatcggaagacacaacaattgggccaattgaacaacgaaaaatcatccaaattaatgaaaacatcgcgaaaatgagtgccaaactgaattcacggcttcaccaaatacgtcgctcggtcgggcggaaattcgcctcgtcggcgactgatcccaaaaaattgactcaaatttccatccctttggccgatttttgtgcgttagaattggaacaattaaaactgccgatcgtgggaaatggtcgtccccatttggtcattcgcgagacgaaaagcaatttgcaacaattgcaaaacaacttgcgagactatctaatggtgagcatttgcaattaattagctatgctaatgacatttttaaagaaaagaccaaacgaggtggaagtgaagcggattttttctctcaaaatgccggacgaatcggaggctgtccaaacagtgccaatgcaatcggtcgctgatcaaagattggcccaacggatttccgaggcggcttctccgccgaagccccaattggtctccgttggcgtccaatcccccgattttgcagcccaaagtcgagaaaagacaccgaaaagtactcggggctggctttgtgttagtgtgactttgattgggttaaatcacttttcaaaaggagccccgttgaaaaagacatcgacgccgaaagctgcgaagaatggggggcaatcgctgcgaaatgccgtgccaatctcatcgacgcctttgtctttttcaactctgtctccaaagccaacagaagcggtttcaaaagagacaccaattgtggaaaaaccaatggaaaaagtgcccggcaaagtggcaatgcctttggccactccgcccaccgaaaaagcgataccatcgccaccagaaacagttgcgatactttcacaaagccaagccaccgaaaagggattgacggggggagaagagggcacggaaaagcaaagggaaagccaaccgacgggagaaagcgctgaaaaagcgaatgtggcggaggagggaatggacgacgaagcggctgatgcggcacgcgaggcggtgaccttcgattttatgaagtacgttctgccccaagaacggtccgtttcgaacatttccacaggtctggtttgg

SEQ ID NO: 68742 - DNA, 306 bp, Heterodera glycines
atgactcggcagcggtgccgcactgcgcttcctcctcttcagtctctgctcacaaccaacttccctccgcttctcaacatacctcggcttctctcagcttcgacccctcttcttctgctgatcaccaactttcatcagattcgtattcccaacggagtcccgcccaattgtggactcacagccaacagattagctcaaacacgccttacggcaacacgccttctacgccagcacaggccatttacagcggcaccagcccttccccaccgcaacgttttgaattcaacagccgcggaggggcgataa

SEQ ID NO: 68743 - DNA, 512 bp, Heterodera glycines
atggcgcacgatttagcggagatgacctttgaggtaagggaaatcattcgaagaatcagtaaatgtgcatttaataagaccattaattaatcaaatttttattagtgagttttccataaaatttgctgaagcttttcttttatattcaaatattatatttttatgcaaatttgtcactttttagtcagaagacattgagctgaagcgacagttggcactcgccactcgcgcctaccattgccacatgcaatcgctgaacacaaaccaagcactgcacacgctgcgcacgttcattggcgaccgcgtaaacaacgaatatttggttggtcgttggggcagcacacagaaatggcgttaattggcaatctctgtgcggagcaagcagctcgtttcctccgagaaaatgaaaaaaaacaaattttttttatactaatttagaaatttttcgtgaagaaatctgctagaaagttatttttataggaaaaattcgaacaatttttcagcttcgataa

SEQ ID NO: 68744 - DNA, 215 bp, Heterodera glycines
gaggaaacgagctgcttgctccgcacagagattgccaattaacgccatttctgtgtgctgccccaacgaccaaccaaatattcgttgtttacgcggtcgccaatgaacgtgcgcagcgtgtgcagtgcttggtttgtgttcagcgattgcatgtggcaatggtaggcgcgagtggcgagtgccaactgtcgcttcagctcaatgtcttctgacta

SEQ ID NO: 68745 - DNA, 823 bp, Heterodera glycines
atgttcatctctcccacgccggatttgggggcagagtccgcccccccccccgttctcctccgtcgcattcttccattcccaacaacgacaccattcacttcttctcatcgggccaaagggccgtcccactggatcaatggaaacgccactcaaagggggcggttgcgttcggtgattgtggtaccgaacgccgccggcaacgggcaaaagctcggggaaacgtcagccagaacggccgggccgccggccaactcaggggaacgttcccctcgtccatcaaccagcagttcttcggcccaaccgccgaagagcccggcaacaacagcaccagagctgcgagcgagaccgacggagcaattggcaaaagtggcggagctgcttgggcaggtcggcgaggaaatggccaaaatcctggaggccgaggagaagagcacggacgggaaggaagaccttctttccctcccttcggacggggaggaggtggtgccggaaacgccgccgccgcccgccgcaatgtcgcgaaaccgcgacgagagttggggtgaaggatcgggtcaattgtcctttacccggggctcgggcgggcactacaatgcccgtaaaatcgatgaggaggaggagaaccgatgggccaccccaggcgcatggtttactgcacccccacgagtctcgggcccgaagaagaagaagccgtggtaccattgatgatcgggaacattcccgttggtcggtcggtcggagcagaagatcggagagatcacgaaacccccgccaatctggcttttcccttccttttcgtccccttctttttttctccctatta

SEQ ID NO: 68746 - DNA, 1247 bp, Heterodera glycines
atgattgccgaacccctcgagaagggattggcggaggatatcgaaggcgaaattgtgaagatcagttggaataggtcggtttacagaaatgtttgctttcatataagattgaatataataaacacattaaatgattagctagagttttaaaaagttagtcaccgcttgggaaaagttaaattcttgcgcaaattaacgtttattatttgctatgctaacactaaaaatgtttaatgagttatggccttattttatgcctccgctggggaaaaaatctttcatttcgttggatttcccttcagaaaacaacttggtgactttttccaaaccaaatacgaatgggatttgctcgctgcgcgttccatttgggcatttggtcccgagacaaatggtccgaacatttttctggacgacactcttccgtcagaggtggacaaagagttgctgaagacagttcgcgagtccgtcatccaaggctttcaatgggccaccagagaagggcccctctgtgaagaacgttcgtccttcgctaattttaaggctatcaaaacaaatttcgcttgcttcagcgattcgcaatgtcaagttcaaaatgttggatgctcagatagccaaggagccgctctacagaggcgggggacaaattatcccaacttcccgccgttgcgcatattccgcctttttggtgagttctttccccatgcaattttcgtttctgatttttctttcgatcagatggcaacgcctcgtctgatggagccgtattatttcgtggaagtgatcgcccccgccgattgtgtgacagccatttacactgtgctgtcaaaacgacgtggtcacgtcacgaccgatgcgccgatccccggctcaccgctgtacacaatcaaagcgttcattccggtgatcgattcgttcggtttcgagacggacttgcggacgcacacccaaggacaggcattttgcatgtgtgtgttcagccattggcaggtaattaattgccctggaattctctgatgacttgccatcattgcctttttcagattgtgcccggtgatccgctcgacaaaagcattgccattcgtccactcgaattgcaaccggccccccatttggcacgcgagtttatgatcaaaacaaggcgaagaaagggcctctccgaggacgtctctgtgaacaaattcttcgatgacccaatgttggtcgaactcgcgaagcagcaagacttattcagtgggttcggcgtatga

SEQ ID NO: 68747 - DNA, 143 bp, Heterodera glycines
gtacaggcctggatccaggcctcgaggctttttacaaaataccgacctctactaaactccccacctgaattaatggttggattgacacgcggacaggggcctttggtgtcacaatgtgaatccttacatggaaaataaatgaa

SEQ ID NO: 68748 - DNA, 198 bp, Heterodera glycines
cttttcattggttttgattacgaatgcccacggggacatcgttttatggttgtggagccgggaaaagtgctccgacatcggcgaatgtccgggacactaaaaaccgatgcggcaccgttgatggacaatgacttggcaatttggatgccatgtccgtgcaaaaaggaaccgagaatgaccgcacaattaatgcggtag

SEQ ID NO: 68749 - DNA, 415 bp, Heterodera glycines
atgtccatgtgcgcggacaacaaagatgtcgaaaaagaggaagaagagaaggccaagaaaaaggtggagaaagaggatggagaactgaaggaagagtcggaggatgacgatggagatgaaattcagctggttggggagacgaaatcgaccagcaccgaggccgtgaaaaaggcaaaaaagaattgacaagagtgctgagtaatgatgaacctatcttaaatgatattgatgttgcatttagcatagaaaaaaacaattgttaaagaaatgtttgcacttgtaacagcctacaaaaaaaaaggcatagagaaattgccaaattatttgaaacactctgaaaaaaatttttgtttttcaccttaaataacagcacaatgaaaaggcgctgggactttcgttcaatgagcttttttga

SEQ ID NO: 68750 - DNA, 243 bp, Heterodera glycines
  unsure (1)..(243): unsure at all n locations
atgtccgctgtcgggagagtcgctgactgtcccgtcctgctgcgaatgctccgcttgctggttaatctgatggtgaagcatggacgaaggctgaagacgaatgggcatgagaggctgctgctgagacatggacgggaacatgtgttgttggacgaattggaaagtggggacggaagagacggggaggaccaaaggctgattctaaaaggcgtcgaaagtcaatgnccgttcnctttcaaataa

SEQ ID NO: 68751 - DNA, 141 bp, Heterodera glycines
atgttcccgtccatgtctcagcagcagcctctcatgcccattcgtcttcagccttcgtccatgcttcaccatcagattaaccagcaagcggagcattcgcagcaggacgggacagtcagcgactctcccgacagcggacat

SEQ ID NO: 68752 - DNA, 989 bp, Heterodera glycines
atggagtccccgaaggggtcgttgcccgaaattgtgcaagcgtcctcctgctgccacttccagtcggcccccggcgggcggcccaatgttttcgctgcacaacaaacgatcggtgccggaggggacatttccgcagatcagcaccagcaactgatcactgctggaggcggtgcagctggggctgatcactcgctgttgtcctctttccaacaccagcagcaacagcagaccgcctcctcggcgggagtcggcccaccggacggagtcggctgttccggctttcacatgttgcctccgccctacggcaacagtccgtccgtgttgcgacccgtcaaatcgctttcaggttcgaattgcgccacccccccccccacccgacgattcacaagaatattttattgatccttttttttgaattgttagactaagtagcgctttgaaatgataaagttttggcaaggaatgaaaaagtcgaccaaaacggcacaattcgtcgaaacatgaaaaacaaaatttaattggttaatttatgccccacgagcaaatgttgaattgcgggccattatattgcaaacttctaaattccttattcttttacatcaaattgttcgtgtttttgtccagatttgagttcgttggctgctgccggtggtggccaaatgtgctcttcgcaaccgtttggccaaatttgtccctattcgccgccatgcgctggccataataatgcaactgctaacagtcaatatggcacgatgaacagcagcaacagacggctaaccgaaacgggcattttgtacgggggcggactcagcaaacagcagagggactcacaggtgatggacaagacaaatggaatgggacaaaagacacaaagggacaatcgaacggagggacaaatggtcgaaaaaattggaaaaacaaacgctgataatgagacaaaagaaatggaaaggaatcggaaattgaaattctcagggaattgcttttaa

SEQ ID NO: 68753 - DNA, 151 bp, Heterodera glycines; identical to SEQ ID NO: 40413

SEQ ID NO: 68754 - DNA, 480 bp, Heterodera glycines
atgggattgtgttttgaaaaaccgagattggaatggagccaaaaagccgagattccggaaacaattcgggattactctcttatggaaccccaaattttagagctgttaaacgctaatcatccgacatatcgtgtgaaaatttgtgaagtaaaagaattctcattgaaaattaataatatatattattaatttcagaagttttcaatccctcaacaattctgttgggatgccaattcgtgtcacagtgacctcaaaatcgttgacgacaaatgcttgacgatccattacattggaaatggaaaaggtaaactattcaagacatttttaattgcattaattatcaattaattaattaatgatgagttttattgtttgtttagcatattgctctgtgttcgctaactattcgatcccgaactgtgcttcgggcatcttttatttcgaaatagaaatcaccaacttgaaaaagtgaataataaa

SEQ ID NO: 68755 - DNA, 896 bp, Heterodera glycines
  unsure (1)..(896): unsure at all n locations
atgcgtaagttgatcgccaagagggacgccgcncgggatgaggacgatgttggtcactcgcataaacaaagtctgcactctgagaaccaaacctcttggaacatatcgaatgactgtccagttgagaagcgatgcaaaagatttttggttaagcagaagaatttgattgaccattttagaccttatcatgaacaaagaataatgaaggtaactatgtgtctatgtaagcaagactatgtgaacttaagcctaagatttcacaaccaactaacgaaacagtgtaaatcaatcgaatgaagaaaatatttttatttggcattttgtacgtgttaaattactaaaagccatttcaaattgtttttttctttttaacctggcttttgaactaaaaaaattggattatattctaaacatttttaaaattttgtatttacaggtgaagatgaaaaaagcaccttctgtaaagaagcgcaaaagacagagaaatattagaaagtctgacaatcaaattataataaagaaaacttgcaaaagagaacgcttaaatttgagactaattgacacgcaccaaaactcaggatcttcaaggttgcctgaatgcaaacatggtagttttgctggttggtacatttgaagatgactataaattaagggccctgtcttttattttcaaatgaagacggtacaaaaaagtggtttgcttgttccgtttttcggtccaggaaacggtgtgcgttttccgtaactatccatcagaatggtgtccttcagccatataaagctgaggaagcaattgaatcattacccattgaagagtatggaaaagcgagaaaagggtacgccgccggattttgatttttgatttaccctcagcaaatatatccaaatttaataaa

SEQ ID NO: 68756 - DNA, 49 bp, Heterodera glycines; identical to SEQ ID NO: 60106

SEQ ID NO: 68757 - DNA, 312 bp, Heterodera glycines
atgggaacagtgaagaaaaagctggaagaaaagttatttgatgaaatatttggagaaaaatgggaagaaaaagaagaagaaaagcgaaatgaactcaaaaaaagagaaataattgcaaaatattatagaataaaagaaaaaatcaagcaaaaaggaagaaaattctcaaaaaaagaatggaataaaattgaagaaaaaataacgaaaaaattggggacaaatcgaatgaaaatttataaatggatcaaggaattggggcttaatcaaaaatttaatctgtcaaaattaaaaacggatgaacaaaaattttga

SEQ ID NO: 68758 - DNA, 1401 bp, Heterodera glycines
  unsure (1)..(1401): unsure at all n locations
tttttttttctttgattagcgcatgaaaaagaatgggaaataaattcagaaattcttgccaaaatgagggcccgtgatgcgacaaaagcgaagaaaggcgacgaaaatgaactggacgaccaaaacgacgaaggtgctgaagaagtggaggcaaaaacattgccaatggctgaagaagcgggcgaaacgatagaagagaatgagtcggaagagagttcggaggaatgatgcgacttttcgtttttccttaccattttatattgcataaagcgtttaacaattaatttgaagctactgttttgcagccttttactgttcgagttaaatacagattgcttacatatttgggatacaagttttaaatatagattctttggcgttatgattggtttttctgagaatgtgaatgaaattacctagccaaaatttttcgttgactgattttgtaataaaaagaacacaatcaagtggtttttgctcacattccaattctttcttttagtttgccccgttgaatttttattcgcatttattggcagtggtcaattgccttacaattagagtcgaatattagccgtttgattgaataacattcggagttattttgatgatttttgacccaataattgctcggatgcaattggccactgaaaattagattcgttttttccatttccagtggtttatgcagtcatctgaccttattattgaggaaccagcaacgaaaaaggcaaaaatcatctgtgaactgccgaactccgaggcatcagaaaacgtcactttttgttctattggttgctcattttcttgctgactcttttccgtttaggcaccaaagagtaacggagaacaaatggcggccatcgacaccaatttgtactctcggcagatgtaagccgcgacaaatgcctttgatataattgcttattgtggtttttcctgtttagttatgcgcttggacattccgccatggaacacttgcgcaaggcgtcggttctcgtcagtggcctcggctccgtgggcgtggaggtggcgaagaatctgatccttggtgccgccattctttgattttactttgcatgactaaacaatcgccgcttttcaggcggtgttcgctcggtgactcttcacgacacaaaagcgttggcgttcagagatttgtcggcgcatttctacgccaaggaaagcgacgtgggaacgaaccgtgccaaagtttgcttcgacaaattggcggagctcaacgacactgtgaactgtgcattgtctgtggaaaatctgtcggaggatttcgtcaaacaattcgacgtcagcaaacgcttacttccttttcccgtctcgcctaattccgtcgttctttcagtagggcgttctcaccngatgcgtccttttccactcagacgg

SEQ ID NO: 68759 - DNA, 382 bp, Heterodera glycines
atggccgctttgaacgaaatgctagctaggaatgtgccggcgaagaatggtgatccggcattcttcgagatttgccagcaaatctgggcaattctcggccaattcttgggtaagtttgtcttatttggtatggggaaggcggaagatggggaaagaaaaacggccaaatgcaaaaatgaatgattgtaaggatggaaaagggaaaaaatgggaaagaaaaattgcgagatgactatcagtggatcggtgtaatggccgagaaagccattaggggaggggcataaatgtatgcaattaatgtgtttttatttaaaatgattaaaaatgattttaaatatatatatttatttatttgaggaaaagtttcgaaattataatcaaa

SEQ ID NO: 68760 - DNA, 4548 bp, Heterodera glycines
atggaaaaggccaacaatgacctcgtctctttccaagacggagtgaaccgctcacttaggcacattaatagacttgtcaaagcaaattatgatgccatcaatcgcgccgctgctgaagtgaacacaaatctacagacatgtgaggcccaaattatatcactctcagatagaatggaccttttcaaattggaacacaaagatggaacagactctcaaggggggaattctgtgaattttacaggaggaaatggccaacaaaatacctcattaattcgagtagatccattcgtggaacagaatcctgacaataacaatgaagtgaatacattaaccggagtaacgggtctagaaattttctctcaagaatcagtaacggcatttgacaaatggtcgagacgatttagggattacattcaagtagtaggcaaaaatttggatgaagctgaaaaattggaccgccttcgcctcgccttagacgacgtaccacgcgacttgtacgacacactcaccccggcagaaacaacgacagtattgcgagctctcaaatttttaagagaaaaactcgactcaccacaacgcaaagaattggccaaaagaaatttggcactgtgcaaacaacgggatgatgaaccggtgggaatatttttaaggcgtttggccccattagtggaagttgcttattcaaacctggacccggatcagcttaaagagcgcttgagtgaggaattaattgaccgtttgagacctgacttagcatttttaattagactcacagggctctcaaaaggaaaagagttagacatagtcaaagcccaagctgaagagcttgaactgcttcttaaaactcataaaggacaaattcccgacccaattctccaaacagttcatgccgtccaacaaaatccatggacgccaagccgtgaacgggaccgacgacagaactacaattcaaatgaagcgggaccatcaaattcataccgcaatttttcaaacagcccaaatcgtggaagatatggacaaggacgtggtggcggcactttcaaccaaagacaaagaggccgaggaaattggcgaggaccaaacaacatggccgaccgcagctggaatcaacgaccgtactgtactttttgtaagaggacaggtcatatggcatacaattgctttcagaggaaaaaccaattttctcaaagacaattcaccccaaattcaggaccaaacctaaatgccattcacgactctcccgaatttcaccaggatgcaaatcgtcaatcatcaaatgtcacattggacatcaatgaattgcttagagcattcagtgttatgaacactcaaggcccgtcttcaagaggtggaaatgaatctgcatcaatgaatgccattagcacaatgcctgcagatcacccaagagttgctgaagttgcttaccaaggaacaggtaaaactcaggttaatccatgtgaaccaagtgaccagcagaaaatctcacagtgggaagggattggaccaaaattgtccaagtatttcatggttcttacagcattcatgttactcattaccggtctcattaacaccactaccgctaatactattcccaaacaccccatggtatgccaaatgataaaagatggagtactttggcaaattcctaatttgtcaagctgcccaaagttctcattggattatttggaaaatcccaaaattaagtcacttcgattgtacactccaaatgttttcgaacatcaaaccccggcttggtcatgcagaaaaataagaaaatcaatcaagaaatatacaagtcttacaaatgttcccatttcagagatgcttgaaccaattccgctcgaaattagttcagatgaatgctggcaaatgattcgccaccgtaagtgtaaattgggggtactgattgaagactcgggcttatggcatactgatttgaaaattgacaactcacctcgccattggttaattggctcatggaaatgggaaacagtttttattgataattgttatttaatcccaacaaatatcacatcccattttggaggaaatacagtatccattcaaaattttgaagagctaaattgtccatacgaaaaaggcacttgtttaactcaggacaattcattaattgtttggaccccagaaaacgaaacaaactgtgaattccaaagcattggaaattggaaaggcgaaatgatgggtcagcattggatttcgtccaatgagcccctaatgttggaattttctcataatgccaaaacaattttagactgcgacaggaatctcacaatttcacaacaaggttttgcagcagacacagtaagtcttaggggaaggaagagaacccgagttacacgcaccacggatgggttaataacctcctcccaattagcctcagaattatccttccttaactggaacatttcaaataccatgtcattttcatttcaacataccactcactcaatttgtgaatacatggaacaaacaaggcgatgggttatttccgcctcgatttctgaaccaattacttttgcccgtataactttcaagaacccaaatttggttgctaaaaatttggccccgggaattattaaaatttggccatgtgtgccattggagccgaatcagtactcattttatcctctcgaggaatcaaatcctgtgacaaatgaatgttttgaatttcttccaatcaaaatcgagatgagaggaatccaccaaatggcgtttgtcgatccaacaacaatgatcataaatccatcatcgaaaaaggcaccgtgctcaagcaatcagaaacaaatgattgtaattgataatgaaattttggaagttgatcaaaaatcagcttcagtttccagaattaaaattaaagaaattggaaatttgagtttcaatcaattgaccaccccaattctccagccattttcatttcaccaattggtcctaacaaatgtaactgatattcttacccattcttatacaagtaacatgatcaaagagtcacaaattgcttttcgaattcattttcagaataaaggaacttcaattgtgcccgacgaacaatggactaaaacaggcaaggaattcaaacattttcttattggtgactgggatgggattttctggaaaattttaacaattttagtttttatcaacacagctgatttaatccttcgtttttattttattttgagaaaccagtacataaatttgggacgtagtaacacagagaagcggaacaataacacacacattgatgataggcctgggtcatcccaatcattcgaacgatccggttttgtaaatgagagaccagaatacaccccgatcaggccgttatcagaaattgagaaagcacccctaaggaacaaaacccgaagagtttcatttaaattaagaagaaaaaccgaaacggcaacaaatcgaacaatcattggtaatgtaaatgctttaactcagataggagctaattctgaattgctgtcaatgatgtcattatctaacactgctgtaatttcaaccataattaattcacaaattgtcagatgtcttgtggacaccggttcaagtgtcacggtggcgtcaagggcactgattgacatcttgggctgcaaaacggtaccatcacatgaggacgcaatcagcgcaagtggtcacataatttcatttcgtgaaaaagcaaaggtaatgctaaaagtggcagacatttgtgtcccaattactatttattttgtaaatgaacaaaaatccgtctgcaaccgagattatcaattaattctcggatgtgactcactccgacattttggcccttttaccgtaaatatagacaaaaacaaaattcaaattggaacacaatggataagcttaggctccaaaaattatgaattaatgaacaatattcgagcctttgctgccgaaaattacacaattccaccttcaagccaagtaatgatcagagcaaacattaaaactgccttacagccaaaacacagcttagttgtggataagcccgatttaaatttgctaaacaatgaccttgggattgtaccaagtgtgtcggctccatttgtggaggatatcccgttgacaataattaatccatcaaatgatcctaagattttattcaaaggcatgcatttagcctatttaaacgaaatagtcgaaaatgatggaattttctacgaatcagaccaggagaaaattaaaagcgggaatcctgacccaaatggattaactgatccatcattcaaaattgacctctcaaaatctgacattaatgaaagagaaagagaagcacttaaaaatcttttagaagaatttaaggacatattttcaaaaagtcaatatgatttaggctcattttcaggtggcgaacatcattttgacacgacaaccgaagctccaatttcttcgccgccaagacgaatgccatataaatacagagatgaattaaagaagcatattgaacaattgcttaataaaggagtaatggttgaatctgagacatacagaaaaaggatggtggaattagaccatgtttag

SEQ ID NO: 68761 - DNA, 623 bp, Heterodera glycines
ctggttatttgccttcaaactcgcctcctcagggcgaagttctgattcacggggccaatgtcgcgttgggttacttcaaaaatgaggaaaagaccaaagaggacttcgtcgagttggacggaaagcgttggttcgccaccggggatattggagaattccgtaagcgatcgactccaccaaaagcattgacataatgatattattcatttttaggcgaggatggcagtctctgcattattggttttagtgaataatattgtcgatttaccttccattttaagaccggaagaaagatctgatcaaattggcccacggcgagtacatcgctttggggaaggtggagacggcgctgctgaccaatccgaacgtggacaacatttgcgtttatggcgaatcgcacaaggactatctgattgcacttgtggttccaaatctcaaaaacctgcaagtccttgctgaaaaggtaccgtttgaaatcagaagcagtttccgcttctttacaatgataccccagcgcttctcccctcttcagaatgacgtcaatgagccgagtattgagagaatttgtgccaacaaagaaatgcccaagattctgcagaaggaactccacagctttgtttcgg

SEQ ID NO: 68762 - DNA, 397 bp, Heterodera glycines
  unsure (1)..(397): unsure at all n locations
tgagtaaacaatgtttttatccaattaacataggttcatataagcacattaagtaaattggtatcacacatttcaattagagaattaacaatttgaataattggtggcgtaaagaaacttaattatgggatacaatccttttcaaaatctaaggcaacaaaaattgtcggaggtgataaaatttatcgactggtcatcaataccattttaataattgatatcatatgtcttgaggagcaattaagtcaattcagttctcttcataaagctgcctgatttcctcctcgaacttcttctcgatgttcttgcgcttcagtttcaatgcttcggtcagcattcccgaatcggcagtccacggctccgcacaaatgatgacttttctgnngatttcctccct

SEQ ID NO: 68763 - DNA, 2366 bp, Heterodera glycines
atgccttttcctcccttagctgacgacccatggcttccctcagaaggcttcttcgatgtccgtggacgagcaattgggatatatcgcaattgggacgaaagacggcagacttttgatgtaagtttttccttaactgagaaggcattggggtgacttaaatgatgggttcggttttttgtatggaatttcacgggatgaaaaaatttcccaaacatataaattctggtccatcattttgtattttaaactcccgaaattttctaacttcctactactaaaaatgtttacttatatttaagctggactagtttttcttcgttttggtttcagattttgttcaaacggcgcccaacatttgtccgccaattttggcagcaaattgccgatctgtgcgctttactttgtcgcaggtgcgaacactttgctgattcagtgcaatgactcctccacaaatgctcagcattttgtacggtgtcaaatcacttctgatcagctcactgtcacccatttgaacaatgaaaggcatttgaagcggatcacttgctgtgagatggttggcctcgccgatgggcagtccgcccttctgattggtattccatggatatttaaatatttgaaaaggaaaagtgttttgaattaaggcacaataatcggcaacatttatgcacttttggtgcgcaacatggaacttactgaacacgttgtttttctcgacaccgctctcaaagagtaattaacacttaattagcatttactgcctattaattatataatttatttgcccttggatgttccaatttaagcatttccgagttcgattctcagcaaaagcaagtgaacggagtgaatgttcactcggaagaccaatcgaagctttacattctcttcaacaattcatttgttgttttttacgacattacttccgacgaggttttgcagacgttcaaatcggagacgccaattacggtaacaaacggcaatgagcagttaagcctttaactttgttaagtttatgtcgacgatttcctcactcacaaaattgctctgttctcatgccgatggcgcttattcatttctcggtgtttcagagaaagggtttgaaattgagcgcaaaaggccattcggaacgaaaaaatgcacaaaaattaccaaaataatttcttcgaaatcaccaaagtctgctctctcttttgcattttcaaaatgtcaattttcagttcctgcgatgaatttgtcattttcgccggcggtgttcccctcgatgagctcgacaatcgctttacgctgtccgttttctgtgccgacaaatctctcattttggattttgacagtgccattttggatttttgcgttttttgcgccaatgatagtaattttttccccatttttttcccctttccctcccaacatgttgcagattcttcccacattttgttcgtcctttgtgaggatgaaattgttgcgattgatttgcttgatcccatttggcgaatgcttccccttccttttctccatccaattcactcttcccctgtgacttgtgttaccacagtcaattctttgtccgaaaaggcccaaactttgcttggtcgattagcgaatttgcagcgaaatgcttcgaatattttctcgaggagtaatttgacactaaaaaacggacaaattgcacaacggagacgaatcaacaacaccaacgcggcaaatgacctgcaattggttgtcactgggtctgtttttgcaattgcttttctctttttaatacctcattttccattttattattaggcatgaaaatggtgtcatcaatgtttggttggcttctgaattttcattcaagccctggatttctctaaacactgcgcgcgattttgagggctttatcgatgacagtgccccaaatttactgcaaaattccaacgaagaattaacaagaaaggaaccggcagacgcaaattccgatgaaaataatgccaatttttgtttgccacccgtcagaaaggtcggccgagttatttctgctaatagaaatcacagattcatttgcatttaggctggcttattcgacccctattctgatgaccatcggttggccgtgcaaaaagtattcgtcgactcccaaagtggcgaaattgccgtcgggggaacagcaggacaattgttggtttacgaagggctgccgaattcaaaggtaattgttttgagagacaagcagaaaaccatgaatttcagaaggatatgccaaggaatgaagtgctgttgctggacatgacgtcatcggaggatgccgcccatctccgacttaccggccgtcttccctccgagtcgccaatccaagcgaggaatgtgccggccaattaccccccggg

SEQ ID NO: 68764 - DNA, 889 bp, Heterodera glycines
  unsure (1)..(889): unsure at all n locations
ttttgtgataaatatttttgcttgattttgctcatttcaacgccccttttcagattgtgcggttacccaccctttttctccacncatgnccttccaatttcncccgggcatgaaaaggtgggttttcacaagagaaagcaatctttagaatgaatgaatgatgctttcgttttgcttagccgaatccgagctggccaatacaatttttcgggccccgaatgggaccgcgtgtcagaagcaggttccttccgccaatcccttgcctttttgccattttttgttttattctcagcgaaggacttgatcagacgttgtttggtcaccgacccggacgaaagggcgacgatcactcaactaatgcagcacaaatggatcactcactaccaacaaaaatccggcgactgcgttggccacccaaaaagtgttaaatgaaagagaggtcgactggtccgacttttcggtgtttttttttctttttccgcaaacaattgctgacaaaagcacgtcgaatggatcaacttgagaatgtgaattgtgtgaattagcgcgcctgtttgttgatttttttaaattttggcgacccgaaagcaggaaaatgtcgattttgccgacttcccccggtgcaaattttggagaaatttaaaatctaatcttttgcctcatcgaagaaactaacaaaaattaccagcaatataaattcataaaaataggaagagatggaaaatgcattagcgacgatgcgagtgggcgacgtgcacatcaaacaaatgggagacgcgcgaaacgcacttttggagaagcggagaaaacggacaacggaggaggaagagcaaaaagagacactgccggaggggacaacgacggaagagggggactgaaaatgacgaaa

SEQ ID NO: 68765 - DNA, 299 bp, Heterodera glycines
atgacaaattccaacctgggtgagcacacatttcagataagcttcctatcattatttcttagaaacaactaataatctgttgaacagttatttcaaaataaattcgaatatattagcttattatgcatcttcagtgtgcattctaaaataaaatcattttttgttctaattttatgatttatttgttttctgttgactaaatagtcagttcttatagcaaatattaatttatatttgcgtagcttcaaatgagcattctgccttcaatttcgaagggaagtgaatttttttataataaa

SEQ ID NO: 68766 - DNA, 274 bp, Heterodera glycines
atgaccaatttgccttcaatttcgaagggaagttagtttttttataataaatagatagagagcaaaaaccccaattgtataatattcacaaaatttatctatgcatttgttgaatgttcctagacccgatcaaattttttaatcctttatatgaaaacatttattgcaggaaatgacaaattccaacctgggtgagcacacatttcagataagcttcctatcattatttcttagaaacaactaataatctgttgaacagttatttcaaaataaa

SEQ ID NO: 68767 - DNA, 926 bp, Heterodera glycines
atggaaaccctgttggataaaaatacctttgctgtaaccgcgggattcaaatttttcttaccttttccgaatgtaaattgtcatactttctcccaatcaattcactatattaatctctctgctgtccattcatttaatcccgtgccattcatcattgtgttcttttatctcaaatattaccatgccatttcaatctcattcgcctctttttctaaaagcactttcattcctccaacaaaatccccttttgcgtcattactctctccttggaggaaggcaaatcaacacttttttaaaattagttttttgaggagaattgccattactttcgtacccaaaatctcaatatatatcccactcaatttgggtcattctgctcatttgtaagtgccactgttttatgcccttgcaattcccttcccaataataatttcactgacccatccaaaatgctctgagattgtttgttataatattgatccaatcattcccacggtttatgctgcgttttattttttccattcgttttcttataataagtccttctcctagaaaggggtaattccaaataatctaaagccttaaatccggaggtttgatgggtcggcaacaataaaatctatttgcacaaataattttaataaacaattattatgtaatatttttgttttgctttattctataaaaagtcaatttttaaacaaaaatacatgtttatttttgcttaattatatttaattttctagtctttaaagaataaattctcctcctctattataagaattactattgctatggacacatttgaagaatttgttattgtcaacgaaaaatcattcaccgatattttactcacatttggttataatcgaggcggtaacagtgagatcaaattcagtgatgtcactcaattcgctgcactgtaa

SEQ ID NO: 68768 - DNA, 768 bp, Heterodera glycines
caaaagttttttacaaccacttattgccaatctattttcttgcagatttaaagctatccattgcctgccggttctcggcacagcaaagcactaatacggtgtttgactcaattcaaaaaataattcattacccaaaagtttttttacaaccacttattgccaatataatttcttgcagatttaaagctatccattgcctgccggtctcggcacagcaaagcactaatacggtgtttgactcacttcaaaaaataattcattacccaaaagttttttacaaccacatattgccaatctaatttcttgcagattgaaagccatccattgcctgccggttctcggcacagcaaagcactaatagggtgtttgattcacttcaaaaaataatttcttacacaaagttttttacaaccacttattgccaatttaatttcttgcagatttaaagccatccattgcctgccggttctcggcacagcaaagcactaatacggtgtttgactcaattcaaaaaataattcattacccaaaagtttttttacaaccacttattgccaatataatttcttgcagatttaaagctatccattgcctgccggtctcggcacagcaaagcactaatagggtgtttgactcacttcaaaaaataattcattacccaaaagttttttacaaccacttattgccaatctaatttcttgcagattgaaagccatccattgcctgccggttctcggcacagcaaagcactaatagggtgtttgattc

SEQ ID NO: 68769 - DNA, 671 bp, Heterodera glycines
atgtcaaccgaccacaaagagagagcaacacaagccaaaaaagttggaattaaaaccaccaaaaatagagcaaaatttgaacccgattcacgaccatcgacatcaaaagtcgcgcctcggtcgaaaaaagagcctgagttccagcttgacccacggccatccacatccaggcaagccggatacattcctcctccggcacccaaaattgtaccaaaacatgagccgacaaagagacccgtgccataccgtatcccgaaaagagaacccaaaattgttgaagaaacgccacagaggcaacagcaacctcctgctgctgctgtcgtcgaagaaatgtttcttgttcctccgcctaggagggggaccaaacgccgctaccctgtaatcggtgagaatgatgctgaggtgcgcataagaaaacgcgtgaggcaagcgaggagggtgcgagtacagtactcacccgagccgggtccatcaacatctgcacaaagtgatgaacaacaacatcgagaactgtttgccatcccgtcaaatcagctgaccatgaatcagcgggttgaacgactgtacatcaaatgcaaccgttatgcggatcgtatgggtgtccgtggcaatacaattaacaccgcaaacggcaagccgttggcgcatagcaatttgcgaatggccatcag

SEQ ID NO: 68770 - DNA, 617 bp, Heterodera glycines
atgccaaatttgaactgcgtggagttcgacgacacttgcgcatggcacaattgccaaacgcccgctgaccagctgatgtggtttcgcacttcggcaaacataagcagtgatcagatgatgaccacgacgggcactggagtgatgccaagttgggatttcgctatctcaaaaatcagattttttttcatttttttattggtgtccaaagaaaacaaaaagtttcgacgaattttccatgaaaatatattaaaccttctttttaaacgaccatttgctatgaaaatcacggaaaaagcattaatttaaataaaaaatttttttttcatgttttggtaaaacccttaaaaatgtttgaaggtccaaggtttttcataaaaaggacggataatttacgatgatccaacaataagcggacggggaataatgccaaatgcaagtcaagaatcactttttaaaattcgaatctccaatatttttaatagacggaagttatgccatcgcgtcaagcaacagtgttaatcagtcacttcacgcttgtctaattagtgatgttgtgccttcactaccaagcaatggttccttaatgttcaggtaaaaattggaaataacggaatcaa

SEQ ID NO: 68771 - DNA, 1695 bp, Heterodera glycines
atggacattttcctggccccaaaactgccggtcggcggcatggagaactggggcctggtggtgctccacgcggacgctgtccgcatttcaaccagcgacggaccgttgccgctcggcaccgacgactcgtcgtcctcgtcacgtgccgcgtcacgcgaggagcgggcacgcgagcaaaagcagcacagtttgatgctggtcgaccgccgctcggaacagtaccgggccgagaaggccatcacacacgaattggtccaccagtggtccgtttttacgttggaccttgttttttgatgcttggagttggaaatttctttaaaaacctaattgatttctggttcatacaataattgtagaaatagggattttgcttgttgactaaaatttcctgaaatccaattttgggctcaaaacccaccgtaaaacgaaaatcgccaacatcttttattctaaaaaaaattaaaaaaaaaaaaattaaaatatggaaaattttgtggttcaggttcggcaatttggtcggcatttgggaatgggaagagctgtggattgccgaaggctttgccacttattttgtgttcgactttctcaacgcggccaaccatcctcatctgacgggtgagggagcttgcaataaatgctatgaatctcatggaaaatggcattttttggaaaacttagcgtcgaggctaaagcgagagataccaaagagtgttaagatgccacaatttggcaaaatgacttcccagcattggatataccataaccgattagttgagtaaattttggatatattttcgaaatcgaaatttgaatttaatgaattttttaattaggcaaacaaaatcaattaggaattaatttgtttattccgcaatttattttcgtagagcacgagtattacctacgactaattgagctgatccaacgtcagtccactgacggacgttcggcattggtacgaccacttcggacagccggccaactctaccgactgtttgacggcattcatttgtacacaaaaggtattaaaactaattaccaaaacaactaatgactaattaaggcgataattgcctaaattaaaatagaattttaaatttggatcttgatcaaaatttttgagaaaagctgaatcattttgatttgtaatttttgttttttcaattcttttaggaaaaaaaaaatttaatttttcagtattttttaaattaattttttcatactattatcattaacctaaacccaggtgccgtgatggtcaaaatgctgaaggacttggttgggcctgccgagttccgtgccggcatcacgcgcttcttgcgcgagaactccttcaagtcggtggaccgtcgcgcaatttgggccgcgtttcccaccgtcgctgaccacggcgttgatccggtacggctgaaggacgccatggagccgtggcttgtcaaccgcggcgtgcccgaggtggaagtacagcgaaactatgaggaccaatctgtgcggttgaagcaacggccggccgatcagaacagacacattgtgtacctggacgacgaagcaatgcagcagatgaggatgaactggaaggatgaggaggatgaggaaggaggaagagagaaaaagggggtcggaagaggcgcaggggatgaggaacatgatgaggaagacgtaggagaagattggtggaagatgaaaaggatggat

SEQ ID NO: 68772 - DNA, 257 bp, Heterodera glycines
atgctgacatcgattgcttttgttccaattggcggtctcacagaagcagtcaatgcattggacgttgagtttcgaaatctgccagaaatgcaaccgatgctggaatggtttgtttttttgctatcataaacatgccaatatttacatttcctgcgtacaggttgatgaataattacacggtcgtccacgcgctgatggttcgcgaacggaaccgcgtttcaaagccgaagcttggaatgtctaggaaagaacgctaa

SEQ ID NO: 68773 - DNA, 320 bp, Heterodera glycines
atggaaaatcgattaattcttggccattcattaattgccctaattattggcaattcattaattgccaattttgattatgttcttactaaaattgcacggataataatgaggatgaaaaatggtgaagaaaaatgtttgaagttggtgacaatggccagcaacagcgagcagtacagcacggcagacggaatgccaatggccaaagcgaaaaaaagggggcacaaactcgaattggccaaaatggtcatggcggagaagaacggagcagagacggaggagcccattgggggaggatgaaatggtgtaacggggaggaaata

SEQ ID NO: 68774 - DNA, 400 bp, Heterodera glycines
aaggaattaaaaatttttaaaaattttattcatctccctttttgatagaaaaagcatcagagtgcctaaactaacatgtaaataaaatttggtgcgtttcagagcattttctgaaaaaatatttatgaaataaaaaaatcgattttttcaagtgtccgtttggggtactcaaacaattatggggagcaaaaatccaacgcagaattaaagtacagactatagggaagctattcccgaaggattcggtctccccataaatctgggcgcatcggttcggggggactgccccgaaaacaaaaaaatcgattttttcaagtgtccgtttggggtactcaaacaattatggggagcaaaactccaacgcagaattaaagtacagactatagggaagctattcccg

SEQ ID NO: 68775 - DNA, 248 bp, Heterodera glycines
taggggtgtattttttgaaaaaatttttaggtcgattcttaggggtgtattttttggttttattgcatttttgttaaggaattttccaaaaaatgccgaaatagtgaaaaaatagtgacaaaacgccaaaatagtgatttttaactattttagtgacgaagtcgccaaaatagtgatttctagtgacgaaaagtgacgtccaaatgaaaaaattttaacgcagaaatgcgttttttgagctcctttct

SEQ ID NO: 68776 - DNA, 797 bp, Heterodera glycines
atgccgggtaccagttcaacacacaaagagtcggtgttcatgaaactgaacaagcgactgacagtgttggagcagaacatgtcgctgagcagtgagcatttgcttgagctgagcaggcgctgtgtgaacggagcggcgcgggcggagaacgaattgaaacagcaaagggaaggcattgccaaggaagccgaacgcatggccaagcaggaggccaaccgagtggagacggagatgaaacagaaggtagctggttggccaaatacggagcataattataccattccatcctctcaaatatatatttctattaattattataccaaaaatatttttaatgatattatttattgggttttacagatcaccgaattgcaaaatgaagtacgccgtctctcccaacagcttcaatctgtccaaacaactgtccaagcgactggcaccggtggttttttctaccggcccatgctttcccccatgcacgggtacagtgcaagcgactcgcactgcagaggcgaacaaggtgtgtccatgttgagaaattgaccaaaacattaaccactttggggaagagttacataattatttaatttgaaaaaggggcaattttttaaaataatcgggctatgccattccgtttttaagcatgccttctcagtgatgcaatgatgggcacaaccctttcgccattgcacagcacttcagccgctccttacagcgcaaattcaatgccggtctccgcccattcagcatttgaggggaaaacgatggatggactttggacggtaatctatgaatag

SEQ ID NO: 68777 - DNA, 157 bp, Heterodera glycines
atgccatggttgcgcgtgccgcaattggacgagccggacatgtgagtgaagcgcgtgggggggggcaattaattaactaattgattaaaattgctcattttaaattttccaacaatttttcaggcacgcaatgcgatcgcacgaaagaagtgcatga

SEQ ID NO: 68778 - DNA, 210 bp, Heterodera glycines
atggccggggtggactacgtgctgaagtttatgcaaattgctgaacacagcgaacaacagcgaagcagcggcagaacgccaaaactgtcgcaacaaaagtgggcgatggcggaggaggacgaaatgccacaattcatcaaaagaccatttcgggtgccgagtgcgcattcggtggacaaatttgtggacgaatccctcaaatcggacggg

SEQ ID NO: 68779 - DNA, 645 bp, Heterodera glycines
atgcagaaaaacacggtcctggtaagtaaggcctgagatcccacgaaaatttgaatttacacaatttgcttgagctggaaaaatttagcattaaaaaattgtttttattagaatcatttaaaaattctaatttcgaaaggagtcagaaaaaattttagttcttcaaccataagttctattaataaaaaagaattcgtattactacaataatctcagaccaaaagtaagaaaccaaccaaaagcaggctgaaacaaattcgaaaaaaaaataccgagctttttaaattataatgatgaattaatttaattttttatttaaatacattttaatcgaatttttcaattatttctttatcaaattttttaaatttttgtaaagccttcgccaccgacagaacgcgagtgttatgacaatgatgtgtgttgcattcagtgggccgcgaatggcacatgtaaaacggcaccacgttacatgaacacatggtgccagggttcgtgccgttttgacgggtgccgaccgtacgccgattatggcaaacctggtaagtaaaaaatgaaaaaatattttaaaaaattgcattttaacaaatcggactttgaaatttttaaaatttttaagaattttaatagatgtgatgaaataaa

SEQ ID NO: 68780 - DNA, 540 bp, Heterodera glycines
atgaacaagaagcacaatgtgaccatggcacgtcgtcggccgaccaaatcggccgcttttccccccgccaatgcgccaaatgcgccgccaaccaaaagagaagcggtggtaatgccctgactttgcttagattggaaaagcaagcaaatctaagcattattgcctgaaagtgttcagacgaaggtcggctgtcatgaagtgcaagctgtcactgattatgcttgttccatagccaagcaaaaggcccccgagggcgcaaaaccaactgatcagactcaaaaacagagtggcggaggacgactcggagtgatcagaagcagcagaggacagatggagctgaatgggcgagaccaaaccaatcagcagaagagagaaagggagagaaaggaacaaaaacgaatgcatacgcaatttgggacagccaaagaaatgcggccatttgttaatgatggaccaatttcggcatttttgtccatgagaaaataaatagttaaaggtggaggaagtgaagaaatgaaatagaaaatggaagggaataaa

SEQ ID NO: 68781 - DNA, 2667 bp, Heterodera glycines
cagctccatctgtcctctgctgcttctgatcactccgagtcgtcctccgccactctgtttttgagtctgatcagttggttttgcgccctcgggggccttttgcttggctatggaacaagcataatcagtgacagcttgcacttcatgacagccgaccttcgtctgaacactttcaggcaataatgcttagatttgcttgcttttccaatctaagcaaagtcagggcattaccaccgcttctcttttggttggcggcgcatttggcgcattggcggggggaaaagcggccgatttggtcggccgacgacgtgccatggtcacattgtgcttcttgttcatcgtcggcaatttatgctcttcgttggctccgacttttcccgtattttctttccttagtaattttgagcatccctccaaaattcaaaagttgcttctctccgcccgcatttttctcggcttttctctcggcggcttttcctctgtcgtcccaatttttctctctgagctttctccgtcttcaattcgtgctcaagttgtcacccgtagcactttgaacatagtcgctggtcaattgctcgcttttgtcgtcggtgcccttttgggctccgtttgggaggaacggtaaggcgacggattgcgcggaattgcctaaattgtcgtgatttttgccaattccccgccccccccccagattggatatttggcgatggatgaacgctgtttcgctgttccctgcccttctgctgctctccgctttgcttctgttcgtccccgaatccccgcgttggttggtctcttccggacagatgggcaatgcctttgtcgttctgtgccgaatccgtcacaacgcggaagaagcacgtgaagaattggcggagattgcacagagccaaacggagaaaagcggcaaagaaaagctcaccttttcggcatttttgtgggatagatggcttcgaaattgtgtgatgatcggtaagaaaagccaaacggatggacaaatgttaaccaaaaagcaaaattcgattaacaggccttggaattgcactcatccaacaaattgtcggagtttccgctccgatgtattacggcacaaacattttggaacggtgcggcatggacatcgaattggcaatgattgtcaatatcgccatcggggtgcttcgtccattccacccattatagctaattactgtgctaattatgccaagatcgtttccttggtgtcaatggcatttggcatttggctgatgggccgttgcggtcgtcgtccgatgcttttggtgggaatggtcggctcttcgctctcccatttactggtcgcacttattttttggcttatgcccagcggaaatgccaaaggcgtagtggtgctgcttttgctgctgctcttctgtgcttttatgcaatgcgccatcacttcggtataatccgccgatggtcggatcggaaaccatggccaattagtttcggacagtgcaatttaaaaatagcgaaattctaatttattatgtccaaatggcaaggattttatgtaaaaatactagagtgcagcgggaccgggaattttgggcttaaccgggaccgggaccttttctggttgaaaaaccgggactttttgctgggaaaaccgggaaaaaaccgggactagtcccggtcccggtcaaaacggggaccggtaaattggacaccggaaaattggacaccaagcggaaaattggacactgtcggaattttggacaccaaaggaaaattggacactaaattcctcttttaaaatataaacccaggaatttaaacactcaatatgcacaataattgatcaaatgtggcaaaaaagtgtacaaaattagacgatgattgatcaagatgccaaaaaatgtacaaaattgcgtgatgattgttcaatgtaccaaaaaatgcgcaaaatgggaactccataaaaataaaaacttttttcgttatgaagttgtccgtgtccaggtcccggtcccgctgcactctaaaaaataccaaatcaaaattattttaaaataattttattttgatttggcactttttcatgctgctcgagaatcttgaactaatttgccttcgtttctttgacatcactgaaatttttagccatacataattttttgcggatattttactgtcggaaacatttggcacttttaaattttaaaataactttttctttctgtttccactggttaaggtcacttggtgagtggattgatttgattcccttggcgttccgttcggccttttgtcaccgcccctccccaccaattgccattaattaataattaaggttcattctcgcggagatttttccgctgcgtgtccgtgggatcagtgagtgtttgatcaattgcgatcattaaaaaacattggcattccgtctttacctctcttagccatgggtttgtgcagtgccatcgtttggatgaccaaattcgcttacggccttttcttgcccttggcaatggatttcctcggcatttctgctacctttctgctgcttctccttttcacttcactttcaactatttttgtgtggctttttctgcctgaaactcgtgacaaaacattggaagagatggagaaacagttcagggaggaagattgggcagcactgaagaggaaagggaggaagagaagcaaaga

SEQ ID NO: 68782 - DNA, 103 bp, Heterodera glycines
gtgcccttttcgtattcccctgcaggcatttttaattgaaccacaaaaaagcgaatttaatggaaggaatgtaaaataatggaagatcggaagggcataaagc

SEQ ID NO: 68783 - DNA, 732 bp, Heterodera glycines; identical to SEQ ID NO: 8655
  unsure (1)..(732): unsure at all n locations

SEQ ID NO: 68784 - DNA, 49 bp, Heterodera glycines
ggaagctattcccggaggattcggtctccccataaatctgagcgcatcg

SEQ ID NO: 68785 - DNA, 49 bp, Heterodera glycines; identical to SEQ ID NO: 51181

SEQ ID NO: 68786 - DNA, 53 bp, Heterodera glycines
agcacttcccggacccggtccaaaacaaccctggtatcattcgaaagccaaga

SEQ ID NO: 68787 - DNA, 779 bp, Heterodera glycines
atgaaacaacaaaatgtgcagattgctgaagaagaaacattcggaaagacaaacgacgaaatgccaaacggagcacagaagcagcagaatggccaagcgaaggagaagcaaaaagtgggccaaacggcgccggtggcacgtccgctgacagtgaaagattgggactacgacgagaggggccaatgcggaccaaagcattggctgcgcattgccaaatgcgaacatttgggtgccaccttttatcattgataaaaaaatgccaaaatgatttttgaaccctttctcaggcgatcaccaatcgcccattgacttccaactgtccaaaatgcgcgtccatccgctgaacattcacccgctgtgtttggtcaattttaaaaagcctttggctggccagctgatcaacacgggctgtggaagtcggatttattatatgaaattttaaaataacttaattatattaaatcatcatttagtccaattccaacccgacccacagattgaaccgcccgaaatttacggtggcttattggaccaaaactatcgcttcgttcaataccatttccactgggcacagaatgacaatgaaggttaataaacctactattctttatttatgtaaatgattttcaagtttgaattttagaaaaaatggcaaaattcataaatttaaattaaaaaaaaattaaaaaaaaattagggtctgagcacacaatcggtgggctgcgttacccagccgaacttcacttggtccaccagggtgtcaagaatccggtcagtta

SEQ ID NO: 68788 - DNA, 489 bp, Heterodera glycines
atggcttcttccgcggaacattttgtgtcttcgtttgtccgttacgaggggtaaaagccatgccaaatttaatttataaattgaaaatgttctaagctccctgaccacaccgccatgctccgaaaatgtcacttggacagtgttcactgatccgcttctgatcaccagagagcaggtggaaagggaaagcagcaaaaaaacaaaacaataaattaatgggattaaattaattttaaatggttcaattaaaacgccttcttaaagaacctctaaattcctattcaaaattaattagatctaagcctaagctgtgtaaattttaattcttcttccagcaattatttcgtatatttttctttgcccttttttatttttttaacactttttattacaaaaaaacgttgcttgatttttgtaaatttcagatgtctctcctccgcgccctaaaagactgtaaaggcaatgtaatcgaaaagaattacaggccgg

SEQ ID NO: 68789 - DNA, 689 bp, Heterodera glycines
atgggggaaaaggccaattgggcgaatttattcttttgtatggcgggaaaaacggacgccgtaaaatgggagaaaaaaaacatcgatcacaggacagaacagtcgcccattaccacagaattggaagcagcagaagcagcaaagcattattattggtattattataaaatattattattatattattattattattattagtattggtattatgattcgtattaatgaggaattaaaagcgggcggaaaaaaaggaatttgtttggtgatgatccgatgatgatattactaattggcgaaaagcacaagtcgaaacattggcccaccgatggaatgtgttcaaaattgtacagtgaaagtgacagtgatctttgaccacattttatcattttttaacctttatttttagataggccttttatgttgttttgctaccaaaaaatattagtaaaaatattatttatttttttgctttgacttttttaatgatttttattccacttttttgacatttagtaactaaatctgtcagtcgaattcattcataagacacaaaaaatgaaatgtttaaattgttaaacagaaaaagcaaacaaaaaagtaaatcttcaattttgtaatgtaaacagaaaatgcataggctctaataagcaatttaagattttgggttaattttggttgaaaataaa

SEQ ID NO: 68790 - DNA, 341 bp, Heterodera glycines
atggcacttttcaaatgttcagcttatttatatttgaaaggttaaaaaacccgatttctttaaagcgtttttataaaatatatgtccatattttcggcattttatgtccatattttttgcatccctatagattacatttgatttttttgttttaaaattcaaaaatattcaaacaattgtttttaggaaatctgtgagtttatttaaatttttataaggtaatttataatatgaattaaaatttgcttaactcagcttcataaccacttaattaattcccctttttcctaatttatccgttgttcgatttgccaactgagacaatgaaatgtttaaacaca

SEQ ID NO: 68791 - DNA, 545 bp, Heterodera glycines
atggcaatggcaccagtcattgtaaagcaattaagtgttatttaatgtttttgttaattattttagcttacgccttacgttctttcgcccaatattcttaacccttttgcgatgagtccgctgattctcagtccgacggtaaaccgaaaaatatttttgggggaaatttcaataaaatggcccaaaaaataaattggtggaaattgttttttcaagcttaaaagattattttaaaaaatagagtaaatccgtctgttgtgtaaggcgtcgcagggaaaacatttcttagcttttgtagtaaaagtcattattttcttaggaaatataaaatcaaaatcgacgacaaaaagcttcatttatcttttttataaaacttaattctttatttaatttattaatctgctgcttttcaggttctcagtcctgacattttatccccacaaatccttggcggtgccattctttccccaaccgtcggttctccggcaattttgactgaaacatttttggcggcctctgtactttcgccaagcgttttgtcatga

SEQ ID NO: 68792 - DNA, 198 bp, Heterodera glycines
atggcttcaataaacgatttagattatgttcgagattatgattatgtttatgattagattttgatgaaattgaagaatgtgttgagattttagatcaagaaaatgaaagaaatattaggaattatgatgtgtttgaagagcataactatgctaagagacaaagatttgtggatggtggtcccagtcagggataaatga

SEQ ID NO: 68793 - DNA, 408 bp, Heterodera glycines
atggacaatcggttcatcgacagagctctctttgagaactcggcgacgaaaaaatattttgttggcacattcccggccgatcgattgccaaagtgcaccaaatttccctgcagtctaattgtcaatttagttagtacccataaaatacattaaaatacatcttgccattttaggatccatcgggaatgccgggaaccaaaaagcgctcaaatccgcgtattccattgtatttttcgtagtgctcgagcatcacttgtgtatttcccgtcatcattttcaatgtgtcccttaacctgcggaaatttgtttatttgctgtataaatattcaatttttacaaaaatacctgaattttggctcatgatttttgcgtgcctaaattttataaaaattattactttaaagaaaa

SEQ ID NO: 68794 - DNA, 110 bp, Heterodera glycines
atgctggggaaatgctctccacctgtcactaaattggcttcaacagcagatgaaatagaagagagtgtgccggagacatcttctgggtgctggaaacgctttcgtcaatg

SEQ ID NO: 68795 - DNA, 286 bp, Heterodera glycines
atggctcaagcggagtcggcggaggagacttacgagcatgcaagtgagtttcaatcattttatttataaaaaaatatcaaatattcaatttttagtggacttctactttcagttggacaattatgtccaaatgtcgcagaatttgaccattgatgaccaacttccgccgggatgggacgcaacagcagaagtgcgagtttattgcgcgacgccgacagtggaagcctctaccccagccgggtggaccatccatgcggtagcttcaaatttcactttgctcggatga

SEQ ID NO: 68796 - DNA, 2075 bp, Heterodera glycines
  unsure (1)..(2075): unsure at all n locations
ggggatctctagagtcttcattttagcattatcttgaagcatcaaatgaaatattggtaagccatcaaatgagaccaaagttagctaatggtcaaatttagacgagggaccgagaaataaaagaactttttgcgctcagagatcgctttcacgacaccatttggaatctcacacactcagaagaggtccctaaaacaaataaatgcatacaatcgacaccttttcatcgacttcagaatgttatttcgcgtgaatcgttcaacggacttggccaagaatattttgacaaattaattgcccactcattttccgcatgccgaaatcaatttacgaatgaaaggcatttgctgaacagaacccacggggccgagatgttgtggacctatgcgaatagtttattcttcgcaacgaccgtaatcacgacaattggtccaaagcaatcaaattagtccaaaaaattcccatttatccttttcaggatatggaaatctcgtcccgatggtatcgttggaaaatttggggagggggctaaagcgatgtgatgcttttcaaatggaaatgccaactttgtcagcttcagactgagtttggccgaatcgcgtgcatttgctttgcacttttcggcatccctttacttctggtgacaattgcggacattggcaaattcttgtccgattttctgaattttctctaccgaacctaccgcacttttaagacgaaggtgccgtcgtcccctttcggcctcctttctcttcttttcaggtccgtaagcaatcgcgccgcttctctcgctaccgcaccgcttccgcctcttcccacgacggtgccctccccgccccccaattggcttcttctctcctttatgagtccaacaacaactgactgtcctcgctttctgattggactcgtaaaaggagcaacagaagaccaagtgtccgcgcaatttgtcttaatcgaaaagcattcagaggaaagagcgtccgtctcgacgatgaccaaagcgggaagcataaatctgaacgaaataaacgaggcggacgtggaggagagcgaaacgccgcacgaactgcgcattcccgtggtcatggttttgttcgtgctcctctgttactgcgccattggcggtttcctcttccacnnatgggagggatggacttatttcgaagcgttttatttctgtttcataacaatggccaccgtcggtattttattattttggtttttctgaccgaatttcgtcgttttctgctaaatgctttagggtttggtgacatcgtccccactcacagctcaacttatatcattttggcctatatcatttttggactttcactgtgctttaccttttttgatgaatttaattcattgtttagcgcaacgatgtgcatcgatttggccgggacggaatacattagaaaaattcattatttgggcaccaaaatggaagatgcaaaaggcacagtaatcacagggcttaaggcaggggagcaaatcctcaaacacagaggtacggcatgcacttgctgtacgatatgcagcatttattttataatttatttataattcgaatatttttgcttttttattcgagtgttaaccgaaatgaaaaggtaacccaaccaaaatttgagggatcgaagtcattcgaacagcgagtggaaagattgtgcaagttgggggagcaatgctcagtcttcgacaagctcaggaactcggagtggagtatattctctcggagttcaaattggacaacaaacacaaaaacattctttacgagcctttgagtccggctgtccaaaggctaatcaaaaacaaaaacatcaaagtgagacagaaaagaccattgacagtctaaaaaaggtactgacatttccaactacgacccaaatttcaagattcttcctggtgacatcagcgacaacgatgggctgatcctccaaaatcggagttatgggaagccctttctgttgctacaaaccagcccaaacgctatccaccgttacactatgccagcagaagatgcaagaaatgcctatgccattctcgtgccttttattttaaaagagacgaatatt

SEQ ID NO: 68797 - DNA, 1160 bp, Heterodera glycines
gtggattttcggggcaaaattttgacggcgccatggatttggttggacggacagtttcgccaaaatgtccatcttaaaattgatgacaagggaaaaattgtgcaaataatggaagggcatcacgaagctgaaaaacagtgcgacgacggaatggcggcgggatactgtcgcctggacaatacggtaggtgccttgtggtgcctccgagactctcgagtcgagaaattcccggtttttgaggtttcgaagactgctcaagagtattgtttcctgagtcgaaaagtcacaatgcctaaagacttcgggggttgctgatcagaatatgaattcatttcgaacaatttccgaacccagggaattttccgatttcattttggcttagaaatgatttaaatactcaagaatatttcaaaaggcattaagcataaattattatctttccatgcagccttggatgtaaatgaaaaattcaaaaaatttattattcggctttttgttcgaatttggccaggggttcggaaatttttcgaaatgaatatcactgatcaacgaactgcgatctaaaaaaaaacctttctcgagtctcggaaccgagcgaactacgaatttgttgttaggccctgttgcctggctttgtgaacgcacattcgcacgcgtttcaccgctgtttgcgaggccggtcccaaatcggtggccaagggaccaacaatttttggaaatggcgccaagacatgtacaacctggtgcggcacattgactatgcgcggatgaaaaaagtgaacattttacctcccagacttttgtatttctcgagaaattcaatgattttcttgaatttttgccgaattttttggcattcaataattttcacacttaaattgcatacaatttcaaatttgcgtcggcacttttcgcgaaatgctgtcagctggcatcaccacagttggcgagtgagtgagtcaatcgacgaataatgcaaacaaattttgcaaaaattcaaaaaattcaaattgatttttcaaaaattgaaatttggttttttcaaaaagatttcactacgttcaccatgcggatgatgaaaaatttgggctcgatttggccgtcgtagaggcggcccttgaagttggcattcgtttggtgctgatcggtcggttcgaaat

SEQ ID NO: 68798 - DNA, 902 bp, Heterodera glycines; identical to SEQ ID NO: 40475
  unsure (1)..(902): unsure at all n locations

SEQ ID NO: 68799 - DNA, 407 bp, Heterodera glycines
atgtgcggagcaaaaaaggttagcgggagcgggagataacttagtatttttgaggccaacaatttaatcagattagattgtgaaaaccttgaaaaaggcttgttttcatgaaaacgtgtttctgttggttttcgtgggtaaaaaaccacatacctatcaggtacttatatggtttagccacccaaaaaaatttttttttaatcatataaaaattctaggtggttttcggggtagggtttttcgggatcgctgatcacgaatctgacatccatttcaaccaaattcctaaaactggacctgaactattacagaaaaatctaaagttcaaactttcgaattttgggtttttggtctaaaatcggtttaaacacacggaaacaactaaaatctatcacttctacaataaa

SEQ ID NO: 68800 - DNA, 427 bp, Heterodera glycines
ctacattgaccattccgtgatcaaatttctccgctccaaaaagcgattctttgacaaaagtggcaccaaattggaagtgtttgtgcattcaattgatacggatgtccaaccaatttgggatgtttttacccgcgaaattttgcctatttttgcgacaaacgttcgccatttgtgctttcctaatgccaatcatttttacaatttgcgtcgtcacacttcgccgacacttctcactgatcttgatcaattgaattcaattgattctggtgctctgttacccgatggaatttctgacgatgggccaaaagcaactgccggccaagcgttgtccaaatggttgcacacgccgagcaaaaatggaaaagcgaatgaattgtattgctgtgcttatttttgtgaaataacatggatcaacactttcaaggag

SEQ ID NO: 68801 - DNA, 683 bp, Heterodera glycines
atggcatttgttattttaatttttgtgttgatattcataataaattcaaccgataaatgtttgtgtgttcataaattatctgatttgaatggaaaaactcggccaacttttgttgaaatatttggccaaggatgggaaattgatcaaaactcaaattggcaaaatgatcaaaatgaattaaatttggaagattcaattggcaatgatcagaacaacgaacaattcaatgatcagcaaaaacgcgaaattgttcataaatttcatgtgataaaggaaaaaataaagaaaagaggaaaatattcggcaaaagttcggactaaaattgagcaaaagattgccgtaaaattgggaattagtcgaaagaaaatttacaaatggaaaaaagaatttaatttaaagaaaattaagaaaaatgataaaaattattatgaaaagaaaaagcaagaatttattgaacgaattgatgagatttacagaaggttaagaaaaggaaaacagaagcaatttgcgaaagagttggacattgaccaaaaaacattcattaaatggaaaaaaagaatttggaattgaaattgacaaaagtgtgattcaattaaaatttgaattaaaatatgattttttttaaattttaaatttaaattttatattttattatttttaggtggaattcggtattcgaatga

SEQ ID NO: 68802 - DNA, 818 bp, Heterodera glycines
atgaaattattggttgaacaatcatggtggaaagttggaatgcaaaaaacagaatcagagaattgtttgttatcaaaaattagtttatttggtacaccagggttagaaacttgcgtttacaaaaaagatgctaaaataaatgggacatttgtaccaggaatttggatgtcagaagataacaatcgtgcactagtttttgacaaaaattcaaaaaaggccgaagcatgcggcgaaaaattgcgcgttagtgcgcaagggtttgcccttacggagaaaaccaaattttaattaaaaaagaaaacgataaatttagttggctttttggatccaattaccatgattatcaaagaaaatagtaaaattcaaacatgcactgaaggacaattcaaaactattttgttaaacaataaattgataaaaattaaccaaatgactggaaaatataatcatatcgaagaaccaactatttacaatatggaccaaaaagtctggaacgaagaaaaactacctattttcccattcaaatattcaaacaactaacacttacaaatttaacaaataaacaaattgacatgttggaaatgttaaaagaatttagaactagtcgtattatatagataacagacccattgagcaaagagaaatttggacgtcaactcaatttcgagattcggcattattccattttttaaaatataattcctaaagcaaattaaaattttcacaatgtaatttattcagtaaaatttttaatttcagaaataataagaaaaatttttaatttttcttcctttttttaaaaaaatcaaatacataaa

SEQ ID NO: 68803 - DNA, 562 bp, Heterodera glycines
atggattttgattttcatgttttaattcttatgttattattaataattagttcaactgacaaaaaatttgtgtttaaaaagaatggaaaaactcggccaacttttgctgaaatatttggccaaggatgggaaattgatcaaaactcaaattggcaaaatgatcaaaatgaattaaattcggaagattcaattgacaatgatcagaacaatgaccaattcaatgatcaacaaaaatgtgaaatggttcataaatttgacgcaataaaagaaggaattaagaatagagggaaatattcgccaaaaatttggaatagaattgagcaaaaaattgcgaaaaaccgggctttcttccaaaaatcccctcttttcctattcattcgttgctttatagacgaatttctcgatttcggttcggtatggaaaatttacggctccaacaaataaatttccattttcggcggtccattattttaaggcaggaggaggccggatgtcgattgctgtcaccggtaaattttttgaaatttggctaggtttttaacagataattgtccaaaaaata

SEQ ID NO: 68804 - DNA, 296 bp, Heterodera glycines
ggaatctgaaaagccctcctctgacagagccaaagtcatcagttcgtcgtccgccgattcgcaacacaagcgacgttcgtctcacaccaaaaaacacctgccttccccgccgcctgtccatcgcgatgcttttcctcccgccaaaaatccttccccgtcgcgcgctcgctcaccgtcacgtaacggtaaaagcggagacgctaaacggacgccaccgcgacgaacgcatccgttgccaccaaagacacacggcgaacgcagcgtaaatattaaaaaaaacggaggggttgaggaaa

SEQ ID NO: 68805 - DNA, 195 bp, Heterodera glycines
ttaggccgcttcgcggcctcgaacgggcgcttcgcgcccgttttttaaattttgttgggcttatacgggcgcttcgctcccgtttctaaatttgttgggctattaaggcagcttcgaggcctcagacgggcgcttcgcgcccgtttctaaatttgttgggctattaaggctgcttcgcggcctcagacgggcgct

SEQ ID NO: 68806 - DNA, 1014 bp, Heterodera glycines
  unsure (1)..(1014): unsure at all n locations
agtgcctgactttttaataatgggtgattagaagactttcagattgatttttggcgtccgccgcccttcgtcaattcctctggggatgttatggtcgatgttttgcgcaacggaagacattttttggactttttacgcaaattccaagtcgaattcaaagtgttggtagacgatttatcaaagtgagaaatcatttggaggattttggcaagtttttcttacatttctttagacttattgaagaaaaggaaattgggccttctccgtacgccaaattgtccaaaaatgggccaattctccgcgacactttcgatcgttttgaggggttcggcctacgcatgggcgactatcacagcttcgctgatttgttggcatttatgcaaaatgtgcaaaacgcgatgccgagcagggcacagttgcgcaccatcggatggacggccgagggacggccgctgcagggcattcaggtggagaaagggggaagaacggagggaagggatgaaagagggagtcgttggaaggggggggggatgaaagttatttaatattcattcattcatttggcagtttggcaatccatcggacaaaagtcggcccgtcgtttggatcgacgcgggaatccacgccagagaatggacagccgtaagaacattgcacagcatcggctgtttgatgttttgttttcgcctccgcaggtgcacaccgccgcttacttcatcttttactttgccaaccaaattcgccttgggaatgaccaaaggttgctcaaatgtctggagagagtcgacattttggtgctgccctgtctgaaccccgacggatacgaattcacgcgctccgaaccgcgcaacccggcggtgcgaatgtggcgcaaaaaccgatccaaggaacgctgcgcgacgagtgcgagggacggccaaacgcattgctgncaagtgaaaattggggaggaaattaaaaggggaaaagccaagaaatggaggaaaatgaggggaaagcgtaacggacgattta

SEQ ID NO: 68807 - DNA, 1073 bp, Heterodera glycines
atgatgggaattgagtgcgttcggagtacggcgccgaggccgtgggacagcgaaagtgaacggtgaaaatgggcgaagggccatcatttttcggggcaaaaaatgcttcattcatcacatgaaaatattgataaacgcctaaggcgaaatgcaaaaataaaatattgcaaatgaaaatatattacggaattttaagtgcggaatttggcagttttatatgcatggcaaaattttttgaaattacctcaagtaaaatcttataaaaaattattcgaattcaattttttaaattgcctacgacttttgaagtccaattgaaatgccctgacgatgtttctttggaaattgaaaaaatccttgagcttattcagtgtaaattgcctcgatcaaataaaaaaatttcagctttcatcaagttcaccattcttccgacggctatggacgtgatggcattggcacgcacccgccaatgtcaggtgtggcattacaattcgaccgatttgaagtccaggcattttatcaaaatattcctttcatcgtatgggtcgaagaaattacattccattaagtatttttgaattttttaaatattaatcgaaaatttttccctgtggtgcctgccggactgcctgacacctattttcattgatttttttaatcaaagttaaagtgaaaatcaaataatttttggattaaccttttctttaatttttggattaaccttttctttaatttttaatttttggattaacctttctttaattttttttaagatggggccttaaattctcgaaaaactcctgtcaacctgaaattcaaaaaattcttataattttgtttaaaaatcaatattcccaaggtgacgcaactgccattgtgattttgccccattccgcgccctcttcgtcgtgtgggttcggctcgcgccgggccgcctccttcccgctggccagcgccgtgctgatcagcgccaatctgccaagctcacacgcggcaaaaatttaccaacagcagcaaatggctgccggcaatttgaaggtggggaatgagcataatttaattttattaataaa

SEQ ID NO: 68808 - DNA, 304 bp, Heterodera glycines
atgaaattagaattagcaaaaaataatactgttttttcagtaagtctcccagatttaaagaaatttgccatcttgtcctagaaaatttttgaattttttgtcaatctgagtgttcttactttttagagtaaattgagtcccttcggtagaaaaatggttgaacactataatattgaatttaataatgtggaaaaagatgcaaattagacccaaaactttgcttttgccctcctgtccataaaatgcctcacataatcaatttaatagtggaaaaattatgacaaaaaaaattccctagcgaaca

SEQ ID NO: 68809 - DNA, 283 bp, Heterodera glycines
aatcgaacgctaacggacgacctaatggaaaaaaatccccgaaggagagaatttaattaaatccattccttcgggggaccgtgccgggtgccgcggggtaagcagtgctggttcgtttcatcacggcaccgaaccttttggctagtcagcaatcgttgcttaacttgccagatcggacgggtgcgcatgattccactggtcccagcaccccccccaaagcaaaaacaatataaccaaaatataaggaaaaattttttcctcccacttccctttttgatactaa

SEQ ID NO: 68810 - DNA, 1460 bp, Heterodera glycines
atgcgccctatcgctttcgttgcggtcgttgtttcgacggtgcgaaaaagtgacgaaatcggacaatttttaccaaattctcttttaaggttgctgtgattgcttccgtcgttactttgccaatgctttacaattacgtccagtccttccaaagtcatctgatggttgagacggattactgcaaagtgcccttttcgaagtgttcaaagaccactcgcactttttaaaggcccgtgctcgtgacatgtggctggagatgaccgccctccaaattggcaagggacatgtgaaccgcatcaaaaggggctggttgttcggccaatgggtgcccgagagcggcgccgatgcttacgctgcgggtaaacactcgactgatgagccttcattgggcttttttgggtttcttttccatttgtcaccttcgctcccctaaggaggtgggccatccggcggtgctccgtcgggaggtgctccgtcttctgcttcggcacccgtcggggctgtgcccgctggcccttctgccgcggtttctgctggcccatctcagccggcaggtggacaatatgggcaaggagccgccggatatcagccggtacaagctcccgaagtgtcgcccgtctgttgtgagttaaaaaaatgtgtatctcttctttacgttggacttaggcacttgtcaccagggccctcccggaccaattgggccggagggagccgccggggcggatggagacgatggacacaacggaaaggacggagcccccgggagggacgcgcagtccatcccagcacctcttgaagagccatgcatcgtaagcattggcgggcagaaagtgcgtgctgtgataagtgtgactaattgacagatttgcccgcccgggcccgccggtccccaaggacccgccggaccgaaaggacccccgggaccgaagggaagcccaggagagccgcccaaagacggagtaccgggagagcagggaatgcagggtcagcccggtcctgtcggacgcccaggccgcgaggggccgcgtggagcccccggacagcccggacgactcattcccgtccctggaccgcaaggcaaggaattgtccattattatcattttaatgccatcttaaggaccgcctgggccttctggacctcccggagaacaagggtttgtgtcttacggttgaccatttatgttctttttcagaccgaagggtcagcccgggcccgacggacaatctttcgaaggtcctcccggaccccctggagatgctggtcgacctggtcgagaagggcgtcccggaggaactgtaagtgttttcacgcgtttctcaccgaaccaaacaccgaagggaccttccggaccccccggccaagacggcgagaagggcagctgcgaccactgtccggagccgcgcactccgccaggatatttcgtcgaggcgggcaaaagtggcggacattaccactga

SEQ ID NO: 68811 - DNA, 989 bp, Heterodera glycines
aagcggaagaagaagacgaagaagaagcggatgaagaagacgaagaagaagcggatgaagaagacgaagaagaagcggatgaagaagaagaagcggatgaagaagacgtagaagaagcggatgaagaagacgaagaagaagcggatgaagaagacgaagaagaagcgtaatcagcggaagaagaagaagcggatcaaagcaactaaatgtacagaaatgattaattaattatatttgttgaaatgatcaatctcactaattggaatttgatttgatgctcattttatctcagaaatgctttgttgattctttcgttcgaattcatatatatgtatattattttaaattagggttgcgactccgaaatgtcgggattttatgaaagtcgtcatattggattttttgtaggtatttatgcattttttctgtatattttgtgtaaaaaaagaagacgaagaaaaattgtcggcatcagcggaagaagaagaagcggatcaaagcaacggaaattaatttatatttgatgaaatgcccatctcactaattggaatttgatttgatagaattatttttttatatttacttaaaggcaataggcaaaaaataattctcgaatatactcggaaaaaatgaatttcgtgttacataatttattttttaatgccagtacttgctcttttcttgcatttataaaatcccgagactttaagcttggtaatactggaaaacaaaaaagccattagtaatcattgcaatttactgaaagtttcgaggacacatcattttaaaaagttaaataattccttcacaaaattatatcttcgtcaatacataatgattagggttgtaaattatatggattaacatatattttctgcgcatatgctatgaagaaaggggctcaaaaatagcctttttacgttaaaattttttgatttagtgaaggtttttagtctatataaatcaatatttttggggggtttcgggaa

SEQ ID NO: 68812 - DNA, 477 bp, Heterodera glycines
atgaggagggatcttgccgacagaccagccaaagttgagctaaccaaaggcatgagtgtgttgttaaggagaggtggtgaagatgaagatggtgaggttgtggacactacaccccgaccccctgctccacccccaccacctccaccgccagggagacgtcctccgcgtggaccccctcctccaccgacggggagacgccctccctctggaccaactactcctcgtccctccccacccggaagtcctccgcctcgtcctgaacgtccccaaagaccaagtagagcttctcggagaggtggtcgtctggagaaatggaggaaaggtcgatacaatatacagcaacggcagccggtggtgcgggaccttctagcggaagcagcagctgccccattgcccgaaagtgacgatgaagatgactatatgctggagagtggattcgcgctgccagcgccgtcacaatattatggcgatttgcct

SEQ ID NO: 68813 - DNA, 717 bp, Heterodera glycines
atgatgcacaaaacggatacggtaagactttggcaagttcctctgtggctcagtcgtttaaggcatttgactatttggaatttctgtgggttcgagtcccgccggcgggagcatataatattttaggttcaacacaatttatacatattttatttatgtttctcctctccgggcatcttggacttaattttttatatttgatacgctcatttgctgagctaaaattgggcgtccggtagtgggcgcgcttggcgccaggtgttaaggcgcacgccaaaaagttcaaaaatatggtggaatttttttagcctctataaaatttgttataatattttttcttttacaattaataattattgtctgttatgatatggataaaagttttttattttatttaaatatacaattttaagggaattttgaatgtactattttcagctgcttgtacagcttgacaaaatgcgcgacgacttgcgacatgcaagtgcagcaatggcagggtctgtttcagatatggtttctctttcgccaaaaagcctcccaaaaattgtgttaataaaatgtgaaagaagtttttctagttaattaaatttgtatatttttttcaaaagaatacagctttttatgcatagataatttgatttttattaaatcgaaattttaaaagattccactcaaaaattacatctttttaaatactgtactagcttgaataaa

SEQ ID NO: 68814 - DNA, 2730 bp, Heterodera glycines
atgccaacagtgcggcaaaacataatgccaaagtcggcgagcagtgccaccaccaccacaatgtccaccattgcagtcagggcagaaccccattcgacaattgttgtcgcaattgttagggtaaaatacggctttttctattaattgtctgtccgagagagtcttaaggcctttggaatttctggttctcggagatcactaatatttccaaagtgtgaaatttctttatttcgaaaattgtggccgagaatttaatcgagaactaagacccccaaaatccgagaaattttttagctcgagaaaacaaaatcgggcgagaaatctcggttatgccaactgaaaatgtctatctctaaatttaattcaacataaaaatttatttgataattttgagttaaaattttgaattttggacagagtgtcggctttgtggaattgcgcattgacgagatggagccgggcctgctccaaattggcacaaatccaagcgagaatgggcaattgttgctgctccatgaggacctttacgcgcgactgcttggcaaagaggagcaggcaaattgaatttaattaaatgtttaaatataattgaaaataaatataatatatttattttttaggtcgaagaacttctgggacgggctgaaaaactggtcactgaacaaacggagccggacgacattctgatttatgaagcgatggcggacggattggccacggcttggaaaagcttgagcaggtccatcactcaaatattaaaaattaattaatttaatttcaaatatattaatttaatttcattatataaaaaataataatttttgaatttttccatgtaattaaaggaataaattaaatcaaattattaattataattcaattaaaatatatgtttaattaaatttaaaattattttttaaggcaattatcaatccggggatatattctgacagacactcaacatctttatgagatcgcattgaagcatgaagaagtaatacaattttaaattattatttttatatttatttttatttataattttatttttaagttttattaattttttcttacttttttcatttacagttagcaaaattggccaattctcgtttatgcaaaaatggagcaattcaatcaccagatgaattacagagaattattgatggtatttttaaaggaattttaaccgctttaaatttaatttttttttttaattttctaatccattttttccttacaaaacaatttttttacttctatattaattttatatttttgctgattttttctttaattacatttttaacaattttattattattaaatttttaaaaaaagaaaaaattgcgaactcagataggggcgaaaattagtcatcaatcagcaatcagatgaactattccaacaaacatcacagttcgcagtcaaccggattcgaaccagcgaattttgtacagacaaaatgaacagagttaaccgctagaccaaataataaaatgatgtgctcgatttttttaaatctaaaaagagaaaaaaagtaaacaaaaatttatttaaagaaaaaatttaatttatatttaatttgctattttttttacattatgtattaattttaacacttttaactcccaaaaataagaataacttttaagagaatataaaattattttaattatagaaaaactcttatttaaataaaaatttaaaggtttattctttagcaattttttaacttttttatgtttcattagactttaatttctttttttttttttttaaattttttgtagaattagctgaattaacgcgtgaaggccttgagattggttcaacagttattgcgcaaattcgaattttgggtgcacttactgacaatgaagaaaggccacgtgaagtgctcaatgcatgcctggccattgagaagataatgctaaggtaaaaacttacatatttaataaatataattcaaataaaataaaaaattttaacggcaaatcaaataatatttaataaactcggattattattttttttttcttacgtaaaattcctatgagagtgtaggaaatctttctgaatattagattttgggtggtggatatagggatgtgtgccgacgccctcaaaaaatctcggcaaaatcggcattccgacacatccttggtgggatatttattacttttttatataaaaaatcaaaatcccaaaatattaaaatcggtaaaaatgattataaacatggaattctgccaaaatcggaaatatataaggctaatttatatttttccgaattttcatgttttcaatttaattttattttttttataaaataaattaaaaatatttaaatatggaattctccattaattgaaaaataaataaggataataatattttttttctgaatttttaggtctatacctaatttaatttagattttaaataaatttatataaaataacatttccattttacattagaattgcacaaagctgggagctcattgaaaacaattggcgaattcaacgagatggtggtcaagtagttgccattgaaagtgccaaaaaggaaaagccggcaccaccaaaaacagtcggcagtttcagtgccaacaatctagtggcagccgaacaatggctgctgacagccgcacaacggtttgaccgtgtgcgcgactgtgaggaggacgaggagttggaactcgccattttgatcaccgacatcaag

SEQ ID NO: 68815 - DNA, 474 bp, Heterodera glycines
atggcaaaaatgcttcatttattggctaccattgctttaaccgccggcccaattgatgagggaagagacagcaaagcagaacgaggagaggaagaagaagaagctgcttgttggagttcaactgatcttttagtcactcacataaagccacagcgggagggaaaagcacacccatcggcgccatcactctttttcttttcctctcgacatcaaacactattccttgagagagtaggcttactacgcccgaggcaatatggagggttgttaatcaatatggaaatagaagccaatttggagagagcactaaacagacagacaggcagggcagacagacaagcagcggataaacaacgccaaaggcaatcaatcggatttatattttattgttgttgtggagattgatcctgaagattaatccgtgtcttatgggtgatcggataaattggaccaaaagcatcttttggtcgaaga

SEQ ID NO: 68816 - DNA, 568 bp, Heterodera glycines
tgtctgtctgtttagtgctctctccaaattggcttctatttccatattgattaacaaccctccatattgcctcgggcgtagtaagcctactctctcaaggaatagtgtttgatgtcgagaggaaaagaaaaagagtgatggcgccgatgggtgtgcttttccctcccgctgtggctttatgtgagtgactaaaagatcagttgaactccaacaagcagcttcttcttcttcctctcctcgttctgctttgctgtctcttccctcatcaattgggccggcggttaaagcaatggtagccaataaatgaagcatttttgccatcgggggacattcaacgaaaagaagaagcggaggaatggacaaattgtcgtcccaaaatgtatttagagagcaaatgagcatcacattacaaacaattccatctaatatgtatccaaatttaaatcgactatttaagggatctctctatttttcccgaactccgaattcctaaatacctgcaaaaaactacaaaaaaaatatttttagatactgttgcttctacctcctatgttttcggctcgaaaaa

SEQ ID NO: 68817 - DNA, 49 bp, Heterodera glycines; identical to SEQ ID NO: 51181

SEQ ID NO: 68818 - DNA, 165 bp, Heterodera glycines
cagaaacgtgcacaattttccgcaccctgcagcaatggaaacagccaacggtcgaagacgacggcagacaggaatattattacaacaattcacgtagaaatgattattactgattggttgtgagtgagtgacatgggattgttacggaaagtttttctttgccca

SEQ ID NO: 68819 - DNA, 192 bp, Heterodera glycines
atgaaagccctaagtctaccgaatttttatataactaaattatggacaaaaggtaaaagacaaaaaattatcttgaatatactcttaaattaaattccaggttttctcattgaaatttttacgaagcaagaaaaaaattgatggcctaagaaactgagggtagtcactgactttgacgcacgcttaaataaa

SEQ ID NO: 68820 - DNA, 1058 bp, Heterodera glycines
atgctagcacattcgcatgtgagtgccgaaaagtgtccaaattaccattaaggtaattccgttttcttctccctattttcagaattacacaaaagcttcgttgcaacacgtacaaaggaatctgatgaaaaacaatgtggcgccggacttgtttcaggttagaggtccaacttcaatggcattttgagaatggcaacttaaatttagccatatgtgacggaaatctgtgaccagttgaaggaggacgtgttcccaaaattcttggacagtgacaaattcacgcggtattgccaatggaaggtcggaacgaagagcaaagcgtaaaggggacgaacactcggccatttgacaatgggaaaagcaaaattcttaaatattcatttttgacccaatccctattcaaaaaacataattttgaatttggaaggaataatagcatattttcagaatttggaactgaacatgcaattggcgatgagcgacttttccggtagtagcacaaaaaggagaaaaaaaacaacaaatatttggccttcatttagttcatcgaataattggacgcggagggttcggcgaagtgtacggctgccgaaaggcggacacgggcaaaatgtacgcgatgaaatgcctggacaaaaagcggatcaaactcaagcagggcaagtgacgagcacaaaccaaacatttattagaacatttacaggggaaacactcgctctaaacgaaagtgagtgccaatcggcgcaaaatttgtcactaattgcctccgaccaaatgcagggataatgctgagtttggtcagcacggggcaggactgtccgttcatcgtctgcatgacatacgcatttcaggcaaacaaaacgccaaatgcacagcaaaacaaaattatattttatcagactcccgacaaattgtgcttcattttggatttgatgaacggcggcgatttgcactaccatctctcccagcacggcgtattcaatgagacggaagtgatgttttacgggtccgaagtcattctcggcttggaacacatgcacagcaggcaaattattaaa

SEQ ID NO: 68821 - DNA, 464 bp, Heterodera glycines
atgatgaaattaatccggcgattcatgttcttcgatttcttaaaggagcctttctgggtatttgaagacaggcccaaaattggcctcaattttgtcaccaggccaaaacaacgaaacacaagggaacagttcgggtgaagaagcattggcagaaatattgacagaacctgtgtaaaaatcaaaattaaaatttttgtgaaaaacaaataaaaactttctcttaaaattttgatttaaaaaattgtaatccccaaaaattgttattcaaatttaatcatattgagaatgaacgtaacaaataaacagttaggttacatggatacggtatttgggcaaaaaccaggtccgggtatcgccaggcccaaaaaagccgggttcgagtccaagtttttaaaccgagcccgggtatccggttgaaattgtatattcgagtttaatcatattgagtacgataatgcgtacaa

SEQ ID NO: 68822 - DNA, 483 bp, Heterodera glycines
atgagaagaggtgcaacagtgattagaagaggtgcaacagtgattagaagaggtgcaacagtgattagaagaggtgcaacagtgattagaagaggtgcaacagtgattagaagaggtgcaacagtgattagaagaggtgcaacagtgattagaagaggtgcaacagtgattagaagaggtgcaacagtgattagaagaggtgcaacagtgattagaagaggtgcaacagtgattagaagaggtgcaacagtgattagaagaggtactaaagtgattaaaagaggtacaaaagttattagaagaggtaaaaaatgataaaagaggtacaatgattagaagaggtgcaacagtgattagaagaggtgcaacagtgattagaagaggtgaaacagtgattagaaggggtataagtgattgaatgtggtacaaaaatgattagaagaggtacaaaaattgaatgcaatttattataaattttaaaaa

SEQ ID NO: 68823 - DNA, 728 bp, Heterodera glycines
ccggtgccgctgcggtcttctgcgatgcggtgcccagtgtcgatgttcctccagccggtgccgctgcggtcttctgcgatgcggtgcccagtgtcgatgttcctccagccggtgccgctgcggtcttctgcgatgcggtgcccagtgccgatgctcctccagccggtgccgctgcggtcttctgcgatgcggtgcccagtgccgatgctcctccagccggtgccgctgcggtcttctgcgctgcggtgcccagtgtcgatgttcctccagccggtgccgctgcggtcttctgcgatgcggtgcccagtgccgatgctcctccagccggtgccgctgcggtcttctgcgctgcggtgcccagtgccgatgttcctccagccggtgccgctgcggtcttctgcgatgcggtgcccagtgccgatgctcctccagccggtgccgctgcggtcttctgcgctgcggtgcccagtgccgatgttcctccagccggtgccgctgcggtcttctgcgctgcggtgcccagtgccgatgttcctccagccggtgccgcttaatgctgcggcagtggacagaaggtagcgatgcttctgtcgtggctgattttttaaaatcatttcccttttcattttcagaacacggaagagccgcaaatgccggccggaccggaaggggcggaggccagcgccaaaccgacgggacagagcgcagcacctggtggaacttccgcg

SEQ ID NO: 68824 - DNA, 583 bp, Heterodera glycines
cggcaccggctggaggaacatcggcactgggcaccgcagcgcagaagaccgcagcggcaccggctggaggaacatcggcactgggcaccgcagcgcagaagaccgcagcggcaccggctggaggagcatcggcactgggcaccgcatcgcagaagaccgcagcggcaccggctggaggaacatcggcactgggcaccgcagcgcagaagaccgcagcggcaccggctggaggagcatcggcactgggcaccgcatcgcagaagaccgcagcggcaccggctggaggaacatcgacactgggcaccgcagcgcagaagaccgcagcggcaccggctggaggagcatcggcactgggcaccgcatcgcagaagaccgcagcggcaccggctggaggagcatcggcactgggcaccgcatcgcagaagaccgcagcggcaccggctggaggaacatcgacactgggcaccgcatcgcagaagaccgcagcggcaccggctggaggaacatcgacactgggcaccgcatcgcagaagaccgcagcggcaccggctggaggaacatcgacactgggcaccgcatcgca

SEQ ID NO: 68825 - DNA, 3642 bp, Heterodera glycines
cggcagcggatttcaaaatgcaagcgccagattggggcaactacgacaccaacggaaccgactacgactacatctacaacaactcggacgaacgggacaactggaacagcgagcaggccggcgtgttcagacatttagtgacccaggtagacgacgcgttgttcgatgaattgttttaatagaaattctcttttcagctcggcaccactcagactctgcagaatttggcgctgcccaccttcgtgctggaacgacgctctctcctcgaaatgtacgccgacttcttcggtgaatacattgctttttaaaatttttccaagttcaatcttatctcatttcagctcatcctgatgaactgatcgccggcgcctacgagaatacggctgagaaacggtcccgattggttgacgacaacgcttttgaatcaacaatttttcagattccttgccgtcctcaaatactacttgaactccttctatcctgcacgcaaaaccgacgccgcgaagaagccgtacaatccgatcctgggcgaagtgttccgttgccgttggaccctgcctggcgtgccgttgtccgcaagccgaaccgccggtggaccgttcccgggctcagcaaccaaccaggtccagtttgagtgatagcctcgtcactcattgagaaacctaaatctgttcccacatttcagatgacgttcatcggcgagcaagtcagccatcatccgcccatctccgccttttacgtcgaacatccggaatccggcgtgacctgcacatcgcacatttacaccgagtcacacttcgctgggcttacatcactgggcgtccgcaacatcggccgggcgactgttcgactccaaaacgtgagttttgtaattttttgtgccatttgttttatggttttaatcgtttgttccccattttcagcacaatgagacgtacatggccaccttcccagatgccttcgcgcgcaacgtcttcggaaggccgtggtttgaactcgctggaaaagtgggtccatttcgctcgattttgctttttcagcaaacaaaatttttccacacaggttgaactcagctgcttgcaaaccggatacagtgccaaaatcgagttccaggcgcggcccatgttcttcggaagtgcgcaccaaattcatggccaagtctaccacagggaggtggcggtgatgcaactgaaaggcgactggcgaggcgaaattgtcctgaagcgaagtgcccgcagagccttcgaaccctttacaaatgtgcgggcgaagtgcgacgtgacaaaggttagaaaatgcccaaataaaaatgaactttaatgcacccatttctaatttccacaggaatgtgtcagggtgctggaccagaagaacaacgaaagccgaaaattgtggcgtcatctcaccgctgctctgtacttcaacgacacaaaaatggcgaaccaaggtgggaggggagggaggaatttggattaagaattaattagttttccccttgttttcagtcaagcgcttcatcgagcaacaccagcgggacgaggacaggcgacgcaaagaacaacggagaccccagtggaggccgcgccattttcaacgcgttgggactggtacgccgaccgacgcctggagataccgcgacgcgcaggaatgaatgtgatggcgattcgtgcacacctccgatgctgcctgatgtattaaaagaggatgtttgtaaatcatttggcccaagttgcctccatgtataattgtatatgcatatatcacttggccctgagttgcctctctgtgtattttgtatgttattgcgactcactattgtacatttcctacatatatttattaaaaatgaataaactaattctttatgtgttgtgagtgggttgatttcgtcaaaacaccttcccgggtttctgcagggttactgatcacgaaatgacattcttattgatcgggtcgatcaatgcgcagtgaccatagatcgctcgctaattaacaataatcaaatgccacactgatcagtgttccgttgcgcagctttgtctcccgcccgttccgcgcaatcgcctcgcggttcgtcgtccctgcttaatgcaaccattcctctccatgccaacaatgccaatgtttcgccttttctgttgtcccctgagcatgccgcttttccccattggcaccaaaggtcgcgctcatcagacagccccgctgggtaacgatttagcggttttttactcctccaattgaaggagtacggcatgttacagttgtattaaaatgcaggaagccgctgtcccccaacgatttggctgaccttttgcgccgtcaccccgtccccgtcgatgggtccatcactaatccttcctatgtgccaatgcaggaaaaccaaagcatcaaatttgtattggcatttctcatttttgacagtcaattaacaaatttcattaagctgatcccgaccgcaaaagtcactcatttggccgcttcgccagcacctcaatttgcagcacaacagcaagaagaacggacaaaaaggccaatggcaatgccacgggcggaaagtgcgaagaaaaacggcggagggacggaagacatttcattgcgctgcccaacttcgcaggcgccggtactgaaccgagcggaaatggcagcggagggattgccgggggcattcaatggtcggtgggcgaggaatttcgaatattttcagacttcctttctctctcgtcagatttttcgatgtccgtctccgaacagtgccgtcccaccactctccgacttggccacccgcctttgccgccttccgtgccgtcgcccgacatcgcctccgtctcttttggcctgcccacaaccaatagcatggccaatggacagaacggcgccggcggatgggacagcggaatgtgcgcgagcagcagcaacgagggggtgtgaaatgagtgacatgggggaaggaggatatagagagagagagagagatatagagagagagagagagcggagatagggagacagagacaacaaagtgacagagtgtgtgtgtgagagagagagagagataatctgacagaaagtgagaggaaatgaggaaagagagagaggggggggggggggagaggtgatcagagtgatcggtcaacccaattttggttgggacttcgatcaactgattataagtgccattgtcattagaacggatcaagtcattaatcaccttatctttcccattcctatcaatcaaatgttttctcaggacgattgttctccccaaatgtttgccccgccgaaaaacgtcgcctccggcgactgttcctccgctaccgttttccctaccgctgcgccgcgtgtcggtccgctccgctcgtccaatgcttctcaccctttacacatttcgccgccctttccgccccctccggtgccgcccaaaacgcggaaggacaaagaggggccgcgggtgccgccactgccgcgcaaccgacggatgatgaagcaatgaccgcacagaaagagacaatgcaaatgattccattggcctcggcactttccactcattgtctcgctgctctctcccaaatacctattctttttcctttgtctgtctgtccactctccgctttaccattgtgccttccatttctctctatttga

SEQ ID NO: 68826 - DNA, 1147 bp, Heterodera glycines
atgccctgctcgtcctcctcctccccctcctcctcttccgccgcttcgttttcctccgttttccccgtccctttccccgcttcccatccatggaatcctttcgcttctgccgccccttttgtcatcgcaattggcagtggttctgtgtgcgtcaaaaatggcgaatgtcgccagtacaaccaactgaaacgacactaccacgagtcagcaccggtcgcagcagaagtgccatcagtcgacgagggaatgaacgcgacggacaaaaggagaaagaaacgcggaccatcggcactcgcaactctttccgcccttttgctgcttggcgtggcgctaattgtcagtttggcattcgtcgcgtggacaatccatcggatggtaaacgaaaagaaaaggccaaacgatgccagggaaagtgggaaaattgaattgcagaacgaacagcacaaagaatgtgcggaagcgatgaaaacacaagcggaacgaatcgaagtgttggaaagtgcggtgacaaagcaaaaacggacggaggaaaaggaaacggaagagccaaatgacaatgggaagaaaagccatggtaagggagggaaaagcaatggtaagagaaaggaggaaaagcctggtaagggaagggaggaaaagccatggtaagagaggggaaggccatggtgagaggagggaaaagtcatggtaaggagggggaataaattacagcggcaggtgtcagcgaatggaactgccaaattcggaccaaatgatttcggcgtttttagacaaaaaacgccgcgacaacaaaacttcggctgagcagcaaattgtcaccacgcaaagtaacaattgggaaagcagtggtgaaatgataattgtcacaattaaaataaataaaaattgacagatcgtcgccaattttcgcagcgaaaacagccaaaagaattgacgggaaacggcggcagagattttgtgatttttatgaagggacggccaattagcggaagacatttcatggcgcaagggaaaaaagcaaagtgaaagaaggcaaagggagaacaaaaaacaaacaattttaattgtcatttctcattttaattttaatttttcatttttatttgtttaagattttatttttcaatttaattaatttgtaaaagga

SEQ ID NO: 68827 - DNA, 373 bp, Heterodera glycines
atgtgtgcccagcaggaagtgcaattcaatcgaatttggcattacgataacgccaaaaacattcattttgggagagggcgaaacgtgacgaatttgaaatggacaaatggcaattttgaggaagaaaatggacagaaaaagtggcaaaaattgggggagggaggagagaatgacaatggagaagcatttaggaagaacgaaaacggacgaaagcatcagcaacatcagacggtgttcccggcagagccaattccgccgaagagaacggcgagggaaaggacggaggaatacgtttgaatggaacggacaaaatggcaaaaggaaatgcaaaattgtcaattggtatcggacaaaatggcaattgacaaataaa

SEQ ID NO: 68828 - DNA, 432 bp, Heterodera glycines
atgaaaaaggcgaaggaggaaagagaagatgaagagaaagaagaggaaaagaaaaaggaggaggaggaagtggatgagaaggaggagcagaaagtgaaggaggaacagagagaagatgaagagaaaaaggatgagggaaaggggaaagaggaacagaaagaagaagaagagaaaaaggaggaagaggaggaggaaaatgtggaggaggaaagggaagattataatgaagaggaggaggagaaaaaggaggagggaaaggggaaagaggaacagaaagaagaagaagagaaaaaggaggaagaggaggaggaaagggaagattataatgaacaggaggaggagaaaaaggaggagggtaagtggaaggaggaggtggaacacacagctgatcaaatgggggaggaagaagaagcagaaaaaggaagggattaa

SEQ ID NO: 68829 - DNA, 560 bp, Heterodera glycines
atgagcgagaaagtcggtccggtgtccttcgacactccggagcctggcgaaatggcattcgataagccctattcggaggctaccgctcagctgattgaccaggaggtgcgcgacatggtcagcgcggcactgcggcgaacgcgcgaacttttgatgtcgaaggtggaacagatcgaacgggttcgtgaaacagtcagaaatagttaggagagaccataagcatttacaaaaacggagaaaaatttgaccttcgtatgaaaaatcgggcccgagacacccccctgtcccaatcgtccgttgtatggcccttgggctgagacaccccttgtgcatgtatgattcatttcctttcatttttcttatttttaggttgctcttcgactgttggagaaggaaatcttggcaagggaggacatgatcgagttagccacacgtttccttccctttaatccttcactttcacagattgttgggtccgaggccttttgccgagaagcacacttatgaggagttcgtggcaggcacaggatcaatggatgaggacacgacgctgccgaaag

SEQ ID NO: 68830 - DNA, 962 bp, Heterodera glycines
atgcatttcatcgtccggctcgcgcagcacagtctcgcgcacggcgtcgcccgcactttcttcgacttcgtccaatgcctcccgaagacagaggaagaattacaacaaaagtggacgcgtaccggtaagaaaaaatttgcaaattcaagccaaacacacacacacacacacacacacattcacttcctagataaatgtgaatgccgattgccccaatgttccgcccggtgtactgccgaacccaaaaactcgccagtaccaggtcaagagcgttttggcgcaattcactcatgcatcggggaggaaatgctatttcttggagtggctcggtgagtttgatgatgaaattgaaagaaaaaatgtgtgaatgaaaaggtggacggatggataaggaaattgaaaatttattgtaaaattccaaacgtgtgccgagttaacctggtttagcttcgccacttttggaacggaataatttgagggtgtgggccgagttaacacagtttagcttcgctacctctcttgctatttcactttaaattttctttttctttttccattaaccaatccattttcttctctcattttttctcgcaattataggctttcgcggtcgcaactcatggtgtttgtcggaggacaccgactgtacagagtacattgaaagatttgggacagtggcaacagtcgacgctgtactgtctgcgctattgggcgaaagcgtcccagcttcgatagctgatgagctccagaccaatcctaaatttggacaaggtgtggagagtgaggggaattaaaaattgcataattttttgtcagtgttggcaaagttggatgacattgaagatgaattcatattgcggacaactcagtataatattttgttcgcaaaagagcttatggaaagcgccgagggccaaggaataattgaggaagaagcacacaaatgcacttttttaatttaa

SEQ ID NO: 68831 - DNA, 966 bp, Heterodera glycines
acatgctcaacagtggtaaagtatttgaatagagtggtgcaaaatgccgacaaatgcggcatcaaagactgcgtggacggggggaatttgcgcgttatcctcgcggagctcggcgacaatttctacgccaccattttggcccatgcgctgtccttcgcttacaatttggccggtgcgatgcttttgctgtgcgacgtcagcacgtacaagtcggtggggcgggcataaaaccaggctattattatttcccattagaaagtgcattagcgcctggggaattgccgagttggagaaaaagttcgacagtttgcacgcgttggccaaccttttggtggtggtccccgataatttgccggaggcgtgcaattcccaacttgtggtgagcagtgaaaagccttggggattttcaacgaaaattcaattaaaccgatcggtctttaagaaaaacgtggaccgtccgttgatgaacgaatttattcagcgacgccacgactacaaatcggctaaactctttctgaacacttactgaaaagtcaatttactaacaattacggtggaagtgcaattttcttgtctttttgatgctgtgatacattttcaattataatttatcttcggaggaagaaagaaccaatttaaaaaatatattttttatttttttgtatttatttttttttataattatattgatttaataaagtttggttttttctattttattttgtaattctgctatacattatcagatggatgccatttattgtaacaagaaataaatttttcagaaaaccgttcagtgatatgacattttatggttcttcggcgctgccaaatggaacgaagggcccaaatgccgacgactttttgtacgccaatggcacagattcaatcgccgcatcgaccgccgaattgtcaaaggacgaaatgtttgtggaggatttgttgcacgcgcacgaggccaagtaa

SEQ ID NO: 68832 - DNA, 105 bp, Heterodera glycines
tgaaaagaagcgtgtgccggcgtggtgcgaccgcattttgtattgggtcaaggacaaaaatgtcggcattgaacaagtgacctacgaatcggcacaccaaggcaa

SEQ ID NO: 68833 - DNA, 138 bp, Heterodera glycines; identical to SEQ ID NO: 50950

SEQ ID NO: 68834 - DNA, 121 bp, Heterodera glycines
ggttaaccataatggtttccttaaaatattagtaaaaataaaaacaaaatgattatgtaaataaatttctttattccttttttggacaagaaatgcttaggaaaattttttactaaaataa

SEQ ID NO: 68835 - DNA, 676 bp, Heterodera glycines
atggatgtaactccaacgttgcaatgtgcattcgaatgttttgtgttcaaggtttctgcagttcgcactaattatcgcagttggctgcgttcttcatcgatccacgagccgagtgatccaccgataagactagaattcattcttcaacagaagtgtaaaaaaaaataatgaaaaaaaaagaaaaagctggcggtgcccgagctgacactcattgagtcttaagcctcgtgctaggccaagcacgggccctaccgcgtcgtctcatcacggccacggacgtagcagcaagcacaaacacaccgctagttacggcacgtaagaccgggaacgaaaccaccatccccagtcagtgtgttatgtgcctgccacaacaaccgctcaacgacgcacagacgccagcacagccgttaggtcgccccacgagcgtgcatcccacattggcgcagcgaaccaaccaagcgaggcggcccgccaccgacacattgccacgcagcagccatacacaggctttcacatgtgcagcactgagcggtataccacagctccaacgtatggaagcaccccaaaagcatggctcgtgaggcagctgccccgtaatgttgggcagcgtccacaagtcatctcgaacgacctgtgcccatcagcggacgggggcatttggttgtgccaacgctag

SEQ ID NO: 68836 - DNA, 933 bp, Heterodera glycines
tctgaatacgtccctgccctttgtacacaccgcccgtcgctgcccgggactgagccatttcgagaaattcggggacggttagtgttccggcttcggtcggtatgcagactggaaccgatttaatcgcagtggcttgaaccgggcaaaagtcgtaacaaggtagctgtaggtgaacctgctgctggatcattacccaagtgattcctattcaccacctacctgctgtcctgttgggctagcgttggcacaaccaaatgcccccgtccgctgatgggcacaggtcgttcgagatgacttgtggacgctgcccaacattacggggcagctgcctcacgagccatgcttttggggtgcttccatacgttggagctgtggtataccgctcagtgctgcacatgtgaaagcctgtgtatggctgctgcgtggcaatgtgtcggtggcgggccgcctcgcttggttggttcgctgcgccaatgtgggatgcacgctcgtggggcgacctaacggctgtgctggcgtctgtgcgtcgttgagcggttgttgtggcaggcacataacacactgactggggatggtggtttcgttcccggtcttacgtgccgtaactagcggtgtgtttgtgcttgctgctacgtccgtggccgtgatgagacgacgcggtagggcccgtgcttggcctagcacgaggcttaagactcaatgagtgtcagctcgggcaccgccagctttttctttttttttcattatttttttttacacttctgttgaagaatgaattctagtcttatcggtggatcactcggctcgtggatcgatgaagaacgcagccaactgcgataattagtgcgaactgcagaaaccttgaacacaaaacattcgaatgcacattgcaacgttggagttacatccattggcacgcctggttcagggtcg

SEQ ID NO: 68837 - DNA, 165 bp, Heterodera glycines
atggcagccgacggcaagaaaattgaggactctgagcggccatttgtggtttggcagcggttggacccatcggacaaattgggagcgccgaaaccggcaccagtgccatctaaggtcaaaccaagcagcggacagtcgccgtctccgagtggcattgagaggcgc

SEQ ID NO: 68838 - DNA, 853 bp, Heterodera glycines
atgatcggagttctgggccttggagcagtggttgtttccttatgggacaaattcaatgacaaacgttacagaccttttcgcgcaaccatcttcagtctgatgggattaagcggtaaatgcttacattaacaaaaattcaggaaaaaaatatggaattttgtgtctttttaaggcatcattccgacgattcattttgtgtatacggacgggttccgtcagttggttgctgagacttccttttactggctggtcgcaatggccgtcctctacttgttcggtgctcttctctatgcgactcgaacaccggaacgtttttttcgtatgcggaacaaaaaattttaattttacatataaaataatttcagcgggaaaatgtgatctgctatttcagtctcatcaattgtttgtccatttaactaatttttgtggaattaatttgttaccatttttttttttgaaggtttcatctttgcgttgtttgtgcggcattcactcattattatggcatcagtgaggtaagcaatcccggaaaaacgggagaagtacccgagtcaattttcaagtcccaatcccggacatttcaaaatttctggctctaattaacttcttttttagatggcgatgaatcgactcactggcacttgtcacattagcaccccgtcatcttcacatattcacactgaactttaggcgggcagcaagcaaattttgttgaacaatgtgtgataatagaaagactattgtatttggatgaatatgtgttgcctttgcctgctgtaatctgtgctgctttcttttgctgcttatatataatattatattgtcatgtcattgtagcagtataggaaaccga

SEQ ID NO: 68839 - DNA, 136 bp, Heterodera glycines
atgttcttcttttgctgtgtgtccattttgggttatccgacttatgtgatgctgaaccttgacaatgtgcgtccgttcaagcagacgcacttcaacgacgagctcaatgagaagctggaggagcgccgtcgcttac

SEQ ID NO: 68840 - DNA, 811 bp, Heterodera glycines
atgaacactgcgatctcaaaattatttgaattgaggcctgacccatacgataattcgcaaagaaaatacttgcgtctttgtttggtaagtccatcggttttatttaccaattaggtatccttctacaatacattcagtttttgaacgtggaaaatgcatcagacttagcggatcttgtaaaagttatggatattgcattgattcgcgcagaactcgtaattcatcatactttcaaattggactgttaatttatattatttacaggtacttgagccttttatactccttgtagcagcgaatcgtgcactttttcaagccgctcacaaccaactttcaactcgtacgtgaattcgtccaaaattgctataaaaaaatgtctcgagggtaatagtttagatggtgctacacaccttttttaaataaatttttatagtttataaaagtcgtaaaaacacatttctagggtgttttcggggatgccgatcccgaaaatgacactttcgagtgattttttttcattttttaggttcactgtctgctgaactgatttactgtctttcgcccaatcgtaatattcgcgagtcgttggccacttttggcattgctggcacaacccgtgctctgttggttgcaatatttgatgatgccaaagggaagaaaatgcgtgaagccgccaaacatatcaaaggcacaccggtgacattagaaaaattgagggaaaacgctgacgaggcactaatcagacaggtaattaatcaaactgtggcgtattatttcggtgaactgccgatgctaatttatcactggatgg

SEQ ID NO: 68841 - DNA, 788 bp, Heterodera glycines
tgcgacgtcaagaaggcggtgccacaaaacaaacgcaatggtggtgctggtgccgcgtcgttcattcgtggcggcaacctgatcatgcgcaacgcgtacattggtggtggtgcggctgcgcaccatgccagcattggcatgggcggtggcggcggttcaatgcgaggttcttctcatcatcacccgcagcaggtgggggacgctttttatttgttttttcattttttgtgttaaaaaaaactcattcattcgctaattcatggaatggttattaatatcctatttgtgtacggaaaactttgattccatgatccgatttggtaagggaatcgtgtttccaaacactgtcatctttttttcaagggggagaaggttgggtcaaattgaatggtttgaggaaccttggcaaattcggtgttcttttggactcagttttagtttttttgttgttgttgacaatgtgttttacagggctgcacgcaattacggattttacggaaaaaaatacggtgcttttttgggagttaaaattttactctattatcccccgcataattaaaaggtatatataattaataaagtttttttcattccagcaaatgcccatgtattcaaatgcgtctgccgcggcatacgcccaatggtactacaacgcggcggccgctgctgcatacggggccggaggatatctgtcataagacatattagtctaatttatgatttcgacccatcaacgattgatttttcttttcatcaagtgcttcattttcacccgcgtattgatgaga

SEQ ID NO: 68842 - DNA, 80 bp, Heterodera glycines; identical to SEQ ID NO: 51817

SEQ ID NO: 68843 - DNA, 165 bp, Heterodera glycines
atgcagtacaatgcttttaagccccgccgtgaggcgggacagttccaaaattttgtaccacattttactgtggaaagtccaagtaccttattggacaactacgtgtcaatgagcacagtcgcctttggccagttgtggaacggaaaaatgggaatatcagatggg

SEQ ID NO: 68844 - DNA, 388 bp, Heterodera glycines
gcttaaaaacattgtacagcataattaaaaccgaaaataattttcgtatatttttcacaatttatttcaaaagacaaaaaaaaatgattcaattttgaaacgaaatagtgcacaaaagggagggatggttagacgaaaagaggaatttttagaaaagagcgcaccccatctgatattcccatttttccgttccacaactggccaaaggcgactgtgctcattgacacgtagttgtccaataaggtacttggactttccacagtaaaatgtggtacaaaattttggaactgtcccgcctcacggcggggcttaaaagcattgtacagcgtaattaaaagctaaaataattttcgtatatttttcacaatttatttcaaaaagccaaaaa

SEQ ID NO: 68845 - DNA, 275 bp, Heterodera glycines
aagggagggatggttagacgaaaagaggaatttttagataagagcgcaccccatctgatattcccatttttccgttccacaactggccaaaggcgactgtgctcattgacacgtagttgtccaataaggtacttggactttccacagtaaaatgtggtacaaaattttggaactgtcccgcctcacggcggggcttaaaagcattgtactgcataattaaaagctaaaataattttcgtatatttttcacaattatttcaaaaagccaaaaaaaa

SEQ ID NO: 68846 - DNA, 1244 bp, Heterodera glycines
  unsure (1)..(1244): unsure at all n locations
atgtcacaaaatgaatccctcgacaacgcacaacacnagcaacagaaacagcagcagaacccgaacacggaggccgaattggccttgcaacaggcccaagttggactcaatctcttctggctgatccaacaagcggcagcgatgcaacagcagcaacaacaagttgaagaaggacaaggaacggcaccgacttcctctttaactgagtaaatgacaatttgagctcggttaaatccatgccgagttgtaagcagttcgttcttttcaggcgacagaatgtgtcgctgcactcggcactttccaatttggttggctttgctaaggcatcgtcgcctccaaattgtccgtcgccttttttactgccgacacaacaacaagcaaatggaattagtactttgaacgatgaaaaaaggagaaggtgatcggccgaacttttcgggataccgtacccaaaaaaaggaaaatcggtcatttccctctcctctggaaggcgtcagtgactagtgatcagccttgatcagcctgcattcagtagctatcggggttaccgtacccataaaattggccaatccgggacgaccatttccctcgagggactgccattgactaaaaaagagctgcgcacgcatcgccaattccaatcttttagagatttgtcaatcattgggagacggtgggagtatgtgagcgacgtgcagagcttcgtcgagttcgagcagctccgctgccggcatcaagtgtcgcgcaaccgcacattcgctcacggcattcgctattcgtgcacccaaaagacccaactgagaagcaattgcccctatttgctgttgtgcttattctctgatggagcaggtccaattggtgggagatttattccaaattaattagccaattacaggcgaacacagtgcgccgggggtcggcaccatttcggtgtactctcgaaacaaacacacgcacccggtgaatggcaaggggaaggtgccaattcaccaaaagcattccgagttcaggtcaaagtgatcaaagcgcgacagccgcgacgattcgccaaattggcgaaaagagaaaagaaatgggacaaaaaggaggaggaggagcagcagagaaatggaaaaagaaaggggggaaacgaaattggcgaacccaaagagaaagaaggagacgaagagaaaggaggcgaggcaaaggaagaggcggaaatgggcggaatggcgggagaagcactgatcgaatactctcaaaat

SEQ ID NO: 68847 - DNA, 289 bp, Heterodera glycines
ccttaatccaccttaatgacccctgcccctccatcgcatttcacttaagcttcaatggtgccgtctccggttatgacggtggtcccttttctgtcggtggtggcacttctgctgcagctgacggtggtcgaccatggcggcaacatcaaaagccaacaccaccactaatggtggcacaacaaaatgccgtagtgcagcagcagggcaatgctgatcattggcaaatgccgacaacaaatgggcccgaaatggaatggaagggaggagaagcggcggcgaacagtgacgg

SEQ ID NO: 68848 - DNA, 597 bp, Heterodera glycines
atggtactaattattattctcatatttttcgccacttttaatgggatttttggggttggagaaggtggtgaagaaaacgatttgttcagtgatttgtggaagaattgtttcaacgcaaaaaacgttcagaaggcaaatgttggccgaaacggaggacaaaaagtgaccaatcgcgtaaagatggaagaaagggacggtggtgtagaaatgggtgcggttggcattcgcatgccacccaaattggcacaaatgttgatcaaaactgaaccaaccgcagcagcagcagtttttgatcagctattgaaaaatgtaaagcatgagccaaaagaggaggagtttgagcaattggacattggaaaaatgggtgtggttggcattcgcatgccacctaaattggcacactctgtgatcaaagatgaaccgccatttgatcagcagagagagcatcaacaaaagcaagcaaataaagagccaaatcatttggactatgggatagaaagaatggaagcaacagaaaattcattggaatcgaatgggaaaattagccaaaaaagtgccaaaaaaggggcaaaaaagaaaagtcaatggcaaaaggaa

SEQ ID NO: 68849 - DNA, 378 bp, Heterodera glycines
atggtgagtaagcactaattaaaacaaaatcattatccaaatttcctgacagcaattttaagcaaattcttttttcagccaaaaaatacagaaattaaaaataataattattattataaattttacttttcagaaacttggacaaaactttatttttttatcaaataaactttgtttttgccaaattaactctgaatgcttaaattaaataaattgatatgatgcactcttgatagctctattattttagaaaattctaaatattagtttgggtaacaaaaaagttatttccataaatctcaaaaaatgattttttaattgcagttttggcgccgcttaacttttttaaaaaaggttgaaacattttaattttggcta

SEQ ID NO: 68850 - DNA, 2938 bp, Heterodera glycines
atgtcaatgtgtgagaaagagaaagagaaaaagagagacacagtggtacggaaaggaagagaaaagagaatgggagacagaaggaatgaagggaaagtgagagagcaatggagaaaaatattaggcggacaaagcaagacaaaaagagggagaacagagataaagagagcgagagaggtaaaagacgaaaagaaagggaagaagtgagcgagagagaaatagagagggagagagagtaaaatggtaactgcgataacaaaacaacaccgcagctcaactgttgatcactttgatcaaaaattaaacattcctcatcctaaccactgttactcataagaaaatgaattaatattttttgcacaaaaaacaataaaaattgagaaaaataattttattaatttctccccatttttatttgtaaaaagaagatggcacaactgttcgaaaacattggcgttcgacgcaaagctgatgacaaattggtgaacgggcaagaggcgctaaaggtcatatttggaatgtatcggggaacccggattgggactaggccggattttccagcatcccgattttttgggtccactgaacaccattaattacctaaatgccatagctcctggaataaacaaatggaaaagccataactttaagcatttttaacaaactaaatcattgtctattagtcggaaaaaattcaaaaaattgcgctaaattgtggaaaaacgtttgaaaaataaattttttgagttttttagtcgtatttttaaaaaattagcggaaatttcgtaaactaatagaaaaacacttatgattatcgaaagataacaagaaataaaaattttttgctttgtaacgaaatggttttgttaaaaattttcatatttgtgttttttaataacgaacatttcctgtggtttttaagactcaacccccactgacccatttttaaatgtcccaattttccatcaaaatgcccattagcttaataatgcaatcgccggtatttagggttgcgaagtggtggcactttatttcagtgcccattggtgtccgccgtgccgcaatttcacgccggtgctcaagaaattttatgacgaggtgtgtccgaggggatgccatggccaaaaccaaagttcatagcacaggttcaaaagcacggcagatttttaagcaaattttcaatgcaaaaatttaaaaaaaacacagatttatcacaacttttcggcaattctatagagtatgagtcgaaaaattaaaattttttattgtcaaatcaaaggaaaaggagatttttgatttgcaaagattttaaaagggtcccccataggtcttgcaacaaaaaacttatttttttacccctattctgatttttgtgtcgtcccaaatctaagaggagcaatagaaaatttaaataccccaaaaactcggcatggacacttagaacttggaaaatgccaaaattttccggcatgcagttaagcataagacattgcctgactttaccgcaatttttaataaataggcttaattaggcgctgcttacttttaaactctttgaggcatacaatatatttaattaattaatttctgtccattcgattttagggataaataacaagtataaaaaactattcaaactcgggaacgacaaaacaaactgaaaagtgactaagaaaaacacattttttcccggatataaattaatttttttccactttttgcaaaaaaaaaaaaatttagttgaaaaagtcgccggagacggcgcactttgaaattgtttttgtgtcctttgatcgttccgccgatgatctgagcaactatttgcgcgaatcgcatggtgattggctgtacattccgcttggaagtgagcacatcgagtaagtggaggagggcattcgtgtgtgcccttttcaaggaaaaattttgcaaaaatggccatcacaggaaagggaagaaattgggcctcacgaccaggatgaggatttttaaaggcggaaaattttagaattttagttgataattttaaaaaatatggtttttctatgaaaataattaagattaatgcaaatgatttgttttcctttgttgcaattgaaaaagagtgcaatttaatattctttgaaagaatgaaaatataaagcgatttttggcttttttcagcaactttaggatttttttttttgaaaatttaaaaccgatccttcgggttgaagagatgaataggagcgttaaaataaatacacaatttttttttcatcagctaagacttcaaccatagtcagaaaactcaggaaagacagtaacaattgaaaataggtaaaataaaaattgccatttctgatcaaatttttattaaattcatttatttaaaattggatggtgtaaaacaatttttaacgaattcacaaatctacagaacattgtccaaaaaatttggcatcagtggcattccggcattggttgtgctgaagcaggacggcactttggtcaccaaggatggtcgagcggatgtgcaggtggaggacaatttgttgttttttgatgatttttctaacaaaattggacaatgagacgcggaattgaaattttccaaatttgaagggttgggggcggtcgattcagtatcgtagcaatttacacttggctaacttccagaatcatcgaactcgcaaaattaattaaaaatttaaaaagttgtggtcaaaaatttaaaaaaaaaaaattttttttttgaacatttatttggtcgaggaatttttgtaaatcaaaagcaaagcacacagatgtgccgactttttccttcatattttgtttattttttcacttggaaaagtaaattcctggcccctgttgaagtcccggtcctgacttttctggtcctcgcaaattcctgcccttttttccttaaattcccggttccgtgacagctctaaattaa

SEQ ID NO: 68851 - DNA, 57 bp, Heterodera glycines
gctatagggaagctactcccgaaggattcgtgtctccccataaatctgggcgcatcg

SEQ ID NO: 68852 - DNA, 674 bp, Heterodera glycines
atgggtaaaatttttcataaattttacaaaaattttggatttttttctcttttttcagatattgatgatgacgtcatattggttaactctcagtcatctcacgcagaggaacgccctgtgctcaagaagaggggccgaaagtctcgctgggaaaaactgctggaggacgtgaacaacgcaaagaagtccaaccccgcagaggttgaagtcacagatgtcgacgaacgcaaagcagccaacgtcttcgactacccaacaattttctggaagctcgcacgcccaaaggtaatgtttgctctggtggcagccctacaatgttcttcttccgttgcagtatggggtgttcacctttatgtgcaacgaatgccgtaacgaaaacttcaagcgaggcgacaagcgcttcatcctcaacactggcagtggccaagagaagctggagttcacccaaacattctgccaagactgtgccaagttgaactttgactgcaccgacctgatcatgaaacaccaaaagaaagatgacggaccatctgcacagaagaacgtaggacggaacacctattttaagatggaaaagtgatctctgatcattcattcattgatttttcgttgaaatgagcaactctttctttgtaattttgcccagcaatacgccgggatttgtcggcaataaa

SEQ ID NO: 68853 - DNA, 56 bp, Heterodera glycines; identical to SEQ ID NO: 52733

SEQ ID NO: 68854 - DNA, 669 bp, Heterodera glycines
atggagcccggtgcgaagaagcgcagaaaaaggaagaatgccgaaaacaccgacggcgaggctatggaatgcgaagaagaagaggatgccgtagatgaggacgccgagaacaactggatgctggggtatgaagaagccggggagaagccggagtcggtgacaacatacgcgtacgcccacgccggtaattttggaattattttaaaaaaaaacttggaagaaataaaatttaaaggttcccgctacgatcatgtgctgatttatggtgaaatgctgcgcatgggtgtccgccctgaactcatccgccaggggaaccatctcctggaaatgaaggcccgcaaaacaggagtctacacaaccaccgttttccgggacaggtaaatattttgaatattaaatatttttaaaatttttgatcactttagttacaagttgatcccaataaaacttgccaattttgtcaagacgtttggcctagaaattgagggcgtggaaaacaagaaatattttccacacaaattcaataaggtaagaggaatttataaaaaaattaaataaaaattaatacaatcttaggcggaaaattatggcactgtgttggacaccctgccaccgattgagaattattacctcaggtggactcttcccggcagagcgcgcaaagtttga

SEQ ID NO: 68855 - DNA, 3890 bp, Heterodera glycines
atgtctttttcaccaaattcaacaattgccgaatttacttctgatcagggtaattaagcaataaaattggagtaattattatagtaaaattgttgactaaggatttcaaatttaattttagcaccgtaccaaaatgaaagtctgacgccaaccgaggaattgcaacaaatgcgaattacagaaatggaacggattcaaaaaatgtctttacatggcggatacggtagaaaattctttgcttgtacatttggagattatattagaattttcaaattattattatttatttttttttcatattaatttgttcaaatttttcgctgtagacagtggacacaaaatggggatggcaaagccggacaccttggcggatcgaatgaaattgttgctgagcacggccaaaggtgtcgatgcgcattttttagttgggcaaagtgacaaaaaagaggcaagtgaaattaataaacaattaattaattacggtctaattagcgaatgacatttttagacaattaattacggtaaaattaaattttaagcttgtgcatgctcacaaagccattctgattgcttcttcgaatgtttttgaggcgatgttccaaacggacaaagaaaactcaaatggtaccaatgcaggaaagagtaagcaaaaggggatgaattatgaacacataagcaaattaatatatatgtatattggactagcctcatctctgttgtttttactctgctaattgccctaattattttcaattagtctctgctaattgccctgattattttcacttagtctctgctaattgccctaattattttcaattagtctgctaatttccctaattatttttaattagtctctgctaattgctctgtggtggaggaggtccccgacgttgaaccagcagcgttcaaagtgatgttgagcttcatttacacggatgatttaagcgaattgaatggagacaatgcaatggctgtgctcaacgcaggtgaattattttttaaattatttagttaattattttgtaaattagccaaaaagtacaatatccctggccttattcgtccatctttgcaaattcccatctccgaattgcgcaatgttttcttagcatatgaccaggctctcattttcgaactggaggtgagaaagacaaatttatttttaattctattatttttattatcccttttttgtataattttgataatttaatgcttttttaaggatttttccatcaaatgtttgcgttacatttgtcaaaatgcgggccaattgttcgaatcagatgaatttttgcaaattgatcagaaaatgttatgcaatcttctcgagagtgatcgtttattgctcagcaatgaatttgaaatttggaaatctgtaatttcaatttaattttttattttcattttttaatttcgatatttttttctatttaggcactccgttgggccgatgaaaaatgtcgtcagaatggcattgaatgctcctcgggaaatcgtcgttccgtacttggtcctgcactgttcaaaattcgttttcctaatatccatgaggaggattttgcaaaatgcgtcggtaaaatttttgaaatcgaaaattaaattgaatttgttttggttgatatgaaattttacctttaatgcttgaatttcatacatggacaaggaggggggtcagaattttttcaaatttatgtgaaattggccgaaaaaaactgatgcctacagaataatttatgttgaaattttacagttccatccggtgtgttaacagtggaagaagtgctcggcgtttatcagttcaattcccatccgtttctgtatcttcgtggagtgcccgggctgtactcgtcgaaattcccaagccatggacgaatttttaattggaacaaagccaagggcaaccgaagagggacactttcgatggaaattgaaaaaatgtcggaatttgcgcgagagtctgtcgggagaagcagattcagtgatgccgtgtatataaatggatttccatggaaaattgaagcagaaataagaaaaaagaccgaagacactgatgagaagaaatatttgggattttacttattgtgcgatgcaaaagaaggtccaattttaataaatattaaaaatataatcattattaaaataggaggaccatggaactgcgttatttcggcaacctatcgaattgtgtcagaaaagaccgaagcggagaattcaatttggacattgtgtgaccgggttatcaacagatcaaacatcggccggggatttggatttttaattacttttgctgtgagtaataatttaacatatttacttaattgatataattatggttaatcaaggaattgatggactcgaacaagtgcttttacaacaaagcagaggacaaattggcattggccattgatgtcataactgttgatgagccaaaaatggagaaattcatttccgatcccaacaaatccaacggcacactttcaatggaaattgaaaaagtgtcggaatttgcgcgtgaaataattgggagtcaacgtaaaagcgaaactgtgcacatcaaaggaatgccatggaaaattgtggcacaaattgaaaagaaagatgaaagcactgacaatgagaaatggttgggcatttgccttttgtgtgatgctccaaaagaaggtgtaaaattactaataattaatatatatattaacaacaattaattaattgatattgagcagaaaattggagttgcaaatgttcggcaaactttcgaattgtctctctaaagagcggcgtaaaggatttcaggagaaaactcgatgacgatgtttttgacaataaaacgtacagctggggatatgccaattacatttcatttgctgtgagtgacaattcaaataaatagtgctcaattaaattttaacataattaaggaactgatggacccaagcaaaggcttttacgaccaaagcgaggacaaagtgacattggccatcgatttcactgtgaaagaagcaaaacggaggacgaaacataaatgcccaatatgatttggggaaaaatgcccattgaatatcctccatcctatgatgaacctgtttttttatttattaatttttcttgattatactttcaaaactactgatatatgaattaattaattgtcggagctgttttagcagactctcatttttgagtaccgaatttcaatgataaacattttagtcataaacccaattcaaattttaccattttaggtcaatgtttacaattttttggacttggatttattgcattaattttgttaggatttacgtaaacattttttaaactttttttttaaattgaaacctttcctaattgactgatcattttttccttttatttaagcagaattttttgggaccagaaatttgggaaccgggaagtttgggcttattaaattaaaaattgaaaaactattactaattacgctatgatttcattctttaataatccaagctgcgcttaaaaatttatatttactacaaaattaaaaattaaaatatggaaaagtgacaattttattatttagtcaattcttacagctgtttaaacgtggtgttgagtgtcaattgtacataattccttaattggcataattattattaattaaggaattgatggaccaaagcaatggtttttataacagagaagaggacaaagtgacattggccattgatgtcacagtgaaagatgataaaaaggagaaatgcatttctgatcccgacaaatccaatggaataatttcgatggaaattgaaaaagtgtcggaatttgcgagagaaatcgacagaagtgaacgtaaaagcgaatctgtcacttacataaatgggcttccatggaaaatattggcataa

SEQ ID NO: 68856 - DNA, 507 bp, Heterodera glycines
atgccatcgtcaatggatcggatgaaacatttgttgagcacgggtgagcattcggatgtgcactttttggtgggggacggagacgcaaaagaggcgagtttaattaaaaataaaaattttattttatttttcaattgcaatttcattaattatccacgtttttaaaggttttgccagcacatcagctcattttgaagagcgcttccgatgtttttgaggcaatgttccgttttgacgccaagaaagaaagaccggaaaatggtaaaaaaaaatttattttatgggaaaataccaattaggtatgttgttcttcattttgtctcttctgctaatttccctaattaatttcaattagcccctgctaattgccctgctgatgtggaggtccccgatattgaaccatcagcattcaaactgatgttgagcttcatctatacgaatgatttaagcgaattgaacggagacaatgcaatggcagtgctttacgccggtggttttattatttaa

SEQ ID NO: 68857 - DNA, 778 bp, Heterodera glycines
  unsure (1)..(778): unsure at all n locations
acatttggctgtatttntggaaggattttgaccaaagacaaagaaatttgtggcaaaatcgagcaaattgcgctcgaaagtaagggaaaagcagcgaaaattgagcaattaattgtggaaaatcgcattacacttgagaagaaaacggctaaagaaaagcaaaaggtaatttaattaattgtttaattatttttattagtttaagtttaatccacagttaatgaggactaaaatggaatttgtaaaaggatcttcgttagcaatacataaagatttatttttcaaaaaattgcatcaaatatttttcattctaattagtaaaattggatttttagctgctcgaaaagcaaaaatgtgctaaatgcctaaccgaaatacaaataacaattttacattattaaattttaaagataattttaaatatgttaatgccaggaattctttgtgttgtgggagaatgggccggaagacgtcactcttttaaaggcactaaaaatatgcgcggaagaatcattcgacgaaatgcacaaaatggaccgaattaaaaattatgagagcaaaaagaaagcactgagaaattttgctgagtcaattggcgtaacatttattatttgtatgagcaaaaatttaaaaaggaaaacaaaaaaggataaatttttgtcgagaatgcatttcgagaaaattagccaattaattgacaatcaatcaaaaggggacgaattcaaagaacttttctcaaaaaatggttaatttaaatatagagattttaaaaaataaa

SEQ ID NO: 68858 - DNA, 749 bp, Heterodera glycines
atgacattagaaggcgaaagaggtggattagatgcacttttgactgctcggttggatgaggatgaggtgggggaaattgaggaaaagggaggaggggaggggaaagtcgactgaatttcgaagttgccctgcattttgttttctcctgttgagttagtgttttactcttcagcaattcattgcgacaataaattacctgaacgacaatttgcgtttggatgccgaaacgacggagcaaaaactcagaatggtattggaggaccgggagctggagctgaaccaacagtacttggaacagcttgaaaaggtggtggagcaacggcgaatgtgggaaaatacaatttggaaatttaattcagatgaatgaccgcgtgcagggatttgtacagcaaattcggtcgatgaattcgatttgctgcgaactcactgaacgcattcaaacgaacaaggaaaagacgcgcgagttgctgaagagaacagccgttctgcagacggaaaagcgcgaattgggtgccaagaatgcatttttggacgaatttttcgccaaatattccctaaacgaagaggaggagacggcattggcactacccaatcagcagggtgactcatcccgtccactgatcactctgaattataaattactgttaagggtcgccttccgacgcatttttctcggccttacgacgtttgttagaagtggagaaaaatgtgacggaacaattggcattggagccgaacagtttggcatt

SEQ ID NO: 68859 - DNA, 1181 bp, Heterodera glycines
gtccgcggcgcactccaatgccatcgcgacccgagcaaacatcagaatgtggaagtacgggtcattgaccgggacggatggggcccgttgaaggtgttggaccctgacgacatgatggggtgtgccggggttaaatgttgtcaacgaccgattgattgtttattagtgttttcaaggggaagggtgccattaatcgatgcttaattatgccaatgctttttagcgtgtcttttactgagcaggacggcacctttcagctcgacggttgtggcaacgacatgaacttcctcccgggcgtggtcagtgagtgccgtgacactgtccctccgttcctttgcccatgcccatccttcgttctcccccccccctttttagcccaatttgcccgaccctttcgttcgcattttgcatttctgcaacagcgaagaaggcgaaaccatcgaattgcccgaattccgaatttttgtggtcattctcaaattgtttgtgctcaaattggcttttccgcttcagccggacacttatgacttgggcatcctcgtgttggaccagaagactttgcccaattccaccgttaatttccccgtgcccgagaacccccgtcgacgcctgcagcaggcaaaaagaccgacggaagtcggcactttggacgaaagcaatggcaaaaagggggcggaagatggggtgagaagtgaacggggcaagaaaggaaaacaaattcgaaatttggacattccgatgaattttttttttggataatgtgaaattttggaattgaaagtcggccaatgaaaagtttctgaaaattattaaaaatcgcggcaccaccttttttagtttgtgactgtcgacgcgccaaaaagtcacaacgccaaaggcctggacgaccttttgccgcccggcaaaacggtgaccaaaacgaacggcgatttgttgtgggagacgcaatcggtggagatggaggaagtgccggccgaatacgacacgtcgatacggcaaagtcagcagcacaattgggaggaaggtaagcaaaacgaagaagccaaagagaacgacagacacaaaatgcgaatgttggcattttgttgcttcacttttcagagtccaaaggcgatggaaatgaaaggaaaaattggacgaagaaaaagcaaccgacgaaggaagagaaaaagaggaaatga

SEQ ID NO: 68860 - DNA, 305 bp, Heterodera glycines
aaaattccctcaaaaataaaaggtctattgcgcaccgccctccctatcatgctcgagagcatttgtatgtgtataaaatttatcaaaaaaagagatagccatttttctgggatagagtctaaatataaaaatcctctcaaaaataaaatggcgattgcgcacagccctccctctcatgctcaagagcttttgtatgtgtataaaatttctcaaaaaaagagatagccatttttctgggatagagtataaatttaaaaattccctcaaaaataaaaggtctattgcgcaccgccctccctatcatg

SEQ ID NO: 68861 - DNA, 368 bp, Heterodera glycines
tattcggtgacgcacaattgttaattaattattcggatgcgctttttcatgatggcacaacactgatccatgtgattggcactctgtccgctcagctcagtgtttggattcgttggatggattctgaactaatggagaagcaaaattcaatgcggatagtcgatagaaaaatctacgagaaaatatgggccaatgcaaggctggaatttgaggtgaagaagggggtcttgttggaacttttcgcaaaaaataaaaatacgaaattgaattgcacaaatattgaaaatttcgccaatattatgattttgataattagggctgccaaaaatatttgcaaaaatggtcaaactatgtacataaatatgtaa

SEQ ID NO: 68862 - DNA, 339 bp, Heterodera glycines
atgaacgtttgtgttaaccttgtcgagttttgtgggcatgacaacaacaacacgacgtccgccgatttgcagcttattggacagtgtaattttctttttttttgaaaaaaaattttataaaatgaaaattaatgaaattaaattaatgaattaacattttttgcattaattaatatatgccaattcaaaaatttttcagtcatttccactaattgcatgcgcatcagtggggagttcaacatcgatggccacctgctggtttagcgagagcaattgtccggcaacaattttgtggagcaaagaaagtgccattgtcagtgaattttggatagaattaaa

SEQ ID NO: 68863 - DNA, 3012 bp, Heterodera glycines
atggaccctgaatcggttgaaaagacagcatttgtgacggaattcggacttcacgaattcaatgtcttaccgtttggcctctgcaacgcagttgcaactttccaacgcttcatgacgcgtctttttgaaggaatgattaacgattctgtttttgtgtacatcgacgatgttttgatcgcttctgaatcttggagtgaacatttaaagcatcttcgagaagttttcaagcgaattgatgaagcgggtttgaaactgaaaatttccaagtgccgttttgccgttaaagaaattccatttcttggccatatcttaactcgagaaggtgtaaaaatggacatggacaaagtcaaaccagtcattgaacttccaacgccaaccagtaaaaaagaactccattcactccttggattcttaacttactaccggaaatatatttttggttttgggtctttggcagcaccactgtttcgtctcctaaaaaaggacgtgaagtttgaaatcaaggaagttgaattaggcgcaattaaagcactaaaaaagagcattttggaccacgcaatgctttatttcccggatttcaaagcagcagtagacgaccaaaaaaggcaatttgtgatgttaaccgatgccagtaaaattggtttagcagccatactttgtcagccggacgaaaatggaaatttaagacccatttacttcgcgtcacgacaatgtaatcggcatgaggcgcgatactgcccaacagagcttgaggcgttggccatcagatttggcacaaagaaatatgctcaatttatcactatgattccaacaagagtgataacagaccatcgtgcactcgtttcaatgttcaaaagcaaaaacgagactggaaatagtcgtgtggataaatggttgatggcgatgaattcccgttttatccttcaagtcgaataccagcctggcaaaaagaatatacttgccgacctcctttctaggtccaaaacattgcttaacgcaacagaaaacgtggaaagtgaaaattcaaaagcggaaatcccaatttcaaaagaaatttttcgtattgggcaaattcgagaaaatcaggtcgccgaacaggctgaagacttgagtgatgaacagaggaaagattgggttgaaaagaccaaagagagcgaattggcgtttgtctatgaatttttggaaaaacgtgttttgccgcatgacgttcgcgatcgacaaaaattattgtcatctttgcacaatttttcgttaatcaacggacttttgttccgcaatgagaacgatggaaaactacagctttttgtaccaaaagagttcagggaaatgatgataagagaaaggcactcgggaatttgtgcggggcaccttagcggaaaaaaaatttttcgtcagctctcggagctttacttttggccaaatatgtacggagagtgtatccgggcggcacttcgttgtagagtttgtgcacatgcacgaaaaccacgatcaaatgagcctcccctgaacatagtcgagacaaaggagccgttggaattggtttgtatcgatattttatcgattggacccgcagcatcttcaaatcggtacattttggtggcagtagatcatttctcgaaatacctcgtggcctgcgcgatcccaaacaaaaatgccgaaacgattgcgaaaaatgttgtaaaaaacttcatttgtatcttgggaacgccgaaaaagcttcatagcgacaaaggaaaggagtttgttaacgaaacattggaggaaatttcaaaaacactcaaaattaagagaacgaccacctcaggatacgatcctcaggcaaacggtgtaacagagcgcgttaatcagacgatactaggaatgctacgaaagtcgacttattcagcctgggaatgggacgaaagactgccttttgtagtgtttgcctataattcgacaccatcagaagtcacgggtatttccccacatcatttaatgttcggaaaaccagccaactttccgttggaacacgaattaaaattcgccgtaaatccgctctacacaatagaccaaaatacgtatattcaactttttcgcgagtccctaatgcaattagtggacgaagcgcgaaaaaattcccaaataagccgtgcaaaaatgaaagaacacttcgacgcacaagcaaaagtcacggagaacaaattccaaatcggagacagggttatggtcatttttcccgggtcccacattcgatcaccacataaaaagattttgtggaaccattttggcccatttcgtattacggaattgaataaatcgacggcgaccgtaatcccgtccgataatccatacggtaatccaatgacagtccctcttgaacgattagtgcgcgtaccaaaggaattgcaaaacatttgtacaatgccgaaagggaaaaacccctataagaatgttttaaatggactgataagtgtggccggattaatttgtcaagaaaacataaaattgtatggggaagaaaaattgaactctaaaccggacggaataattgggcaattgaggtcaattgcatttttaggcggtgaggaggagcacatggaaacggaacagacggacgacaaagaggcggagaccaacgaaagcgaaaacgaagaaaatgtagaggaaaagatggacggcaaagaggtggacgcgaacgggagcgaaaaagaagcgaatctggaagaagaagaccaaatttcggtcgttcaggaagaagaggagccgaaaacgctttcttggacattggcatgtgccggagacgagcacaaatgctgctccgatgtggtcgtggccgacttggatgccgtccttgaccgatcaggcattgggctcacgaagatcgagaatccgctcaaagcgctgttgacaatgtttctgctgaagtctgaagcggtcgcatcggcatcagctgccaaaaagctcatttcgcaaattctggacacggatgccgattgggaactcgcaacatattgcagtgcccgagaagacgac

SEQ ID NO: 68864 - DNA, 1055 bp, Heterodera glycines
tcgccttgtgttgattatagagggctgaactctgtaacagttaaagatgcatttcctttaccaaacatcgatagcactttgttagcgctcggcggaaaaaagtttttctcggtcatcgatttcatgtcaggatattggcagataagaatggaccctgaatcggttgaaaagacagcatttgtgacggaattcggacttcacgaattcaatgtcttaccgtttggcctctgcaacgcagttgcaactttccaacgcttcatgacgcgtctttttgaaggaatgattaacgattctgtttttgtgtacatcgacgatgttttgatcgcttctgaatcttggagtgaacatttaaagcatcttcgagaagttttcaagcgaattgatgaagcgggtttgaaactgaaaatttccaagtgccgttttgccgttaaagaaattccatttcttggccatatcttaactcgagaaggtgtaaaaatggacatggacaaagtcaaaccagtcattgaacttccaacgccaaccagtaaaaaagaactccattcactccttggattcttaacttactaccggaaatatatttttggttttgggtctttggcagcaccaaaagagcattttggaccacgcaatgctttatttcccggatttcaaagcagcagttgacgaccaaaaacggcaatttgtgatgttaaccgatgccagtaaaattggtttagcagccatactttgccagccggacgaaaatgggaatttaagacccatttacttcgcgtcccgacaatgtaatcggcacgaggcgcgatactgcccaacagagcttgaggcgttggccatcagatttggcacaaagaaatatgctcaatttatcactatgattccaacaagagtgataacagaccatcgtgcactcgtttcaatgttcaaaagcaaaaacgagactggaaatagtcgtgtggataaatggttatggcgatgaattccccgtttatccttcaaagcgaataccagcctgggaaaaagaatatacttgccgacctcctttctagggccaa

SEQ ID NO: 68865 - DNA, 493 bp, Heterodera glycines
  unsure (1)..(493): unsure at all n locations
atgattgaaccaggcaaaagtgttaatcttctgtntaaacttaaatgctcttcctgtcttaatttcaaatatgaagaagaaaaagacggacaaaatggaaaatacggacaaaatgtaacagacggacaaaatgaaacggacaaatcaaagcaaccaaataaactactattaactaaaacttcttacatcaaaaaagaagaaacagaaaatgagatcaaggtaggccattttctaaatcaaatttatttaaataaatgataaaaaaatttaatctaaaattattaaagattgattttgaattaaaaagtgccattttcaacggaaacgcggccgaaattgtgaggaaagaggatattacaaaaggcaatgaatttactgcgaaatatttagatgtaattttatattttatttttaagttgaaaatgattttatttatgcaatttttcattttacatagttttattagttttttaaatttaattatttttagtaa

SEQ ID NO: 68866 - DNA, 356 bp, Heterodera glycines
atgagaaaaaagagatagctattttttggtcaagaattttttttgtttgcgtttcaaatatcgtaagattgtttgatagggccagacaagagaaggcaactgttggtaccaagtttgcggtaaaaaaatgagaaaaaagagatagccattttttggtcaagaattttttttgtttgcgtttcaaatatcgtaagattgtttgatagggccagacaagagaaggcaactgttggtaccaagtttgcggtaaaaaaatgagaaaaaagagatagctatattttggtcaagaattttttttgtttgcgtttcaaatatcaaaaaattgtttgatagggccagacaagagaaggcaactg

SEQ ID NO: 68867 - DNA, 772 bp, Heterodera glycines
atgcatccacaggaccattatccggaaagtgaggactgctcgaaggccgaacaaattgggcagcattacatcgaatctgccgcttcaccgatgttgttttcctgcaaatatgggccattaaaggtacattttgctttagttttgtgcaaagcaattaaatttaacgcacacaaaatctaatttttagccaaatcggaactattcggccactgtgtgggctgaaaataaggccgggagtagcattgccgtctctatcggtagccaatgtgttatggattatgcggagcctgaacacattgaaccgcccagcgtcgcctctcgtcccaacatttcgtcgtttggtcttcgttttgagcacgagccgaaccaagaaaatgggcctattgtgtaagagaattgctttttgtattctattcatatttatcattcaatttcagttgctattatttggctattctgcctttgcctttgaatgtcagcatcgaaatgcttccgatgcctgcaaatgttactatggacaattatgataaagcgcttaagaacaaccaaaaccaacacgcaatcaccaataaacaattcttcgcttacattgcggagagttatttgcaatacccaagacaggtccaacaacagttttttttgtgtcctttcatttgaaaattcattgatttttaattattttttttagactgtcgttggagacagagaaacttcggctggcactgacgcgtgcactgtgccttatatgaccagacacactccgtcagactaa

SEQ ID NO: 68868 - DNA, 556 bp, Heterodera glycines
atgtctttcgggttgggccgtgccgagtcggtcactcggctcagcgcattcgagccaaggccgaatccgtcggtgagtgagtgccgttgttggtaactgcccccccccccgttctgataatcccagtgcccttttcttttggctctttagctcgtccgttgctcctctctgatcgatgtcaaccgtttctcccgtgattttgatcgcttttctccgcgttcgtcgcgtctgtcccaaaatgactcgagcgcattgtggtcgagcagaatgtaccgaccatcgtttgtggtaatggtgccaagattggaggatgcaatgattacatatttgcagatggacaaccattggttcgacaagttttactatttctcgccaattttcaagggcacccaaccgtacaaatgtcacgtggccaggcgagcccttcccccgggcggaactgtcatttctctccctctttagccatcgtctcacttatccctcctcttggcatcagccccacgactattggcgccgagtacgcacttttggtggacattggccaatcatcaataaa

SEQ ID NO: 68869 - DNA, 334 bp, Heterodera glycines
atgacacttttaagcaaagagagcagcggagagggagaggaaaaagggatggaagagcagagaaagagaaaagcggatcagagacacaaaagtggggaaaagcaaaagcaaaagacaaaaagcatggaaaaagcaaaagcatggagaaagagcagctgtcaaatgggagggggagaagctgatcagactgatcaatcaatcaaaagaaaacaaaaagcatttattaatagtctaatcattttacaatgaatgaatgattcacagaaattcgctttaaatgccttcgatttgctcaagtgtgccatccatctttttccatttcaaatttctttca

SEQ ID NO: 68870 - DNA, 354 bp, Heterodera glycines
atgagtcccgtttttgtaagcatatttttaacaatcgcataatcaattaaaaaaattgctcaaaaataaaacttttgagtaaaactaacgaaaatttaaaaaaaatcgtttgtggttaaattcttaatttttgagttccgtgctaccgtcagtcagctgagcgttcgtgtagttgccatcaccacgaattctatcaaagtccagtggtacccgatcaccgcaggccaaattgacaacaagaaaattgtcaaatacaagttgcactacaaatgcacctctccagaccaccaatggagtgagactgatgcttatgaggtaaaatttgaggagagattgtactttgactttgtatga

SEQ ID NO: 68871 - DNA, 2706 bp, Heterodera glycines
atgcagcccgatcttgagaatttattttttaaaattgaacttcaaatggatttgattgcctggagcgaatcggcgacagacaaagcggcaaaaaaagcacacaaaagggaaattatgtcattaagaagtgacaaagacaaactttttcccgaagaagcccaagtgattgtaattgaaaaaggtgaagaaaatcggtcaaatttattagcgacagagataagtctgttgacaatgcatgacgaaatcatggaaggactgatcgaaaatgagcaacactttttggacaaagttaaaagtgagtgagaattaattaattgattatttcataattattagttaatttaattaaaatttcagcaattttcattaacgaacaacgccttcaaaaaatgataccacggatgacattggcataccaaattttaatggaaaatgccaaaggaagcaagcagcagaggaatgaaaacgaaaacaatggaaaagaggacgatgaagaaaaggggaaaggaagaggagaaatagtggaagaaaaaggagaagagaggggaggagccaatggagaagtagaaggaggaggagaaaaagtaggagaaaatagtgaaggaagaaaggtaacaaaagaagacgaaaaaacacgaaaaagggaagaaaaaggagatgaaaaggaagaaagagacaaaaaggaaaaaggagaagagaggggaggagcagttgaagaaaaaggagaagaaggaaaaagtggggaaataaatgaagaaggaaacgaaaaaggaagagaaaaggaaccagcgggagaaaaaagaaaagcagaagaaaaagaagaagagaggggaggagcagttgaagaaaaaggaggaagagaagaaaaaggaagaggagaacaaaatggagtggaaaatagtgaaggaagagaagaaaaaggagaaaagcggggaggagcagatggagaaaaaggagaagaagaaaaaagtgaggaaataaatgaagtaggagacaaaaaaggaagagaaaaaggaagcgaaagtggtagagcagaaaacgaaagatgcgttgattcggatggtaaataatatttttaatttattaattcgctgaatttttgccaaaatcaaatttgtaataaattttcaaaacactctccaactaattgtcattagcttcattaatcataattgttttgattatttggctttcattattaagctgattcggacttgatcagctgctaccaacatttgatgttggcggatcggccaatttcaagccgtgataaaaaattgttggaggtgaacaccgtatattaccaacttaaatcactgatcaaccaactcttatcaatcataaagcaaataaaaaagggtgtggcaattgaaattgaaataatggcccaaaaaacgcttctcttgggaaaacccgaaaattttgacgaaaaaattgtgaaaatttgctatttaaaaagtttttgggcgtatgtcatttcaaatcgcaatttatacaatgaaagcgaaagctggagaacatattttacatataactttgctggaaaagtgagtttttaaattaaatttgaaaaaaacgaattaggacaatgccaaacttttagctaaatgcgccattccccactgaaggagaacaaaaatgggacaattccatttgcgaggaaatgaaaaatgttttagaaatttttcaaggtttcttaaagtcaccaacatttgaagggacgcaggaatttgtactgaataacttattggagaagaacaagaaatttgttgattttataaattataattttggcaaaatgccaatttttaaaaaatatggtaatttttttgaaggagtcgagcggtgttttatagctaggaagattaaatttcttattctagtttttaaatttttgtgacaggccctttaagcactcaaacatcagagggggggaatgacaaagttctgcaaaatttagcattttttttgtcaatttttacacaccaaccagcattgcctagctttacatttttattattttttgattttttccaaaagccttcatttccgagttcctcgtccaaatgttttttttcttgtttaaagtctgtttctgggactcaattaattgtcgatatcaacaagcttcaaacccagttttttcagcaagatttgatgacgtccacgagatggaccttttctatttggcgttgttttcctccaccgattcggacacaacttttcaagcagagatatttctcggcatcaaattgatggagtcgatcatatatcaaaccgagaaagtggtgattaaccctgctaatttcacggaaattattagaacacgggccaaattgcgtgccatggtggctgtgcaactgcacttttggcatgccgaaaaattccgcataatttgttaccaaattgcctatgtgacctatctggtcaataagaggaacttcccatccacagattggcagtcgcccaccgaatgttttttaaacactcgcgaagaaactttgtcctcaatgcgtacagtactccaaagttcccattgggactttgtagtcaaccgagtgacgggcacagtgcgaaacggtatatcggatacagtacgccacaagcgtggcgccattgcattgctggagaagctaattgggggtacagcaatggttaaactgtgggagaacaaagaagccagggcgaagttaatggaggcaaact

SEQ ID NO: 68872 - DNA, 1067 bp, Heterodera glycines
atggccatttttgttatgtccaattcatttggaaaaatgaaactaaaagggcgaaagggtcacgaaacaatgaagaaaatttatccagaaataagaaaaatttggagtgaaaaattttgcgaaatttgtgcgcaaattaaaacgaatgtacaagaaaattcctttgagaaaatttacaaattttggcacaagttggccgatttatacaacaaaattccaattttggaaaaacatgaaaagattttgataatttacgacgaatttgcccttcaacggaccgatgaacttttatggagggcaaaagatcaactaatggtggaacattccgaaattgtgactcaactgaccgtgtgccaatcagcggagtgccaaaacgcactcagtcgctttttggcacattcaattggccaaatgaaaggggccaaacatcgactgagaacatttttcacctcaccattaaaaggcactgcaattttggataatttactacaaggaaatgcgagttttgcgcaggtgttccgttccggtgaatgttttattttaattttttgaatgaatatattatattttaatttgaatattaccgtaatataaaaataattatttaattgcctcctaattaaaatcagatttgacaacagacgaaataagccaattacaagtcaaatattatctaaattatatggacagtgacagtgaaacagatgttcacacgagagcactttttatggccaattttttggcattttatcactggtaagttagggatttcggggcctttcccgaggcttacataatacgattggacggaactcgtctaacaatttgttagtgtttggtggatggaaatcgatctctggggttggaattgagcgggccaaaccccgaaacccggcatagcttagttttcaataatttttttggttgaaaaactttctgtttttctattttggtttacaagaaaaataatcagaaatccggccgcaattccgttacatccctgcagcaaagttaccagggatgggctttgctttttcacctttcaacgtttggggcaaaagattaaa

SEQ ID NO: 68873 - DNA, 1244 bp, Heterodera glycines
  unsure (1)..(1244): unsure at all n locations
gtctgtgcgtcgtgagcgggtgtgtggggcaggcacataacacactgactggggatggtggtntcgttcccggtcttacgtgccgtaactagcggtgtgtttgtgcttgctgctacgtccgtggccgtgatgagacgacgtggtagggcccgtgcttggcctagcacgtggcttaagactcaatgagtgtcagctcgggcaccgccagctttttcttttttttcattatttttttttacacttctgttgaagaatgaattctagtcttatcggtggatcactcggctcgtggatcgatgaagaacgcagccaactgcgataattagtgcgaactgcagaaaccttgaacacaaaacattcgaatgcacattgcgccattggagttacatccattggcacgcctggttcagggtcgttaccataaaatgcactgcttgtgcgttgcttcgtgggatcatgtacttgtacgtgttcttacgttacttgcttagctcggctgtggggttttggtgtgctggcgcgaacttgtggttctaattcgcgttttacggaccgtaactcgggcgcaccaatgctttgcatgctgtggcggagtgcctggattactggcattcctgctttgatttttcgacctgaactcacggcggggacancccgtggaaacttaacatttacataagcggaggaaaagaaactaacgannggatcccgtagtacgggcgagtgaactgggaagagtccagcgctgaatcgcagctcctctggggttgcgaggtgtagcgtatagaccgtgagcttgggttggcccgcttgttcaagtttcccttgaccggggctccagagaaggtgcaagacctgtccaactggcggtgcctacccatctttacgtgtcttggagtcgggttgtttgggatcgcagcccaaatcaggtggtaaacttcatctaagactaaatacggccacgagtccgatagcgaacaagtaccgtgagggaaagttgcaaagcactttgaagagagagttaaagaggacgtgaaaccgatgaggtggaaacggacagagctggcgtatctggtctgcattcacccgtttgttgctgtacgttggcctgctagcctccagactggggtttgctgtccttctgttcagtggcgaatggggcatttgcaggcggagtgcgctgagatgctcggagtagctgcgtgagctcggtcttgaggccagcctttcggggtctggtaccc

SEQ ID NO: 68874 - DNA, 123 bp, Heterodera glycines; identical to SEQ ID NO: 67087

SEQ ID NO: 68875 - DNA, 205 bp, Heterodera glycines
atgaaaatgccgggaaggcccaacatccctcacaaaaatccatatcattataaggtgcaacagcaaaacagaaaccaagtgcagtacaagcaacagaaaacgattgaggaaacaatccaagaacaagagaaaggccgcagcagcgtcctcggtaaaaaacttcgccacggggggaggggaaatccggttcatgctttgaactatg

SEQ ID NO: 68876 - DNA, 1209 bp, Heterodera glycines
atggattcattcggaactgtcgcctggattctgcgaccaacggctcagacgacaggcactgctgtgggctcaatggagtacgaagaggaggaaaacgggacaggaaagttggtccacagtgacacagctactgtcaccacacctaccaccgccgagtttagactggaaaaagaagccccctcctccgagaaggacggtgctgaagagggcagcggcggccacggcacactgctgttcatcgaatccgatgatggggaggaggaggaggaggacattgaagacacccccgtcgccacagactccccctcggctacgacggcaaccgttgtggatgactcttccaacactgttaaaggggtggagcagcgctccagtgagcacagtgacatgacgaacggtacgggcggtggcggtggaagcgaaggcgcaaaactgctcggcgggggagaggaagaggaggtaggtggaggccagctaattttctacccccccccctactgtttgtagcctgttcgaatgccgctgctcaactacctgtgcgcgttcaacgactgttcaatgaaggagcttcaactcctcttccacagtgtccacgcgcgacagcgtatggtggcgcatctgcaacaacactgccgacttcataccgcgcatctgaaaccggcggagcgtaacattgcgctccactgtcacgacctcagcgtgcagaacgccaaccggacgttcgcctgcggtggctatctggagcttaccgtaagtcggtgagtgtgtagaaccagtcatggtgcggccttctgtccaggttcgacaatacttcttcgccaaacacgggctaaagctgaagcacccgtacatgccgtgcatgatcgagttcgggggcggcacgcacgcctcctactatccgtaagcggggggtacgcaaaaatgggggaagtgagcgtaaacgccttcagcctggagctcgtccatgtcgtgctggagcgtacgaagcgcgctaaacaggaggagacggtgaagcaagaagagccataccgtcgtgaatccggcgacgtggctccgacaaagtcgatggcaatgccggaacgacattgttgccgctgttgctgtcgatgcgctaacaactagctttttgagagacatggtcattgtagatttgcgcgcgtgatcacgtgacttattgtgctgttatagtttttgtgcactttttttgaa

SEQ ID NO: 68877 - DNA, 324 bp, Heterodera glycines
atgcctgacgcggagcagcgagtgcccgtcccctgcacccgcttcgtgcgtacgaagcgtgccgaggtgttcacgcgccgcggcaccaagctgtaccagcccgtgtacaccaaagggctggtcgttgcgcttgacgagagggaggctggcggcggcgccggaaatgcctacttcaccagaccgtttggctggtacgacgacgacgacgacgctgaccgtgacaatgctgaggaggaggaagccgaagatggggaactcttggacgaaagcgacactgatgatgatgatgatgatgatgagattgattttttggtacttggataa

SEQ ID NO: 68878 - DNA, 827 bp, Heterodera glycines
taattaaatccattccttcgggggaccgtgccgggtgccgcggggtaagcagtgctggttcgttcatcacggcaccgaaccttttggctagtcagcaatcgttgcttaacttgccagatcggacgggtgcgcatgattccactgttccaagcaccccaccaaaagcaaaacgatataaccaaaatataaggaaaaattttttaaaaaattttttctccatcttcctttttgatactaaagcatcagagtgctaaaattaagttgtaaataaaatttggtgcgctttagagcactttctgaaaaaaatatttatgaaacaaaaaaatcgattttttcaagtgtccgtttggggtactcaaacatttatggggagcaaaaatccaacgcagaattaaagtacaggctatagggaagctattcccgaaggattcggtctccccataaatctgggcgcatcggttcggggggactgccccgaaaacaaaaaaatcgattttttcaagtgtccgtttggggtactcaaacaattatggggagcaaaaatccaacgcagaattaaagtacaggctatagggaagctattccggaaggattcggtctccccataaatctgggcgcatcggttcggggggactgccccgaaaacaaaaaaatcgattttttcaagtgtccgtttggggtactcaaacaattatggggagcaaaaatccaacgcagaattaaagtacaggctatagggaagctattccggaaggattcggtctccccataaatctgggcgcatcggctcggggggactgccccgaaaacaaaaaaatcgatttttt

SEQ ID NO: 68879 - DNA, 267 bp, Heterodera glycines
  unsure (1)..(267): unsure at all n locations
atgaattttggcaccaaaaatgggatgacattcaattcgtttttgactcaattcaagcttttaatccgtcgaaatctctcttatttcctctcaacaaaatgtcagacaatcgaaaagaagcggcggaggaagaaatggcaaaagcaatgtaaaattaatgccaatttcacataaatttcatttttttcagcttcatctccgccgactggtggctntgtgtgttcgatctgcttccggctttcacacttggncttggaattgcgctga

SEQ ID NO: 68880 - DNA, 615 bp, Heterodera glycines
  unsure (1)..(615): unsure at all n locations
atgcaacctttttacccgctcatctgctcaaaaaagcagcaacaacaatcgcttcaagtgcattgcctccgaggaaaacgccgcgtccaaccaaagcgtcgcaacttcgaacggacaaaggcacccttttgggaggcatggcatttaaaggcagcagaggtgagtggcaccgttaatcaaaaaaatgtttaaattgtgtaaatacagagtctctggacagtttaatgcgctctcctccgcctggtcacatccacgcctcatctgtgagatctttttttaataatttcatttggattagcagttacagtgcgtgaaactgtctccaactggcattaaggacagcgacgttattgtcagtctgaaggtcggagaaatgatttttttaattttcaaatttacagttgatttaaaacttttagaaatgccttcaagagaaggaagcccacttggccaagctttccatcgaattgagcgagcggagtaacgatgccggtgacaaatattcagaatttgctttgttaaaaataattcatatttcagaccgactggcacatgaaaatctngaatttgaagttgaggattagtgaaattggatgccgatctaaatgcaactga

SEQ ID NO: 68881 - DNA, 420 bp, Heterodera glycines
  unsure (1)..(420): unsure at all n locations
atgggatgggcagtactgcttcacttcattaatggagttggcgtagtacaagctcaaccagcaatntatntcataaattaaggcgcaattcagaaaaggaggaccagaattgttaaatagttctatggattaatacaacttaaattatgggttttaacaattatctttgtaaaaaataaaattttgtttgatataatgcaaatttatggggagtttttaaatgagcaatattttcaagcgcgcagtgaaaatcaatgccacataatttataatgccatttgcgtcatttgttgcagcctaattgccgtttaatttcttattttattaaaaaaatcaattgaaattttatattgactaattttcatttccttcatttattggagctaattgctttttagcaattttattttactaaataaa

SEQ ID NO: 68882 - DNA, 107 bp, Heterodera glycines
atgattttgtttttgtttacatttttgactcatctttgcttcatcacaattaatgcaaataatgtcaaaataaccaatgttcttggtgacggaaactgtctattccg

SEQ ID NO: 68883 - DNA, 1511 bp, Heterodera glycines
atggtagatgctcattttgctgggtgtgcacatatcaagtcggagtacgtcgtattacgaagcgaaacgcaacggcaagaaggaggcaacaaaccaccaaatgaatccaatccattggaagggaattcgcacgagggaattctgccaagaaatgtgagggcacgcggaatggaccgccaaagagagcaaaaaatggccaaggcccgagcggaaaaccgtcaaaaaatcgtaagaatttgtccatcggttctttttgagagcgaaggaaggaagtgcaaatatggagagaaatgcgacgcggagcactcgctgacaaaatattgggcgaagaaaccgccggacattggcgagttttggcacccaacgccaaacaccatctttctttggaaggtccgtcctgctttttgttcgaccaaatgggcaagtgctctttctcattgagctgctgtttcgcccgagcccatacgaatgagtcggatttgagccagaagagcaaagcggggcactcggaatggcagtccgttctcaacacgcacactttgcccattcagcaacagctcagaaaacgcacttacgacttttctcggttctcccccttttttccttgtttaatttctctctttttctgtcagttctgaacgtgctctgcatgaatcaccatcgggttgtatggaacgcgaagcaccgaagtgggacatgcgcactctccgcggcaaaaaatacttggcccctctgacgacggtgggcaatttgcccttccgccgtttgtgcgttgaattgggcgcggaagtcacttgtggtgaaatggcaattgccacgcatttgttgcaggtgctttgcccttgggctgtggtcattatttgtcctattccttttacagggtcttccttcagaactttctctgatgaaaagacatccgtcggaaaaaatctttggcgttcaattggcaggtaaaagttagggagagagaaacctttgcaatatattttaaggaggctaccccgattcacttggtaaagcagtccaactgatcaccgacaatttcaatgttgatttcatcgatttaaatttggtcggtcattattcgttttgtcaattttccttattttttagggttgtccgctggacagtgtcaatgaaaagggtgcaggctgttcgttggcgaataaatccaacaaattggtttccgttttgcagtgcatgcaaaagagtgccacgggagtgcctgtgtccgtcaaaatgcgttacggagtgaaggaaggagaacggactgcgcattacaccatggggacaattgccgaacggagtccccctcagctgctgaccctccaccctcggtcacggtcagccgaaccttcaaacggacgaattgatgccgtcactatcacagggaacagcgctacacaaaggcggccgagtgggattacgtcttggagtgtgagcagcgaatcaacggacgcttcccattttttgtgtgtggagatgtaatggattacgaagagtattatcag

SEQ ID NO: 68884 - DNA, 912 bp, Heterodera glycines
atgtgccaaagtgaacggaatgccatgaacagtgatgaaatgaagcgccaaattcaaaagttgacaacgaacggcccactaattctttccgatatgaaggcagcagagaaggaacttcaaaagtcgaaagaacaaaatgagaacgaacaatttcgacataattttgccgatttggcaacaaaactatgttcaaaaacattgccaggaggccatttcaaaaatgccgtaatcgaattcctgcaaagaaaaaagggccaaatgctgtggcccagcgatttggcacagtttctccttaccaaaatgaatgttgtccgtgccaacaatgcaaacggtgattgtaaaaattcggaaattttccaaaaaattatggcatttgcagaaaatttagaaataataattaaatatattcataaagtagcaagaccaactgtgcaaatggcctagtggctagtctcttcactttcccttcttctttcccctggttcgatccctctacagaaatgaaaatattttgaaatttctttttatatatactcatggctttcctatcgacaaaatatgattcttaatttttttttaattgtattttatcatttttaaagaaaatccgtacaaattgagcctagtaatcccaaaaccagccttttttgttgaaaatctgttaacaaattgcacccaaatttttaaaatttcccccggcggcgcctatcggcaccgccggtccccctttcttccgctaagtttttggaaaaagcgcgccgaaaaaatttatgtgaaacgtaaatctgaatttctaataatattcgatcacttagtccaaaaatgattaattgtttgaaagtaatgaagaaaatttgatttgaaaattttcattaatttattagctttaacttttgggttttattaaataaa

SEQ ID NO: 68885 - DNA, 1974 bp, Heterodera glycines
atgctctacggcagaaaattcactctgttgaccgatcacaagcccctactggccatcttcggatcaaaaaaaggcattccaatatattcagccagccgacttcagcgctgggcgttaattttgtcaaattacgaatttgatattaaatacgtcaacacaaaggcattcggaaatgccgatgtactttcgaggctcatcgcaaattacccgaggccatcggaagacatactcatcgcaaacatctgcaacgacactgattgctgtgttaattttgtttttgaggcaaaaattgagcaacttccgatcaccgcgaaaataatagcggaggaaacagcaaaagacgaaattttgcaacaaattagcgctttcaccaaacaaggatggccacaaaagctgaacgacattaaattgtctccttttcttccaaaaaagggacaaatatccgaaatcgaaggatgcctcgcctacggtgaacgaattatcatcccttcgtcactccggaacaacatcctcaaatcattgcattttgcgcaccccggcattgtgcgaatgaaagccattgccaggaaccacgtttactggcccggaattgactcagaaattgaacgagtggtgaaacaatgcgaggaatgccactcagcggccaaaaatcctacaaaagcgacccttcagccatggaaggcagcaaacggagtttttgagcggattcacattgatttcgccggcccgtgcgctgacggccaaacatacctggtattggtcgacgcctactcaaaatggccagaagtatggcaaatggaaagaacatccagccaactcaccatttcaatgctcaaatcattcgtgcatcggcttggaattcccaaagaaattgtctccgacaatggaagccaatttcgatccgccgaatttgcacaattctgcaaagaattcgacataaagcacaccttcacgccgccgttccacccaatgtcgaatggggcagctgaacggtttgtcgacatttttaaacgatcaatgaaaaagtgccgtcaagagggaaaagattggcttcaaaaagtgcttttggcgtatcgcacgacaccaaacacggcactcaacggccattcgccagacgaacttttcctaggacgccgcatgcgcacaagaatcgcacttgtccatccggaaaaacaaaaactccagccaccaaacttggaaaattttcaacaattccaagggcagtacatcaaaaagatggaaaaccaattcaacataaaacatggagcaaaatcagccattttccaaaatgaggaaccaatttatttttggaatttaaaatacaataaagccacttggcttccgggaaaaattatcgaaaaattaggcacatctccgacgtatcgcattttggcaccgacgcttggccgagccattcatcgtcatgccaaccaaatcaggcgacgtttcccaattgaattggaggacaatgatcaagttgtagaaaatgatcaaacccaggcacaaaatccgcaacaatcgccgatcgcgcacaaaccgcagacaaatcgtcagcaatcgcctgctcaaccagttcttttgcgccgatcaggaagagtcaaacaagcacctcaacgactggtcctggatccgacaaagcctaaatacggcttaatccgatcatgaatcccaaatcgagggacattcgacttaaggagggaggtgttggatagggatcaaagatcactttcccatcattgttatcgacttttcccctccccctttctctgtcttacattatttccattgtcttcctctctgcctatctcctccacatttctctgaccccgcgtctttataagggtgcccattccctcactcatggctctccgctccattcattcgcattggacatttttattattttattctcctccgtcgctgcactcctccgacctcatcaatttgtgcatttatttttatttgtgtttatta

SEQ ID NO: 68886 - DNA, 610 bp, Heterodera glycines
  unsure (1)..(610): unsure at all n locations
atgctggttagtgcgcctctcatccaacaacagcaacagcagcaagtgttccaacaacaacgcccttccacttccgcttcttccgccgatggtcccttttgaaaaccctttaaaattggctttattagtgtttctttatccaattttagctgttttgcttccgcatgccacggaagcttctgcaccaactccctatcagcagcaacaaacggaggatcagctcgaattgccgacctccgtaccctccgctgccgactcccagcgccaacaccgcgccacccaacaaccgcagagattcttcaaatccggatcggttggttacatttactaaaaaatcattaaatacatggnnggtacttgtgcagtttacggggcaatttcacatacattttcaaaaaaaactgaattttagaaatcaaagaaaatgttttatggggttttcgaggtcgctgatcacgaaaccgggctcagaccagcgctaccgttcatctgccccgtaaactgcacaagtaccaatacatgtgcaagtggtgccccatatgaacaacacgaccataaaatatttgacaattttaatgcattgtacaagcatcaaaattacacattattg

SEQ ID NO: 68887 - DNA, 447 bp, Heterodera glycines
atgcctcggctattgaaattacttgtcaattttttgacgactgtaaacgtgagaagttgattaccggtataattaaataattcttctgcagttctcaagagtcaacagttttcaatggatgcgtccttcaaactttcggatgctatgagtgcgattggtattttttcttaattttcgttgaatcaattttgaattaagaattgatgaatgaaaaaatggattcgggtatgaaatatgttgagcggaaacttgattttttcaccagtaatacaatggttataccaaattaaaatacaaacattaattgaaaaaattattttgtaggacatactcaacaaattaaagtttgctgatattatcgggatttttgatgcctcatattctttgttggcgtcatggttaactggacaatcgcctgatcagacggtaccactcgttatcgggtga

SEQ ID NO: 68888 - DNA, 811 bp, Heterodera glycines
atggaagatttttacattgtacttccctcaaacacacctggtccaggaaatactgcctcaaattttacggttagacttccacacaccttagagcttgactccaaatggtccgtcgcattatcagcaataatctatccatattcattcccgtcgatcagtgtggacgaggatgactctatctctgtcaaactggttaatcctaactatagagaagatgccggaaattctgacgaggaatcgcaaaagtttatcaatttgtcagtgaagattccaaatgtacaattccaaagtgtgcaaagtttacaaaaaacactgaatcaaataatccagaatgcttacgatacaaaattggcggctcatcattaaatgatggtacacccaacaaaagagccaaacgacaaaccgaattgtcagaatcaggcgctggagtaatcgaagtagagaatttcttcactcgaaatccttttgattactggcaacagattggagaactgagaaaaaagcactatcagctcagagaaagggttgaaaaaatgacaaaggagtacaattcaacagcggatggcgaacgaaaaacatttctctcaacggaacttggggtttttcaagggcgagaaacttttctgaaaaaacatttgcatttgattgaagaagaggcgaagagaagggacggtgagcagcaagaatccaatgaacaaagactcattgaccgtttctttgcccgataccctgccaattatagagagcagctggacgagtggaggtcaagttacctccgagatgtgctagatctacagacaaagatgggaga

SEQ ID NO: 68889 - DNA, 103 bp, Heterodera glycines
atggcattgtggcctacttgtttggacttcatttccattgtccaactgaacagagacgaactccttcatcagctggagaaagcgcttcttatatttattttca

SEQ ID NO: 68890 - DNA, 1199 bp, Heterodera glycines
taattaaatccattccttcgggggaccgtgccgggtgccgcggggtaagcagtgctggttcgtttcatcacggcaccgaaccttttggctagtcagcaatcgttgcttaacttgccagatcggacgggtgcgcatgattccactgttccaagcaccccaccaaaagcaaaacgatataaccaaaatataaggaaaaattttttaaaaatttttttctccatcttcctttttgatactaaagcatcagagtgctaaaattaagttgtaaataaaatttggtgcgctttagagcactttctgaaaaaaatatttatgaaacaaaaaaatcgattttttcaagtgtccgtttggggtactcaaacatttatggggagcaaaaatccaacgcagaattaaagtacaggctatagggaagctattcccgaaggattcggtctccccataaatctgggcgcatcggttcggggggactgccccgaaaacaaaaaaatcgattttttcaagtgtccgtttggggtactcaaacaattatggggagcaaaaatccaacgcagaattaaagtacaggctatagggaagctattccggaaggattcggtctccccataaatctgggcgcatcggttcggggggactgccccgaaaacaaaaaaatcgattttttcaagtgtccgtttggggtactcaaacaattatggggagcaaaaatccaacgcagaattaaagtacaggctatagggaagctattcccgaaggattcggtctccccataaatctgggcgcatcggttcggggggactgccccgaaaacaagaatagatcgattttttccagtgtccgtttggggtactcaaacaattatggggagcaaaaatccaacgcagaattaaagtacaggctatagtgaagctattccggaaggattcggtctccccataaatctgggcgcatcggttcagggggactgccccgaaaacccaaaaaaaaattttttggataacaattatttagatgaactgactatataatatttaaaataggttatttctcttcctttcagtatccctgcagaagttggtgcgcttctgatcagtttctgaaaaaaaagttaagcctaaacttgttggcctgtttaaaaaggaattacaaatttttaataagtgtattcatctccctttttgatagaaaaagcatcatag

SEQ ID NO: 68891 - DNA, 809 bp, Heterodera glycines
atggtcgagtcggtcagcagcgagacgaacattgtcgaaatggaggccaaatcggacgccaaagtgagacggaaaatttaaaaaaaattgcgaaaattaacgaattcgttgaatttgcattcccataccgtacccctttgcgttagcgtacatctaccgtatctatctcacttttttacagactcccggcctgcccgactgggcgcacggcttcttctcggcgctggacaagaatttgctgattcagaccgccaatgtggccaactttttgtccgccacccaatttgtggagcacttggccaatttcatcgcgttgaaggtgggcacagcaccagcagcacaccatcgggaattcaaactcccgattggtccgtccatatatccgggcttatttgcctattttttggactttggtctcgagccttgaccattttgaataacgttttcgtgaaaattcactcgaacgcattatatttttttgagtctcattctcgagatttcgattctctaataccccctattgttatattatttttggcattttttgaacgaaaatataattttgcgttccatcatgcgcagtgccgtgagatggactcgtcggctgagatcatggagttcctcaatgtcggcaccgacgacttggaaggcgaggagttgcgcaaggagttgtacaaccactgatcgaccatccgtctcggtcaattgatcgggaggaaagagacccagctaattgatttattgtggcaaaatttctgatcaccccccaaaatcttgtgccctttggctttgtgtattgtatatcaaaa

SEQ ID NO: 68892 - DNA, 124 bp, Heterodera glycines
cggacatttgcggccaacgaaacgccaaattgtcattcctttttcaaattaattataccaaatatttttatttaacacattcaccaattattttgttcaatgacttataataattttcaactaa

SEQ ID NO: 68893 - DNA, 208 bp, Heterodera glycines
atgaatcgtaaaaaaattgaaaatcttcaaaaatgtcgtaagcgcaagtttttggataacaatgacagtgaaaacgaaacgctatctgctgatcaccgtgaacaaaatgagaacaacaacgaccgcgacgatgattttgaagaacacgccatcgtaaacttcgaacttggagaaacgaaaagaggaggtgtctgcatttggtttaatg

SEQ ID NO: 68894 - DNA, 393 bp, Heterodera glycines
atggacgatgattacgacaattatgtgccccaaatttcgaccatggactacagtctgttgcagccgggcggaagcggcggcggcggtgccacgggcggtggtggcactgccggcatgggtggtagcggtggacagccgcaacagcaacattttttgtacgatgccgggggcgggggttgcggcacagtgatgccacccggcgcggtgacagcatcgggcggcagagcgggcctccctcccggcagcggcggcgggcacccacaatttggggggcacttcggtgccgccgagtttggcggtgctatgccaggacaggttaatatgcctaattgtaaagctaaggatggcttatattagtcaattaaacgataatatcggtgcggaggcggggga

SEQ ID NO: 68895 - DNA, 543 bp, Heterodera glycines
atggcaccaccgccccatatgcaacaaatgatggcacaccgccagcagcagcaacagcagttaatgggtggcggtcagccgcagtttgacccgcgctacggtggtgggagtgcagcggttgtgccaaaaatgtccgccgctgcggcacaaatgatgtcacagcatcaacaatcaacggcggcttctggcacaaaagcggggaaaagcggtggcagcaaaaagggtggcaaaaaagcgtctgccgccgccgctgcagcggcggcagccgcagcggcagaagcagcaggcggtggtgccgtaacagtgatggaccatggaggtaatcaagcgccatgcgccgcggtaggaaagggaaaagccgtgatttgccggcttccaagcgcgtcgttttgtctcatgcgtcatttcgtccaccaagccaaatcaagttaattagtccggcaaatttcccaattttttccgctttaaaaagaaaatcaatgtatttaatcaaaaaaaaatttttgggaaagacaaaaattgaaataacaaacattgagatca

SEQ ID NO: 68896 - DNA, 696 bp, Heterodera glycines
atgctcattgtttctttattttttgttttctgtcaaattttgctgctgttgacagtaaaaggcgatggaaattacagtcgacaaagcgattacggtagtgccggtgtttccgacggttctccgccgcccatttcttcgggtacaaatctgtacaataagcaaaaactgatccaaaataattgaattgtattaaataatctcgttacattaaaacttacaaaaaaataaaaataaaaattttatttaggggctgaaaaaacggtagacgaatttctgtccaaattcgaagcgttgtccgcccgaactgattccgatgatgtcggcgttctcatggcacaactttcccaaaatatttcctccttttttgaattggctctccccgtcggttcactcatcgcgggggcccttcaaattagcgacaaagtaattcataattatcattcaacggaatatacggtagttcggcgtaatgcatactgtaattgattagaaaagcaattaattaataattgtgccaaaaatattttgctttgttagcccgaatctgaacaatacaaagcgatggagaaactgcacgataaatttgatgcaaaacttaaagaattggacacgaaaattgtgagatcttggcaaaagattgacgtgagcacgcgaatattcaacagttacgaagatgtaattagctaattatagtaa

SEQ ID NO: 68897 - DNA, 840 bp, Heterodera glycines
atgatttccaaatgcaacggagtttgtcggctttctattgggtgagtgcagtaaattcacagacacacattccatttaattgcaaattcatttaaattttccagttttcgatcgctaacgagcgctcagcgcgagaaacacactttgccggaccttccgtaaactcccaaactttcagttgtttattttacacttccaatttcatttagctacgattacaatgcacttgaacctgcaatttctgctcagattatgcaacttcaccaccagaaacaccatgccacttatgtgaacgttttgaatactgccgaggaaaagactcaggaagctctttcaaagggtaacacttagtaaattggaagcaaaccaagaaacagctgtataaatttgtctctgtttttaagcatagttccatcgtttcgttagcgctttatatttccctcccgacttcatttgtcttcccatttctaggtgactttcgcaccgcaattcaactgcagccaatgctcaaattcaacgggggcggccacatcaatcacagcatcttttggacagtgttggcaaaagatggcggcgagcccagcggcgatcttttgaagaccattgaacgcgacttcggttcggtgcagaaaatgcaggagaaagttagcacgaaagctgtcggagtgcaaggctccggttggagttggcttggctacaacaaagagctgaagcgattgcaggtggccgcctgcatgagccaagatccgctggaggagaccactggtgagcattcacatacgaacattttaggttaattatatttaaacctggtaaggctatacttattcttccggtcca

SEQ ID NO: 68898 - DNA, 207 bp, Heterodera glycines
atggtcactcaatttttgcgtaccatcccacaatttccgcctgcattggacaaaaatggcactgttttgcttggcactgttggcattgatcggatgccgtcaccgtccccacatgcggcaaatgcaccggcaacaaatccgctcaaatgggtgccggccgccgaacgggcggcgcgcgaaggcgaacttcgccgaagcaaacgaaaa

SEQ ID NO: 68899 - DNA, 398 bp, Heterodera glycines
atgtttgtaaaagaacggtttgtgccattgtccaaatttgttcaacaatctccggtcatttctcggcagtttttgggcgaattttgcacaaatcaacacggaagtgccattgccaaattgaatggcttcgacaaaatcattgcctttctttggcacggattcctcgaggagccgaccgacgagttcctttttttggggttgaaatacgaaaaggatcaaccgactgaccttttgggaaaggcacggttggtagaaaagcttgacgaagggcggacaagggacaattcggagggtggcggacacgagaaagcccaaagagccgagggaccacggaatgccgaagaacagcgactgattctctccatcctttggcatttaaagcatcaaaaaggccaaca

SEQ ID NO: 68900 - DNA, 1236 bp, Heterodera glycines
atgaaatgtagagaccggaccgggccgggcccggtaccggtttttaccgggcccggaaaccggaaccggtgatttttggaaaaatccggtttgaccggttttccggtttgaccggtttttgagagaccgggcccggaaaccggtcgttttttaaaatgcaacccggcccggaaaccggccttttggaccggttttgaccggttttataatcaagccaaaaatgtttctttttgttcatttttctttgaaaatgtctttttggcataatgtttttaatttttttttgtcaatgttcaagttgaattttttaattctaatgtttgcttctttataattattaaataatgtcttttttgtttagattttatgcaaatgagtcttatttggcaaattggcctatttaaaaaaacgtccaagactacagcaatttgtctcgagtgccaatcaaatgaaaagccgaaatatgaattcaagctcaccaaaggaacggtcaaaagcttgcacacccatcttcactgctttcacgaaaactccgaattctctgaaaagctgaatgctcttgaatcgaaagctgaaaaggagaaacaaaaacagaagccaatctcagactttcagtcgtcctgcggaccgactttttcggactgtaattcagccaaatttttttaaattatttaatttttgtttcagcacaactctcctcgtttgataagaaaattcttcattttttggtgacaaaaaacatttccttcggcgctgtggatcaccaaacttttcattctttatttccccatcaaaaagtgaaaagtgaaagtttctataggtgatgagttacattaaaagttatgagaaaattacatttttgaaattttcagaaaaactgccttgccaattgtttaccaacgtgtcagacataaaatcaaagatgaattaaaagaatcagcatttattacactgacaactgattgttggagcggaagcacttgcaaccttctgtggtacattattactttgtttattaatcatcatgggttttactgcagcctaaccgcgcactcaatttctaaatggaagtctatgtcacgtgttttggcaattacggaattttctgaatcacacacagggaaaaatatcgcgctcaaaattgaggatttattgctcaaatggggtattcctaaggaacgtgtgcatgcaattatctcggattcagcagccaatatgaaaagagtgataatctaa

SEQ ID NO: 68901 - DNA, 101 bp, Heterodera glycines
atggcagaagtgaaaaaggagcccatttttacggaagtgaagaaggagccaatttttgcagcggagacgccagcagccgagccgagaagggacagcgctta

SEQ ID NO: 68902 - DNA, 369 bp, Heterodera glycines
taagaaaaaaggtaacgaaaccagtggacaactgtcggcctcacctgtcaataatttgtttgaggcttgcgattttttgttttggcattttatcacaatttctagggcgttgagttgccgccgtttactgacaatcagatgaatgtttggtttaagtatttgtcctgcatcaattcgcggatcagagaagtattttttttagattattatatggaacgatgtccgtccttttatttttagattaccgaggatgcatgagattattttatttacctaaaagggaacggatctgaatttatttatcgtttcggtgcaatttaaagctgattcaatttgtaaaaaactatttgactattaaacaatattcga

SEQ ID NO: 68903 - DNA, 1041 bp, Heterodera glycines
atgccaaacactgtctccgtacaatcccctgctaccatttgcggcgatattcatggacaattttacgacctaatgaaattgtttcaaattggaggtgacattctcgaaaccaattatgtgtttctcggtgactacgttgaccggggctattataggcgagtcaatttgaaaatcaaattttattggtcgtccaatgaatgtgcagaatggcaatggggcacacgcaatcacaaattttgcgtatggttccttccacaaattgagaatttgggcctggtttcttaatgagaagctcggccttgttttcattattaatttatccacgtaaaaccaccgaaattaatacacaaaaaaaccttttcatatgataaaatgtttagtttggaaacgatctcttacctaatgctgctgctgctaaaatacccggacagaataacacttctccgcgggaatcatgaaactcgtcgaggtaaccttacgactgggaccttgtctttgagtttggccctaaaactaagttggctgtgaaatttgggtttttcaaaaatgaccaaatttagcggttttgagcaaatatttcaagaaaataaggatttagggtcggtggttccgatagacgccgcccgggataaattgaaaatttcagtgctatttattcatagaattatacaaaaattgctagtttttggctcaaaatcgctaaattggtcgcactctctttgtttattacattgctttttttatttgtagtcttttctttatgttaattgtactataataaaattcatttgcttcaatttcctttttcattaagtctcacatcagtacggcttttacgatgagtgccaacaaaagtacggaaattctgtggtttggtcctggtgttgccgcgtcttcgacgtgctgcccattgccgctgtcgtggacaatcaaattttctgtgtgcacggaggattgagtcctgaacttccgacacttgattcaataatgtgccttcagcgcaacgtggaagtgccggcaaatgggcccctttgcgacttg

SEQ ID NO: 68904 - DNA, 346 bp, Heterodera glycines
aaaatctataaaaaatttaaaaatgagaattcatgcgagattttctggaaataagcttaatagggcctagttaagctgtaaaaaaaatttggggcgatttgaaagagaatagaaagaaccaggttcgatgaagttttggtaagccaaaaaaaatccaaacatttaaaaatctataaaaaatttaaaaatgagaattcatgcgagattttctggaaataagcttaatagggcctagttaagctgtaaaaaaaatttggggcgatttgaaagagaatagaaagaaccaggttcgatgaagttttggtaagccaaaaaaaatccaaacatttaaaaatctattaaaaaa

SEQ ID NO: 68905 - DNA, 364 bp, Heterodera glycines
atgtcggagtttgaaagtgaatgcagtggcactgccaaactgaaccagttgggcccggtcgaaatcaatgccgacactctgtacactacgctggttgtccatgctgttgaacaccacgatggtggtgaccaagaaatgccatcaaaaaacaaaaacaatgccaacaccgacggcaccaccattgatggagggggacaacgacgacaaattgttgatgaagaggaggagttgaaggaggaaccgatggacgtgcgacggggccaaacgcaaacaatggaagcagacgaagaaggaggacaatgttgcaacgaggctgaaaagagcggcggcaccgcttcatcccttgacaaaacgtcggatggtg

SEQ ID NO: 68906 - DNA, 442 bp, Heterodera glycines
atgcaaagaccgataatcgtaaatataattgctctcgctaatctcggtaccggaattaaactaaactctctgacgatcaccgaatgcgaatttaagtataaccctagaaaattcaatgccgcggttatcaaatgtataagccccatcaaagccacggcattattatgggaatccgggaaaatgatatgtctggggacgaaaagtctgatagactgtgaaaatgctattaaaaaatttatagaaataattaagtgctcggggtgtccgggggcttcttacaccggacacacgattgaaaatattgtttcgacctttaaattcggacatgaaattgaactgaacgaattcagaaaaaatcgtcgtgccttttatgaaccagaaatattttgcggtttaaatttcaagcggggtaaaagcatgacagcgttaattttctggaccg

SEQ ID NO: 68907 - DNA, 651 bp, Heterodera glycines
gaccatttccatcttttggccattggctgttgctccgtcgcacttttcagtgttctcgcattggcaatcggtgtgccgattttgtactcacaaatcgactcggaacgttcaaatattttggcaaaatcgcagaaattcaaggcatttttcgaaattccagcttaagctctcctccccccctaaggctgattccaacagagtttgggctgttctccattttccgactttcactgagtcgcgaaataagcgctcttcctcagccgaacgtggcggccaaagtgccttagactccgcttgcagctgttcaatgttgagttgcccacagggccctcctgggccaccgggattgccaggcccggacagtcctcctgggcaagccggaagtccgggcgagtcaggcgtggacggattggacattgtcgtggaatcggaattagacttgccgtgcactgtgtgtccaggaggaccacccgggcaaaggtttgttcatggtatagcatattttaaagaactttttcttaagaggccaccaaggcgagcgagggatgtcgggcattgcgggactccgaggggaggaaggaattgaggggagagagggctccccgggaccgagaggctctgttgggcctcggggcaatttgggcctaaagg

SEQ ID NO: 68908 - DNA, 444 bp, Heterodera glycines
atgacaacaaaggagggtatcaccttgtggtgcacccgagtggacaaaacgcaattcatccctttcgatgtcgtctatgatcttcctgggcattgcttcttccgtgtaaaaaataaagcgagagtgttcaatgtcccatacagtgatctatcctctgacacaatcagcaccactaccaccaccacaaaaacaacaacatcaacccaaggcacgcagactgaggagcaggagttgaagcgtaaggccaaggttgcgcttgacttggtggaagcaggactattggctgacgctatgcaggacggcgcgcggtggaagaaagcaaagactgcaattaatgtgcttggcaatcttttgttggctgagtcgttgagcaacaacaacaacaacaacaaagccgacaaaaaggatgaaccccctgtgaacggaccatcaacgcaaccaatt

SEQ ID NO: 68909 - DNA, 423 bp, Heterodera glycines
atggggcaagttaaaaaacctcaacaacatgtaaagattggtcaactaataaaagacaactccaattggctgtgtgccctggcgaggacgaaatcccagaaaaaatgtaagaagttgatactcaaagcaaacaccgaacaactacttgcactggtggaaatttgtttgaatcttgtagcttcacggttccaattgactacccgtcagacaaaaagattaatgccatatgtgcacactgttcgcaggatgagtagggcgagaagtgagcggggcgccaggcgtgctattgtacagaaaggagccggatttggtggactattcgctgcccttttgacgcctgttttgatcgaattagcaaaatctgttgtatccaaaaacgcataaataccgcgcagtattgtatgtttcatatgcattcatcca

SEQ ID NO: 68910 - DNA, 3070 bp, Heterodera glycines
ctccaccccgacctcccgctccaccacctcctcctccaccgcgtggaccaagacctcccgctccccctcgtccgccaccgcctgggagacaccctccgcgcggaccaagtcctccagctccaggtccctccccgccaacaagtcctccaccgcgccccgaacgtcctcccagacctagtagagcttctcggagaggtggtcgtctggagaaatggtggaaaagtcgatacaatatacagcgacggcagccggtggtgcgggaccttctagcagaagcagctgctgccccattgcccgaaagtgacgatgaagatgactatatgttggagagtggattcgcgctgccagcgccgtcacagtactatggcgatttgcctgtgctaccagacaatgcgaacgaaattgaggagatggacactgctcagcacaggattgccaccagaagaaaattacaaaaggatgaggcaaatgatgatgatttacgaaccaaaagatttttggtttatcaccgttcacctccacggctcccatctccgcctcgatcgaaagaaaaaactgaaccaagaccacctgcaccgcgtcctaccgccaagagagaaaaacaacaggcaaagctggattggaagaaaaccgaacaccctactccagcgcctcgggcgaaaagagagccagaacttaagctggacccgcggccatccacgtctaggcaagccgggtacttccctccctaaacgccgaaaatcaaaccaaaatatgagcaccaaccaacaaaaaggcccgtaccataccgtatcccggaaagagaaccaaaaattgaacgaactccacagcagcagcaacctcctcctcctactgctgtcgtcgaagaaatgccctatgttcctccgcctaggagggggaccaaacgcccccaccccgtaaatgatgagaatggtgaggtgcacataagaaaacgggtgaggcaaccgagtagggtaagggtacagtattcgccagagccaggtccatcgacatcagcacaagcttatgaacaacaacgacaacaacgtgaactgtttgccattccgtcaaatcagctgaccaagacacagagaattgagcgattatacatcaaatgtaaccattatgcggatcgtatgggcgttcggggaaatacaattaataccgcaaacggcaaaccgtttgcgcatagcaatttgcgaatgaccatcaagtatataatagaccggagagcgggcagccccaccattaaaccaccaggagcgaacctattggaagagcttaggcaggacccaattttgtattcatggacggccccaccaaagagaccatcgcagacccgaacggaacgggcaatcaagaaggaatttcgcccgaaaaaatggagctgatcaacaccactcttgacaaaatgtacaatgatccatcatccccagcggcattcgcaggtgttacagcgctgtggaaagaggcgcgaaagaagattaaacatttacggaaaaaggacgtacagcattattttttaaaaaacgccccgcttccgtaaagatgaatttgtgcgaatgagcagagataagggacaatttgagaagggatatttaccaaattatggagacgaaattctcgagattgatgaggtgttgaaagcggtgcgtccaattcgatacaaattgcgggatgaacatggtgagaaattcaagggcagcttctatgagcaggagttggcaagcgtgagaaaggacgcagagacaagctaccgtatcgagaaggtgtacaggaagaggaaaaaaacggacgggaccacagagatgcttgtgaaatttattggctatcccaatcgggagtgggttcatgagtcccaacttgtataaaagcgttcacatttttcaatatttatgcagataaacaatcatgtcaaacagtttctttgtgtttttgcctagtaatgtgagtgattaccctgacaatcagccgaataaattccgtgttcggctcccaaaacctttagattttaacggctcgtgggtgtgcggactgcacagtatcagttacccctactcatggtcaacattggcacattggatgagcaatggattgacattcacttcaccgaccgcagagcgaccgatgaggacagacagcgagtgatcagagtgccggtgcctaaggcatcgcatagtagggttgaacaactgagagaatttttgtctgtcactttgaggaatcatagcggtgcaaaactacaacctctccctcgtgaggtggaagagaatcggaatcgtactacaacaaagcctctcggctcgccaccgcctttgaaaatacagaaaagagatacggtgtttgacgcgaatagaaaacagattggccctcctccattgcataatgaaaatgatgacgatgaagaaattattgaggagtcaccacctcatcatgaagaagatgatgaagggccgattgaagagtcaccacctcatcatgaagaagaagatgatgaagggccaattgaggagtctccgccgcattacgatgaagagcaaaatgatacagtaacagctcctgtcacaccaaaagtgccggtacaagcgcctgtcacaagccctgcgaaaccaacaatagtaaaaacgccagttactccatctgtaacaacaccagcgcctcccacaactgcaaagccaccagtaaccgtcccttctccaaccacaaaaccgataacaccgaccctactcctaccacgaccacacctactccaaccacaaagtcaacaaccagccctccacctactacaaccgttcctccagcaatcacaaagccatcaaccagccctccacctaccacaaccgtccctccaccaatcacaaagccatcaaccggccctccatcaacagaaaagccaataacaacggtgcctgcaccgccaaagacaacaacaacaacaagtacgccagcaataagtgcagttcctagcccatctgttaagccgacgattccggtaccgccgtcgtgttggtactacggtagggtcggaggcgctgagcactgggcaacgcgtgctggagcgagtcgggaa

SEQ ID NO: 68911 - DNA, 182 bp, Heterodera glycines
aaaatctataaaaaatttaaaaatgagaattcatgcgagattttctggaaataagcttaatagggcctagttaagctgtaaaaaaaaatttgggggcgatttgaaagagaatagaaagaaccaggttcgatgaagttttggtaagccaaaaaaaatccaaacatttaaaaatctataaaaaa

SEQ ID NO: 68912 - DNA, 529 bp, Heterodera glycines
atggtagttgcatttgtaaaaggacagcaagaaattccattcagtgaatattcaaagcaaaaatatgaggcaaaccttggcattgtgtattttatgataaacaattggcactgtgacaaaatagatgagaaatttaaggaatatgaacggacagaatgccaaaaatatcgcaaatatttggatattttgtacgaatatttgtacagagagtacgtcggaattccaacagccaagccaaagtttgtatttcaaaaccaaattgaaattgacggtccaataatttatgcggtgaattgtctgaccaaaatttctcagttttatttaataaaatcggtgggacaaaaatatgaatataaattaaacaaaatgttctacttggttgacaattttgaaccaaaattgttgaatgagaagagatttaattataaatttaaattaaaagatgtatcaaaaatgccaattaatgaaatgattttgcaattagcaattgaaacagcgaatgaatggcaaacaaacgaaagtttaaacg

SEQ ID NO: 68913 - DNA, 945 bp, Heterodera glycines
ccctacccagccggctattggcatgaattgaccatgaaatttcatttctcccgtcgtgctggatggtaaaatgcaaaaataattggcacactttgccaatgaaaatgataaataaaataaattttgaaaacccacaatcaggtacattctgcaggcctacttacctacctacctcaccattttcatctgttcgttaaaatttatatgattttttccattagttttcacgcaaaaaaaaaaaaaaattcagcatggatttcttttgtgctcggtacacaggccattccggcccgaacaatgctcggtgttaattcacttttgggtgggaaatttattttatgtttcatcattttaatatttaatacatttctttcagcgatgaccttccaggttatattatcttaattaatggattcaaataaataaatgtattaattaattaaccatacaatttaatataattccatttgaatttttagtttggcaacataattcggtaggtcaaaaatgcagtgcagtcaaatggggcaggaaaattttgcttttaataagaaaattttcagaaatttgccaaaggtcagctatgttaaggcaatcgacatctggttgctttcctgcatgactttcgtgtttttttcgttgttggagcttgcttgggttggaaaactggaaaaaaattatgtaaattaaaaatttatataaatttttaggtgggctatttaagcagaaaggtttgttgttgatttaagcaaattaatttatatttatttttgattattattaaaggaagcggacagtcgcgaggctgcaaaagaggcccaagacgcagtggcggcggtggtccagcaggttacggtaccacctcctcgctacggtagcgtcgatgcgcaaagcgtcggggcctcctaccaacagctcaacatgcaacaacggttgatcaagtaa

SEQ ID NO: 68914 - DNA, 924 bp, Heterodera glycines
atggagagtgatgtgaccgatggtctgtgggataaaatggtgctgtgtctgcgcagcattgtggcgttgccgccgaatttggacaggcaaagtgtgagttgtggaaatttatatgacatttttatatttgtaaatttgttcaaatttgattataaaaataaagacaatttttccgatgccatttcgttttaattgcataatatttcattgaagttagcataaattaagcatacacctcaatttcggcactataatgcttattttttgatttttaaaatttcaaggttaaataattacggctttttaaacctccgtaattgctgaatacgggtttcccgtaaatgacgcctgactgctccccttaataatttaaaattcaaaatgattgaaaaatattaacgaaaatttaatgcaggtttatccgaactcttcgtcatcgattggcttggccctgatcgtcagcaatttccgatttgaggaccgtgataacagggatggcacaaacgtcgatgagcagaatttgcgttcaaaatcgattccaaccttttttaaatggttttctatttttgatctatgagatatatttacccaatttttaagaaaaataagggttatagtggaaaatttttgaaaatttgtttggatttgttaactgattttgcctaattcggagatgattttttgataacaattttccatttcataggggtgtatttttctgaaatttttcggatcggttcttaggggggtgtatttttcgtgtttatggcatattggttattaattttgttgagaattgctgaagatattgttacaatcttttcttgatgacagaaacagcactgaatagcactgatgggtcatatcggcgcttaaatcgaaaagacaacaaatgatgacttgccaatatgagtagctgatcta

SEQ ID NO: 68915 - DNA, 817 bp, Heterodera glycines
atgtcggaaatcggaattccgtgccatccctgttgtggatctcttggtagccaccaaacaatttttatttgttcgtctcatcgagactaattttgtattgcatatttcagttggagaagggcagatccaaatgagccgatagttggcacggtgaacaaccgaaaaacgagtggatgttgttgatgaaacttttgccatggagttttgggtcacttgatcactaatccggcaccatttcgaccaattttccgcactttctactctaacccaatgaaatttggatttattttttcttccaattcttgtccgggattcggaattggtcgaaacggatgccggtgatttaggatcactgtgatcactaatatggcaccgtgaatctgcagaattgtgacggaaaaacggcattgatggccgcgtgttggaaagaagcttttacagtactcaaaaatgcaacgttttgtctctaaaatttcaggacagtctccgcttatgcaagctgccatgagcgacaatttggaggcgtgctgtctgctggtggaggagtgggtagcagaagtcaaccaaccaaacatcgaaggcgaattcacggcactgatttgtgctgccagccggggatatttggggcggaaatgccgaaatggtggacatatgttggaagaatttggaaaaacaaaatgatttgcccattttcggttttaataatttacttgaacggagagatcaagaagtgacaaaagcccgcgagactcccaaccatcgcattttgaaaattgcaaaagacagttccaaatattttctgaataatttatttaca

SEQ ID NO: 68916 - DNA, 432 bp, Heterodera glycines
atgggcgtcacattggcacgaaaagtgatccaaggtggatcggcacatattggaggtgatggtggtgacgagaaaagtgccagccctaacaagtgccatcttggcaatccaattcggcaccgtgtgcacacattggtcggcattgctggtgccaactacggcctctgtctgtgcacggcaaatttggctgtgctcagttcacccgcttgtaacaaggagaccggcttttggacacattctgacggatgtgccgccgccatgacttataaacatcatcaaatggaaagaagaagacttgaagagaagaggcattgtgatgatgggaaaagcgtgggaacagaatgccaaagcaaggaggaggaggaggagcaatattccaccgtgttgcgggagctgaacgcgccggacaaggccaaagatgccatttttgtg

SEQ ID NO: 68917 - DNA, 212 bp, Heterodera glycines
atgaacaagtggtctgcacttgtgtaagttttgtggggaggggtggggcttgaaccatggccaaatattaactctctgttcactttcagtctgttgatcgcgctgatcagcgcgctggacagcgctgttgttcgacaacagcgcgccgccgacgctgacgcatcgaaaccggaaccgaacaacgaaaagccaggcaaacttaaatgaattta

SEQ ID NO: 68918 - DNA, 236 bp, Heterodera glycines
  unsure (1)..(236): unsure at all n locations
atggaaaacactcacgcaaggaantgggaagaatttataggaaaaattaaacaaaagcttggcgtgactgaaagaacaattgaaaaatgggccaagaaaattaccaacatcaaaatatttcaaaagttatcttaatatttataacattttttaataattaaatttcagagcagaaggtttacacaattgtcgaaaaatggaactgaataagtaatattatcagctgaagaatgaaa

SEQ ID NO: 68919 - DNA, 556 bp, Heterodera glycines
atgtattggttacgcgggacgtagatcgaatggaaaacatttggtacgggtgcccagaattctgttgctaccgagtgcctctttaccatggaattaactttttcatgatgcgttaccaacttgagagcaacgaacgggcgcaacaagcggcacattggttttccatgaaccaaaaaaaaattgtcgaaattatcaggtcttgataatttgaaaaaaatgtattatttcttcagggaaaaccaaaaagcggatgagcttggcaccttggcaaaaatcatccaagacgaagttgggccaatcactgccatgccggcctaccacagcttcgtgtttttacgcgtaagcgccctctcggaaagaaacgccaatttaccagttggactttccaatacaatgtatatggggcagaccggatacagtatgttagaagtgtacatgcatcattggcttcccaaaaatgaagaacactttaaattgctattgttcctataaaatttttagggcatcttaaacaattgttgaaaagttcatattagcatttgattctggaaataaa

SEQ ID NO: 68920 - DNA, 2978 bp, Heterodera glycines
ggtgagcctggagcaccccctcttggccccccataccatcacatctcctcatccaatgccaacaacatcaacaatggcacggcaacttgctaccagccgtgccgtgatgggttgccgggtcgtgatggagtgccggtgctttcttttttccgatttcactatccttccatttctttgatttttaaagtcaaaaatttttaaataattttaaaatttcagggtgccaaaggcgagccgggagtgccaggcatggccccgtcaatgttggcacatgttggcggtggcaccaacacattgcttcaaggcccacctgggccgtctgggcccaaaggggaaaaggtgggtgggatggcgcttaaaattgaagatttctaatttaatttagcgaatttaatatttttgaaataaatttaattagggattaaaatggtattgttttcgaaaattctaaaaatattgattgtttaattaaattatttttgtaaaaaagcgaaaaaaaaaataataataaatttttctaaaacaaataggtaaatagaagcttttctttttttctttttttgtataattaattatcgattacatacatttttgaatctattaattaattgattgcgataattacggactgaaaagctttaatgaaaaatgtcctaaattttataaaaaataattctcgacacttacccttttccagggcgatttgggcccgcccggtctgccaggtcaaccgggcaagaaagggcgaaaggtacagtaattaaattattttttggcattccgtattctgtctgtctgactgtctttctcacacttttacacactgttttgtggtttgtcatgcacaaaaattgtggcgtatatctattgtagcaacaccaccaccaccataaacaacaccacaaaaaccagaaacaactgctggcgggagcagcaatacaagagcaagaattaccgtatagcaaagagcggcaggcacagtacggcgacgacatcaattatcagcgacaacaacatgcattggtgcaacaactgttgcccatgctgaaggaacaactgttgcgcaacctaagcagccaggctcaggtactgtattaaacaattttagggccactaccgtaatagccgaggaagatttactatattgatcttgcttggtctaaggggccacttccgtaattgcctaattgctttacggtatcaagctttaagggccattttttccaaaatcgggattgattgggcgggattcggtcgggatcccgaatcgggatccctcccgaccatttggccaatcccacgggatctcgcgggattgaagtccctataatttttagaacaatggtcaaaatttcggcatttggtcgtaaatatttaaaaagatttgagaattataatcaatataattcccagccataactataaagaaattatttaaataaataaatttgaaatttcccgtctctaattataaaacatatttcccagcatccgttcggcattcacactgtgcccggtccgcctggtccacgcggtctgcccgggctccaaggcctgcccggccatggcggtgaaaagggcgaacgcggtgacatcggcctacccgggctgcctggacaacccgtaaaaaaaaagaagaaaatttccaaaaatccattccatcgggtttggcctcctatctcgatttggaaccatatttagggttttctcagagattttttgctgccaatttcttgaaatccaatgaattgcctaaaaatccttttcaaatgaacaaaatgccaaggaatgtcttgacaaaaataattttaaaaataacagaatttttcatgggcgtcaaaaacctaaattttttataaaaatcaaccattataatgtttaaatctctaaaaaaaaatccaaggcgcctcctgccactccgaccgtcttcacaggaaatggtcaaccaaagatggtgattcctggcccgagggtaattaattatatattactcataaaatgcaatttttttttaatttttggcattttatttagggtccgcctggccttcccgggttgccaggcccacctgggccaccaggttggcattataactaaaaaccaagaataaaaaaattctacaggacctcttggaccacaaggaactcttgggttgccaggtagctgaaaaaatatgtaaaaataattttttacatattttctaggcctcccaggcccaatgggtctccgagggccgcctggcgtcgatgggagaagtgtaaatatatatttttccttaaattttctctttgcacgtgtgttttccaaaatttccattttttacttctttatattgtacgaaaaaattttcaaaaattttttttttaatttttagggtctgcccggcccaaagggtgacacaggcccacttggcccacccggcaccaaaggggacagagggccaaagggtgaccaggtaaatgatcaaaatgcatttaaaagataaaataaaaattgaaaatattttttttaatttgtataaatattgaagaatttaaaaaataatattaataataatataaaaataaggaaaattatatcagtaaagactaattttttacagatattttaaaaaggaaattaaaaataaatttgttactttttttttatttaaaataaataataaattttaatagaaaagtttgcgattcctttcataaattctttaattaaatatttttaattatttttaatcaaatataaaaagttatattttatttgaacccaattattttcaattacttttttatttattaatcaatttttaattttgtaaataatttttgcattttccagggcttgccaggcctcgatgtatgcccattttacttaaatccacaaaaaaaaaatgaaaattttttctttttcaggcgccctgtccacctgggcctgacggtcttccgttgccatattgcggtgaccctgctccattgcccgaa

SEQ ID NO: 68921 - DNA, 1147 bp, Heterodera glycines
atggtgcataaatttttattgtaaatagtcacaaaaaaacttttttttactcgcaatatctaccagttatcatacaaaaaggcaatagttaggctttgagatataaaacaatcgtctagaataattatctcaacaatttgtcgggaaagttgaatacatttcagttgcaataggcatattggctctatacataaatgtagagcaggtttaaaatagaggaaataccaaagattaaaaaattggtggttatgagcttagtctggttggtctggtcatagggtcgcagagagtggagatagatctttttgttgatacatttgaaaaagtagagctagggtagatctattcgaataacttgaaattcgttcatatgtcctgacagccaatcagctgatgataggtccaggtccatgccatttttcggcaacctggatttttcctggacctggattttcctggatttttgtccaggaaatccaggtccaggtctaatgtgaaaaaaatccaggtccaggcaaaaaacgaaaaacctggattttcctggacaaaattttagaatttgttattttaagtgaccgatgtttttttcaagttttcaaaaaatgataaataacttagaaacacattattattattaattagatatttttagaggtttataagcaattaattgattttttcaaacatttttttgattattaaaatgagtttcaaaaaatccaggtccaggtctggatccaggtcccgaggagcctggatttttcctggacctggattttcctggatttttgtccaggaaatccaggtccagatccaggtccaggctttttcaaaatgtcgatctctagttaattctctaacgaaggaaaagccacacacgatcgcatggacaaaacccaatttcgagaaagcatttcgtatcacaaaaaatggtatttatattatatcaccacgagaaaattcagcaaaatttgaaagaccactttcaaggacgttttcaaattcaagaacgtccttgaaattttttgatccgttttctcctttggctttaatagcccaatcaaatgtatatctattggacaaaagaaaacagaaaaaaattcatttaaggactcaattacctgtgtgccttggtcgcctttgggaa

SEQ ID NO: 68922 - DNA, 255 bp, Heterodera glycines
aaagacaaaaccttaaagcactagccgattgaaataaatggaaaaaaaagcaaagtcaaaacacaaaaccttaaagcactagccgattgaaataaatggacaaaaaagcaaagtcaaagacaaaaccttaaagcactagccgattgaaataaatggaaaaaaaagcaaagtcaaagacaaaaccttaaagcactagccgattgaaataaatggaaaaaaaagcaaagtcaaagacaaaataggaactttatacaa

SEQ ID NO: 68923 - DNA, 737 bp, Heterodera glycines
atgccacatacttttcgtacatttacaagtgcaaaaagcaatcattgggattttgacaatacgtgttgtcctgcccctctctctcttcaggtattcgccgcttcagcagctcagcgtcactcccgggaagcagtggccggcgactcttttgctctcggctgaccatgacgtgggtttgcccatgctttaatggcatggactcgggaatatttacgtgagattgttttcaccgggatttgagaccgagaaatcgaaccgagagcccaattccgagaagttctcgactcaaaagccgagagactctcataaccctcactattctgctgcttttttcaggatcttgttgatgtgtctcacacactcaaatatacggcacaactgtatcatttgttgttcaccaatgctgagagttggcagcgcaaccccgtggtggcaaagattttggtggaccaagggcacgcgttcaccggcacaccgaccgagaaaaaagtgaagcaccaattgcactaacaaaagccccattttgacattattatctttttcagatcaaagagaaggttgacatttacactttcatcgcgcgagcgcttgggctgaaatggaccgaatgattaagaacaaatccatctgtgtgatcactgatcagatcattatcgatgcaatatttttaggattttcttttcataaatttgcattccataaaattttgggacaactattcaaaagggaaaattcca

SEQ ID NO: 68924 - DNA, 1483 bp, Heterodera glycines
  unsure (1)..(1483): unsure at all n locations
cagattccagtgggttcatgtgccaancagattccttgtgcccggggggttgttcaagctgtatttttactgggacacttattggatactcaaaggcttttcagcattaaaattcattttaattggtttttttaggcctttacttttcaaatttggtcgaaaccgctcgcggaatgcttgagaatttcgcgcatttgctccgtttccgcgggttcatccccaactcgggcaacgttcagtaagcattggcacttttcgccctttttgatgcttttcgcttttccttccaaagactttcgcggcgaagtcagccgccgttgttcacgcaaatgatcgccgattattatgaggtgacgaagaacaaatcttttttggccgagtatttgccaatggcggagaatgaattggcttggtgggaggccaacagaacggtggaagtgcagcggaacggggaaaagcattcgcttttccgatacaatgtgaaaacggaagacaaacggacaaaagctgaccaaagtgcggcatttaaggccatcaccgattgcccacggcccgagaatttcctggaggattaccaattgggcatggagtccgacgacgcgactttcttctggtgagctaacaatgtgagaaggcatttgcaaaagcgcaaaaggtcttccacggcgagtgcgtgcgagtcgggcctcgacttcagctcgcgttggtacaaatggggcaccgaatcgaaagcaatgcgaaggactgccatcgccaccagcgaagtgctgcccgtcgacttgaacgtgttcatggcactgaactaccaaactttggccaaactgtacgacgaggaactgaaggagcacgggtagaaagaacggcacggcactttgggacaaagtgaacgatttaatcacagaaaggcacggaaaaacaaagagattgccgaagcaattacggcacacattgacagaacattttgggacgacgaagagggcgtttggttcgattttgacctgacggagaaaaaactgaggaaaaagttttatccgagcaatatttatccaatgttattgaagaacgacggaaaagggacgggggaaaagtgccaaaaagtggtggaatatttgaagaggagcggagcaattggattcaaaggtaaagcggcgggggatgagcagcgattggaccaattcatacgggacagacaaagggtcaaaggatcagaagagtcgtcaaaatgaataaattgaaataggcccctttaaattgaccctttgctcttgcgtaagtcatttgctctcttcccaaggcggagtgccatcgtcgttggaacggaactccaacgagcagtgggactttccgaacggatgggctccacaacaacatttggtggttctgagtctgctcaagtgccaaaatgtgtcgggcgaagctgccggaattgctcgaaaaattgccgaagcatttctcacaacgacttacaacggattattcactc

SEQ ID NO: 68925 - DNA, 622 bp, Heterodera glycines
atgaaattaaatggaaaattggaaggaaaaaagaaaaaatgccaaaaaataatagcaaaacatttgggcacaaatatcagaaacatttattattggaagaaacaattaaaaagtggaaaattggtgcaaaatcaaaaaaatgatgagcaaaaaagagaaattgttgaaaaatattttaaaataaaaattaaatttatgcaaaatagaaaacattcacgaaaagaatgggaagaatttagagcaaaaattaaacaaatgtttggaatttattatagaacaattgaaaaatgggccaagaaaattggcgtttttgaaaatgtttcaaaaagtgaattaaaaaaaataattaaaaaaaaattttttctatttacagagcgaaaaatattaacaattggtgaaaaaatggaattggcaacgcaatattatcaaatcaaaaaagaaaacccaaaaatcaaagaatacgaaattgcaaaaatatttaacattccaaaaaactcattacgcaaatacaaagccaaatttggcattaaacccaaaaacaaattgcactaatggaagaacattattatcaaaagaatttttagtggcaaatttcactgaaaagatgaaaaaaaaacctaaa

SEQ ID NO: 68926 - DNA, 633 bp, Heterodera glycines
atgccacggcactgtttctttttccagcttttgatctctcttctgccattgttctcaagtggtggcaatggttcaactttcttcttccacaaagtttggccacttttctttcggagaatggcatttggcaaaatgccaatccctcgtcaaaaatggcttgcatttttcaccgatgttcagaaagattcggatgttttcacgcgtgaccatgtcaaagtgaactgctcggagcccatctgtatcggacattaccgggagatttactgcgaaggggcgattatgtgggcagcttggtacttcggccttcagaacgaatgcccgggcaatcgaatgcgatttgaggcggaagtcattctgaaaaactttgacaggtggacaaaaacaaaacaaaaaacaatcgaaagagaaaagcaaatggaaaaagcaccgaacagaggaatttgccaaatgccaatccgttttaagcagctttgatcagcagggaaggctttaccgggaggattttcgccgcttttgcaaggaaaacttcgacgatcggccgtatttggaggaggcgcaagtgaaagattggacggccgacttggaatttcttgacagaatcacatcgccaaaaatgaagtcgaattgcattga

SEQ ID NO: 68927 - DNA, 144 bp, Heterodera glycines
attttatggaaaattttatgaactttttatcatccaacaaaattaaatcagtatttgtagtccaacattgggatggccttgttcaaaaatatcaacatttctgcggttttcggctttaatctcgaacgtcgataatcataaaca

SEQ ID NO: 68928 - DNA, 467 bp, Heterodera glycines
atgtgcatccgtacagcgatgcaaacgggcgctgttcgcgcttattgcttaaccttctgtttttgaaaaaatcggtggcttccatatatcctctaatatataaaatgaacaaaaattttagatgcctacagttgtcattccagacaatgattggttccgatatcaagaagcgatcaaaaaattcacaattaagtcggatgacaatcctgagttgacgagcgaacccgcaattcaattcattgagaaattactccaaggtgcaccgggcgatgaaaaaaagtaaagagacgagcgttatatttaaaatgaaaaaaattacatactaaaagttagttgggcgagaactggattcccatgggaaacccggaatccctttcctttttttgccggtactgttaaaaatttggtacctccttattttaaaatattcaatcccgaaaattcgatttattaatattttacgatca

SEQ ID NO: 68929 - DNA, 748 bp, Heterodera glycines
atgtgcgttttagacaagcagaaaattttggccggtgtctctgacggcgacggagccgtggcgcaacacgcgccggacattacgctgggggaaggggcgaagcctttgctggacgaggagggggaggaaagtgagtggaattggcattgggccaatcggatgtttggcattccgtcaataagcattccaattattacgataaattgaccaattcgtcgttcgttttgattaattcccccccccctttttttaattttcccttttttattgtttttcatttgttgtgctttcattgtgtcctttcgcttattggatagtaagtaccaaaaccctaaaaaaagaacactttcagacatcaaacttgacggttacaatggcgcaatccctccggggtcggcaggaagggccaaagacgacttggaagttcagccggccaagaaggaacggtcggtgcttcaagccaagctgactcggcttgccattcagattggttatgccggtgtgtgaggggggggggggggcgacggaccggcgaaagtgtcccatttgaggctcttttgttgctgcttgtacggtgcttattttgggaattcgcttttgcatccaacactacctaatcgaccaaaaaccattcgttgtcgccgactttcgctatttcgtcaactttctgatcatcggcgtcactgttctcgtcgtggcagtgccggagggattgccattggctgtcaccctttccttggcctattct

SEQ ID NO: 68930 - DNA, 701 bp, Heterodera glycines
atttggtgcgctttagagcactttctgaaaaaatatttatgaaataaaaaaatcgatttattcaagtgtccgtttggggtactcaaacaattatggggagcaaaaatccaacgcagaattaaagtacaggctatagggaagctattcccgaaggattcggtctccccataaatctgggcgcatcggttcggggggactgccccgaaaacaaaaaaatcgattttttcaagtgtccgtttggggtactcaaacaattatggggagcaaaaatccaacgcagaattaaagtacagactatagggaagctattccggaaggattcggtctccccataaatctgggcgcatcggttcggggggactgccccgaaaacaaaaaaatcgattttttcaagtgtccgtttggggtactcaaacaattatggggagcaaaaatccaacgctgaattaaagtacagactatagggaagctattcccgaagaattcggtctccccataaatctgggcgcatcggttcggggggactgccccgaaaacaaaaaaatcgattttttcaagtgtccgtttggggtactcaaacaattatggggagcaaaaatccaacgcagaattaaagtacagactatagggaagctattcccgaagaattcggtctccccataaatctgggcgcatcggttcggggggactgccccgaaaac

SEQ ID NO: 68931 - DNA, 130 bp, Heterodera glycines
ctcaaataacaaacactaatgtttatcaaagacatgtcacacataattgtgtcacactaaactcaaataacgaacactaatgtttatcaaagacatgacacacataattgtgtcgcactaaagtcataga

SEQ ID NO: 68932 - DNA, 689 bp, Heterodera glycines
atgccgtcggcagtgttggcgtcgcaacaatggtggtggcttacagcaatggcggcaaacccaaatggcaccagcaacagcagcgaattgtgccggcctaaaatgctgccacgtattaatgatgaattgggaccagcttttttgttttattgggaacagctcatttgtgatggttgggaacagctcatttgtgatggttggaaactgagtgtgatgaattgggtccagctttttgtggtgaattgggacctgtgggaccaaatttatgatgtgggttcagttttttatgatgaaatggtaacaatccattgtgataaattgtgaccagatttgtatgaatatttccgtagttttcatgttagccaggtccctaaccagaaataacttcataccgagtaaaacgggttagaatttttttaaatatctcatcgcaaaccaatatttatccaatgctgacttctgttttccaaaattgggcgagaacaaatgccaccaggaaaattatgaaaattttggttaatttgttaacagaattattggaaattaccgaaatatttaaccatttttctttaaaaaaaattctgcccgctccccgctcctggttacggttctgatagccagcccatttcgggtaattaaccatttttagttttgttcgaagcttttattataaccaagttttatttcaa

SEQ ID NO: 68933 - DNA, 148 bp, Heterodera glycines
atggtggagaaagagaccgacatcgctgccgctgtgccaaacaacgctgcaaacatcggtcatgttgaagctgtcgacccatcggcatcgaagagcgctaaggaggtgccgaacaacaccgagaagcatagtgccgaagatctaatgg

SEQ ID NO: 68934 - DNA, 891 bp, Heterodera glycines
atgaccctcaagtgccttccgcccgaacttttgttcgaacttatgccttttgtccctgctgaaaatgccgttccggatgcgatttcgtcatgtcgactgttccactgccttttgtttaaacgtgtcctcaattggaaaaaggtgagttttataaataaatcgcaaagaaaaagcagaattttttcacactcttatttttttactcgttcaattatttaattcgctggttcagatatccaaagttttagaatttgataacaaaagacttagaagttgtttttaaattgtatctaaaacgctaaaacaaggtaaaaagaatactgcgaattttttttcgcatatgaattatatatatcaatagattcctttcagtgaggggagtcgaatggtactatttttagggcgcggcgacaattctgaacagagttacagactcgggactgaagtgtccaaatcgctttaggacttgaccttaacaaaaccgattatatcaaaagcataataattatgattaaacataatttattatgactagggctgccaaaagtatgcaaatgcatatttttttcctggcttctccatgctctaaatagtacgaaaaacactttcttttttgtgtttgcgtataaaaatcgggacttttaaatttgcatattttgggcctttatgcatatttttgcttgttttacattttcatgcatattttgccattttttgtgcatattttccgattttttgcatattttgccatttttcgtaaaatattttccgttttgaatatcccttaagtaaattttggcagacaataggatgagctttagtgccgaaaatcttgagaaattattgattttcaattgcaaaaaaaaaccgataaaatttatgaggaataaa

SEQ ID NO: 68935 - DNA, 424 bp, Heterodera glycines
atgagcgaggaatacggcggctatgagattgaagaatattgttgcggaggggcgaagcagtacgcactgaagatgagaaacaatcagacgggggagatcgaatacgttatgaagattagagggattacgttcgatgtggacaacaggaaaacattgcactacgacacattcagggagatggttctgaactatgggaaaggggaggtggacccggcattcttcgtctataagaatgattttgggtgagtttttaaaaattatttgcttcattaataaatcaatatttaggccgacaagggattcgaaagtggtgacgagggagaagcataaaatgtacaggccggtctgccagaaggggatcatcgatgaggagcttaatgtgatgccatttggattttgttaattttgtatttttttttgttaa

SEQ ID NO: 68936 - DNA, 536 bp, Heterodera glycines
agaggataccgctggttttgaattgattcgaaacggaacgaccagcatcaaggtgcagtttaatgagcctataaaggacggcgggtatgagatgatagttctgggggaatttgattcgattctatctattaatgctaatcgtgtgctcagtagcgacggaagcatatgatgaattctcatgagattgaaatatttctatccaaacatccgacaacccgaaaatattttatcggggtttttgcttccgacaagatgccaaaattgaaggacaggcattttccgtactgttttgtggcgaatactgaccgggcgggcacaataggtgaacactgggtcgcttgttttgtaaattcgccgacagaaatagaatattttgattcattgggcgattatcccaatgaagatttaagttcatatcttaacctattcgaacgaattctctttaacgaacgtattgtccaacatcaattctcagatgcgtgtggtcaattttgcatttattttttaacacaacggtgctccggaatcctttattg

SEQ ID NO: 68937 - DNA, 377 bp, Heterodera glycines
ataatcagttttgcgatctcaataaaacttttctttatttgtcaacttcaattgagagaaaagacaaaagcaattggattccgattaccaaggacagtgaagctgaccaacacgtcggtgtcattcaaaattttgggcacagctttgtcaaaaccttaaaggtgtcaatttcaggtgtttagtcttatgattccggcatttactatgcgtttagggcatatatgatgaatgaattgggattttcagaagatgtcaaaaagggtctctgtgaagcgtcctgctattatgtcgacgatgtcgaccaggatgattatacaaacagtggctttaaaaacagagcgtcacgttttgctgatggtgcaaaatgtgaaacaatg

SEQ ID NO: 68938 - DNA, 665 bp, Heterodera glycines
atgatgcgcaacgcaatgcttctcccggttgtctttgcgatgcttttttacttcagcgcacttttgcaatttggatacggtacagttactgtaatccaattttcacatattgaaaaaactgaatcgaaaaaaatagtataaataatttataatgatattaggaaaaatttaacaactttaaaatacaattaaattcttccttcgcattttggcatttttacccgtccatattttggcacttttttttaaaatccaccttctaacgattgacatttaattcattaaaaaaatacactaaaagaaagaaaattcagaaatttttggtaaaatttcttaagcatttcattttaataaaaaaaattattttttattatttttttcactttacatttttagcattgaaatgccgtgccctttacacaacggaaaatgccacggcaaatgaattaattaagcaaataactaatccaggagattttaaatgcactcgaaatgagaagaactgcggtgtaacattctgttcagctggttgatgctgaaattatttttataaatttaaaaaacaatttaaaaggcaggcgcctaaatcaaaaatatttgagagttggaaatgccatgactttttcttttcaccctaaaaaatattaaatataattttctaaaaa

SEQ ID NO: 68939 - DNA, 68 bp, Heterodera glycines
tgtccgtttggggtactcaaacaattatggggagcaaaaatccacgcagaattaagtacaggctatag

SEQ ID NO: 68940 - DNA, 728 bp, Heterodera glycines
atgcatcttgggtttgagatggcgctggccaaaacgttgccacaaatggagaaaaagaaggaactgctcaaaatgttaatttacgtggagaatgcactcattttagtgaaagtaaattttaaaaattcatatttaatttaaaaaaaaaattatttcatggaatttaatcagtagttgcgtagaattatatttggaaataatccatattttttacttttcgagttgatttttcgctaaaaattagtaaacattttaggtttaatgtttttttcttctaaaatgatttttaataccatatttaactatttttaaacattttactttacatttagcgtaattgaagaccttttgaaaaagtatataccgctaatttcgaaaaatttatgtccatattgcgcgattttttggtccactttttatgtccatatagccgattttatatccttatttttatgccctatttatcatactaaaaagtgtagtaatttttttttttggcgactagccattgaatatgtcaatgagctgtggaagcttttgagggaaaaactcgagggtgggccggctttgacccgttgtcttggctttgtttctatgacattagccaaaaaccatcaaatggaaatattttttgatataattttgctcaaaagcaaccaaatttttaaatcttcatatcattcgatagccctaaatgttttctcttatcctgcaaaatatctaataaa

SEQ ID NO: 68941 - DNA, 317 bp, Heterodera glycines
atgaattttacccggtactcattgatttacccgcagctgcgggtaaggtgaccagttacccggtttttttagtatcattatgatgaaattaccttaccaaaagaatgattaacttttctgatcataactctttcaatatttatttaaattatatgaatttttatagacttatagaggaccattagagctatcgaattataccaagaatgtttaattatattacttataaggaaagttattaaacgctaaacatagtgaatttttgtgggtatttcatgttccaaaggtcgaatatttttttttaaaaggagaataaa

SEQ ID NO: 68942 - DNA, 498 bp, Heterodera glycines
atggagaaggcctgcaaaatttggagagattatatcgattttagtgcgctaggttcgatgaaactttttaaaatataagcctaaactttttggcctgtttaaaaaggaattaaaaatttttaaaaattttattcatctcccttttgatagaaaaagcatcagagagccttatttaacttttaattaacatttggtgcgtttcagagcagtttctgaaaaaatatttatgaattgattttgctaaaaaaataaaatagtgaagctttaaaaattaataaaaaattttaaattcagaattactggagttagcatcatagcagtgcttttccttgtctttttgatgctctcgcaaaatctggttcgcttctgaccagtttataaaaaaaaagttaagcctaaaatttttcgcatatttaaaaagcaattaaaaatttttagatttttattcatctccctttttgatagtgaaagcatctgagtgcctaaaataacttgtaa

SEQ ID NO: 68943 - DNA, 1161 bp, Heterodera glycines
atgtgttgtcattgcgacttcatccatataggtaggtattactgtgatttggaaccgaaaaaaatttcagaagatacacccctaaattgaaaaaagcttcccgaaattgattcacgaaaataattttttttatttaattgattttcaatttttttcaccttggcattaattttattcaaaaataaaattttaaggagtgtcgttggtgcaaaaaagcgttactttggcttcacttcttcgccaaccgagtaatacatacggggaatattatcaataatatttcgacatttcgcaatttcaaaggaatatttttaagacctattactttatttgaagaattaaaaaaatatataatatctatttttttacgaaaaacaaagttaattaattaattatgtgttgtcatcgcgacaatcacccgtatagatttttctgtaatttagctgtatcaaggacgacgaaaatattctcaacactttagaattttcattttaatttaaatcaaataaaagtaggaattttcttatcacttcgcgcttccgtcgatcaatttaaatttttttgtttgttttttaggtcagacggaggtggtcacccgcacaatgtcacaacagtgggaagtacagcatgatatgtatgattatgatcattaccctaaagacgatggaccaaaagaaaaaggctccaaaaactgctgcactataatgtaggaaatttggacaaatttcagacgctttttcgagtttggcgatcttagaaaattgtgtaatccgcttttttgaattgtcgaattgttgagtaaaatcttgttgttgctaaatatttgtcttacatatggtcaacaatttgggacacatttgcgaatcaaaattgaattttcaatgagtaacaaatttttgagtgacaaaaaattaattaaattttgcttttatgtttaccaggaatagaataacccaaaaaaaacactggacgtcgtgattcgaattggcaaagtatttttgaaaataggaaaaaattacgaaaatggagtccaacaaacccaaaatttcgcaagtcgaaggtcggaattgcgtttcatccctgatgcttactaggccaaaatttcaaacaaattcaaacagttgatttgtggtaaacagttttgatttgcattggaaaaaa

SEQ ID NO: 68944 - DNA, 56 bp, Heterodera glycines; identical to SEQ ID NO: 52733

SEQ ID NO: 68945 - DNA, 816 bp, Heterodera glycines
atggaagaaaaacaaaaatttattcaccaatttgacaaaataattggcaaaaaggagcaacaatcggtgggacgaaaggacaaattggaaattgctgaaagggtgggcattaatttgagaaccattgacaaatggaaaagcgaaatgggcttaaaaggtaaaatgggaaaaggaatttaaatcatattatttaaaattttaaatgaaaagttacgaaagaaagtcaaagaattgcccttgtaaaagaatactacagaataaaaaaggaagacccaaaagtgccgacaaaagaaattgccaaaagtttcaatgccagcaaagcgacattattttattggaaaaaacaatttgacaagaataattatgagtcatcatcatcaccggatggaccggaacaattaagctggtaaaaagcttctgcatttggattcccgttcactgcccgcctctctaattatccccaagtcgaaattccgtgccatccctggttcggacggactttctgccatggaaaaattttgtgttttttggcagctttcttccaaatttatttcacctatttttactccaatctttgggtattgtaaaatttagatttaaaaaagaccaactgacggcttttttcttacgtgacgaagacgaagtgctgaacaaaaaaaaggaatttgtctttttatatttgctcaataattttcaccttttcttcggtttcgcctatttgaactaacggcacttctcactttcaccgattcgtcccaaaattttgcttaaaagataagggagacacaattaattaattgaatttaaattatatca

SEQ ID NO: 68946 - DNA, 525 bp, Heterodera glycines
atgaagttagtgccgcggaaaatacttggattcaatggacttcctttgttgggattgtctcacggtttttttgatcttgatcccgaacatcattttaggccgggctcatgcccgaggcgccttaaaaaaagtttattgaaaaagtggattttttaatgtaaactattaatattcaataaattagtctaaatatgtctattaaataaatatgcaaactcgaaatcaaattctttgcttgagtatcaacctatgtttcagctggtcgctctttttgcggccaacggacgccatattttcattctttttcaatttaattacacaaaatttattgttttaatttgttcaccaatgattttctgaaaatgaattcttaattaaataaaattatttttcagcaaatttttcaatcctttccactggtgaatcatttcgtttctgtttattgaaagcatttgatgaaaattaatgtatgacaatgctttttttgatttatcgcttcgaatcgtcccattttatattcattta

SEQ ID NO: 68947 - DNA, 2275 bp, Heterodera glycines
  unsure (1)..(2275): unsure at all n locations
atgaacgcaaacaacaaattgaatatccgtagcagcagccttccagcggtgcgtctgctggttggcgttttgctgggctttttcatggcattggccatttctccatccaacggttttccacgcgctgccgcacaccaaacgaaggcatttgccgaacaaacggttaagatttttttttttgctgtttccacaagaaaaatgctaagtttttccttattactatggtcgcgatttttgttacgaaaaatctcgtaatagtaaactaaaatagtgaggaaaatgccattaactattttagtgatgaagagccaaaatagtgatttctagtgacctgtttaactcagttgggccggcacgtttgggccccagcatgtttttgcgctaaaacttttttctgtcgaccaaatccaacaatcttggtatcattcgaaaatgtaacatatttagaagctatttctaaagagngggttgcaccccccgaccccgccccgaccccgaaccccgacatttttggccatttttcggggttaaccccgacccgaaccccgacgcttccaaccccgaaccccgacccttaaccccgactcggggtcggggttaaatatacacccctaagaatggcatttttgtgagagaaagtcaagaaaatttaaacaagttttgaatttttgaaccattttgccaaatttttattaaataaagaaaatttgctttcttatgacatgtattgtggtgtattggttagtgcatgcatcacactgacattactgtctttcataagttcaataaccattgacgttctcatttttaatttatttttttgtgattaatactagagttcgggtacggaccggatccgtatacggatttttacggatccgtagtccgcattttttgggccaatacggatttttacggactacggattttccggatttttagtccgtaatccgtatgggtgcctagtccgtactcttggtccttatccgtattttctcaaaataccgatctctaattaatacattttttaaacaaaattatcaataaaaatagccattcttggcataattgttaacagattaaacccaaattttcaaaaaatttttactttcgttgaaatttaaaattcaattttcatgactaaataaatcatgaaaacaatatatttcaaaatattgacaaaatatcgaaacaattaaatttcaaaattcgcttggccgagtccaaaaattcgtaaatcttattaaaaaaattggctcaaaatcgaaaatattcagcactttttgggcaaaatctgttaacagcccatgcaaattttcaaaaattttcccggcggcgcctatcggcaccgccggacccctttctcatgaaaagtctttagaaaaagcgcgccgagaaaaaaagatggtttgaaaaagaaaaaagtaatcagaaatttttgatcattttttgaataagattcacttttttcaaattgccggatccgaaaccggtttccggattgggaaaaatttaaattttcacatgttaatatttgtaaaaaccggcaaaatttcatttattaatatagaaattcgatgcaccagaaatgtcgccgccaaaaagacataatgttgccgacaaaataaaaaattttaaaattttcaagatattaaagcatacaaaaatatttattataaaaaataaataaataaatataaacaaataaaactttattatggaaattataaaaaattttgactatatggcataaggtaaaaatttaaaaaccccggaacccccgaccccgaacttgctgaccccgacaaccccgaaccccgacttttctaaccccgacgttcgggggtgcaaccctaggaaaaatgtttgaaaacataattttgaaaggagagcttttgagggttttcaaaattccaaattcgatagtgccttaaaaaaataatttttcattcttctaaatctgaaaaacatttagtctagtggctataattattcgtgcattacagaccttcatttgtgagatttggtttttaagcattctaaactttttccaaaaatttttagagctataagactgtacttgttaatacaataattctaaatgagtcgaaatggatgtcagcaaaataagtttcctgggtgtatttttcaattttcttctaatatgtaagatatgtttttatgtgccaaactgtcaaaatcaaaaatagttcggtgaaaatactatttttgggcttatctcgccaagattaaatgacaaaaaattttgtaaaaa

SEQ ID NO: 68948 - DNA, 771 bp, Heterodera glycines
atgccaatgccatcgccgacgccggaccatcggcaacggcgtcctctgccatgggcaacaaattggtcaccgcttcgttggacgccaactgggcacacacttcgctggtggccgagacaaggtttgtttggctgctgcgcaggatgccgtacttttttgtaaagcattgggtgccatggaaagaaaaaaagtcaacggggcagggtttacatttttgccacgcaattttcaaaaaaattattcgattggcccatcagaaaatgcgtttttaattgcttcaaaatttcataagattttctctcaagactaacccccacacacgaaataaatctttttgaaaattaaaaaatcccattatttaaaaaatgattcaatttttcagaaaataaataaatacatatccatgggtgtttgttgcgtttcacaagttttttttgccattttagtgaatttcttgcttccgccgacaattcggcgttttggcgcttcatcgacgcgttgctggacgagcaacatcgctcgggcaatggcaccggcacaagtttgtcctgctcatcatttccaccattttctaggcgaattcaaatcgatttcttcatttttttgagctatatgtaccccttttaagatgattttttggctctaaatttgactcagggaacttgccataatttcatttttgcgtatttgtctcacaattacccaagccgaggcatgctcgtatgtgttcgccggaagccaaaaaagctatttttgtattggctaaattta

SEQ ID NO: 68949 - DNA, 423 bp, Heterodera glycines; identical to SEQ ID NO: 65209

SEQ ID NO: 68950 - DNA, 446 bp, Heterodera glycines
catggccgttcttagttcgtggagcgatttgtctggtttattccgataacgagcgagactctagcctactaaatagttggctcattgcttctgtgggcacacttcttagagggatttcggtgttcagccgcacgaaattgagcaatacagggtctgtgatgcccttagatgtccggggctgcacgcgcgctacactggcaaaatcagcgtgcttgtccttccccgaaaggggttggtaaaccggtgaaaatttgccgtgattgggatcggacattgcaattattgtccgtgaacgaggaattccttgtaggggcgagtcatcaactcgctctgaatacgtccctgccctttgtacacaccgcccgtcgctgcccgggactgagccatttcgagaaattcggggacggttagtgttccggcttcggtcggtatgcagactggaaccg

SEQ ID NO: 68951 - DNA, 808 bp, Heterodera glycines
taattaaatccattccttcgggggaccgtgccgggtgccgcggggtaagcagtgctggttcgtttcatcacggcaccgaaccttttggctagtcagcaatcgttgcttaacttgccagatcggacgggtgcgcatgattccactgttccaagcaccccaccaaaagcaaaacgatataaccaaaatataaggaaaaattttttctccatcttcctttttgatactaaagcatcagaatgctaaaattaagttgtaaataaaattttggtgcactttagagcactttctgaaaaaaatatttatgaaacaaaaaaatcgattttttcaagtgtccgtttggggtactcaaacatttatggggagcaaaaatccaacgcagaattaaagtacaggctatagggaagctattcccgagggattcggtctccccataaatctgggcgcatcggttcggggggactgccccgaaaacaaaaataaatcgattttttcaagtgtccgtttggggtactcaaacaattatggggagcaaaaatccaacgcagaattaaagtacaggctatagggaagctattccggaaggattcgatctccccataaatctgggcgcatcggttcggggggactgccccgaaaacaaaaaaatcgattttttcaagtgtccgtttggggtactcaaacaattatggggagcaaaactccaacgcagaattaaagtacagactatagggaagctattcccgaaggattcggtctccccataaatctgggcgcatcggttcagggggactgccccgaaaacaaaaaa

SEQ ID NO: 68952 - DNA, 691 bp, Heterodera glycines
caacatttacgtcaccggtgttgtgggcgcggaaaacattgcgaacgcggaggcggctggccgacgcaaaaggcgttggagccaaccgcttgacgaaacaggcgtaggcaagtcattttggccgaaattttaattcatatttatttaaataaattaaattaattttttattttaaattttttaaataaaaatattttttttttttttttgcagtttttgttgcaacatctgacggtcgctatcggaaaaaagtaaattttgtataatggtccgatacataggaaagcatgatggaataaaactaatcttccaaccacaaaaataaataaaacatttttttattttaaaaaatcaaaaatttaatgaggcgttaaagtgagatttttggaaaatggtaatttttggaaataaaaaaaataaaacgttgacactgtcataaatgaaaaatggatctgatcatttgatttatctcttaatgaactgactttttaaaatgttattttccgaacattaataaaaaattttttttttaatattttagattttgtaatatttttttcagatcgtgtttggacaacttcaaattccgactgcaattgtcacattgccaaaacttggccgaatttgttacagcgatgccgggctggaagcaaaaattgagtgtgccgacatggacggaaatcggcgacag

SEQ ID NO: 68953 - DNA, 600 bp, Heterodera glycines
atggctgcaaaacgcaatggaacctctcaacaaagcggaccgtcgactaaaaaatgggattttagatcaatcgggtaagtaatttttaataatatatttaagagacaattttattcaataatttttcagaaacaattttattgaagaaatggaaacttttaaattgatggattatcgttcgacgatttgcgaaaaatttggatttacgaagaacattgcggaatttacgatcaacccggatgtgggacgccccgatgaagcgatgagggacgcaatcgacacaatgattaaggcggcttttaagactacggaagaaaggatgaagcggaaagtgaggatgtttggagtggtaattacgggcgccgggcttgctttcccggtgtgggtgccgtatcgggcgttcccccagaataatgcggatgttattatgcaggagattaataagttggggcagagcggggacggagatgaaaataagaaaatgctgttgctctcggagcaaattacgatgaaaataacgtgtgtgacaatgcccggtggagaggggccgaggaatgttcataaatttgattttggattcaaggagcatcagcggataag

SEQ ID NO: 68954 - DNA, 345 bp, Heterodera glycines
  unsure (1)..(345): unsure at all n locations
atgtatatgaatctgccccctaaactgaaagggtaccgaaattgttgatggaacgatgcagaaatgaagaagaagatccgccgatgttcattcattatttataaaagatattattgaccataattgtgtgtgtgcctttgctccctgggcttttaaattttattagttaaccataatgggctgagtaaaattttcaattttggaccaatggaatttgtggggattttcgaaaaagcaaagctcttctcttaatgggtcaattttatagatacccgnaatttttattttttcagacattctagaatttaacgaccaattattattaaatatttttgatcgaataaa

SEQ ID NO: 68955 - DNA, 762 bp, Heterodera glycines
atgagcaatcaatccgcggctcaaatcgctgacgaatatgagaggtgggttttttggtgaaggtcctaatttagtgctctgttttacattttttttctgttttaatcaattttactgcatttaggggtgacggtgaagttatcaagagcaaccagggcaagcgcaccaagtccgaacaggtcggatcgtttgttgtataataaggctgattgtgcgtcattggcttttctaaaaaaggaccattttgatcagggacggtctcagtgggacgtatcccccccccaaccactcgaaatttcaaatagttttttctataaattttcaacacaatatagttttgcaaaaaaatgcgttaatggaaattacatttagtaaagaaaattaaattgaattctaccacaaacaatttgaactgctgagttcaactcttgatgccaaaatgaggctcgctttaccatccattgttaattgtgcaggcattttaaagactgcccaccaccactcctcattttgtggcaggttgagcacaaacatggacatccggagggcgacacgcgtcgcatcgtggacaacgcggtgaagggggaggagaagcgcaaggagaaggagcgcaccacgtcacagtcgtcgaagtgaacgaacgaatggaggcggcactttgccattttgggggaagagaaattgcggtactctttcagtttaatatgcctataaatgtattcattttacattgtgtctggtttttgcagaagagtaaataaa

SEQ ID NO: 68956 - DNA, 1395 bp, Heterodera glycines
atgcgttcgatgaattcgacgggtgcacagccatcgcaagacacgccaaacgatcgcgagttggaacgtcttcgcgaattcactcaacaattgcccgaccgtcgtgattttgaaaaagctgcaaaccctccaattcttccgccgcatttgcttcaggtaattaattgtgcaacttaaacggaattttgaaacttttataattgcctcattataatctcaaaaaattgttcaagaaacatttacatttgtgtccatcattgtatactagcattacttttgtttgttaaggtttttcttttaatttaacaatatttcaaaaatcttatgccttttatacatatttcgcgctttttaagagttttttgtttttattttatttcattaaccggaaatcaatgaaggattcgccatttcaggttattctgaataaagatactcctgtgcaatgtgacccgaatgtgctgcctgaaccgaaccatgttatgcttaatcatctttatgcgttatccattaaggacggagtcatggtaaaactttcattccatttattatctttgtttcaaaaaagctgttggggaaaaaatttagggaaccatttaaaaaatggcccatcaaattatgattattttaacaaaaccttataagggcggcaataatgctatttatgataggcctactcattttttcagaaaatttttcttaccctattggacttttgaaaattacggatgcaccccaaaatttcgccaggacataattcgccgaagaaatttttttaaaaaaatttagaaattttcaagaaaaaaatcatagaatattttttatggaaattcaaggaaaattattgaaaatttttttaacgatttttggaaaaattttcgaaaaaacttactaatttattataaacttcaaaaaaatcgctgaaaattttttaaattttttttcttgaaattttcttataaaaaattctaagatttttttcttaaaaaatttctaacaataagtttaattatttttgcggcgtaatttcggcggcaaaattatgtcccatccccaaaattaccccaaaacctttttggctttttcagaacaccataaaggagatatctgatcaagtgggtgtaaaagattttcgatcaacataaaagttatctggcgggagtcttgtgactcccggtcccggtgttttgtccaagaaacagggacctgcagtccggcaaaatcccggcgtggccctgatccgttccgggttctaatcatcgactgtatgcttctttgcattttataggcgccaaaatgactcaacttaattttacttaaactttacaggttttgagtgcgactcatcgccatcgcaagaaatatgtgaccactttgctatacaagccaatttaa

SEQ ID NO: 68957 - DNA, 2834 bp, Heterodera glycines
  unsure (1)..(2834): unsure at all n locations
gcttcccaaagtgccaatacattccgttcgaatgcgccgttggttacaggagtttcacctcatcagggtgggcattggtcgttttactattacttccttttccaaatttcaaatcaaattaattctactgtgtaattgtcaaatgcataggtccacctggcactttgatcacaattcgtggcgaacgatttggagaggatgccaatgacctcgtgcgctcattgcacttttaatgtgaaaatggttttatggagtaggttgccctggtcatctgcggcaccgattgtcttgcgactgccaaatggaaatcctcctccaaaattgtggctcgtttgggcgggcaggcaaagcgtgggcccggggacattgtgatggtcactcgttcgggaggacgtggccaatcggcggttcaattccgagtgttcatcgagcagattgggccgttgcaagagtcagctgtgtgggtggacgaggcaaagacagtgccgggccgaaatttaattcggaatgtgcaggagggcggagatccggaagacgcacttgggctgggcatcgaccagtccgtttcttttttgtcaccaaaaagcgcctcattttcagacaaacgaagacggacatcgccagtctgatcaaactttttcctgatggaacgggcagccgaaagatggaaaatttcagccccgagtggtatttgctggagaattacaaattggcaaggtccctccctctcctccctttttttcgtttttttttttgctttttgcatttctttccatcgcttttatttgttgccatttctgttcagtgtttccgatttgaagcgggggatggccaatttggagaagcaaatagcgcatgaggaagaatgttcgaaaaatgtgcacaaggccaacctcttccttttgatcagttgtgtggacgcactcacttcactccactcaaaaattcagtcgaaatcgaccagcgaagattggccaatcagtgcgaaattggcagaaaaagtgatctgaaataaatataaaaatcatctttttaccgtttgaattctctctcccccttttttccttttaatgtcacttttatacaaaaaaatctgttcttttttatttaaattgaaggtcgaaaaggctgcaaaaacggcggaccgtctcttccgcgatgttttgactcggaaagaccacgccgactccacgcgaaatgccctgtcaatgctgacccgattccgtttcattttctttcttgctgagtccattgaaacgaacatggccaaagtgagcgacatccaatgaatgtaaaactttattatttcagggagaattttcaacaattttgaacgattacgcacgggccaaagcactttttaaagacaccgaagtgaatttgtttaaggaaggtgagcaaaataattgggaagacaaatgtatgcctaattaagttatggcggtgctcgacgaaaacattggaaaacttcgcgaatgcattcgcagcaaattgatggacatttccactcccttcgaagagcagaacagactgatcaaattcctgaaaatactcgaccccgagtcggaccccgcctggtacgcactgaaaacgcactaatcgaaggcattccatttctgttcagggattgcatgatgtcttacaacgggtggttggagaacattttatgggagttgcaaatccattttcatgggaaatgtaaatgctggctttcatttggcttttcctttttatatttcaatgctttagcgatggaggcgcaccaacggacttccatggcttatgagacggtcgatgtgtctgatcttttatcggaggaaaacaaatcgcctcaagactttcgccatgcttttgttattgaccttttgggacttcttacagaaaaattgcaaacattttggaaaatttctcaaaattttgctgtgactggtcccaccacttccgctgctgtttctgcgcttagtcagacagaggctgaccaattccaagaacggcaaatggacatcgatgtgagttgatcggactttgtgatcacttttggaccgaccccttcagcaaatgttgaccaacaccatcaacgttggctcgtggctgttgctaaatgcgttggtgcctgacgcactgcccgagtcggtgaacaaacaatacaaagaccgattcgtgcaatggcctcgtctcagtccaaatgcncaatgggatgtcatgttcccctccataaaaactcttcggtacgttcaattggtcaataaatccctgcttttatttcatttgaatttnaagggcctcaataaaaactttgactgaatgtctgagccgttctcaccttcagccgttagtcgaactttgtacaacggtccgtctcaaatgtttgggaatgttagtggagaggggcaaagaaggtgggcggtaaaagccaagcaaatattatgcatttccaacgtaagccatccgtttgtttcattgtcagccgttttgctgcttggtgcccaagagaattggcgcgtcgatttaatggccgacccgccgcgtacggcgctgcccgaccttttcgagacggaagtcaacgaattggtggctgatgtgaaagtcatcctttcttccaacaatttccctggggaaattgacctttttctaaaggagcgttggcgacaaatggtgcctttttggcattgtttttcgtcttccatttgtgaattgtttttagatcatcgacctttttgccgtccttttgctcggtgtccgcgactgttacgaccatttgctcaaattgcgtcgggagaacaaacggcccaacactttgttggacaatgtgtcattggaagtgttgatgagga

SEQ ID NO: 68958 - DNA, 652 bp, Heterodera glycines
atgcacgcgtttcgcgctcgagctatttatcatcgggcttgtcaatccaaagcgaaacaacaaagatgctgttttgaacgaataaagggcataggttattttgaagaagtgtcaaagaaacatgcagcaataagcctgcaaaatctaataagtggaaaatacatgagtatagaatttattttcagaaagtgtcaacatacttttggaaaaatatatttgcaatttatcaacaattttgagaagtgagttagaaatgataaacttcacgattcaaaccaattttcgttgctctaattaaccgcgataaaaacattcgaatcaattaaatagcttctgagataataaggtttatcataaaatttcatttaaaaataaaccctcaattattggtatgaacgatactttccaaacatgcacgcgttttgcgctcgagctatttatcatcgggcttgtcaatccaaagcgaaacaacaaagatgctgttttgaacgaataaagggcataggttattttgaagaagtgtcaaagaacatgcagcaataagcctgcaaaatctaataagtggaaaatacatgagtatagaatttattttcagaaagtgtccacatacttttggaaaaatatatttgcaatttatcaacaattttgagaa

SEQ ID NO: 68959 - DNA, 50 bp, Heterodera glycines
atggcgattgtgcccggccctccgtctcgatacgcaagcgcttttgtgag

SEQ ID NO: 68960 - DNA, 879 bp, Heterodera glycines
ttcaatcaatgggactcaacccaccaacattccaatcactgggactcaaccctccagcattccaatcactgggactcaatccaccaacattctaatcattgggactcaatccaccaacattccattcaacgggactcaacccaccagcattccaatcactgggactcaatccaccaacattccaatcactggcactcaattctcctacatttcaatcactgggactcaacccaccaacattccaatcattgggactcaatccaccaacattccaatcaacgggactcaacccaccaacattccaatcaacgggactaaacccaccaacattccaatcaacgggactcaacccaccaacattccaatcattgggactcaatccaccagcattccaatcactggcactcaattctcctacatttcaatcactgggactcaatccaccaacattccaatcactggcactcaattctcctacatttcaatcactgggactcaacccaccaacattccaatcattgggactcaatccaccaacattccaatcaacgggactcaacccaccaacatttcactgggactcaatccaccaacattccaatcactgggactcaatccaccaacattccaatcaacgggactaaacccaccaacattccaatcattgggactcaatccaccagcattccaatcactggcactcaattctcctacattccaatcattgggactcaatccaccaacattccattcaacagtgactccacccaccaccaatccattcactgctacacaattctccgacaatccaatcactgcgactcaacccaccaacattccttatcacatggactcaacaccaccaccattccaatcaca

SEQ ID NO: 68961 - DNA, 935 bp, Heterodera glycines
atggaatgttggtggattgagtcccagtgattagaatggtggcggattgagtcaactgtgattggaatggtggtggtgttgagtccatgtgataaggaatgttggtgggttgagtcgcagtgattggattgtcggagaattgtgtagcagtgaatggattggtggtgggtggagtcactgttgaatggaatgttggtggattgagtcccaatgattggaatgtaggagaattgagtgccagtgattggaatgctggtggattgagtcccaatgattggaatgttggtgggtttagtcccgttgattggaatgttggtggattgagtcccagtgattggaatgttggtggattgagtcccagtgaaatgttggtgggttgagtcccgttgattggaatgttggtggattgagtcccaatgattggaatgttggtgggttgagtcccagtgattgaaatgtaggagaattgagtgccagtgattggaatgttggtggattgagtcccagtgattgaaatgtaggagaattgagtgccagtgattggaatgctggtggattgagtcccaatgattggaatgttggtgggttgagtcccgttgattggaatgttggtgggtttagtcccgttgattggaatgttggtgggttgagtcccgttgattggaatgttggtggattgagtcccaatgattggaatgttggtgggttgagtcccagtgattgaaatgtaggagaattgagtgccagtgattggaatgttggtggattgagtcccagtgattggaatgctggtgggttgagtcccgttgaatggaatgttggtggattgagtcccaatgattagaatgttggtggattgagtcccagtgattggaatgctggagggttgagtcccagtgattggaatgttggtgggttgagtcccattgattgaa

SEQ ID NO: 68962 - DNA, 85 bp, Heterodera glycines; identical to SEQ ID NO: 65905

SEQ ID NO: 68963 - DNA, 621 bp, Heterodera glycines
atggtaaaaatccggtaaagataattattctatttctttttgttttgctggaagaaaagtgccgaaaaagactgaaataccaaaaatgaagctctttgaaggacataaaaatgtaaaatactgtcctatgactcataaatttccttttccaatgaataaatttattaaaattgggtaatgaaatttagaaaatatattcaatttcaacattcagaatataaacaattttttgtcaatttaactttttgatttttttcacaaaattagaacatcagcagctgttggctaacccattttcagctgtgtttcaaggatatattctccatttttgctaaaattccattggtttgctctcactttgtttatttatcagtggcatttttgcactttggcaatcgaaagggcgcggcattgggtttgaatttgtcactgatcacacatattcttggcattttgtcctcagttttcgtctccgtccgtccatcggtcggtcggttcggctccttatcagtgcgcttatccattctgagcaatgttcacattcgcaatgtttattggcacccagcgctgctgttgcggagtccaacgccattgctgttgctgccgtttgacgctcttagg

SEQ ID NO: 68964 - DNA, 154 bp, Heterodera glycines; identical to SEQ ID NO: 62241

SEQ ID NO: 68965 - DNA, 129 bp, Heterodera glycines
tatggcacggaaagacttccggtttccgacatttttggggtcggaattccgacttccgaaatttttgatgaaaagtcggaaatttttaaaatttttatttcaaaaaactagtaagttttgtacaatttc

SEQ ID NO: 68966 - DNA, 577 bp, Heterodera glycines
atggaggaattattgcgggggatgaatatgtacaaaatcggatttacagaacccaaggggacggtaaacggtgtgccgccaattaaaagatgtcgaccggacattaaggaatgtgcgagagttgtgatggagaccattcggaacggggaggagagcgagccgttcagcgacgaattggcagccgcaatgaagcggctgtgggcggacccggcactgaacacggccacttactcacgccgactcgaattccatcttcacgactcggccaaacagtgggaccaggcttatttgttagccaagactgactaacccattgcccaattcagcttcttagacagtttggatcggatcagcaacccctcctacaggccgtcccagcaggacatccttctgactcggatcaaaacgacgggaatcgtcgaaattcaatttctaatcaaaggcgttccgttcaggtggaccttcggcagagaagcggacaaataatgggaattgagtaatttttagagtttttgacgtcggcggacagcgatcggagaggaaaaaatggattcactgttttgaggatgtcaattcg

SEQ ID NO: 68967 - DNA, 931 bp, Heterodera glycines
tgttcaaaatgatgttgacaccgaattggacagattgatcgagttgggtgttctcaaaaaagttgactacagcagatgggccgcaccaattgtggcagtgcgcaaagcaaatggaaaagtgcgcatatgtttcgactttagcaccggactcaacgcggcactcgaaccacatcatcatccgctcccacggcctgagaaactttttgctcaattaaacggagcaaaaatattttcccaaattgattttaaggacgcttatttgcaaattagcgttgatgaacagtcgcgtcaacttttaggcgttaacactcacaagggactttatcaatgccaacgactggcattcggaatcaaaagtgcaccaggcatttttcaatggacaatggatcaattggcaagcggaattcctggcgttgtcggttatatggacgatttcatcattgcttcaagcacagtgaacgaacatttttcaacaatttttaaatttttcaagcgaattcaagaattcgggttccgaattcaaatggacaaatgcaaatttttagttaaggaaatcaaatttttgggtcaaattgtttcgtccgatggtatccgtcctgatcaaaacagaacacgagcactgcaggaaatgccaccaccgacggacatcacaacactccgatcattcctcggggcaatcaattactgtggaaagtacatcaaaaacatccatcaaatcagagcaccattggatgagttgctcaaacagggagtggaatggcaatggaatgaaaagcaccgcgaagctttcgatcaagcaaaagcaatccttttatccgatttagcattaacgcattatgacccgcatttgccaattattgtcacagctgacgccagcaacaaaggaatcggcgcaacaatttctcaccgttttccggacggaaaagaaaaa

SEQ ID NO: 68968 - DNA, 388 bp, Heterodera glycines
atgccaaaacaaaacgaaatcgttttaaaatattcctttctggacttgacttggtttcttgatatcgaagctgttttctacgctatttctaaaacggttataccaaacctcagatttttgaatccggttttcagaaaaaatgccttgtggtgaaaacaatatttcacatttcactccataactttgtgagttcggcacggatcgagaccgggataagaccattggaaagagcagctcgagctctacaagaaggtatggaaagaaaaaatagttatttctgggactttttcagaaatcagaattaattctccaatgtggcccaaattttaggcccccagccacagccccttgcttctcccagttttaagtcttggatttgtcaaataaa

SEQ ID NO: 68969 - DNA, 59 bp, Heterodera glycines
aacatttgccttctctagtctggctctactaaacactcacacgatatttgaaatgctaa

SEQ ID NO: 68970 - DNA, 59 bp, Heterodera glycines; identical to SEQ ID NO: 52421

SEQ ID NO: 68971 - DNA, 59 bp, Heterodera glycines; identical to SEQ ID NO: 52422

SEQ ID NO: 68972 - DNA, 59 bp, Heterodera glycines; identical to SEQ ID NO: 52421

SEQ ID NO: 68973 - DNA, 59 bp, Heterodera glycines; identical to SEQ ID NO: 52421

SEQ ID NO: 68974 - DNA, 59 bp, Heterodera glycines; identical to SEQ ID NO: 52421

SEQ ID NO: 68975 - DNA, 671 bp, Heterodera glycines
  unsure (1)..(671): unsure at all n locations
gccccgaaaacaaaaaaatnncgattttttcanagtgtctctgtttggggtactcaaacaattatgggggagcaaaaatccaacgcagaattaaagtacaggctatagggaagctattcccgaaggattcggtctccccataaatctgggcgcatcggttcggggggactgccccgaaaacaaaaataaatcgattttttcaagtgtccgtttggggtactcaaacaattatggggagcaaaaatccaacgcagaattaaagtacaggctatagtgaagctattccggaaggattcggtctccccataaatctgggcgcatcggttcagggggactgccccgaaaacccaaaaaaaaattttttggataaaaattatttaaatgaactgactagataatatttaaaataggttatttctcttcctttcagtatccctgcaaagtttggtgcgcttctgatcagtttctgaaaaaaaagttaagcctaaactttttggcctgtttaaaaaggaattaaaaatttttaaaaattttattcatctccctttttgatagaaaaagcatcagagtgcctaaactaacatgtaaataaaatttggtgcgtttcagaaccctttctgaaaaaatatttaagaattaattttgcaaaaaataaataaaaacgaaagact

SEQ ID NO: 68976 - DNA, 567 bp, Heterodera glycines
atggaaattgaaaaagtgtccgaatttgcgctggagaaggtgggaagtgagcgattaagcaaagccatgaacatttggggattttcatggaaaataatggcagaaattagaacgaaagacgaaaacaatgagaaatggttgggctttttcctttacaactatggcactgaaaaaggtaaaaaaaaagccattttcataaatctgtcaggagaaaaaaataataatttcattaaaaatattaaattactctttttaagctgaattacatttaataaattcttttttttccagagatttttattttttactatcttatcatatttatttatgaaatttaatatttaattgaaaaatatgaaaaatacaaaaatatggaaatttaggtctaaatgatcacgattttggtatccatttcgatcgatagggatagacccgaattcgaatctaagagggcagagttggtagttgaagcttgttcctattttcaaatgcattttaaattcttttataattaaattgcccattgtcaaatttccacatcgaatcattgagaaaaatttaaaatta

SEQ ID NO: 68977 - DNA, 269 bp, Heterodera glycines
atgcaatttgtttttccacttgcaccgagcttcgaggcgttgctttcttctcccggctacgccatattcatcatcttcctttttttgattgcccgttttctgaaattgaccagtttcgatgaaaagccaaaaatcacgctgagaaagaacaaaaggagaaattcgtctcaaaaatgttcacatttaatggaggaaggaagtcaatgtgcgactggtccgtttgttgagttagctgaactttttgtgcaatgttcgattctgcaagaact

SEQ ID NO: 68978 - DNA, 927 bp, Heterodera glycines
atgaaaaaactgggtttcctccttttgttggccataacttttccgacccggccccccctgctgtacttcgttcgtatggagaatcagcgcacagtttaccaattatctgagactcgagctcaacatcgagaccgagccttgaatccgagattcgcctttttcaaaattttttttattaacctaaataaaaaagtttttatagcgttgctgaaaaacccgaaaactttaaaaaatatttgttaaaaactgacaaaaatatcaagaaatttttgaaaaatacacccgtaagacaagagcatggtaacagcgcggatttgcaatcactcgcctaaactgggattctcaaaccaggaaacagagaggaaaaaataataattaaaattaagttaaacaagataatttttaaaaataatttcactcttattattattgggattttgggactcattagcccgtattttctcaattattagctgtaaaaaaaggaaattgattattttcacgataactaccccacttaaatacccatttgttcatctttgtttctacttttaaaacaagtatttatttttgtaaattgtctaaaaataaaagtagaattttcaatccaaaattcacaagtaaagacaaaaatattggcggtgtaaattcataaaaatgtgcctctcatgaaaaaaaagcaattttttcctatcataaaaaagatgcatgaaaagaatctgctactttgatcatttagataattgcctacgtaaatcgatttagagcaataagtagaaaatgaatttttgtaaaaatcgtaaaatttatattttttttttcagaaaaatccttttggctaacaacatattgttttttcgcaggggaaatttgagcgaggttagcgtatccaaagcgcccgtctgaagtcacgaagcagtcaataaa

SEQ ID NO: 68979 - DNA, 362 bp, Heterodera glycines
atgcaaatcgaaaggccattttttacggaaattgaaaaagtgtcggaatttgcgcaagaaatcttttggagtcaacgtataagcgaaactgtgcacatcaaaggattttcgtggaaaatattggcacaaattagaaagaatttgcttggcactgacaatgagaaatggatgggcttttaccttttgtgcgatgctccaaaagaaggtgcaaattaaaagctaattgataaaaaatcataattaattgccattaagccaagaattgttgcttcgaatgttcggcaacctttcgaattgtctcgcaaaagaaagatgtgccggatttcaaggatgaattcaatgactaattgttaaacaataaa

SEQ ID NO: 68980 - DNA, 1287 bp, Heterodera glycines
atgttccgctttgattcaaagaatgcaaaatcagaaaatggtaaaaaatatttggaatattaatctattaaaattagggattaatgagagaccggatttttatgtatttccattttttcacatttatttcagtttaaaaattaatttaaataatttttttagcttagtttgaagcgtttaggaatgtattttattttcagttttaaacataccatttttttctatatttagatattttaatcatatttcagcaagttaaaattagcctctttttattaccttaattaattttcaattagccaccactgattatcctgtggaggtccccgatgttgaagcagcagcgttcaaagtgatgttgagcttcatttatacgggcgaattggctgaattgaacggagacaatgcaatggcagtactttacgccggtgaattttatttttttaaatttaatttattaattttttttaattagccaaaaagtacaatatccctggcttggtcgacgcatctttgcaagttcctgtttcatcactgcgcaatgttttcgtggcttatgttcaggccgaactttatgaattggaggtgggttggacagattgaaattgatgaaaatgcggacgatttgatcaaatcgaaggaatttttgcaaattcaccaaaaatttttgtgtgaaatttttggacgtgacgaattgaaaatccgtgaagaaatttcaatttggaacgctgtaattttactataaataagaaattatttctaattaatttgttatttctcattaataaaggcactccgttgggccgacgcgaagtgccgtcaaaattgcattgaacgctcggcaaagaatcgtcgtgccgttctcggtccggcactgttcaaaattcgctttccattgatcccaaatgaggaattttcgaagaaaattggtaaaaataaccaagccaaaatgtttgaattttttccgatgagcagctgccgattttataaaaaacgaatttattttattataattttttataagttttaaaatccagtttttcagttccatccgaagtgttatcagaagatgaagtgatcgacatttatcaattccatgcccttccaaattgtcatgggatatctgatggatttttcccaatgccatttccgactaatggacgaatttccgatcgaaaaaagggcagaattttgatggacattaaaaaaatgttggaatttgctcgagaggggattaagagcagtcggtacagcgaaaaaatatacataaatggataaataattaaa

SEQ ID NO: 68981 - DNA, 612 bp, Heterodera glycines
atgttccgctttgattcaaagaatgcaaaatcagaaaatggtaaaaaatatttggaatattaatctattaaaattattaaaattagggattaatgagagaccggatttttatgtatttccattttttcacatttatttcagtttaaaaattaatttaaataattttttttagcttagtttgaagcgtttaggaatgtattttattttcagttttacacataccattttttctatatttagatattttaatcatatttcagcaagttaaaattagcctctttttattaccttaattaattttcaattagccaccactgattatcctgtggaagtccccgatgttgaagcagcagcgttcaaagtgatgttgagcttcatttatacgggcgaattggctgaattgaatggagacaatgaaatggcagtactttacgccggtgaattttatttttttaaatttaatttattaattttttttaattagccaaaaagtacaatatccctggcttggtcgacgcatctttgcaagttcctgtttcatcactgcgcaatgttttcgtggcttatgttcaggccgaactttatgaattggaggtgggttggacagagtga

SEQ ID NO: 68982 - DNA, 522 bp, Heterodera glycines
atggtacgcatttcacgttatttaataattgatcacgacaatctgccggttcggccaccttctttggacgaaatcaatttacgttggatttacaagcagaattctgaggaaattctacaatttctagcttatcatggacttatcaaaaatcaaatggagtgcaagaagtgttttaacaaaatgtcattgacaaaaaagaccaacacaaaggatggttttttggtaatgcatatagggatgtcaaaaatatgtacaaaaattgatcaaaatatgtacataaatatgtaaaaaaaatccccaaatacccgatttttgtttgcaaacataaaaaagaaagtgtttttcctactatttagagcatggagaagccaggaaaaaaaatatgtatttacataaaattgacatccctattaattattagccccggctcaaaaaattgatcccaaatcaatgcaaatgttgtaaaaaaacaaaacattgtttttcaccaaaataagagaaattgttgtgtacataagttga

SEQ ID NO: 68983 - DNA, 1700 bp, Heterodera glycines
atgccaacaaaaacggacagcagcgacgatgagtcagatgaagaaaattcagcagcgggtgggtaaataactaaataatggttaaaaataaatttaaaaatgctatttttttagcattatttcccgccggtgcccccattaccgtcgtttgtgaaattttttaatatttaaaagatgcattacggaaattacggcactttttgacccccgtaatactaataacggatttcagtaatttaaattccagttacgcccacccctgctgatgttaagaaccattttgaaacatttatgattgtggatttctttaggacattcccaaaaaatatttttatttttttttgcctgatttttttaaatttacaaatatcatgattatcattttagcagaatcaccagggaataaatggatgaagctaatgttgagcacgggaaagtacgcggatgtgcactttttggtgggggacggagacgcaaaaatggtgagttttaaattgcctaattataatccttttaattgtgaaatcgcccccgacacttcggggaagagattagcgaagatcagggacggaagatgggtcaaaaatgggggttattgttagttaattaatttctttaaagttttaatccttttaagcgcgtgccagcccataagctcattttggaagaggcttccgacgtatttaaggcaatgttccgttttgatgccaaaaaggaaaaagcggagaatggtaaaaatatagtaactaaaataactaagatttaattgtcaattagactctgctaattgcccagctgatgtggagattcccgatgttgaagcagcagcattcaaagtgatgttgagcttcatttatgctggtgatttgagcgaattgaacggagacaatgcaatggcagtgctttacaccggtgaatttattttaaggaaattaaatatttataaattaaatgtttgaaattaaatttaatgagtaatatttttttattagccaaaaaatacatcatccctggcctggtcgaacgatctttgcaaattcccatctccgaattgcgcaatgttttctttgcgtatgcccaggctcgtcttttcgactttgaggtgggagataaataatttaatgataatgaatttaagatgatttaaatgcaataattatttatatatttatattttttataaattttaggactattgcaatgattgtttggattatattgatgggaatgcggacgctttgctcaaatcggatggatttttgcaaattgaccaaaaattgttatgcgaaattttgggacgccaattacaaatccatgaagaattttcaatttgggaagcagtaatttttttaatttaaaaaagttacaatttcattttaaataacttcctatttaattcgaatttattttcggcactccgttgggccgacgaaaagtgccgtgaaaatggcattgaatgttcagcagagaatcgccgtcaaatgcttggcccggcacttttcaaaattcgctttcctctcttctcacaagaggatttctcggagaaaattggtaaaaataagtcaaaatttcaaatgcattatttgatgactagggatgtcaaaaatatgtacaaaaattggtcaaaatatgcacataaatatgtaaaaaaaaaatcccgaaatatgtataaaaacccaaaatatgtaccaaatatttaa

SEQ ID NO: 68984 - DNA, 795 bp, Heterodera glycines
atgaggtgggaaaaagtaacccaaatgcgtatgaatttttggacggtgggttaatgcgccgcatggtccaccgagcttttgctgaatttctttcattgatcaaagctctctgttagccgtactatttcttcgctgtatgccgtctttccaccgcactattttgttcccctttcccagtctggggctcttctcttagatttatataatattttcacttgctctgcttgtctgcctctctcacacattttcacaatcctcttctttgtctttcccacactatttcctccactttcactccctctccagatttattctcatgtaatatttcctttttcccaagcattctgccgcttaatttatcccccgtttgtgtactattccatcaattttcaatctctctcttttccttgcttgagggcagtgatcaaagaaaagacggaaatttttttttaaccgtcgtccatccatttaagaaaagggcgaaaatgcattaggaaaggggtgggggaataatttggctggaatggaatgcaaaataaaataaaattttggggttggcgagggctgtggaggaaaagcatcccccgggggaaaagcccccccccccccccctctaattgcaactgaagttgtcaacagcagcagacaacaagcaggaagcagttccgcatttgaacttgaaatatgtggataatttgcagaaatgaggtgggaaaaagtaacccaaatgcgtaggaatttttggacagtgggttaaagctaatatattactcaaaaaataattaaaataataaa

SEQ ID NO: 68985 - DNA, 360 bp, Heterodera glycines
atggaagcactgacaatgagaaatggttgggcttttaccttatgcgtgaacaagaaggtgcaaattaaatgctaattaatactaattataatgaatttccattaagataattatttttttaaattttaatatattacaatgtttaaggaactgatggatccaagcaaaggattttacaataaaagcgaggacaaagtgacattggccattgatccttaattactatgagttataagaattacgcgatttaagccataattttggggttggcgagggctgtggaggaaaagcatcccccgggggaaaagcccccccccccccccttaatgtgagaccaatgaattaagacctatcaataaa

SEQ ID NO: 68986 - DNA, 619 bp, Heterodera glycines
atgaccatgtttttgacaataaatcgaacaactggggatacaattacatttcaattgctgtgagtgacaattaaacattcccttaattgactaattattattaattaaggaattgatggacccaagcaaaggcttttataacagagaagaggacaaagtgacattggccattgatgtcacagtgaaagaagcaaaacggaggacgaaacataaatgcccaatatgatttggggaaaaatgccattgaatatcctccatcctatgatgaacctgtttttttatttattaatttttcttgattatactttcaaaactgctgatatgtgaattaattaattgtcggagctgttttagcagactctcatttttgagtaccgaatttcaatgataaacattttagtcataaacccaattcaaattttaccattttaggtcaatgtttacaatttttggacttggatttattgcattaattttgttaggatttacgtaaacatttttttaaacttttttttttaaattgaaaccattcctaattgactgatcattttttccttttatttaagcagaattttttgggaccagaaatttgggaaccgggaagtttgggcttattaaa

SEQ ID NO: 68987 - DNA, 2552 bp, Heterodera glycines
atgggtggtcgacgaggcactcggctggatccaaccgcagatggtccttttggcacatggtgatgacggcattttgggagatttttatgaaatttggcattctcattatttttcttttattttattttattttttgtttagagagtgcaatcagctgcatttctccaatttgcctatcaaacacatcgtatgtttttttttaatttgtaatgaaaattccaattcttttcgttcaattaattcgaattcaataataagttcgaaactaaaaaccgacttccaggaaatttgttacctgctctgaagatggcactgtttgtctttgggattcaatcgatgggcgagtgattgacagtgtcaagtcgaacttcatacatcgaacaatcaagccttatgtacgagttacggctctacttgcaaatcggtgccttgtgaatttttgtaaaaaccaaagaaagggaggaccctttggttacgaagatttttttttgtaaaacaaatatcgaagtccaaaaatttgaattttctacttttggttctaattcgggttagggattatgaatggttaaaaccaacaacattagtgacaagttttcacgactaggcaatatctttcaagaaaaatttccaaaccaaaaggtccccccccctttaagtttttaataaaattcaaacaccaatttgcaagtaatatcggttttttcataaaaacacatttaaattaaaaactgtcatttcagacactgaaaaatggagcccaaaatgtgctgttttgcattggcgactatgccgatgtcattgttttgcatccctacgatctcaacgttctgttcacattgggctccaaaattgagcccgaatggaccgcttccattgccttggccactccgatgggttggccataaattttgcgaatttaaaaaaaggaataaaaaagattcgaattttaatttttttttcgccactcataaaaattattttttcagatgtcttggttggcacttcgctgtccggcattgtcaagctctggtccctgcacaatgttgaccccaaagactgtggggcgagtgtttcgtttgagtgcgagtcgaaagtgttggccactggggcggacggcgtgaaaagcatcgtttgttcgccgaaaaatcttcgcatgatgctgattgtgtgtggcaattcatggcaggtacacactgctgttgtggacagttttgggaaaatttggtcttaaatttatgacaattgtgccttttatctaaaatttggattggattttaattttcttgccacaaattgcgagttttcaaatctgatgcgaaaattcggaatggagcgaacttttcgaatttatgagccccgttttgttatcagataattgacccaagtactttggaccagctgattgtgtcggaatgtgccattgaggcgctggacggtgtcattgtcgacattgacaaagtggccattgcttttgccgactccacaattgtgttgttccaattgccacgaaagtagggaggctcttttagtaaaaataataattgaaaaatttgaaatttatgccaacattttttgcacacctttagaaaactttgtggcaggcaaattcgcgaaaaatttggcgaaaatccgaccaatgtgttcaacattgagcaggcatttgtttttgcactattaaaagggactctttcaacgccgttaaaggtaaatgtttttcataaattgatggaattttttcgttttcagccttcacttacgcccgtccaatttttcttcgatgagtcgcgaaacagtgacaaaaaagtggtggtcgcctaccgagttgatgagcagggcgcgatcagcatgtggcacattccgaacaacttggacttcttggtcaacgaattcattcgccatcggagaccaatcggtgagtgccatttgtgaccaagacaaggaaattacttttgcttttatttctcaatgtatgcttaaaaaatttttcaagaaaaattacatattttttgaaaactggcacaattttcttatcatatttcattaaaattttcaaaaaaattccccggcgggatcgaatttaccgtatttttttttgttgaaaaattgactcaaaatagcaaaatttatcattttttggcgtaaacatctacaaatttctgttttcgccctggtgctcattttgaaaaataacactggaaaaaaattttcgacccgaagagaaaaaaagagaacttctttgattttctccctccgaaattcctgatccacccataaatttactctcatgcttctctactcatttcgcccatttattcagtttatgagccgaccatcaaacaacacatttccgaggcgtgggctcgtctcgtgccgcctccgccgacattggtcgacactgaggtggacttattattgtacatcattaacatatatatgttgctatttgagtgtttcaggacgacgaacgaattgtaacggcgacaatttatgtgggcactcagggcaaactgttccatgggcgtgacgacggctcaataatggtttcgttttga

SEQ ID NO: 68988 - DNA, 264 bp, Heterodera glycines
atgggaccagtaaaatcgatgattacccaacaacagcagcaaaaccaagaagttcaagcagtacaacaacaacagcaaattttgatgggaaatgagatgaagatggacaacagcaaaaatggagaaacaagggaagaggagggaaatagcattggggaaggaggagagacggaagagaaagagaggaaaaggaaaaattcggcgcaaaaaggaggagagaatgaagctgaaaagagaaaagaacagcagcaaatcggcacttaa

SEQ ID NO: 68989 - DNA, 47 bp, Heterodera glycines
atgagaattcatgcgagattttctggaaagaagcttaatatggccta

SEQ ID NO: 68990 - DNA, 257 bp, Heterodera glycines
atgaaggaacgacagcagctgcaattgcagcaggaagacatggaagctgactggtacatgcgccaagcacgaggagacgaggtgggtggtgatcggatggcatgggacgttgaccaggatgcaattttatttatggacagtttgacgagactatcggccaccaagacttccggctgattcaagccgatccggggcttcattcgcaaaaccgcatcgcaatgaccagacttcagccgcagaagccagcagcgccatga

SEQ ID NO: 68991 - DNA, 785 bp, Heterodera glycines
atgattagaagaggtacagcagtgattagaagaggttcaacagtgattagaagtagtacaacagtgattagaagaggtacaacagtgattagaagagatacaacagtgattagaagtagtacaaatttgattagaaggggtacaacagtgattaattagtaaattcattaaattaaaatgaaaatattttttaacaaatttaatttaaaaaaatacatgaaattctatcaattaaaaaaataattaatttaaacttataaaatgtattcatcaaaaaaaaaattaatttaaatataattttttatttattaactcaacaaaatattttaaattaattaaaatcattgaaaataacgtaaaaatgcacagaaaaataatgttacaccgtccggactcgaactttgcccccccccccaaaaatgatgcctcagaatccccaatcacacagggattctgagatcttgacgatgtcaaaagtaaaatctgatcacgtattcgtgatcagcggcccaaataacgcctaaagacatgtttttggaagatttttggtgaaaattttttttcacttaaaaaccatgtgcacccccctttggtcccgaagcccaaaatcacttttatttttatatctttttttaaagaagtgataaaaataccaaataaattttataaaatagagcaagaaattgcggattttagtattattttacttttccaaaataacttttcagaatcgagttcagaatttttttctgaaaattcgaatttttccagaacttctggaataa

SEQ ID NO: 68992 - DNA, 1397 bp, Heterodera glycines
gaccgccaattgcgtcagttcgtctcccattggactgtcggtgatcccgaggatgtgtccgttgcatgtcaaattgcgggcattgatccctcctttggctttgcccgcgtgtgcgacgaaacatcggcacgacgcgtgttccaagaagcgatggtcagacggacagtgatggtgagcaaattgggggggggggagacaaaactgatcagtgtatgagtgatcagaaaaacaattgccgaccggatcgacacaatcattaattaatttaattagtcgaattattagcagagagataaaaatgataggctaatctgatggccatatgccatacaagatttcaaatattactctgccaagcattggatcatttataccgtactctttgttaccgtaccatccgcttataggggataatatgtgcatttgtaactgtccccaaaatatgaaaagcatttcgagccatttgtttgtttgccctcaacaataacaacaacaaccacctgctgctgctgatagaaggaacaaactccttccatcaaacatcttcagcagttttgggtgttgcatttcccccccccccctttccccgcctcactttccgtcattgtccccccgggggatgggtcatcatccttctcactctttgcttccccctcttctcatccccggctccttccccctctcgtctcccccttacttttctcgactcgcttccattgctctccattcattcgctccccgcggagtctcacttttctgcttttctgtcattgttcttccccggtcatccattcctcccttctcccccccccctttcctctctatttgctaataatctctcttttcctcccctttttcgtgtcttcgcatccaaaacaaaatccctttattccaccacctttcagcacaacaacaatgccaacatcgccagcatcgttcgggcgaagcggagagacggcgccgctgcgctttccccgcgcccgccgtccgcgccctctccgccgtccctcactgctgacaatgggcagcactttgctcaacaaatggtcgtggagatgcgcggccgttgcttcaatgccacgttggccgtccgagcccatctcagccgatgtccatggtgtccggatccaaatgtgcacattcacgtggacggatcagagggaagcgcccagcaggtgaggaacgggagaacgacgtgaagcagcagcagggtgatcaatgatcagttggagaaaaatcaatcgataagaagatgaggaaaagggatgatcagactgattaggcgtgatcaggaagatgaattagagagcacaaaattaagaaattatcagcagctgattcgaaaaccagagaagggagaggggcggataggtatactatcagtgatcaactgttag

SEQ ID NO: 68993 - DNA, 1380 bp, Heterodera glycines; identical to SEQ ID NO: 40733
  unsure (1)..(1380): unsure at all n locations

SEQ ID NO: 68994 - DNA, 653 bp, Heterodera glycines
aaaaatcgattttttcaagtgtccgtttggggtactcaaacaattatggggagcaaaaatcccacgcagaattaaagtacaggctatagggaagctattccggaaggattcggtctccccataaatctgggcgcatcggttcggggggactgccccgaaaacaaaaaaatcgattttttcaagtgtccgtttggggtactcaaacaattatggggagcaaaaatccaacgcagaattaaagtacaggctatagggaagctattccggaaggattcggtctccccataaatctgggcgcatcggttcggggggactgccccgaaaacaaaaaaatcgattttttcaagtgtccgtttggggtactcaaacaattatggggagcaaaaatccaacgcagaattaaagtacaggctatagggaagctattccggaaggattcggtctccccataaatctgggcgcatcggttcggggggaatgccccgaaaacaaaaaatcgattttttcaagtgtccgtttggggtactcaaacaattatggggagcaaaaatccaacgcagaattaaagtacaggctatagggaagctattcccgaaggattcggtctccccataaatctgggcgcatcggttcggggggactgccccgaaaac

SEQ ID NO: 68995 - DNA, 193 bp, Heterodera glycines
gtaggaaatttcccggcttacagtaccagtcttggttcaaaatccgggacacggtccctgtttttcgagttcctttaagtccctataagtcactatcccggcgtgttgataccgtgctgggtggtttcgtaagatccgcaattttagcgaatttttcgacaaaaatggcataattttgcttaattgcaataaa

SEQ ID NO: 68996 - DNA, 1731 bp, Heterodera glycines
acaattctttggcacatcggccgtgtcgcttcgtttatcaaagagaaattccccgtaacttttctcattttcattcactgttttctttgccatttccatttcaggttaccattttggcatggcatgacatgttggttggtaacattgtacattctcacatttaacaaaaaatccaatcagttttcctataaaatgcaattaaaaatggacgtgccttcccaatttgcgcagttttaaggtccaaatgacggagaaggaattggccgactaccaaatgaccgacaagttggaacccgtcctttggtcttatgccgaagacttggacatgtttttgcccttttcccattggatggcgttgaaaccgtttaggtatgccatgcctgggaaggaatgataaaaattaattacccactaatttggtgaggggtattttgaatcaggctttccatctttttcccaaaattcacaaccctaaccgatgttctgtttccttgagaaatgtctggggcgcgtcggcgttcaaaggcgcggacggtccgatgcgtttccactccaacccgatgcattatgtgcgcaaccacgagtcatgggtgaaccaaatgacacgcgtctacaaggagttcgaccgttttcaggtgcattcttcagtttcaaattggcatttttcatcataggcacatttaatcaaccaatttgtactatgattatttgactttctctttaggggctgatcatcaccggttggtccccgctacgaccatttggccattctctgtgaacttttccccgtcggaattcccgcgctttcgatgagtaagtttcggttcttttatgcgacttttgcgaatttgaaaaatatgctttttgttcatttttaaggcattgaaacaattgccatgggcagaccgctgaatgggaaatatgaaaaaacgagggaactgctgaagtgccaaccaccgagtgagcctggctacacgtccgggtgccaatttcccgggaagagggtcagttggcatggacaaacggacagacaaacactgtgccaaccaatttaaaattgggtttctccctttgtcagatatacgaactcatcaacgagtgtttctacgaactgcgccaatttcgcaaatatttcacctccgacttcgacctcaatggatgggtctccgcttttgctgaacgggaaacgttttcctcgcccttttacattgcggttggaacattttatgaaaactgaatctgagtccaaaataaaaaagttaaataggaaccacaattctttaccattgcaggaaattcagcaaatttagtttttttttcttaacacttaggttttcaaaaaagctaacactttcggcgcatttgcaattattgttgctaattttaagccttttccttccagaaagttctgccaaacattgacctttacttggcaattttggaacggatcgaacgtatgcaaaaataatcaatttgaatggccatttaattaggcttgtcggcttcctctttttaattaatttccctctttttgcttcagacgatcttcgcattgaatttcaaaagcattttttcactgaattggccgatgaatttgtgctcacttacatggcacctgaaatggcttccttacgcgccaaaaaagcggtggctcaaagcattttaaaggcaaaaacttttgcacggagaccttttgtcaaatttccaccgatgagcactaaagacaacgag

SEQ ID NO: 68997 - DNA, 501 bp, Heterodera glycines
atgcatgacttgttcaactcgttcatcattggccaactgtctgctgccaatggcactaatggttccatgtcccaaccatcagacccaatgacgcataatcaaaatcgactggtggaaacgaactttgccaagttcagcagggagacaaatcaagcaaataatcaccgtggcggcacctcaaaacaacaaacaaaatccatgtcgtcaaaatctgaggaaaaaataccgtggccctccactaatcagccgaacggtgtgccattggacatggacaaagtgcgactgttcagcaacgcaattgccttcattgccatggaatttgttgcttcttcttcggagagtcgggcggaactctacacgtgcaaatgcttatcggataatgagatggagaagaaaattttcggccccaacggcgccattctttcgcatttaaacgcgtcgtttttaaattcggcacaaaaaaagcgccaatttctgaaactgttgttttcgttcggctaa

SEQ ID NO: 68998 - DNA, 1712 bp, Heterodera glycines
gaatgcaaaacgagcaatatcgcccgtgaggctgcgatcaccgccggtttccctgattcggtgtgctttcgatttctaaatgtttttcgaatggtcacttggtccattttctgctttcagatcccttgcaatacggtcactctcgcgtgtatttcttccggcgtttcaattcaaaatattagcctaatgatttccactggctatttaaaggcgggcatcgctggaggagtcgagttactctctgactttccaattcgttacaacagaaaggtttgttccattatttggttcgcttacccattcgaagcccctttttaggttcgactttctctcatcgatttgcagaaggccaaaagttttggagagagatttaagcacctgaaaacagtcgcctccaattggttctctcccgagttgccggccgtaagcgaattcacaaccggcgaagtgatgggcaattccggggaccgattggctgccgctttttgtgtgtccagacggtgagggcttacatttaacaaataaagtaaacgatattgttcagagagcaggatgagttcgcaattcgatcccatactttagccgacaaagcttttagagagaacaaattgaaagacgtggtgagtacggaatcagggatggaacgagtaatagcccctccacccaacccgaaataaatttttttagcattttctgacacatggaaaaatgatgctcaaatttcaaaattcgccgttttaatcggctaattgtaaacaattagtcgcatttctcattgtcaggttccgatgtttgtcacctccgggaaacacaaagggacgacagttaacaaagacaacggaattcgtgtttctacgatggagcaaatggccaagctgaaagcagtaattaaaagaggaaatgggggggggttccttttgtaatttccaagggacttttttttaattgagtcattggatctctctgctacaaagctaaccatcacaaaaacaacaaaaatctccgaatttcaggccttcatcaaaccccacggaagtgtcactgctggcaactcctcctacctcaccgatggagcatcggcagctttgctcgcttctgaagaatttgcgcgtgagaagggctaccggccgaaagtgttcattcgtgagactttgttcgtcgcccaagaccccaaggatcagctgctgcttggccccgcctatgtgatcccgaagcttctcgataaagtgagttttggcaagcgattgattatgtgggaaatgtccctttaggtcggattgtcaatcaaagacatcgatgtgttcgaaatacacgaagcatttgctggccaagtattggccaatttgaaggcactcgattctgattggttctgtcaggtacaaacacttttctttatttcttttgcatcaacttttggtttaagaattatatgaaacgcaaagcaaaatttgggcttttgccattggaaaaagtgaatatgtggggtggctctctctcattgggccatcccttcggcgctaccggcgtccgattgttggcacacgcggcgaaccgactgcaggccgaaggtgcgtaaagccggacggggcgggggaagtttgaatatttcgttgattattttcttcaggggggcgtttcgcagtgatcgcggcgtgtgctgcaggcggacatggcatgggaatgttggtggaaaattacgagtcgaaacagaa

SEQ ID NO: 68999 - DNA, 1077 bp, Heterodera glycines
atgctgtgcaatttcgacaacttcaattgttcgtcctcgcggcacttttcgctcgcttctgttttacttcagcagcaaaaattcgctgctgtttcttcaccgcccaataaaaattggaatgctgtgcttatcgaagcgatgcgtttgaagtcaaccagcatcgtccaggatgatgcaatcactgaacatggccatgatgaccacgggcatggacaccacgcagtcaattatgggccgccgattacctatgactacactcctataccatctcaaccttataaggcttgtttatttgtttcaattttttgtaatataaaatcagaaaatatgttccagagttttttgggattgctgattctaaatcaaacatccattttgattaattctaagtcactgactgaccagattccgaagtaaaatcgaaattccaaaaaactagtctcgatgatataatctgtttgatttactttgaaaatgctcgagaaaaaattcttagtgacgaaacccggaatccaacatttggccctgagacaccctttgcatatgtatgatctataatattagatttgttgctgaaatttcctttttcatcgggactcagttgtccatccaccactcaaatgaccactggtcatcttctttcactcctagatggatttgtcttaccgaacccaaatgcgaaatttgagttttgacggacccgctgttcggaataggccaaaatggatgtctgattgatgatcatcaaccctgaaaactcggaaaaaggcggtgggggaggtgggcaaaccaaagtattaaccaacaaacaaatgatttgtcgttgcatttgttttgatttcgtacatttaataaattaaattgcagaaggtctataaggaactgaagcagaaattcatcacgtatttggcgatgagcttcgtctttttcatgttttgctgttacgttggctattccactgatgtgctgggacactccgcttggaaacttccgggcagctaccgtaacagaaaagcgattaacgcgcgtttggacgcggaggaagcgaaggcaaaggccggggaaggcgagcaatag

SEQ ID NO: 69000 - DNA, 222 bp, Heterodera glycines
atgtcccccttcctccgccgtttcctcctcctctacccatacgcctccccctccgtcccctgcccaccccaccatcgggatcaaatgtgtcgtgctctctcagttcaacgtgcagtcccttcacacttcgacgatgacaaatcgtttgcccatgcactgttatggtctaaagatttaccaaaagacaatttgcgtgcccaattaacaccaaaattgacctga

SEQ ID NO: 69001 - DNA, 94 bp, Heterodera glycines
accataacagtgcatgggcaaacgatttgtcatcgtcgaagtgtgaagggactgcacgttgaactgagagagcacgacacatttgatcccgatg

SEQ ID NO: 69002 - DNA, 431 bp, Heterodera glycines
atgcttggtcttttcaggccgttggagacaacgactgcaactcaaagcacaacgacaaaggaagcgtcaattttggacagggtaattaagaaaaaataaatttaattgaaaatattacgctttgactgatttggccaagtaattatgaaaaagtccattaattaatttaattttttgacaatttaatataaatttaattttaaattaacttttgattttgtgctatttcagtttatgccaaaaattccgaatattttcaattcgtttgtcggcggacggacgacgatggccacaacaaccgctaccactcctccgacacttttcccatttctctcatttttcaccgaaaaacctactacgacaaaagcgttttgtttttaaattattaatagggctgggatttttatgtgctaaaaatcctgaaatatgta

SEQ ID NO: 69003 - DNA, 1180 bp, Heterodera glycines
ggtggtcgcggacccatttttgcatactttgaccatccgacacgaggatggaaacacttacgaagttaatttgttggaagaacaagcagctgatcctgaagccgcggcctacatttcgtttgtcagggatggggaatttccagctgatttggatgagaaagaaaaagaattatttgctgtaggcactgccaattacaaattaatttcgggaattcttaattttgaggacaagggttcccccccaagaatttatgtcccaatttcattacgtgggctcattttcgaatcgtttcactcctctctattgggaggcggtcatttaaattacagaaaaacaattgccaaatgtaaaaaatatttttggcctaaaatgtactctgacgttttaacttgggtcaaactatgtgtcacttgccaattgagacacaatccaacacccgcgtaccgggaagagatgctcatggtgccagccaacacactttttgccaaagttgggctggacttggccggcccctttccagtcactcaaaaagggaataaacacattttaaatatcgtttgttggttcaccaaatacgtgatttctgtcccggtccccgacacaaaagcacaaacaattgcccacacttttcttaccaattgttacttaaaatacggtggttgtgttgaattaatcaccgataatgcttctgcctttacttccgaatttttcagagaattttgctccatgctttacattgacaaaaagtatgcctgtccacattggagtcaaggcaatgcgtcaactgaacgcacttttcggacatttcacaacatcttggccaaatacatttcgaagactcagcccgacttcgatgaatttttggatgctgctaatttttgctacaacacgtcagtgcatgcttcaacgggtgagactccattttttctaatgtttgggcgtgacccaattttctgtgttgatcagatcattgatccgaaagttcgtgatccgatagccatttcggaccgtaatgaatttaaacagaagctggtcgttgccataagacacgcgtggcacgctgcagctgatgaatatgcaaaagctcagcgaaaaatgaaggaacaatatgacagaaaggcaaggccacaacaaatcacaattggtgatcgagtgctgatcagaaactacgacggacgg

SEQ ID NO: 69004 - DNA, 1224 bp, Heterodera glycines
tcgaattggatgtttggaatgcaaaagggaaaaactgaaaccatacacttatcccgaggctcctaatctgccaaaggagcgagtcaacgagacacgaccctttaacaacaccggcattgactactttggtccactaaaagtgaagagaggactcgaaacggtgaaagtgtatgtcgcactttttacctgcctcgccatccgagcaatccacctggaagtggcagaagactattccgccgaagcctttctccgcgtgttccggagatttgccgcacgacgcggcgtaccgagagtcatcttgtccgaccaagggacaaatttcatcgctggagccaaggtcatcaaggaaaattggaccacagacttactcacactcgaagtgcaagaacagctggctcatcaaggaatcacatggaatttcaacacagcccatgcaccatggaaaggcggcacttgggaacgactgatcggcattactaaaaatgccttgaggaaaagcattggacgcagacttctcactttcgatgaattcggcacgctcgtcgttgaaatcgaagcaattgtgaaccatcgtccgttgacttttgagtcagaccgcgaaccagacccggtactcagaccggtcaattttctgatcccgtacggatcaacggaaaccaattttccgtcaatggcaacggatccggaagatccagaatatacgccgaatcccaacaagctgaaaacgatgcttcagaaggctgattcaagactgaacagcttttgggaaatttggagatccgactatctcctttcactgcgtgaacgtgcaaaccaacggttaaacaacgaacgacaaactcctaacgaaggagacattgtgcttgtggaagaagaagcaaatccgcgatcagtctggagcttggcccgggtccttaaagtccaaataggacgggataacaaatcccgttctgcattaatttcccacaagggaaaagaaaaatggagagctgtaaatcagctctacaatctggaaattcaacccgaatttccagaaatccactccaccgctttcgtcatgagcaacttggacaacgacatcgacagcgtctctctcgccggcagcgaagatgaaatgccgcagccgaaaaataaattccgcattccgaaacgcaaacgggcatttcttcgaccaatcccgcagcagcacagtcctcttcaaggaccgcgtcgcaaaagaaggga

SEQ ID NO: 69005 - DNA, 102 bp, Heterodera glycines
atttatcaaaaaaagagatagccatttttctgggatagagtataaatttaaaaattccctcaaaaataaaaaggtcgattgcgcaccgccctccctatcatg

SEQ ID NO: 69006 - DNA, 247 bp, Heterodera glycines
gtcagggcaaaattcaagaatgatgatggggaaaagcccataaaaatggcgattttggcgtgatcagaaaaaacttatattgatttgtctgattttgcatttagactccgtccgatcgatcgctcctcggcatatccttcccctcccctcccccaccaaataatcccctcaattcatactcattcgcatttaatattattttgtatgctaaggttaccaaattacgtaaattaaatatttagtttca

SEQ ID NO: 69007 - DNA, 977 bp, Heterodera glycines
attatgtaagtaaaatcagagatttatggcaataaaagcattcattcctttttcagggtacatcgatcactccgtcatcgctttcttcgcttaaatcaccaaattttcgacaaaagaggcatcaattatattttgtgtattccatcaccacacaacacggatggccagcggatttgggacattattgttcgtgaaatttggcccattttttcgacaaacattcgctgtttgggctttaccggtggtgatcatttggaccatttgcgtcgtctcacttcgccgacaattctcactgatctcaaccaattgaattcaatccattcatatggtctgttgcccgaggcaattgatgatgattttaatggaacaaatgcaacgatttctgctggccaaattctgtacaaatggttgcacattccgagaaaagatggccaacccaagcgattgcgttgcgatgattacaacacacaagcgaacactgattggatcaacaatttcaaggaggtgtggccatactttcgacaaatcagtgcttttgtttccaaattgtttagcattttcgccgtgccaatgccatttcttccgtcagttacgaaattcatttttctgttcgtgtgccgtcaatgcaaatggtgccgtttgaattggtaaacgaatggacaaaggaaaagctgacattggccaaagcaaagggatggaacaaccgatggataatgaaacgatgcaaaattattggggagaccgcggcggttcaacagcagaagaaagaggaaaattgggacaacaattgggacaatgtgttcatttggctttacatttgcaataatagcattgggtgagcaattaaaaaaggcatttaattttgtttaaataattcaaattgcgcttaattaaggcaattgtctccgccaccagaagaagtggaagaagaagcggcacaaaacatcacaaaggggccgtcttctgacaatgaatga

SEQ ID NO: 69008 - DNA, 347 bp, Heterodera glycines
atgtcggcacacgcggagctgatcgattcgaagatattacgacaggatttggtccatttgtctccggtgtgtccacaaggatttttctgtcagtttagtgccatccataagacgtctcatgtaagctatttatttgttttataaaatattctacaaaatacatattctcgaagacttttttagcatttctttaattttcgtatatattacttttgaatttttcattaaatttatttttgtttgagggagacagcggttcaccattgttacgcgaaattgggggcagtttgtatgcaattggaattgtacggggccatgagtcgaagaaaagtaagagcggaaattga

SEQ ID NO: 69009 - DNA, 322 bp, Heterodera glycines
atgcacgattttgtgttgccagtcaaagcatccgagatgcaagtgaccgttgggagcaaagacataacaaaagggactgttcacgaggtggcacggataaaacgacacgaattctacagactgacttcatcagcaaatgacattactttattagaagtacagttttaaatttttaaaaattaatgaatttaaatgaattttatttgtttagctaaaagatgttttggaatgtggcccacaaataacagaatttgtcttccaaataaataaccacggagtggaacgacagcaacaatcatcggctggggaaagacaaaactaa

SEQ ID NO: 69010 - DNA, 1518 bp, Heterodera glycines
  unsure (1)..(1518): unsure at all n locations
atgtgccgaatcggaatcgtaatcgtaatcggaatcgcaattaatcggattttgggccataatcggaatcggataatcgtaatcggatttgccttgaaatccgattattacacccctaagaattgcggtgggggtcggtttagtctggccggtttagtctggccggtttagtctggccggtttagtcagagggtcgttttagtcagagggtcgttttagtctggcaagctgtttttgtcctacattgatccaattctgatttgtttctcgaaaattctttaaaattaacaccataacagatttatcaatgtgttaacaacaaaaaaataacaaaacattgaaaaatgaatacgggcatatttcataatttcgagaaataccaacgagaaaattgaagatattatcgggattagcattggcatggtaattttgatcattttggtgagcagggttaatgttgttgatggtattgtaaccctgtaagagtcgaagaattcgtatcaacggcacgatattttcgcgtttttaggagggacttcaccagcgatgcatcgtgcgatgtctgcatcaattgacttttctcatatcgaattgtgttgatgaagcggaaaacagttggataaacaagcaaaagcccgttgaatgaaaaaacgaaaaaaattagggtttactttgcctgaagctataaaaaggcggtgccaaactgaaggtttcgctttgtttttattttctaattgggatattcatttatattgtagctaaacatagatattttaagtttttccttgtttataattgacaaaaaaaacattttaagagttatgggcaaaaacagcttgccagactaaaaccgaccctctgactaaactggccagnactaaaacggcccagactaaaaaccgccagactaaactgacccagtccgtgcaagaccatcacctcatgccatgttcaacctaaatcaaatatatattaatcatttaaagaagataaagccgcaattggtaaattatcaaggtaaatggtcaattaattagttataaattactctaaaagttgggcccagcttaattccgcatggatcattgctaactatgtaaggcgcttttcgtgagtcggttgccgcatctaattattatttataacagactcacattcttcacacctataagcaccaacaaaataagcactgacaaaaagaaattcttcgtgaacattaatgaaacaaaaatctataattattattatttttataaatcatttttttaaatcccatatacaaatttattcaaaaaagatggatattaagacatgcaatttgttaggttaaaaaaatttacgaattgaataattacacttttgattgactcttgaatctgcgatggtatttgctttaattttccttttttgcccttgacctaaaaacaattagtttgatctgacaaattatgaatgactgctaaactaatatcaattccgagatacttccaaataattaattcatatttgaaattatta

SEQ ID NO: 69011 - DNA, 682 bp, Heterodera glycines
ttggatttgcaacgacgtttggatggacattttccccagttttgaccgtcctcaactcggcctcaaattggcacttctttcgccacgtttcaatgcgttggtggacaaacatttcaatggcaaaagcgaattggcaatttggagacgaatcgaaattcgtcgcaaggacaaaggaccagaaacgaagctgtctgtacaaattggtgacaaattggtggaatttccattgcccgaccgtccgttgcccagcaaaatccgttttaagcaccttcagattgagtaattcggaatcagagatttatggcaataaaagcattcatcccatttttaggtacattgatcactccgtcatcgcttttcttcgttcaaatcatcaaattttcgacaaaagaggcaccaatttatatttgtggattccatcaccacacaacacgaatggccaactaatttgggatgtttttgttcgtgaaatttggccaattttttcgacaaacattcgccacttgggctttaacgatggtgatcatttggacaatttgcttcgtcgcacttcgccgacaattctcactgatctcaaccaattgaattcaatctattcacatcgtctgtcgcccgctgcgattggtgatggttttgatgggccaaattcaacaatttctgctggccaagttctgtcaaaatg

SEQ ID NO: 69012 - DNA, 843 bp, Heterodera glycines
atgcgaagcccgcaatggtcaggtgctcagttggatttatccgattcgcacgggcgaccggcggcgatgcatggcatcgaagctgggcattcctcgaccgtggcacttctgcttgagcgcggaagtgcgctttttgcacgcgactcgcacggaaacacgatgctgcacttattgggacgacatccgaacaaatgtctaatctatcgactgtcggaagacggactgtcgctggaggacaaaaacaaggaaggtcggtggaacaaggcaggggacgagggcacgccaaacaaatcttggcacgctcaatgagccgtgaaatggccaagaaaacaaaagtaaagcgtaaggcaagcagactaacaacccatatcaatggccagaaatcagcatgttcatgacaactcgaatatcttttcagaccttcgcccgatcgaagtggcaattcgtgctggccaactcgtcgcagtcgacacatttcttcgccgtggcgcccgtctccgctcgctgacttggcaaattgcgctgagttcccatccccctctggtgctggtactgctccggaaactgctcgacgacgcgcaaattctattgcggcgcaaacgaaccgcagaagcgcaacatcgactcagttacgcactgcaaaagtgcgacgaactgctcgaaaaggctgaagcagaagacaacgaagcattgagacggatggggccgcaactgcgacgcgtcaaagtgggagaaggaaacgaaatttttaaaaaacaaatggaaaagtggacgagagagagagagagaggggaggatgagggagaagagagagaggaacggaatgggacagggataggataa

SEQ ID NO: 69013 - DNA, 519 bp, Heterodera glycines
atggagcgcatggaggagcagcaaatcggacggacattccattttgacgcgagcacagagtggtggaatttggtaagaatatttgttgaaaataatagaaatgcaactacgttccccccccccctcacatttttaaaattttcaaacaatttccaagaaaaaatcagaacctttttataagaaattttattaaaattactgaaaattttttgttttttttcaaaattttcccaaaaaaatcgctgagaaattttaaaaaatttcaattattacaaaaaaatgtctagcaataagtttttttagtgaattctaacaataaatattaaaatttaaaaaaaattcagggagcgggaaacgtgctgcttccaaagtaattaaccccaattttaaatacttttttcacagtatgtgcaaaatttgaccgtgcccatgatggacgacatttgtcacaaagtgttggattccatcgcaccagcgaacggagaggacgcgccaatggcaaacggaacaaaaaattga

SEQ ID NO: 69014 - DNA, 323 bp, Heterodera glycines
atttataagcatttgaagggttctcagcagtttccctgcaaaatttggtgagcttctgatcagtctagaacgttgggtgatcaaatgcaaaaaataattaaaaaaaaataatgctggtgtggtaagtgtgaagaactgtgttcctccaggcaaaaaattctaagaaaatttataagcatttgtagggttctcagcagtttccctgcaaaatttggtgagcttctgatcagtctagaacgttgggtgataaaatgaaaaaaataattaaaaaaaaataatgctggtgtggtaagtgtgaagaactgtgttcctccaggcaaaaa

SEQ ID NO: 69015 - DNA, 951 bp, Heterodera glycines
ttttaaaatttttaattcctttttaaacaggccaaaaagtttaggcttaacttttttttcagaaactgatcagaagcgcaccaaactttgcagggatactgaaaggaagagaaataacctattttaaatattatctagtcagttcatttaaataatttttatccaaaaaatttttttttgggttttcggggcagtccccctgaaccgatgcgcccagatttataaggagtccgaatccttcgggaatagcttcgatatacctctactttatttttaccttggatttttgctccccataattgtttgagtaccccaaacggacacttgaaaaaatcgatttttttgttttcggggcagtccccccgaaccgatgcgcccagatttatggggagaccgaatccttccggaatagcttccctatagcctgtactttaattctgcgttggatttttgctccccataattgtttgagtaccccaaacggacacttgaaaaaatcgatttatttttgttttcggggcagtccccccgaaccgatgcgcccagatttatggggagaccgaatccttcgggaatagcttccctatagcctgtactttaattctgcgttggatttttgctccccataattgtttgagtaccccaaacggacacttgaaaaaatcgatttatttttgttttcggggcagtccccccgaaccgatgcgcccagatttatggggagaccgaatccttcgggaatagcttccctatagcctgtactttaattctgcgttggatttttgctccccataattgtttgagtaccccaaacggacacttgaaaaaatcgatttttttgtttcataaatatttttttcagaaagtgctctaaagcgcaccaaattttatttacaacttaattttagcactctgatgctttttctatcaaaaagggagatgaataaattt

SEQ ID NO: 69016 - DNA, 468 bp, Heterodera glycines
atgttcctggcagtgccggtggtcgagcggcaactgcaaaatgatttggcggtcaatggaaaagtttggccacgcggggcattggccgttgtggcgccgattctgattcaccacaatgagcaagtaaaagcacagaagctcaaaatgaatataggtacaaacatatccatccaggtgtaccccaaccattggcactttgaccctgacaatttcctacccgagaaaatggccaaacggaatgccttcgattacattccgttcagttggggcccacggaattgcattggtaattattggataatttaaaatgaattatcattagcaaagattaaaggccagaaatttgcaatgctgcagctaaagattgtcttggcacaccttttctgccattttcatcaaaagaaggtgcgaaattattacgaacgatgaaaagcgtttggatttattgatggatgagaagatcgaata

SEQ ID NO: 69017 - DNA, 654 bp, Heterodera glycines
atgataccaagtatgcttaatttagatgcttctggaaaaagttatggcgttgatcaaaaattgatcatttttatggtgatcaattttcaaccaagtataactttctatatacaaatcgtagaaccactattccaataacaattcggtagcaaattttgtgctcttgccagtgggcttgcccattttctctagaaaaaatttcccaaccccctagggattttgaaaatttccccgattttcagtgtattttgggtgtcccgttcactacaaaggagtgatctgatcaagttgatgtaagagacttttttgatcagcaccaaaagttgtgcaagcatgaattatttcaagtatttaaatgaactataagatagtttttcaggtttgagtcaagacttttttggggcactgtatttctctcgtaaaactgtaacttgtttgggaaatattaaataatatattgaaattataattatggtcagaaaaataattaatagattacaataattatattattaattaattaaattaatttcttccgtactgaaataacgccacccctctgaaagtctctcactgatatttttgtcacttcgtcctagcaccagaaaacccaacaaattcaattggtctttactgttgaatattggaaataaa

SEQ ID NO: 69018 - DNA, 577 bp, Heterodera glycines
atggcatttttcacaatttttctctccatcggaattatttttctcgcgaatattatctcacgagtaagccaatccggttattaattgtttatttatcataattcattatttttcaggcttttccatgcgataataaagtagtttatgtaccaggagaaagatgctgtcatggcacagataacttcaagtaatatttttaattttttaaaaattaaacaaggttaattaacatcgtaaatgtcccaaggcattgaccccgagagtggggatcgagcccggtgactttactaggtagagacgtggttggtcgcgattcctaaaaagtgcaaaaatgaatcatttgatctttgtgtgatttttaaacaattaactattaaattaagcaaaatttaacaaattttgaaaaaaaaaattctaattaatatattgttaatctatatttaaattgtcatttttataaattttattagcaatttaaatgcaagttttatatagtcttcaaatttgagctaaggtcctatttaattcatttcgcaaatcgaaaaacaaaattccaaaattaatcaaatgacaaaaa

SEQ ID NO: 69019 - DNA, 814 bp, Heterodera glycines
atggcacgatgtgtcacgtcgctcgcgtttctcccaattggagacttgacccctggaatcattgctctggacatggctcttcccgacgaacttactcccgtccttgactggtaaattgacaatctcacaaattgtttactatttactgttctttatttattaggttcatcatgaactacacgggtcgtcttaagaatgatggaagccgaacgcgcccgcgatttgacccaaacacttggagcgtttacactcgaacaatgcaaggcgatgaccggacgaataaccattcagaagccgcgaacagacgcctgcagtgctcatttgcctgttcacatccatcgatttggcgtttcattgaccttctgcgaaaggatcaaaagttgtcggatgatgacttcgcgaagtgttcaactggacaagaaccaccgcaaaaggcaaagaaatatcgcgaagcagaccgccgaattctcacgatggttcaaaattatttgccacttaacaacggagacaccaacattttcccaattcatcagcctttcaatcatcattttatcattacctttttgatcggaatttctcgaaattatgaaatgagaccgtgatttgaaacagataaaatgtttgttaattttcttgcttgttttaattaagtgtttatttatattcatagtttgatatgaaaatagcctaaatacgtgaatagggaactggccatagggaaacggtcatagggaaacggcccatagggaaacggtcatagggaaatggtcatagggaaacgaacccaacccactcccgattacaaaaaaaaaga

SEQ ID NO: 69020 - DNA, 671 bp, Heterodera glycines
atgaggaacagaaagtggaagagaaagtggaagaggaacagaaagtggaagagaaacagaaagtggaagaggaacagaaagcgcaagagaagaagaggaacagaaagtggaagagaaacagaaagtggaagagaaagagtaagaggaacagaaagtggaagagaaagtgtaagaggaacagaaagtggaagagaaagtggaagtggaagaggaacagaaagaggaagagaaagtggaagaggaacagaaagtggaagagaaagtgaaagaggaacagaaagtggaagaggaacagaaagtggaagagaaagagaaagaggaacagaaagcggaagagaaatcggaagagaagaagaggaacagaaagtggaagagaaagtggaagacgaacagaaagtggaagaggaacagaaagtggaagacgaacagaaagtggaagaggaacagaaagtggaagaggaacagaaagcggaagagaaagtggaagaggaacagaaagtggaagaggaacagaaagcggaagagaaacagaagtggaagaggaacagaaagtgcaagagaagaagaggaacagaaagtggaagagaaacagaaagtggaagaggaacagaaagcgcaagagaagaagaggaacagaaagtggaagagaaacagaaagaggaagagaaaga

SEQ ID NO: 69021 - DNA, 479 bp, Heterodera glycines
atgagcaccacagacaatcaacaacaacagcaacaaaccgttattgaactcactccagaggaagtggtcgaaatcaaaaattaattcattaaaaaaataaaatgaaaatttgaggagccttttggaaaattgggcggtcaaagtgccaaaaatggggggaacgaagtgacgagaaaacgtagaagcaggtagaaatgatgtagcacacacattatgaattaaatatttaaattaattgttgcagcgccaatgccaacgacggcgatgccaatgaaatgagagaaggcgcaatgtctgagtcatcgtcactcaaatcgaatgttagccaaagtaaaatgaggaaaatggttgaggacccgcttaacgaaatccgaagcggacttatggaagcgatgaacgctaatgatggggacgggtcggaggtggcggacagcggacgaacatccgcagagacattggcaggggaaggaccccaaaag

SEQ ID NO: 69022 - DNA, 358 bp, Heterodera glycines
ttcacccgggcggttgggtgcccaaaattgggattcgtcaaatctacaaggtactcactcgtcagtccatcgtttagcttttttcggagaaaaattcatgaaaaataacaaatccccccattttagcgtgaatatcccaaatttctgcgctccttcagcaaatatgtgctggacaaagcgaacggtacggcattggcacttccgttgtgaatggacaaatgattttgatggcattgtgtaaacagtcaaattatgccaacccgagaaaaagtactgaattccatttcaaatttctgtgccttctttatctcgcttattcgttttcattttatattgcttttgatgtaaaataattttt

SEQ ID NO: 69023 - DNA, 1571 bp, Heterodera glycines
catttgtggagcttagagtcgataggaattcgggacccattggattctaacgatgatgaattagcttccgacctttttcgagactcagttaaatttaaggagggaagatatgaggttggatggccctggcgcccagggggtaaaattaaactgtccaacaactttttcctggcctactcgcggttgtcaggcctatcccaaaaattgcgttccaattcggagtttcgggaaaagtaccaagcaaccataatggagcaatttaaaaaggggataattgagcctgcagttcgtacgggtggcaacgagcattttattccccaccatgccgtcgttacccccaaaaaattgcgcatcgtttacgatgcctcggcgcatgagaaaggaaaagcatcactaaatgaaatgcttattcccgggcccaacttagtcccggaattggcgggcgttttactccgttttcggtcctccgctttccctgtcctgggggacatccaaaaagcctttttggccgtcggtcttagggatgaagaccgagaggtggccaaattcctctggctaaaggatccttccctgcccttaacccatgaaaatttagttgtttaccggttcaagcgcatagcgttcggtgtcaattcttcacccttcctcctggcttccgttcttcagcatcacttaaccttgaatggggaccccctggggatgaaacggaatttctatgttgacaatctgcttctttgtagtgaaacagctaccgaagcagccaaagccgtccacattgcacgccaagtgatgacaagggcagggatgcacctccacgaatttgtggcagccgacccaacaattttgagtgacctccccgccgaagaagttttggtgggcgatgtacaaagagttttggggctttgttggaatttggcacaggaaaaaatattttttgaatttcctgccaagagcaattttccgaccacccgacggggagtattgagcaccatcgcctctttgtttgatcccctgggattgtgcagcccttgtctcgtcaaggcaaaaatgttttttcagtcactctgggattcagccaaggggtgggattagtcaatcggaccaaaattagagaagaattgggttgccattatttctgagtgggactgccccccagtaacgtttgctcggtataccccgtgtggccaggccagccttcagctccatgtattttctgatgctggtcccaattcatttgcctccgcagtttacctgcgctcagcgcttaacggctccgttcgggtctcgctacttttcgccaagtcgcgactgagacccaaaaagttcaaaaacgatgggttcaccataccccggctggaattactgggacttattacggcaattcgtgccaaaaattttgtcgtttctaatttggatttttcgttcgaaaacatttatttttgggcggattctcagatagtcttatcctggttggccagcacggcctctcagcccattttcatcgccaatcgattggctgaaataagaaaggaaaagggcgccttttttaagttcgtgaggtctacggataa

SEQ ID NO: 69024 - DNA, 93 bp, Heterodera glycines
acgtccaagggcccccttcctccatttccttatcatagagttgagctttgatttccgtgggcaacttttcctttatggccacggtcagaaatg

SEQ ID NO: 69025 - DNA, 617 bp, Heterodera glycines
attaaaatcggtgcgggagcaggtcatgggccgtattttgcgggacccagaaaggcaattccgaattgtttggtgaaattgcgggactatcgacaggaatctgatccgacttttttaccgacccgcggcaactcttatacaaagttagctgatgagaaaataggcattttgcctaaattcatcccattcttatgtatttataacattttcagtatccgaactcgcctcttttttgtcgtcctgcccaaccaaaaagtgcacatcccgcatcaacacccgtgcacagcaaacgcttcatccgatccgacaatttgtcaacgtccgacattttgaattatgtatttacagtatactttaaaaaagttaaattaatttttatttaaatactgtataacaaaattaattaattaattttattttgaaaatttaatatgtgataatactagggttgagcggtaccggtaccggtaccggtaccggtaccgaccggtaattaccggtttttttggtgccggtaccgccggtaaaaatttgcactggtaagaatgggggtctgggtgagaaaagagtagggaatggtgaagaaggagaaattttttgagaaaaaaaaaattaaa

SEQ ID NO: 69026 - DNA, 352 bp, Heterodera glycines
ggaatcgaaggtgttgtaagcttttttcctttttcacttgtaaatttatttaaattttcaatttttttagctttttttcgaaaatttttttgtctttttttcggcaggcactgcctctgacaatgttttttatttatttagaaaaataattttttttttcttgttgatttattttaattatatttcatccttaaattttttaataaacattttcaaactttcaccttattaatttaaggcgaattttgccttttttaataaattctcttgtgaaaaggcaaaaaaataggctcttttaaatatgcctatttaaattactttaattgctgtcctttcgcttacgaccatagca

SEQ ID NO: 69027 - DNA, 324 bp, Heterodera glycines
ggaatcgaaggtgttgtaagcttttttcctttttcacttttaaatttatttaaattttcaatttttttagcttttttcgaaatattttttgtcttttttttcggcaggcactgcctctgacaatgttttttatttatttagaaaaataaatttttttttcttgttgatttattttaattatatttcatccttaaattttttaataaacattttcaaactttcaccttattaatttaaggcgaagtttgccttttttaataaattctcttgtgaaaaggcaatggagataggctcttttaaatatgcctatttaaattactttaa

SEQ ID NO: 69028 - DNA, 542 bp, Heterodera glycines
atgccacttgagatggaaaaagcggcctcaaaagttgccgaatgtttgggaagcattgaactgcgcgagccacgcgtgaatgtgtgagttgtactccttctgttttagatttcaatgtgtaaaaaaatagattgctattcttttcttttcggttttcctttaattttttttcttgcctaatcgttgcccctcacggtgttttcttttttagctactcaaatttcaccggcaaatgccacacacgtcgtttgacacaaatgcgcacggacattgctcggcaggtgaacaaccccgtcaagtgggagcagatcatgcagattctgttcaacaaaacaaagtgagttccccccccccccccccggattaacaatgaattttgtgactcttttcaggacgaagaattcccttcgtattttgaggttggccccggccgcgaattgggcacaattttgcaccaaattggcaaaaaagcttcaagaacatatgtgaactatcccgcctaatttgttatttttctgttgttacattggctatttgagaaa

SEQ ID NO: 69029 - DNA, 145 bp, Heterodera glycines
atggaccaacgattggacgacccggtaattaaatgagatgtatgaatcggaattccaccctggggacttgttctaaactctcgtttttcagcaagcattggaagaaaacggaagggataatttctttaatattttattgcattaa

SEQ ID NO: 69030 - DNA, 267 bp, Heterodera glycines
atgtggacaaatttgttccttggctcaagtgacgacgatggttacgtcgttgacggttttttagcaaattggattacagtaaacttttgtatttatttatttattgcaaatatcagattacaatttaatttttcttaataaggccgaaatgttgaatttaacattttaaattgtttatcagtcaaatggagacagagttcagcgtaatctcggcattgatggagaattgctggcagaggacgagtttgttaattcatgaaccaaaaa

SEQ ID NO: 69031 - DNA, 2191 bp, Heterodera glycines
atggcgacagaagaccttaaaaacggaaatttaagcactaaaacaaagtccgaaatggcttacccatcagcgaatgagcgcaatgaagtgatcagtccagccattgctgttgtacaaataacgcaacaccatttgtgcacgactcatagggttgaaaatgccttcaatgcttgtataatcgcgagttgcaattccttgagcctcgtaaagctggcatttcctgtagcgtccatacgaactgacagtacgaccgacaaaaggacctaaaagaaaatggaatataataaaagatggcattttgtgaatgccgtgcctgcgatgatttcatacgttttgtaggtatttgttttacaatgaaagcagaaaaacatcacttgaagcgcagtgtgcttgcgctctaaaaatgaatacataataggttaatttcttcacgatgctttgctacccatttgcataacgcaaattgccaaaagtgcgggaatcgccgaagcaagtaagcgaagaaatggcattgtcaatgtgggaccaagaagcatggaacacaaacgaatgtataacaaaataaaagaaagcggagggcaaatgacatgcctaatgtgtataatgtgtcagatgaaaatgctgcatatttaaatgtaatttaacgtaaaaacataatattgagcaataaccaatgggttgcaattgtccgaaacaatctaatttaattatttgttgaaaagcttatccctctacgaatgtgaaaaaaatcagtttatttcaagtacattcagcagagaatcggttaaaaacccaattttttcgaatttagtgtccaaagtttttgactatgtttgaattagggataggagtccgaaattgatcgggatggatgctgaatctgtgatcagtaataatttttgtgaattgcgcaaatgacgaaaatttacgggctttcagttcgggaaaaaagcgcaaggataaatgaattgtattagtggaaaacattcccttttatgcggcgtttccaaattatagcgttaagaattttttctttttccttcctttttcattatatatatatacctattggctgtttcatcctaattgctgtcagtttcacgaaactcataatcattttacacttcttccctatttctgtttgacttcacttaattgcttctacatttgtttgttttcgctgctttttggtcctacattgacgctttcaattggtttttcagccaacaagtacggcattaatcggttggccagtccatgtttgaaaattcctattccgaagctgcgcaatgttttcctggcatttgcccggctcgcctttttgactttaaggtgacaaaaataagaattattattttttcttttgttttatttcaacgtttatataattttaagattttgccaacaaatccctgcgttttatttggcaaaatgcgtccccattgttcgaatctgaggaattcttacaaattgatcagaatttgcttggtgaaatactcggtcttgatcagttggtgatcaacagtgaatttgcgatttggcaagttgtaattttaaattaacatctattatttaattggtttgtttcttttgcgttaggcactccgttgggccgacgaaaaatgccgtcaaaatgccatcgaatgttccgcggagaatcggcgtgctgcgcttggcccggcacttttcaaaattcgcttccctctgatcccatcagatgcatttgtggagcaaatcggtagataatcagacgtcgtttatcaagcatattttctcttttttgcagttccttctggcgttcagttgatgagtttgtcggtgtttatcaattcaattgccatccgaatttccgtggtgtgcccggattttacactttgaattttcaactcaaattcgaattttcgactggaacgtcgccggggaaaaaattggaaattttgatcatttataagcaggttttcactgaaaattagccaatttatatgtaaaattttgaaaaattttatgggaatttaatccaattcttaggggtgtaaaagtcgcgtttcgcgccaaaaagcgaaatgcgaaacgccaaaaaatgcgaataatgcgaaaggcgaaatgcgaaaagcgaaacctaggcacatccctggtacatatgtgggtggctggacatttcgacaatgaccgtttcgccaatttaaatata

SEQ ID NO: 69032 - DNA, 408 bp, Heterodera glycines
aaaagaatggcaacaaaattatgccgaaatttgtgagaaaattggagttagccattcagcaattagaaaatggagaaaacaatttggaatgagtaaatctttaacggagaaagaaaaaatggagaaaatgaaaatttattggcaaataaaaggagaaatgccgaaaatgagtgacaaggaaattggaaaaatgatgaaaattactagtagaacaattgcatattggaagaagcaatttggagaaggaatagtggatgaataaaaaacggaagaatctaagaaaatggaaaaatttgccgtaaaattttttccgaattgtaaaacctgagtattcattatttgttttttattgcgtaattttttttttttttatcaattcgtgatttaaattttcaaatctgtcataaa

SEQ ID NO: 69033 - DNA, 1316 bp, Heterodera glycines
atggtcaacaaaatgggagtagctgcaaacaaaagcaacctgatcatgcagccacttgagtaagttttattgaaaattcaaatccttcaatatttcttataaaattatttgagcataattagtgtggggtttaaaacgattttgtgtttttaatattttggcaaaagatattcaatagccaataaattttctcgaagcctttatatttataaaattctgtacatttttacaaaattggcaaaaaaaaattattggtgacaataatataaatggcaattaacgaacttagttaaatttttatttcatttgtttttaaaaaataatttaatttattaataaaatttactgctcaactcattaatttttttttaatttaatgcaatattttaagttttgcaagttaattagggggcaatttcaattatttctgcaattaatattatttttaaatgacatgtttgtttgttttttttcatttagatacaaatacgagaatgtgcacatggaaatcatgcacagctgcgccggaggagaaccaaaaaaagtgcatttttttgataattatacaaatatttgtttttctctgaaacataaatatttcaaaaataaattgtaccctttttagggatcaaatccctaatatatttttagcaattctttaattaatttcctgaaattataaatttttactcttttctttattttcctgtgactgtttttcgagtttttgggcacttattttcggcattttcgctcttaattcaaaaatttcaatcaaaattttattgttttgagaaatttcattacattaataaaaataattggaaataaagtccaccaactgaattatttgtccaaattttaattggtttcttttgatcatttatttttacgaaaaatctttgaacaaaaaaaattttaaaaatttatgtttcctcccgtttcagatcagcatccatattccgaccatcgacaaatttgagaaaaatatgatgatcaatgaccacgtcatgcaggtaaatttggtggtactttaattagttatggttttatataatattaatttatttaaaaatatatttatttgttttattgcctaaatttttaatttaaaataattatggaagagacccgaccgatcctaattggtcttctggtttattaaaagatttgccgaaaataaagctaatttgcacataaatttttaaatattaattaattaatttaatttcttttcaattttccgtaaagtttccgctttctcaatttatttctgtaatatttttcagaaaaaatatgaagaatttttaggatga

SEQ ID NO: 69034 - DNA, 59 bp, Heterodera glycines; identical to SEQ ID NO: 52422

SEQ ID NO: 69035 - DNA, 59 bp, Heterodera glycines; identical to SEQ ID NO: 52421

SEQ ID NO: 69036 - DNA, 59 bp, Heterodera glycines; identical to SEQ ID NO: 52422

SEQ ID NO: 69037 - DNA, 59 bp, Heterodera glycines; identical to SEQ ID NO: 52421

SEQ ID NO: 69038 - DNA, 59 bp, Heterodera glycines; identical to SEQ ID NO: 52421

SEQ ID NO: 69039 - DNA, 59 bp, Heterodera glycines; identical to SEQ ID NO: 52421

SEQ ID NO: 69040 - DNA, 741 bp, Heterodera glycines
gctgcatcggatgcaagtgccgccgttgctgtacgcctaacagttggtgagcaatgacggaaaattgcttaaaaaagaaaccaaacaaactcatcaattgttagctcccgttgacaaaccgaagggtacattggggcaatggatgttgggctaccgtatcagttattaaaatttttgtttttcaaaaaggatactaaaactgggataaccccattcagagactagtcaaaaaaaataataataggcttggactactatactaattagaaattttagaatgtgtctgttaaatgcaaaactgttgtgaaaaattgttataactcctttcagagaagagatagaaaaaaaataaaaatagggttagagagcccgtgaacagctgcatcggatgcaagtgccgccgttgctgtacgcctaacagttggtgagcaatgacggaaaattgcttaaaaaagaaaccaaacaaactcatcaattgttagctcccgttggcaaaccgaagggtacattggggcaatggatgttgggctaccgtatcagttattaaaatttttgtttttcaaaaaggatactaaaactgggataaccccattcagagactagtcaaaaaaaataataataggcttggactactatactaattagaaattttagaatgtgtctgttaaatgcaaaactgttgtgaaaaattgttataactcctttcagagaagagatagaaaaaaaataaaaatagggtta

SEQ ID NO: 69041 - DNA, 593 bp, Heterodera glycines
atgacgcaacgcgtaaatgaacttaaactagaggaaggacaagcaacggttgggcatggaagaggcgaatgggcaaagcaattggtggaggagaggaagacaaaagcggaacaaatgcaacaacggaatggtgagaaagaggaaagagtcgggacaggggatacatgcaatctgctgattgggggtcacaatacgctcgaggtacggcccaacccaaacaatatgctaggcgagatagcattggttacaatatgattatgattcaaatatgcaatagtaggggggggggagagatcgacccgcttccatcgaacgaagtccaagggggggggggtaatggttgctttcaataaaaatttgacaaaattcagagtacggaaacagcgaaggtagtgggctcaattgcacatcggcgaatgccatgcgaattcccttgtcatcggttttcgagggtatttcaacggaaggtcaaaaaattgacaacgaagaaaaggaacgaacaaatgaagaggaaacaaagaaacggaaaaaaggacaagaaattgttgaggaaagaaaaggcgaaaaacagcaacataatgtggaaaaggaaa

SEQ ID NO: 69042 - DNA, 4037 bp, Heterodera glycines
atggagcacaccaagcagccgttggacgagtacatggcacagttcaaaaatgtttgtatattgggggggggggtgaaaaaatttgcaaaaaaaaaaaaaatcaaccccctctgccggggtggtcctgctggattcaggacgaaactttttttggtcgagtcgaaatttcgggttccggaaaaaaatttccaggccctacagaaaagaaaattcaaaaaaattaaaaaatttcaagtgaaaatcggctaaatttttgtttgtctcattgtcaggttcgcgtgctgcggctcgaaaaacgcgagggactcattcgggcgcggttgcgtggcgccgcggtggccaaaggccaagtgatcacctacctggactcacattgcgagtgcatggaaggtaagcgccatttttggggccatggacatgccagggatttaccaggattagcgcggtcatggttatggtattgagccaggacagcggaccctgtccaacattttcccaaggtttcgatcccttggcaaaatataggaaaattggcctcgtgcctatgttttcaagccatggacttgcttggattttccaaaaaattgcttacctccccctccatctataaaaatcaggaaattccaggttggattgaaccgttgttggaccgaatacacaaaaacgcgtccactgtcgtctgtccagtgatcgatgtgattgacgacaacacatttgagtaccattcgtccaaggcgttcttcaccaatgttggcggtacataaaaaatgtttttttttcaatttttggccctcaaaatttttaatttttcccttaaaaaatttccataaatttttgtttgtttttttcgttatgtcactcactactaatcaactgacaactccggggttcctttcttacagagataacttcagttttcgtcctttttttatctttacgattttttttttttacaattttaataatgagaaaaattatttttcaaccttttttattcctttttttaatgcggctttcttgttgtgttaacatttaatcgcattttttgctgtgtgttttaggctttgactggtcactgcagttcaattggcatccaattcctgaacgggatcgcaagaatcggcgccacattgacccggtgccatcgccgaccatggtctctaaccgagagctataaatttaaaaaaaaactaaaattattaccaattgttgtaaattgtgtgacaatttgccctggcttaactgagaacagtttgcagcttttttgtgttccttaggtattaattttacatgcttacttaacaaatttaattgccagtttcgtctataacactaagcacgtgggcgtaaaattttctaaaaaaaacctgcccaaacgggccaacccgaaaaatttttcacaaaaaaaaactcaaattaatttcgttcacaaagcccaaatcatgggacagtcctgcccttctttaaaaaaaaaattaaaatctcgaggcctaaacagcagatatttttaaatttttaattacaggccggcggtctgttctccattgaccgcgcgtacttcgaaaagttgggcacctacgacccgggcttcgacatttggggcggcgagaacttggagctgtctttcaaggtcatctcacaacacaacaaaccaataaaaatggcttttttcagatttggatgtgcggtggacgccttgaaattgtgccttggtcagcaaatgtcgaaaatttttaggaaaaaattataattttcagcgaatttttggacaattcttgaaaaaaacttactaatttgtcataaaattttgaaaaaatcgctaggaaattttacgaatgataaatctgagaaacaatgaatttttccgcgcctactaaaaattgcctaaagtaggaaaaatccgaaatgctaattaataatttataacaatgttttaatttagttcccatgttggccacattttccgcaagcgaagtccgtacaaatggcggacgggcgtaaatgtgctgaaacgcaactccattcggttggccgaagtgtggctggacgactacaagaagtactactacgagaggatcaacgaccaactggcacgttttttgaggcacaaaaaaatcataaatttttccattttatagggtcggggaagaaattttagaaattaaatataattttgctttttagaccgcttttttgcgatttgtaatcaaatttagtccaaaaatgccaaattttgagaaaatttacgagaaaaagggattttccgggaccagcggagaaaattttgcaaatttgagtgcaatataaatgtgcatcggttttatgccaattttttaataaattttaatttttgaaaattttttcagggcgattttggtgacatcaattcgcgaagggagctcagagaggtaaatgttgtttgcttttcattttataaaattttaaaaattcgatttttcagtcaaaatgaaaattggatgattaaaaaatgaaaatgcatacgaaatttaaattggacgcaaaaatgtttctgaattcatacacttgtgttgtttaaaaaagaggtaaaatcaccgattttaaatatgtaaataggtcccacagtaacgaggggttgaacctgggtaacctttgtgggtaaatccaacacacagaccaccgggacagaaatttaaatttttgaattttcgtttgaaataacccgcgtttttgccaaactgatttttttttaattgtaaatcattaaatttactaaaatttctttttttaagcgactccaatgcaaatccttcaaatggtatttgaacaacattttcccggagctgttcatccctggcgatgctgtagcgaagggcgaggtgagtcgcaatcctaaaaaaatgtgttttaaagcgtccgatttttccgaaatttacgctattttttgggcaagcctataaaaacatcaatttaaacccatccttatagaaatgcaaattccaaaaaaaaactcgaacattttcatctcttcctcttgaaaattcgggtaaattttccacggctttgcttatttttttgttaaaattttcacaaatttgacccaatatcctccaaatttgtttttgtttaaattttattgtaattacggtcttgctttcaggttaatgtactttttaagaaaattggaaaattcggactcttaaaaacaaaatttttataaataatacacgcaaatttgcttatgcttcaaccgctttttggaaatgaaaaactgtctttatctttatataatcgcaaaaaaaaattcgaataattttgatactaaaaaattccatcattaatttgtcaattaatttcaacgttatgtgagatgccaaaactttgttgatcctcctattatttttgttttcctggttctgtcggcttcaaattgcgctttctgtcgcccggtctagacatttttaagtcaaaatttagaaatttcatgtcctttttcttttctttttttctgtgaatgtttttattgctttttctctttcgatgtttccttgccattctgttggatttttaatttcaaaattataaaaagaaaatttggactttttgggtttttttaatttgtttataaaaataatgaaaaaataggtttccaaggcttttcagggtcactgttcacgaatctctgatttttttttgagttccagcggcacgaaaataaaatttaaaaaaaaattcgtcggtctttttccaaattttaattattttcaatccaaaaaatggaaaaaaattttttagggattcctactttcattcattcattcattcgttcgttcatttgtcagattgccaatggtgcgatggtgaagcatcaacggttgtgtctagactgtgcgatcaaaaagcgtgataaattgaagccggttggactgtggccatgccatggacagggtgggaaccaggtgaagttttggcatttccatggcgcccccgccttgcagattcgcaatgggtttgtgccgcgggacggctcgggcaccgcgtcctgtgtggacagcgcg

SEQ ID NO: 69043 - DNA, 858 bp, Heterodera glycines
atgtcgaacagtttctttgtgtttttgcccagcaatgtgtcggattatccggacaatcagcccaacaaatttcgtgtccggctcccaaagcctttgcattttaacggctcgtgggtgtgcggactgcacagtatcagttacccctactcatggtcaaccattggcacattggatgcgcagtggattgacattcacttcaccgaccgcagagcgaccgatgaggacagacagcgggtgatccgagtaccggtacctaaggcatcgcatagcagggttgaacagctcagagactttttggcggtaacattgcgaaatcgcagcggagcaaaactgttgccaacaccccgtgaggtggaagcgaacaggaaccgaacaaagcttcttgattctccaccaccactgaaaagagagaaaagagatgtgtcatcaccgccagtgtttgacgcgagtggaaaacgcctccaggactctcctcctttgtataatataaatgaagacgaacgacttgaggagtcaccgcctccttttgaagaaacaaaaatttcggcggcaccaccaccgcctgtcacaagccccgttaagccaacaacaacagtcaaaacgcccgctgctccagctgcagcaccttccgcaactgcaaaaccagcaacgcagtctacagtaacaaaacaggcaccccaatcgccaaaaccaacagcaaagcctactaccgccacccctgttaagtcaacaaccgcccctccgccaactgtaaagacaacaacagcccctccgccaactgtaaaggcaacaacagctcctccgccaactgtaaaggcaacaacagcccctccgccaactgtaaagacaacaactgag

SEQ ID NO: 69044 - DNA, 228 bp, Heterodera glycines; identical to SEQ ID NO: 65316

SEQ ID NO: 69045 - DNA, 228 bp, Heterodera glycines
aatttatcaaaaaaagagatagccatttttctgggataacctctaaatataaaaatcctctgtgaaataaaatggcgattgtgcacagccctccgtctcatacgcaagcgcttttgtgaggtataaaatttctcaaaaaaagagatagccatttttctgggatagagtataaatttaaaaattccctcaaaaataaaaggtaaattgcgcaccgccctccctatcatg

SEQ ID NO: 69046 - DNA, 218 bp, Heterodera glycines
atgaggggggcgaaggcccccctcgaggccgcgaagcggccgagtgagtaccatgggcgcaggaaaattattaaggaggagggttcatttttattgatttttgcaaaattaattcataaattttttttcagaaactgctctgaacgcgatccaaaatttatttacaagttgaataaggcactctgactcttatattatcaaaaaaggagatgaataaa

SEQ ID NO: 69047 - DNA, 358 bp, Heterodera glycines
gtgaacacacatccggtatacgactgcgcgtacactgacgaacgcgtaaagcctgggcactgctactattatcgggtggtcgctgtgaacgaggccgggctagataaaccgtccgatcagtcggagttggcatgggccaagcccaaatttgaagcgtcccgcttcgaattggacgacattaacggcaaagaagtgattgattgattgacaatgaattgaaacgggaaaatctctttccctccctactcggcccaaaaaaaaatttttttttcatacatacaattagcatttttcaaaaaaatctctattttgcaaatttcaaaaaaacgtctataaacttttatgataaattattaaa

SEQ ID NO: 69048 - DNA, 2532 bp, Heterodera glycines
atggttgatgaattaatatctagtacaaagattgacacaaacaaaaactcttatggaattgaggatttaatcgtaattcaaaattattttgatactaaattcccgaatagattcttaattgtggctttttctaaggtaaaataaataaattaattttttaatgaatttttttaggaacatgggttaaaaccaatttttaaaggacaaggccatagagaacatttgatatgcgtctttaacgaaaacggacattgggatggtaaaaaaaattatttttaaaataatcaaaaattttaggtttaaaaagcatcaaacaattttttaatgttaaatataagtattgtgtttattgtgaacaaactttccaaagcacaactaaacattcaattaaatgcatcataaaatgcagccgatgtggatcgtggggtaaaatattcaaattaaattcatctatttgaaaatttaggaaatgagtttccgtgtaaaaatagtctaatgaaaccagaagaatgtaataaatgcaaccgtctgttttataataaaaaatgttttcaattacacttggcccgtgcatgcaaattatataataggtgtattaaatgtgacaaagaatatcagaccgatcacacccatgtttgcggtaaagttgcccgaaatttatgtactttaatgttattcaggtgaaaaaatatgcaaagtatgcaaaactaaacatacgaagacggaaagttgttatatcagaaagattaaagtaccaaataaattgccgaaatatagaattatatgctatgatgtagaatgcagcgtaagtaattgacgataaattttaaaaattttatatttagacagataataggattaaagaaggaaaatattttggattttatgagcataaaattaattttatttctgcaagatacacgtgcagcatgtgtgaaggagtaaacattaattgccaaatatgcgggccaaaagggaaccgacataaaaaatggtgtacaaatgaaacccaaaaacctatgattgaatttttaaaatgggtattgtcattcaaacaatttaacacctattgttatgcgcattatgcaggtaaaagcaaaaaaactatgcgttttaatctataattttaagggagatatgatgcccatttcgttttaaaagaactaacaaatttgggatatgcaccacaacttattatttctgatttaaaaatttatcagattaaaattgataaaatttatttcagagatttttggctactttcacaaataaaattagcagatttgcctaaaacttttggcatgaattgtgcacctaaattatattttccttataaatataattctgaaaagaattatggtatgtttgcaacaaaaaaactctaaatttagaaaaatataaagaatttttataggtaaaattctcccaaatttgccaaacatcgctgattattatccagaaaaatttaataatattgagttcgaaaaatttaataagtggtattcagaaaattatacaaccccctttttattaggtatcatgttattaattttttattaattttaaatttagaagaacagttggaaatttattgtggtcaggacactgagattttactccaagctgtcttgcatatgcgaaggatttttttggaaatcacaacagataatgaatcacctaatggttttgatattataaaggtataataattttaaaaaaattaaaaattattatttattaggatgtgactaccatcgctggagctgcgatgcgtatatttagggctaaatttttaaaagaattacatttgccgatagtccctgaaaatgggtttgaaaaacgtgatactcaaagtgtgatagcgactaagtattttgaatggtttatgtataaaaatgccgtcaaaggtcggcatgctggaaatgggggagaaattgaaattagcggtactttgaagcatgctatgaaaataaaaaatatatttagggtttaaagtagattttatatgtgctaaattaaaaacaatcatagagttccaggtaggcaatgaaccctctctattctttttaacaaaaattttagggatgcgcatttcacggtcgttatttcggaaaaattttttttataaaatataaattttaggttgcccaaaatgctttaaatcattccatgtttgtcccaatggaaatacggctgaggaaaattttttgaagacgggaaacagaatgcaaaagttaagaaaagttgcattagaatataaattaaaagtcgaagaagtttgggtaattttttcttctatttttttatagaatttattttaaggaatgtgagattaaaataaaattgaaccctaaaaataaatcttatgataaagaaatgaagaatttttttgacaattgccctgattaaggtattaaaaatatattaaacttttactagaaaaatttagggccaattgacccccgtcaagctttttccggtggccgaacgcaggctttttgtttatattcggaaatagatgaaaaaagtgaa

SEQ ID NO: 69049 - DNA, 1975 bp, Heterodera glycines
atgcaaaagttaagaaaagttgcattagaatataaattaaaagtcgaagaagtttgggtaattttttcttctatttttttatacaatttattttaaggaatgtgagattaaaataaaattgaaccctaaaaataaatcttatgataaagaaatgaaaaatttttttgacaattgccctgataaaggtattaaaaaatatattaaacttttactagaaaaatttagggccaattgacccccgtcaagctttttccggtggccgaacgcaggctttttgtttatattcggaaatagattaaaaaagtgaaataaatatcgcagatatcatatcactttatcccgcagtatgaaataaattttttaaagaaagaaaacgattttaggttaattattttactccctaccccgttaaaacgccaaaaataatcatcccaaaatcacacgacgttttgtgggcactcccggacgatataccatataacggtaaaaaaaagaagtaattaatagtaaaatgaactttttaaaattatttaggtattctaaaagtaagaattatcccaaaaaaagatttatcacttcctctgcttccttattatacggtcagaaataattaaacaacaataatttttaataacaattaaggattcaattttattttttactaattgtgcaaaatgttgtaaacaagcaaagccaaattttacttttgcaaagaatgtaagaaaatgcaaacatactgatgaagagcgcagtttatatggggtttatacgagcattgaattaaaaaaaggttaaaagaaaggtagttaaaaaaaattatttttattttagcattagaactcggatatgtgatcgataaattttaccggtaaatccctgaagaattattaactattaaaataatcttagagcttatcactttgaagaatttgattccgacctatttaaaggatatgtacgaaaatttctcaagataaaggtaaacagacagacctattttcatattaaaaaataaaatataggtcgaggcatccggttggccttctaatctccataataatgagcaaaaaaaatcattttatacaagaatacaaacgtatttttgatattgaaattaatcctgataatatgtatttgaacccaggattaaggttcatcgcaaaattggtaaataatttgaaattttctttaaaaaaaacgaaataatttagctattgaattctttgtggggtaaattcgggtgagcatcatttaattattattataagatttttttaagaatgagaaataaattgtcaaaaaataaaataatcaataaaccgtcggaattttttgaaatgttttatgatcataaaatagaaatgtcaaagcctataataatgaacaatgacacaataagagtaatatacagagagaaagatggttatattaaagaacatagtgtatcaaatattatcatcgcattatggtaaacaaatcggtattataaagtaataaatttattaaggactacttcgcaagcaagaattcatctttatgggtggttgcaacaagttactaatgataaacaaaataagctactatattctgataccggttaaaaaaaactaagttcaacttaaagtgttatttttttagatagtgtcatttacaaacatcccatgggcaaaactcctatagaatttggcgaattccttgggtaatttcaagcatttttttaaatataattttttagtcaaatgtcacatgaaaatgctggaaatagtgtattagaatttgtatcaggtggcagtaagcaatattcaattaagtataggaatgacaagaatggtcaaatatggtataaaacgaaaattcgcggtaaaatatgttatgttttcttgtttaattgtgctttctttagggataacttttaataagaagaaccaaattgatcatgatgaatttaaaaacatgattataaattatgaaaata

SEQ ID NO: 69050 - DNA, 93 bp, Heterodera glycines
atgccgtcgaattttattaagtatcagagttttttgagtggaaataaaaatgaagtattgacaattaaagaattgattgattgccgtttaaaa

SEQ ID NO: 69051 - DNA, 564 bp, Heterodera glycines
atgacacaagaaaagctgaattataacaacaccatgctgcttctgctgggccttttgttcgtcgtgattggccaatgtttggccgaaaatttgcctacaattgtggccaagaaaaattttgatgccaccattgaagcggaaaagctgtctgcagcaattagggaaatgaatacggtaggtaaaaaaagaaaattaatttttgaaattttgttttagagtaatatcattgcgattatctgttccatcaacaacaaccaggtatgatagtgtgaagtagagcccggcgcagaacgggatcctgcgtggggattttgcgggattccagtctataatcccctatttttggaaattgcgggattcaaactaaatcccctattattggaaattgcgggatttcgcgtgattggtcccacgagagtctgtaccgcaaaattaaagtaccaatcccccgctgagggataagaaaatttgaaacttccagatcctcgtgtgaagcttaatttcaaactttatttatgaaattaaaccacccttcacaaatggccacacaaaaatttcaataaa

SEQ ID NO: 69052 - DNA, 982 bp, Heterodera glycines
  unsure (1)..(982): unsure at all n locations
atgaaactttgcttattattcttttcaattgtatttttaattattaaaattgaaattggagcagaaaaggaaaaagcggaacaaaaaacatttgaagaaatatttggagaaaaatgggaagaaaaagaaaatgaacagaaaaaaagagaaattattcaaaaatactatcaaattaaagaaaggatcaaacaaaaaggaagaaaatattcatcaaaagaatggaataaaattgaattgaaaatcgcaaaaaaattgngcacaaaacgacataaaatttataaatggatcaaagaattaggaatatacaaatggcacaacaaatcaaaaacggatgtacaaaaaattgaaattgtgcaaaaatttaatgcaatgaaaaatgaatataaacaaaatggaagaaaatattcgacaaaagaatggaagagaaattatgccgaaattgggaagaaaattggagtaagttatgtaacaattcaaaaatggaagaaacaatttggaatgggtgaaggaatgacggagaaagaaaaaatggacaaaatgaaaatgtattggaaaatgaaaagagaaaacccaaaaatgagtgacgagaaaatttcaaaaatattgaaaattaatcaacggaccattttcaaatggaggaaacaatttgaagaagaattaaatgaggattaaaaaacattgaggagataaaatttcttttcatttattctttttttcacgataaataacatttattttctttttacatttttaggaaaaaaatttatttcgcgaatttttataatttttatttatcttaaaaattattttaaaaaatagatttctattagagcccggtagaacaggatcttgtcatgatttgcattcactcaactttttgcttcgctcctaatccaaggccttgtcttcatatttgttttttaatccctatattgtatagccttacatatttttgatttttcttaagataattaagattaaa

SEQ ID NO: 69053 - DNA, 864 bp, Heterodera glycines
atggcaaaaggcgaagggagaacggacgcagtggaggaggacgaattggcgaaggggaagacaaagatgcatccgaaatgggcggccggaagaagtgaagcggatgaaggggaggaagatgaagcagaggatgaagcgggtgaggatgaagcgggcgacgatacgcgtattcggatgagcgcatcgtttcccttcgccccattgagattccattcgtcgatcacatgaaaagcaccgactcgaactgtccacagtgaacaccttcaaccgatcaattgtgccatgaatgatcagcctatgcttttgctttgcttttgccattcaactgactttttcgcggacagttcagtccgggaccgcacaattccgtcgatcggatcaatctcgaattgcatttggtgctgttgcgttgtcccttttgctacttcctcatcgtctgctgctctctcgtcttcctcctctctgttcccctccttttcctccatttttctctcttcttcacagtattcctccacgattttgtagcgaattgttccgccgcctccgtccccaatttgtccctcttccgtttgatcggcattcactttcacttcccaaaaaagtgatttgttctcagaaattcggacaaattggacgggcggagagaggagaagagaagcggaagagaacggggaagaaaaatggacgaataaagtgaggaggacggaagcggaagaaagggaaggggacgagacgagcacggagagtgcgaaactccgatcagaatcagcagcaacggaggaaacggaggaagcggaggaagggaggcgatcggagggagggagacgaagcagacggacgaagccgaagccagacatagtatga

SEQ ID NO: 69054 - DNA, 274 bp, Heterodera glycines
atgtgtgggaagaaagaaatgattgatcgacagaacccaattgacattttgataagcgatggcgaatacggcgacgtaattgttgattattttggtttgtaactttctttaaatgttagaattctcttgttttctcgtattattacattattcagactttgcgctttcgaatgataccaaaaagatagggtttgttcgaacatggaaaaagttattgtataaaaacccgggattgtcaattgattggactcataaaggtcgattggatagatag

SEQ ID NO: 69055 - DNA, 768 bp, Heterodera glycines
atgaaaagcgatgaaaaaagaagacaaaaacgaatggacaacaacaataataacaatggggtacggtgagaatgaaatccggcaacaagcaaaacgaataagaagcgaagagagatggccaaccgcgaggcacgggacatttgtagagctattatatttttttgagtagagcgggaccgggaattttgggcttaaccgggaccgggaccttttcgggttgaaaaaccgggaatttttggctgggaaaaccgggaaaaaacccgggactggtcccggtcaaaaccgggacctcggtactcagttttactcagttgtccgtgttttggtcccggtcccgctctactctaatatttttcatactgtgctttctttgagaattgccttatgtgtgccatatatgcctaaccatatgtttgcagcactgattctaatcatatctttttcatctgcgactttgtatttgatgatattctttttccacgaatgtcgctatgctttttccaattctgaaccgattttgccgctgtaagtgatcataagactgaattctgtgcgaattgttgttgctgtatttgttgttgaacaaaagcatgcataaaaatgtttttcttgcattctaaactcagttgagcctgatgaaatgggtccattcagtctgaggcatatttttctggccatatcttttttttacgtgataagccgaagtgacataagtatgaataatcgtaatatttaaaatttatttatttgaattttatttgataaata

SEQ ID NO: 69056 - DNA, 771 bp, Heterodera glycines
atgcccccaagcgaaaatctttttaatatctcgttaaatgttaatgatctggaagcgcggccgctgcctgagccccaacaacccgaacagcaacaacaaccgcaacaacaacaagcagaattattgattcagattggggatgttgaggatgcattgcttctcaacgttcatgagggagaagaaagaggagaggaagcagaacaagaagaggaagaacataatgttgagcaaattgaagaattgatgcgtttacatgccgagtatgtagcgcaaattttcaatgaaattgctgatgatgaaataaacaatgaatgatttttttgaataatcgataatgatgaaaaaatttccaatgtgtggcaggataaaaaactatggattgatctttgagttttcagcagggtaatcaattgtattgatcacgggcgtcgctttggcaatataaattgctgttccctagtcccgtttgtccagttatttcatttttgttaaatatccaatgcgtcaaaaatcttctccccgaaaaattgtcaatcccgacaacaacaacaacaacaacaacaacaacaatgttgcttctagttattctgaccgcctaaaaaagtttgcaaatgacgaagtaaagaaagcgctcattgagatcgaagaagagagaaacaagaagaagcaaaaacaacgccaagaaaagcaataatgtggcaaaaaatccttactaatgattattgtttttcacattgatcatttttcaatatctttcatatttctaaatca

SEQ ID NO: 69057 - DNA, 3286 bp, Heterodera glycines
atgtttcatgacctacaagaaggtcaatgtgtgttcaatgattacgtggcacgtcaacgtttccacgggccagaagcaagtcatttgttgcgaagagccggaatcgacgtgaataaatacatgtacactttggaagacgttggacggctacaacaatgggttgatgaacattacggagaagggcagattcgtctaacagtttttgagaaggaacaacagtaccggattgttttcaaaggtagtgatttgtaatggaaaaaaaacttttctaaaaaaaggagactctggtagggctgcaagatttaacttgtgtttattgctggagaacgcgcactttcattatgttggacgtattgagcaactgtttcgttgtgcaggctattgtgttgattgtgaacggagagtgactcgaaagtaccatccgcaagaatgtaaagttgtttgtcgactctgcctacgtttcggcgttgattatccttgtcaacaacaacaatttcctgatggatcaaacagcaaacgtcagtgtttgcaatgtcaattcgtttttcctaatttggattgttataactaccatttgttaaatcgcgcacctgcaaccttggatggacgaagtggacgacgattcagcccaatctgtgaatggagacgtatttgtcggatatgtggtggtatcatttatgccactttcgagcacatatgtctgcgaggaattcgacaacagcaacaacaacaacaacaatgcctacagtgctggggagaacatggtcaagcggagccctgctttattcaaccgttggacgagtttcgagcaccaagaaggtccaaccagcagctacaacaacaacaacacgaacaacgccaagaacgaacgattgaaaatgatgttgatgctgatgaagatgaagacgacagtgaatgtgatgatagtgaagaaaacaaccggggccctattaatggtcggcgttctcgtaaactcaaaccgataagatattgtttctttgatgccgaaacctctcaagaccaaccattgcaacttcgaacccaagttgctcaaaagcatgttccacttcttatcattgcggaagtgatttgcgagcgttgcattgctgccggaattacggttcacgctggcgttggacagaaagcgaatggttgtgtctgtggcacgccaacggggcctagaggacgacagtggtgcagccccccgtttcgcaacgcgcccggcgacaacaccgaaatgcctatccatattacatacaaccagcggcgccttttcttccactgttttgatgacgcaaccaaaaatcccgtggatcagttacttgacttcctaatctcaacggggccccggaaatcgcacacgatttgtctgtcgcacaatggcgggaaatacgatatgcaccttgtattggaggcactccatcaacggaatttaccacccaaacggatctgcacaacgggcctgaagatttactcaatgacgctcaaaggcaatcttcaacggcaagtaaccttcaaagacacgctcaattttttcttctgtgaactcgatgctcttccgaggaccttcagtttgccaaacaacattgcaacgtcgaagccattctttccatatttgtacattcgtcatcaaaatttgaatgttcgcctgcaagggctacccggtattgaattttatcagcccgatcacatgaagacggctaaacgtgaacaattcttgcgatggtatgcagttgaacgcaccgccgccaaatttcagctcagagaacaactgataacctattgtgcaaacgatgtggcaattctacgcgagagcgtgctgaagtttcgcgaattaatcatggaaaatacgagaggattggacccatttgtaattgcgtcaacgggtgctggtttggcgttggccacgtttcgacgttgttttcttgctcgcaacaagcttgtcaacacacctgagggcggatatttacgcggaagacgagcatcagcagaatctgcacgatacattcgcatgtatgagttgatgaatcctggtgtgcatgtccagtctgcacagtggagcgtgggagaagcgcacgttgatgacactggttaccgattggatggcctccatgttcgttcgcctccacagcgaaatgtggcgatagagtacatgggttgttattaccatggtaattgcgtagtgaggggccgagttaagctttaaaatttatcaggttgccccaaatgctatccaaacgaacgtcagcgccatttggctggtggaaggactgctgaagagctgtatgagcagacacagcggcgtttatgggagttggagcacacgcatgggcttgaactccatgttatatggggttgtgagttgaagaaaaatttgcgcacaaatccgatgcttcggcaactatacaatgatgcgtttgtccctcgcccgctggatccacgtgaagatgccctacgtggaggtcgcacagagccatttacactgcagcacgtttgcacccaaaacgaggaaatcattctcatcgacattgtaagtggatggtacattatgcttttttaagatgtattacgttttgaggtgagcctttacccctatgtgatgaaagcatttgagtttccggttggaaatccacatgtaataacgcgagaggttctcttatgtcctccaacggccccgttaccctggcaaaattcaaattgcaacacttttcgcggacttttgtttgtttgtgttttaccaccaaatccggatgttcgccctctacgaattcctctgcttccgtaccggaccaatgatggacgactgacttttcctctctgtgcacgatgcgctgattttcgccaacagcgcccatgcacacacacggaccgtttacgctcatggaactcagcgtatgctgtttttttctttaaagtctatgccaaaaaattcaggtatactcatgtcgaattgaacaaagcactcgaacttggatacacagtcacggatctatttgaagtaatctaatcaaatgaagatatatttcatcaaaaaaaaataggtttggcattatgatgcttgggatggtgaaatgtttcgtggatacatgaacacatttgtcggtatgaaagttcaagcgagtgggtggcctgcgggctgtgaaaatgagcaacaacgggctgagtacattgttgatttcgaacgtgtcgaaggttttcggcttgcgcgtgaaaagataggaaataatcccggtctgaggatggtcgctgtgagttgaattgctcaaatttatttttgaatcaatca

SEQ ID NO: 69058 - DNA, 777 bp, Heterodera glycines
atgcttttttcgttttttctattccaattttattctgttgtctgctcaatagcgtcaaagagaagtcctgaaccatggggggataccctgaaatcgattgacgacaatgccagagatttcaaatggcctgaccgacacgaaaagggtacatgggcagcagtcgccgcaaccggggaaggctccagggctaaagctgaaaccggtgtcaatcgagaggaaggcagtggtatggaggaggaggaggacagccatattgtaagagcggaagcgttgagtgaacgtgaaggcggtgttgcagttgctgcagccaacaaagggcaaacccaaaagacgagtgatgatgataatgattatcatgatggcgcgcaccagcaagtcgtcgtaatggcacgtggaggtgaagacgcccgtgcaaaagctgaagcaagcggaggtccaagaagtgtcgttgaaacacgaattagtgataaccaacgagggggagaaagattagctttgggttcggccattattcatagacaaggaagaagaagaggaggaggaggaggaggtcgaaacagaaaccgtcagagaggcaaagaagaacaagggcgaggacgaagacctattgccaacgataaatttcacccccgccccccgcaatatatggagctaaacaatcgtcagaaaggaaatgagcaagtcacactcaacaacaatgtgcacacaatgagccctgtcagttacccatatttgttgaggaaacaagttggaagagaatgtttttgtacctgctga

SEQ ID NO: 69059 - DNA, 766 bp, Heterodera glycines
atggcaactgattggattcacaatgcctaccctgaatatgaacagtctggaggaggaggaggaggaggagaggaaaacaacgagtcgaacgacgctgccattgctgatggcatcaactggctaagagtcattgacgaggaggatgaagaggagcagaacaaaagacgcaatggaaacacaatgaaaagcgatgaggaggcagcggcgccggaagtggtgaatgcttttctgttactatatagatttttttaagacaaacaactccaattcgacatccaataaatgtcactgtgggcgcagcgggccatacagccagcagcaacaacagcatgaagcgcaagaaattgaaatgccattgattgagcatttgtgtgagcgctacaagtgctcagccaaggaacttcaagtgttattgcaaaatttgaagacacgccgccagatactacaatatatgcgtttcaatgtacgcctgcgtacaaactatctcagaccggccatccgcaactttgtcgtacaatgtagtgatttgtcgactctttcagcaactgatgcttttgcaatgcgtggttatttgggaattacggtttgtttgctcatgcatttggtggctgtataaatagaaaaattaaaggtgcgaatctattattacgttaaacacggactccgcctacggcacccaaaccttccatgtgtagtgcgtttgggtggaggtgaacattacgacctgttcccgctcgagtgtttgaatgttgtgaagcagaattga

SEQ ID NO: 69060 - DNA, 725 bp, Heterodera glycines
atgggttcgattggaggggtgccagtgaacacccatgcaggggctcccggtgaagaaatagtaaagcaaaaggctcgggatgttggaggaaaattgttaatggtattggatgatctaatgattggaattggccaaaattttttggacacaattttcacacgaggctcacacaattggggggtcagcgttgttttggtgactcagcacatgttcacgaaggagttgcgtatcgccaggaataattcgcactacctagtgttaatgcgtaatccagcaggagctttacaggtacgtaccttagccacccaattattccctggacgtgctgagcattttatggaggcatacagggacgcgactgggaaacagtttggctatcttgttgttgatatgcatccagaaagtgaggatttgttacgactgaaaaccaatatatacggagaaaatatgggcggagcatccacaatttatgtggcaaaatgagaaagggcagcagcagcagctcaaataacagtggcgttcctatacaaataggcccgctaatacacaaaaatattgattttctaagcaaatttaacgcaaaaacacgtgcttttcagacacaacgacgaatgttacagggggcgacaaacgaacaattattatgttttgttgagatatgtctgaacatattgaaaggaaaacttccaataaggcgaaagtcgcatttgcgtaaattgggcgca

SEQ ID NO: 69061 - DNA, 3926 bp, Heterodera glycines
atgcgtatgttcctcgtccctgaggatttgtttaattcagtgataaattcttcaaaggcaccggcagatggaacagcacttggtcttgtccgccagcgtctgcaccaaattgagcgaaacagaaatatggatgagaatgaacgcttagcgaactatcaccaagagtttaaaagactgaacaaaattgtacgagaacaagaggaacgtccaatggatgtccgattacaaaacataaatgaaattatgagcgccattcctccccctccttcacctaatctatctgggcctctacagacttttcatcctcctcaaaacacgggaaccaaaacaaaatcggtagcatctactaagccgtttaggatcgtaaataaaaggaaaagcataaaagagaagttgttgagaaaaaaagcaaaaaaaagttattttaatactaaaaatggtgatgagaatgaagatgatgatgatggtgaagatgatgaatggggacgtaattcagcagaaaaagaggatcaaacgatgcgacaacaacaacaaacatcatcatcagcctttccttataaattaaggtcgggttccgccgctgagggtgaagaaccacaaaaaggcactaaaaaaagcaaaaacgcaccgaaccaaaaactcgtcgcaatattagagcatattaaaaagaatgcggaagccctaggtgttactgcggatgggaagattttgagaagggtttcaaccagtgaggtagggtcacaaacaccgtcaacatacaaaacaagtaatattgaacaaattgtgtcctatctattgaaccagaacatcagcacgggtatcgctcgctttaaaaattttccagttggattaaaagattttttggatagagcataccaggatgattatcttaaaacaaatttggtttccgacagaccttatcagtttgggagtggagttgggagtttaattggtttcaaagagaataaaaagtgtgaaaaggggataaagagttttgtcaattttaagccatcattatggtattagaaaaaaagaagcgaaccattttggaccacctttacaaagatataaattcgccggtcagctatacaagcatggttccattgttgaatgaggcgcggaaaacaaacagttcgatcaagcgcagggatgtggaagaatatttggctgaacagcccagctacactctgcatcgtcaagctattagacgattcaaacgtttgcctacgcttgcttcgggtttgcataccgattggcaagccgatcttgcagtttttgaccgtttagccccacaaaataaggggttccgttatttgttggtttgtgttgatactctgagcagacagttgtttgttgagccagtaaaaagtaaaaaaagtgaggacatggttcatgcatttgataggctgtttgcccattccaaatatattccatggaagttggtaacggaccaaggcctcgagttcaccgccaaacgcatgcaaacatatttcgattcaaagaatgtcaagcatttttgcatgtacacgtccccacaatttcatgctggtatagcagaaagagcaaatcgaacaattaaggaacgattatttcgttattttacggcgcgtcaaacccaacgatggttggatgtcatccaggatattgtgaatggaattaaccattcatacaattcatcaattcaaatgcgcccagttgacgttacatttcggaatgcggacacgctaagagagaaattagccaatgaggcagctatgagtagaccaaaacgtctgcctcgtttccatgtaggggatctggttcgcattgaaaaacataaacatgtgttccagaagggttatgttggccgttttacgagcgaaatattcaaggttgacagtgcggatgaaggccgttcacctgtcacataccgaatcagagatgcggataatgaactgatcaaaggtcgtttttatgcttcggatctatgtcgcgtccgcaaaaacacccaccaggatggtgaaaaattatatgacattgagaaagtgttgaggaaaaagaaaaaggatggggtagagtatgcatatgtgaagtggaaaggttataacaaacagcataacagctggattccaatcagttcaatcacccataaaaatatataaatatatagggaaaaatgataaatcaaaaaacaaatgtccaccatttcgtcaaattctttttatgttgttgttccctcgaacacgaacgttgaagggaaccggacgaactctttccgtgtgcgactaccacgaaaaatacaatttaattcggaatgggatgtgggcctagctaccataatataccctcactcatggccatcattgggcaccactgaagaccagtttatagagcttgaatggaaaaccggaaatgtggtgaccatcccagtcccatcatcaaacattatacgcccctatgagttgagcaaaagtttgtacagccttttggatattagtagtgagcatttgtctaaccaggttcacgatgctcagcaaagctacaaaagagcaatgaacgcggcgcgaaaacatgcacagagagagtatttgaacatgaaaagtgatcttgatagagctaggccgaaaaggagcaaaattagcgctggtgatgacgctatcccattgttgacttcacttctggtcgctgtcgatacaattgcagatgcactcatatacaatgaagacgggacggcaaactctatgctaactgctgacgcattgcttgatcgagagaagcgtgcagcaaccagcaatgtcccactgcgaagagacagtgatagcgatgaggaatatcaaaaaaaattggataactattttatgaaaatacgagacactgatgatcttcagctttatcgagagttagttgccaagcatttggagctggagttgaacaaattgactaaagatcagctctcgctcaacaactcaatcaaggaccttggaatggatgcttggattcaggcctacaggaaagtgagcagcgtattacaattcatttttgacgttcaacaaaataggttcacattgtcaatcaataccaaatttattaaacgagttaagctttcggaacaattggcctacattcttggttttgctccccaaaccgagttcaagcgaagtaaaaatccagcaaaatttatgccagatatgagtgggggagtttccacacttcatgtttacgtccccgacctaattgtgccaatgatgattggaaacgttatagcacctataatgcgcattacaacaatacgtggtaatccggatgaaatggttgaggaacaattttattcaatacaatatcaccgtgtgttgcaaaaagaaatttctgaaattttggtagaaattaggacttcaagcggtgcgcttatgccttttcagtatggaacgtgtacattaacacttcattttcgaaagtcatcatatttttgattgcgaaaaaatatgaacactgtggagcttaataaaattctgacaagaaacccggccactaggtatgcctatcgtggctgctttccagcggataaaattatgttcagtccacgctcaagtttattgccacagtgttttgtggctaacattgataccagtgatatgattggaactcattgggtagcattctattgtgaccggattggtcgtatcgagtattacgattctagtggtgtttggccaccgatcagtgagcatataagtaattttttatcaaaattcccatcagttcgctacaaccgggtccccctgcaatcaccatacgctcgctcttgtggtaaacatgttatttttttcctacaccatcggtgtcttcagtgctcatttgatgaaattgttcaacaattatggctcgcaaagcaatcacctgacactattgttaacacctttgcacgagaaaagatctttagaatataa

SEQ ID NO: 69062 - DNA, 661 bp, Heterodera glycines
atgacttcactctacgcttgcggaggacttcactatacgcggcggaggatttcactctacacttgcggaggacttcactctacgcttgcggaggacttcactctacgcttgcggaggacttcactctacgcggcggaagacttcactctacgcggcggaggacttcattctacgcgacggaggacttcactctacgcgacggaggacttcactctacgcggcggaggacttcactctacgcggcggaggacttcactctacgcggcggaggacttcactctacgcggcggaggacttcactctacgcggcggaggacttcactctacgcttgcggaggacttcactctacacttgcggaggacttcactctacgcttgcggaggacttcactctacgcggcggaggactttgtcttcactctacgccagcggaggtacttctctctctctctctctcgacgcggcggaggactttcactctacgcctgcggaggtgtatcagcgtgcccggggattgaacttccactgacaaagtcattatccaatacactacacgggccgctgacaaattgcaatgcaaataatatttcaacataatttattataaaaaataattttccccgtttttttaaatgaaatgggcaccaatttcacaatatga

SEQ ID NO: 69063 - DNA, 1484 bp, Heterodera glycines
atgccagctcagctgcaaccagtttcggttcagcaggctatgccagctcagcttcaaccagtttcggttcagcaggctatgccagctcagctgcaaccagtttcggttcagcaggctatgccagctcagctgcaaccagtttcggtccagcaggctatgccagctcagctgcaaccagtttcggtccagcaaacgatgccaacacagctgcaacccgtttcggttcagcaggagcaaccaacacagcagcaagcgacggtgtggcaaaacacaatgcctattctgttgaatcacacattgccggttcagcagcagcagcagcaccagcagcagatggtgttgtagtagaatgttgtggcaacttgtacaaaggcaactcttacacaaaaaaaaatttaatttaatttttttcttaaagtataattttcagtttttttattttcttaaaaaagattattttccaatttcaaaattttttttttaaaaagacattttttaaaaaaatttgtatggtatttgatcactgagaattgccgatgtactagcctttgtacgaattgagtacccccccccccctccccagcaaactgtgccaaatcaacagcagcaacagcaaattcagctacagccaccggttcagcccgctgtccagcagcaaactttgccaatgaatgtacaaatgccaacggcacaatttgagtcatttttggttcaaatgccacaagcaccgccacctgtgcttcaaacacaacagggccaaccggctcagcaaccggatgatatgtttaggctaattggagaaaatgtattatcaataatattaataataataataataataataataataataataataataataataaaggaagaagctgctccgggcatactttcgacttctggtcgaagtggtggtggtggtggtggtggtggtgggggcgtcaatgggcttgatccatcaatggtacaggggaccagtcaacaaattgtacaaaacagattttaaacaaataattaaaaaataaaaacaattagctgacgcgacgacccaccccatgtccaaacattctgcgtggcaatggtactaggaatggtggacgttccggaggttgaggaggaggaggaggaagaggagggcagggagggcaaggaaggccaaatgtggtgaattgataattttttaagtaaattttaatgattctgtgaaagtaaattgaataaatttctcatgttaaaaaagggaattcattagaaaatgtttgtttttttttgagatgggtaatcgtcatcttgcacgatctcctcctccaccaccgccgccgccagggctaacgcgcaccgaattaacccaaatatttcccgttgttgaagttgatgaggcgatagctgaagaaatttgcactatttgccaagaacatcttgtggccacctctttggaagccacagtcactccgtgtgggcactatttccattttgactga

SEQ ID NO: 69064 - DNA, 701 bp, Heterodera glycines
atggatttaattctcgccactgattggatgaataacgcttacccggaaatggaacaggacaaggctaacatgtcaccaaaggaagaccctagttggattagtctcattgatgaagaggaaaagcgggagcctatagctattgtgcaaatcgatgaggaagaggagaaacaaagaaaaagtttgtcttttagtgttatttttttttaattaaaatttagatcctcccggaaattgcgactgtcgagagaagcgtcgttgctttattccgcttgttgaccacttgtgcaagaaatttgagtgttccgcccacgagttacacgtactcttcaaagacttggggaagcgtcgcgccatcgttgaacacctacgctcttctcaattgtgcacctcccacctgcgtccatcgatacggaatttcccagttcgctgcaacgatctctccattttggatgctcactcagtccctgcataccgtggttacctcggaatcacggtgtttattctttttattttttttatttctcaaaatattttaggttcgaatgcactattacatcaaacacggtattcgattgcgtcattcaaatttgccttgtgttgttgaatttggcggtggagatcataagactttcttcccattagaagctttgaatattgttatttagatgttttctgtatcaaattgtactgttgtttttaaa

SEQ ID NO: 69065 - DNA, 972 bp, Heterodera glycines
atggcacagcgcgtgggtttcacgcagataaagtacacgcgcactccagcggaattccatcaactcttggacgatccaacattagacaaactggactttgtccacgtctccgagcatatggaccgagttgttgtcaggaagcgtcccgagtttgcaaaggcacccctcacaaactgtcttccagtcgcaatatacgtcacatcgtacgcgagacttcatctctattcatacatggaaaaagtgattgcactggaaggggctgagcttctttattgtggtttgcgaatacaatagaaaaaaaaatgttagataattttagacactgactcaatctactacgtgaacaagatgggtgggcggtgtgttccggaaggcgaggcacttggacaaatgaagcgtgagcatgttgatcgtcgaattgtggaatttgtagctggtggtccaaaaaattatggaattcggcacacagcacgagacggaactgatgagcgggccaacctaaaaatacgaagcttcagattatcgtacgccactcaacaattactgaattttgaagcaatgaaggatctgacactggctacatataacattgacggacctatgtcagtttttttttttaattttcacaactaataattttaaattttagtgatgacgtcatcgacaacgatgatctctacgtgtacggaggaggtggagcccatcgttgcatccgagtaactttcccgcaaattgaccgaaatgtccgttctgacgtatacacctgcgaggcccacaaagactacagacctttctacgccaagggccgtgttcgaccgggaatgcaaacacgaccatttggatatgtggaggatgtatcacatccaccaatacaacctacggctgaacgaagaaagagaacattgattgaccctgacccaactcgaccgggttattctggatggttttgaaaatttattatcaatgaataaa

SEQ ID NO: 69066 - DNA, 2152 bp, Heterodera glycines
atgtacacactggaggatgttgcgcaactccaacaatatatcaataatgagaatggggtaggacaaattcgccttgtaatcttcgaaaaggagcaagaataccgtattgtcttcaagggagaggggtaatatttttttgtttatctaaattaaaaaaaaacatttgaagaactgcagcgcaattcaatttatgtatcctgctagaacgaggacacttcaactatattggacgaattgcacagctcttcaaggttcctggatactgcattgactgtgaacggagagcagacgcgcgttaccatgcgattggttgcaaggcggcatgtcgtctttgttttcgattcgggggtggatacccgtgtcaacgagaacgggttttaatttgagcttatttttttcagttataaaatttttttagttgtctgatggtcagatcagttcacgaaaatgtaccgaatgtggtttcattttcccaaatgacaactgttatgaatatcatttggcgaatgatgcccctgctccaattgatgggcgcggacatagacaacggcgttcactttgtcaatggcgacgtttttgtcccacatgcggtcgtgttgcctattttggaatccatcaatgcccctcgatacgtcgtgctattgggccagttgattgctttcgttgcaaaggtccacatatgttggatgaaccttgctacatccaaccgattggtgttgcaccacctttaccaatgcttggtcctgttcacaacaacgacgacaacaacaacaacaacaacaacaacaacaacaatgaggatgaaaatgatattgatttcataatcaacaatctgggaggagaaggtgatgaagatgaagatgatgttgaaaacggggatgatattaatgatgatgatgatgatgagcgagatgaactgctaccacttcgtctttgcttcttcgatgccgaaacatcccaggagcgcccactacagctcaacaaccaagtcgcccataaacatgtacctttgctaatagttgctgaattcatttgtgaaccttgcattcgagctggaatcaacatcaacgatgggcaaggtcagcgcgcacccggttgcgtttgcctatgtggaagagtgagaggtcaacagatgcgtcaatggatgtcaccaccttttgtaaatgctcctggggataatactcctcagccggaaggagctcctgtattcaacaaccgtcgtttattttttcattcttttgataacgaagcttctgaccccgtagaccaatttctcgactttcttatccatcatggatcaagaaaagcacacaccatttgtatcgctcataacggaggaaaatacgactttcatctggtactcgaagcactacatcgtcggagttacccaccaaaacgtttgtgcaccagcggtctaaaaatctattcaatgaagcttcgtggcatgaatcagcggcgaataacttttaaagactccatcaattacttcttttgtgaattggatgcactcgtaaaaagttttgatctgccacaacatctcgcaactgtgaaaccattctttccatatttgtacattaaacgacaacatctacatcaacgactcgatgggcttccgcctatcgaattctactcaccaaacacgatgaaagctgataaacgggaaaaatttcttcgatggcattgtaataacaatggtgatgctcgtttccaactccgtgagcagctgatcatgtactgcataaatgatgttgccattcttcgagaatccgtgttgcgctttcgaaaactcatcggagaacacactcagggcctcgatccctttttggtgtcttcaacagctgctggtctggctttatcaacgctccgacgttgttttctaccgttcaaccgtttggttcactcacctgagggaggatacctccgtggacgacgagcttccgccgaatcccgccgatacatccggttcttcgagcttgaaaaccctggagcccaagtgcagtgcgcggattggtctgtgggagaggccaacattgaagacacaggctatcgtgtggacggcctctggcgacgagagcctccgcttcgtccactggccatcgagtggatgggttgctactatcatggtgttttatcgtcttaattttcaaataaa

SEQ ID NO: 69067 - DNA, 551 bp, Heterodera glycines
atgagaaacacactgagaaacacgagaggggaagtgtgtgaaatcaggttcttgcctttggaggacaatgagcgtcccgaccttgtgatggagatcctcattcaacaccttctcgaccgtgtcttagaggggcacccgagtccaatcctagttggactgcagctccaaccgccggggtttgatcgaccctacgtgatccgacttcggccacctgaacaaaacaacgcggcagcacttgctgcagctatcgaaagactcaatgagcaatcggccgctggaatagacttgctttctggaacgaccgtcaccaaagttctcgctgtgtggcctttggaatccgttcgtgtcgatgctcagcgagggggttgataaaaaaaaaatttaaaattttgataaaataaaatataggtgcgtgcgatttggataacgaacatcacttatcacacaacgtgcagtcaatagttcgtgttgtgaaccccaacgatcgttactgcctcgcgcgtgctgttcttcttggactttgtgatcgtgagacacaaatgccaaattga

SEQ ID NO: 69068 - DNA, 746 bp, Heterodera glycines
atgcccgagacggacgtggagcgcatttcacgcttattcgtcgaccatgtaatttttcaaaaatttaatcttttaagcacaaaacgcccactgtcagggatcacacatactggcgctaattttttttgaacaaatcaaatataccctaccgaattgtttttccaaaaatgaaataggccctgcacttagaaaatcaagtttttctagcgcaaattttatcatgagttatagctttttaaattttcgggggggggggggggtgtgacggcctctggggagaaaccaaccccggccatgataaaagtggctgaacttgtccagtttgttgtccatcaaactccacggttttgactatgcttcaattaactcgctcccgtgctttttcattatattttcctcccattttccaggtcattcaatttctcgaccccatcacgaagctgggtgccctgcgcgagaagtaccggctccattttgtcatcaccaacgaacagttggcccttctccgggactttggcgactaccttcgttagactgaaattgacggactgctcgctgtcgtcccccccccccttcccttaaatgtgcatagtattatcccatgtttgaccgttttattcgtacttctctgatcagctttgtatatgcactaattttttgtttgtcctctgataattactttttttgtatgtctttccatgatttaatccctccttaaatgcttcttgtgcgttcatttaaataaa

SEQ ID NO: 69069 - DNA, 543 bp, Heterodera glycines
atgaaacggtctacgagaaatgcgtcaaaaagagaaaataaaaaatcccgaagttcggattcgctaagacaagaaaaacaccaagaaaaaagtcaaaattgtatcaaaaaaatagatgaatatacaactagtagtaaaaagtttcaactattaaggtcaaaatcaaaatttgtcgttcaaaatatagaccaatgtgataatcccactaaggagttagaagaatgtataaaatcgtcaattaatgaagctatcgaagatgctaagagaactttgggtggcgcggataaagccggagtagttatttcttcagaaatgttagatcaaggagacataattgtgccgataacacctattagctcaaatgtggcagacgcggtcttcaatcaatttatcaaagtagaacaaagtgtagtaagaaaaagtcttaacatttatggaacaccttttgtcattactgtaacagttcttaacattaatggattaagaaaaaaaaataaagaataaattattttttttttttaatttataaaaaatgtgaataaa

SEQ ID NO: 69070 - DNA, 3194 bp, Heterodera glycines
ctctaccacaacaacaaccactttgacggcatcaaaaccctgtccaaattcttcaataaacgttactattgcctctcttgtgaaagcgtctacgagcgcaaatctcaacattcaatgaattgctcttcactctgccatggatgtagggaggttggcgtcgactacccatgcgagccacaacagggatacttcaaaaaatgtttgcactgcaacaactatttctataacaacgactgctatgaacgccacctccacaaggatttgtgcaccaaatttcagcgttgcgaagattgtggggtaatttataatgttaaggttcacggaaatgtaggccaccaatgcggagaaaggttttgtcgtctatgtaagcagtttcatttaaaagaggaagatggcgagaacccctgcaaaagctgcttcatccaacccctaaaaccccataaacttaaaccatacaggatcatcgcatacgattttgaggcgacacaggataaaaaagtaggtaataaattcgaacacgaggtaaactttgcagcggctaccgttatttgcaccgaatgtatcaacaacgacaactggaacaaatctctacaaggaaatccctgcaaaatttgtggcccctaccgcacaatcaccttttcacccttcgactacacggagacaacagtcgaccaaaaaattgtcacacaacaaccactaagtgaattcgtccagtggcttcttttcgaccacaacaaaaagtttcccacggttgcctttgcacattttgggggccgctacgacatgacgatgatcatcaaggaggttttagcgcaaggaattcacaacccggacatcatcaaacaaggaaatcgtctctacgagctgaaaatcaaggacaatgaacattgcccactcacataatgcccatcaaactatctggcctcatcaaatcttttgggcttcatataaaagataaacaacattttccacacatgttcaacaaatcatcaaactatgacaacattctctcccatcttcctccacgtgaagaatactgtcctgatcaaatgaaaatccccgatcaacagaaatttgacaaatggtacaataataattacaaccaaccttttaaccttaaggaaaaactccctgaatattgttgcaatgacgtacaaatactcacccacgccctcgtcgaattacgccgggaattcaaacaactgacacaacggaacggaaaacacgggggaatcgacattctttggcaagccatgaccattgccagcgcttgcgtcaagaactttgcactcaatcatttgaagcccaactcgctcgccatcgtcccggagaaaggctatacaccacaacagaaccaaagtgcactggctatcaaatacctcgactggtactcccacatcaacaatgtcaacattcaaactgcacactcccgctatggtgaatatgtctttaaacgtgagggtcaggtgtatcaagtggatggttatataaaagggactaatgggaagagggataaaattattgaggtaaatgggtgtctgtggcacgggtgtgaggagtgttttgaggacttggacgaagagacgaagatgccgaacggaaagacgctaggacaattaagagagaggggagtaaggaagcacgagattcttcgccggtacgtcgacttggaggttatttgggaacacgaaatcaatgagcagctgaagaaggacaagcaaatgagggagtttttcgacaactggaaggaccactcaccaatcaaaatcagagacgcttttcatggaggacggactggaccaatgaagctactccacacagctaagccgggacaaaaaatcagctacaaggacttcaccagcctttatccgtggaccaactttacgaccgactatcccctcagccacccaaaaattatcagctttagattaaatgagcaaactgtcaactggcgagctccttccgacaacccctacaaaggccttctcaaagtcttgcttctacctccaaacaacaacattaacgtcaccgttatgcccataaaatttgatgagcgactcctctttccactctgtgaaaagtgcgccaaacacatcaccaatgaacacccgaatggcctcaaagacgacaactacagctgcccacacttcaatcccaatgaccgtgcctttgtctctacctgcactcaccttgaattgaatgctgccttggaggtcggctacaccgtcagaaaactcttccatgtcctgcaatacgaccaatggagcgacaacatcttcaaatcttacgttagcgaaatgatggccctgaaaatccacgcaaccgggttcccgtcgtggtgcgagagcgaagaggagaagaaggaatacattgaggagaaccgtcagcgatttggaattttgttagacaacgaaaagatgaaggctgaaccggggaagcggtacatcgccaagctttgtctcaactcactctggggccgcttctcgatgcgaaatctactctcaaaagcaataatcaacaatgacccttgcgtcctccgccaatacactgacgacaagaaaatcgaattagtggacttggaaatgatcgacgacgacaacgacgtattcatgctcacctacaaaccaaaagaggagtttgtcgacgaaaataaatactccaatgtcgtcatctccctcttcacgacatctgcagctcgcctctacctctatgaagtgttaaaaaaagttgccgacacccccgactgcgaaattctctactttgacacggacagcatcatctacgttcaccccgaggaaaacgacccactaccaacaggaaagggacaccttggagaactaacagacgaaaaccccgaccacaatatcttggagttcattagtgctggctgcaagaattatgggatgaagctgcaacgcaaggacaccggtgaaatagaacacgatttgaaaataagagggttcacccttgatgcacaaactgttcaaaaaattcattacgatactgttaaggaccaaatcttacgctatggctccgaagacccccctgaccctatcattgtaacttacccccattttattcgccctaatctaatccaaggcaaagtgtatactcattccctcacaaaacattatcaacccatattcacaaaaggtattattaatgattcattccaagtcctcgaatttggttat

SEQ ID NO: 69071 - DNA, 408 bp, Heterodera glycines
atgtcttctacttcttcaaagaagactctccaatctgtagtggagcaagtaattcaacaagacgcagaaataaaaagcagtgagaaaccactaaaacagaatgagttggaaaagagtgaacggaaatcaacccacaccgtatataacttgcttgaccacaaacgatccttttggaaattggcccgaccaaagtttgcagtgatcaactttctctgcccagggtgtcgtcgaatcaactataaacacaaggaccagttcaagttgatgggagaagatgagttccactttacccaagtgatgtgtcccggttgcgtaaagtacaatatgatgcagactgatatctataacaaacacacaaagaacccccactaattgtatttaagattaaattttaacattatataatta

SEQ ID NO: 69072 - DNA, 995 bp, Heterodera glycines
atgctctggacattgatgagcatgacgacggatcaaccgaatttgaaattgtctcgctcaccttgtacgataaaagcccgtgcacaatttgccgtgagactcggctatggtaccacattgggtaccgcgccgagcatcgccaaattcgcacccactggggcgtcaacctttatcttaaagatgaaggttgcatagcacacgtaaagattgaatggtcaaaaaaaaataatttgttttattccaggccgggtttagcctaggtcggcttctgacctttgtcagcatttacgccaacgaaaacgggcaactcaatgttcaaaaggccagaagagtgtaagaaaccgtgtctatcagcacaaatttgtttgttttttgtaaatttagcgtttttgcgagggccggcgagcaagactttgcccttcaaggccttatcgacgggcaatgtgtgccgttggtaacataattttaataagtgtagcaaaaaaaacaaaatgcattcgctttaaggagcgtctcgcggatgtcccgccggcaccagctgctgtcccaccggctgccgccattgccccgccagccgttgtcctaccggcacccgccgaagtccctccggcagacgtggagatcgaattggacattgacggcgaacaattgacaaacttcccggcacaacaacacccgcaacaattgttcccggcacaacaacaacaaccgcagcaattgttcccggcacaacaccaacaacaactgctgctgccgcctcggccgctgatttcgcagattgtcgaccgtgccgttagcgtgctccaaatgcattttcacaacatgtctcctctgcggcccgcttttccgccatttttcatcaactcgccgtttcctcggcttcagggcgccttggaactccctcctcttcaattcggtcagcagcagaaccaacatgcatttgcaccggcactccaaattgccccggtcgacgatgccccgacgcctcaaccgtt

SEQ ID NO: 69073 - DNA, 2547 bp, Heterodera glycines
atgcagcagaaccgccgaccttcgaattcattttggccgagacgaagcacagggtgagtacggtatacttacctgtaaaaatgatattttctgtcctttttttgcagtgccaacaattgtccacaatgttccattgaaggtacaaaagggacaaaaaagtgtgccaatcactgcagatcatctccaagctacggtaacggtcactgtgtcccacttcctacggtaattgtgcttgaaactgttcagcacccttcaaaaatgccgagtgaactccattttatggtatggcaacaacagggcggcgcacttcaaaagggactgaacacgaccatggacactttcacgcaaaaggaattggaccacggctttgtccgctttgaaattgacgaggcgaagggcgtgccggtaagtcaaagaattgctttttgccagggccaaaatcaacatcgacttttataggacacgaaaatgggcttccattttctgttaaacgacggtcgccatcaattggaccccgaatttttcttgttgcaatttgacgaaatattgccaagcaaaaaagaggacggcacaatgccaactcagtcgacattgagcagtacaccgacaattcatttgcctgtgccaagtgtcgcaattgggccaaaaattgaacgaaacgccaaactcggcactgcgccgggtgtccctgcggtgatcggtcctaatttgctgaaggcgaccggcggagggaaaataccggtcgaaaaagtcattttccacctgacaaagcagccaatgcacggccgactggtgaatggctttccgagaactgctcgggactgttgtccgcttctgttcagctgctcaacggctccctggggcggttggagcggttcagtcaggcggacatcgacgcgggtcggctgacgtacgtggcgaggccggacattggcgcgtggagccaacgcgacaatttccaatttaaagtggaggaggaggcggaaaacggcatcggaaggaatgcggggacgagcggagaggggacaacggcacaacgattcagaattgagagcagctactcaaacttggccgaaggggcgccaatcgacgcactgataccccggggaataatcaccgttagcagaggtaatgggatggccaaatgggagagacaatggcaattgtggccaagggaggagggatttggacgaaaggggagaccatgccaagggagagattttgattatgattctgttggtcaaatcgtagtccagaaatggctattgagtttagccaacccccggcacaattcgttgccctccgttccgttttatcactccgcccctatttatttatgtcaattattttttttatttaaatttccaatttttcttttcggtggttccgttgcactgaactcctcccatttgaatctgaccaaactgtccgccgttattgaggacgaaattttcataaagctttttcgcgcgcccgcctttggatggttggagagaattgacgaagcattggcaattgaaagcggcggaggaacgaattttggcggattagcaaacggagagaatgcgggagaagaagaggaggaggaagaggagaagcaaaatggggacaaagtgagaaaagggagttggtggagaggaaaaggaaaaggaaattcaaaatgaaaacggaaaatttaaaaaaatggaaaattaaaatcaaatgggaaaaatttaaaaatggaaaacggaaaattaaaaacggaaagagttcaaattgccctaggccatctttccccagtggcgttcgcccctttcggccgaacaatttgcctctggccactttttggtgttccaccaaaacggaacgacaacaaatgtagcagcagcagcagaaaaagcgggaaatgaagacgcatttacgctggttgtgtacagcggaagggagccaaaccaaagactgaaattggggatgaaagtgcgaataacggacgaaggcactgatcagttgaaggtaaaatagaaaaggcactgatcagttaagaataactgtaaaaagctctgattatttgagggtaaacgataaaaagcactgataagttgaagagtaggcgagcattgatcaggtaatagaggcactgatcactggtcagttaagggttagctagctataaaagggccgatttgtggtgatcaaccgaatattaaaattcaaaattggaaggaaaactcggcctaaattctctgtccatctgtccccagtttatttctaacatttcactctcgataattaattccgtattcattcagatcgactcttttgtgccccacttgcgtttgctgtccggtggttcggtccccttttatcctgccgattttcacgcgttccatccgtcgttgggtccctcccaaattgtctatcgaattgaccaattgcccaacactctccgccttagtctgaacaatttcagtgagtcatatttatccaaaatattcaaatcaaatcaacacatttggacactttcgaaggtttgccgctgttccgacaattcactcaattggacattga

SEQ ID NO: 69074 - DNA, 1316 bp, Heterodera glycines
tgtcgttacctcggttgcgtagccaacagatggctaagcgtcagattggagttcatcggaaactgtatcgttttgttcgctgcgctttttgctgccatcactcgtgggtcgacaagtgccggcatcctcggactctccgtctcttattcgctaaatgtattgtgacatttttccaattcgatggttcatttccatttttcagatcacttttgcgcttaatttcgccgttcggcagattagcaaacttgaaacgagcattgtttctgtggagcgagttaaagaatacgcggatgtcatccccgaagccaaatggaaaatcccaggccgagaaccgcccgttgggtggccaaaccatggcgaaattcacttcgtaatgaatttttactgtaaaatgtttgatttgacagttttgcaggatcactactcgactcggtaccgttctgggttggatttggtgctgtacgacattcacgctaccatccgaccagcagaacgtgtcggcatcgttggacgtactggggcaggtcctttgtcggtgttcttttcgtttttaatttgacaaatttaggcaaaagttcgctgactttggcactgtttcgaatggttgagcctacgggtggtcgtattttcattgatggcgtcgacattactcagttggggctgcatgacctccgctcgcgtctgaccataattccgcaggcattcgttgactcacaattagtgattattcgccctctgtttattttaggatcccggcctcttctccggtaccctccgttttaatttggaccctttcaaccatcacacggatgccgaagtttgggaagcgcttgaaaattcgcacttaagtgaatttgtcagcaatttgcctgcaaaattaatgtattcgataagtgagggcggagagaacattaggtaaactttgacaaatatgacatttgcttcattttttattaatttttaatctttcccttagcatcggccaacgccaattgctgtgtttggcacgggctttgctgcatccgagtcgcattttggtgttggacgaggcaactgcttcagtggacatggctacggacggtaaaaacattcattcgtcgttcggcatttgctattttgaacatttcttccctctgtttcagctcttatccaggacacaatacggcagaagttcaacaactgcaccatttttacaattgctcaccgtctcgcgaccattatggactacgaccgcgtgatcgttttgcacagagggcgaatccaggaattcgacacacctcaaaatttgctggcccttccaaattcaatcttcgcga

SEQ ID NO: 69075 - DNA, 56 bp, Heterodera glycines; identical to SEQ ID NO: 52733

SEQ ID NO: 69076 - DNA, 250 bp, Heterodera glycines
ccataaatctgggcgcatcggttcggggggactgccccgaaaacaaaaaaatcgatttttcaagtgtccgtttgggtactcaacaaattatggggagcaaaaatccaacgcagaattaaagtacaggctatagggaagctattccggaaggattcggtctccccataaatctgggcgcatcggctcggggggactgccccgaaaacaaaaaaatcgattttttcaagtgtccgtttggggtactcaaaca

SEQ ID NO: 69077 - DNA, 468 bp, Heterodera glycines
gtttcaaatatcgtaagattgtttgataaggccagacaagagaaggcaactgttggtaccaagtttgcagtaaaaaaatgacaaaaaagagatagccattttttggtcaagaattttttttgtttgcgtttcaaatatcgtaagattgtttgatagggccagacaagagaaggcaactgttggtaccaagtttgcggtaaaaaaatgagaaaaaagagataaccatttttggtcaagaattttttttgtttgcgtttcaaatatcgtaagattgtttgatagggccagacaagagaaggcaactgttggtaccaagtttgcggtaaaaaaatgagaaaaaagagatagctattttttggtcaagaattttttttgtttgcgtttcaaatatcgtaagattgtttgatagggccagacaagagaaggcaactgttggtaccaagtttgcggtaaaaaaatgagaaaaaa

SEQ ID NO: 69078 - DNA, 346 bp, Heterodera glycines
atgtggttgacagaatttctggaaggttacggtattcccaaggggattcttggtcatgtcatagtttagatcttatctttaaatgggacgttatagttttaggcaaaataaaattttgttctaggaaatataaatcataatgtggttgacagaatttctggaaggttacggtattcccaaggggattcttggtcatgtcatagtttagatcttatctttaaaaatgggcgggattttcatgtgtagtaaatatttccgctttaccaaaaatgtcaacaaccaaaacaacgaccaaaatcttgatgacttactactcaattaatacaaaaagaattttaaaaattaa

SEQ ID NO: 69079 - DNA, 347 bp, Heterodera glycines
  unsure (1)..(347): unsure at all n locations
atggacnatcttttgggttagaaaaataaaaaattgaatttttataaatattttaagaattcaaatacactttggactcggacttttctgctgattttgataatttgtttccatttgtttctctgaaggaatttacagacgaaattgaggcaaactttgggcccaatttcaaatttgaacgttccgctctttctgttgaggaataataatgatcagttgttaccattttgataaactaatgacttttttccattttgtttccgttttttaaattttttattcaattaacacttaaacatgttctcattttcttgttaatttccgctaattgaaattgaccaaataaa

SEQ ID NO: 69080 - DNA, 117 bp, Heterodera glycines
atgctgtttgcgggtgttaattgttctaccaatattcgttttgcaacattgtgtgtggaagtgtcgccctgtgtgcataatgatgcagggaacgaaggaagtcctctagttatgaag

SEQ ID NO: 69081 - DNA, 496 bp, Heterodera glycines
atgtatgttaaaagtatcaggtaaactagaaaagtaccgaaatttttgcggaaattatttcttttatgactccaaaataagtgtattaatattgaacgctcttaaaatgttcgaaatcccttgaactttttctatcggttcatgcattttttgcttaaggaattcgattttcgcttgctccttttaggtatttgtatagaatggtcaatttttttaattacctctcttttgggttcgttttttacaatttttctttttgtatattatcgtatcaaaattacagtgcaattcgtgtgctgctggaaaagtcgcccagcttgctgcatgaacgggacccgacaaacggaaacacggtaaaaacgaaatcgcaaaaaaaaaaaaatttcaggttgccttaaaaattttgatttttttttcggtcccattttggcattcttcatttaaaccaatttattcttcaactgtgtgcttttttgaccaaaattatttgatttag

SEQ ID NO: 69082 - DNA, 743 bp, Heterodera glycines
agaattaaagtataggctatagggaagtattgcggtcgtcaaaggtctccccataaatctgggcgcatcggagcgggccttctgccccgaaaacaaaaaaatcgattttttcaagggtccgtttggggtactcaaacaattatggggagcaaaaatccaacgcagaattaaagtacaggctatagggaagctattcccgaaggattcggtctccccataaatctgggcgcatcggttcggggggactgccccgaaaacaaaaaaatcgattttttcaagtgtccgtttggggtactcaaacaattatggggagcaaaaatccaacgcagaattaaagtacagactatcgggaagctattcccgaaggattcggtctccccataaatctgggcgcatcggttcagggggactgccccgaaaaccccaaaaaaaattttttggataaaaattatttaaatgaactgactagataatatttaaaataggttatttctcttcctttcagtatccctgcaaagtttggtgcgcttctgatcagtttctgaaaaaaaagttaagcctaaactttttggcctgtttaaaaaggaattaaaaatttttaaaaattttattcatctccctttttgatagaaaaagcatcagagtgcctaaactaacatgtaaataaaatttggtgcgtttcagagcattttctggaaaaaatatttatgaattaattatgcaaaaaataaacaaataatgaa

SEQ ID NO: 69083 - DNA, 567 bp, Heterodera glycines
  unsure (1)..(567): unsure at all n locations
gatttacgaaatttcattccaaatcgttcacgcaaacatcgcgtgctgtggtctagcggtttcggcacgcataaatcggcgtcatcttgatggcatcaatccggaagacctcaagctgggctcacttgtgacggtggttgttgccaacattccacaggactcacttgtatcaatgggatacattctgcctgattcttctccgttcaaactgggaacggaaagaagagccgaaacacctgaatttttcggtgcagttgcgtgcattcgtcctcatctgttggagtggccaaatctgaatgcaaacatgacgcccaaggtttatccatgctccgcggagcttactaaacatcatgttgtggcgatggagcatgttgttggagcagctctccagattgagatggagcgagaggttgacatgatgattgaagcacgctttgaaggaagggctcggaagttcgatggtgctgattgtctgattgtcttgggttcgagatcgaagaaagaagtgaatgagttggccaaggtctgggagccggagtcccaagtgaaggtcttcaaagaaattgn

SEQ ID NO: 69084 - DNA, 982 bp, Heterodera glycines
atgcacgcgttttgcgctcgagctatttatcatcgggcttgtcaatccaaagcgaaacaacaaagatggtgttttgaacgaataaagggcataggttattttgaagaagagtcaaagaacatgcagcaataagcctgcaaaatctaataagtggaaaatacatgagtatagaatttattttcagaaagtgtcaacagacttttggaaaaatatatttgcaatttatcaacaattttgagaagtgagttagaaatgataatcttcacgattcaaaccaattttcgttgctctaattaaccgcgataaaaacatccgaatcaattaaatagcttctgagatattaaggtttatcataaaatttcatttaaaaataaaccctcaattattggtatgaacgctactttccaaacatgcacgcgttttgcgctcgagctatttatcatcgggcttgtcaatccaaagcgaaacaacaaagatgctgttttgaacgaataaagggcatactttattttgaagaagtgtccaagaacatgcagcaataagcctgcaaaatctaataagtggaaaatacatgagtatagaatttattttcagaaagtgtccacagacttttggaaaaatatatttgcaatttatcaacaattttgagaagtgagttagaaatgataaacttcacgattcaaaccaattttcgttgctctaattaatccaaagcgaaacaacaaagatggtgttttgaacgaataaagggcataggttattttgaaaaagtgcaaagaacatgcagcaataagcctgcaaaatctaataagtggaaaatacatgagtatagaatttattttcagaaagtgtcaacagacttttggaaaaatatatttgcaatttatcaacaattttgagaagtgagttagaaatgataatcttcgcgattcaaaccaattttcgttgctctaattaacctcgatagaaacattcgaatcaa

SEQ ID NO: 69085 - DNA, 737 bp, Heterodera glycines
gccgaaatctctgtggtgaccagtggcagtagcaccagaaaagaaaacgcggaggaggtggaaaaggaggacaatgatttgcgaattttgcatcaaaaaagcaaggagaaagcacttgtgacggaaggaacggaaaacaatgttcgacaattttctacccaattaaaatttaaaaaaaaaattgccccaaaggcgtctcctgtcgtcgtggtcagctctcccgcttcaacgccgcaatcgcccatcaacaacaacaacaacaatgtactcactcattaacttaaattgttttacaaattgttcctcacattcaggcatcatcgcatgccatcgccggcatgccaattccaactattccatcatcgccatcaacagcagtcattaaaaaaccgctcatacagaatcatcagcaacatacgtcaccgcccccgcttatggccattactgtgccgccgccttcgcttcatgtgcctccaccgtcgttggcgttgactgcggtgccaccgcctccgctcatcatgccgtcgcagttggcgatggccgccaccaccacaaatgcctccgttgctggcggtgctgctgccatccaaaaacatggcggcccacaacagcaacaaatgcacacgcattcaccaacggcggcggcggttgatcggccaattggtagcggaattctacacagaattcaatgtgaaccaagtagtgtgtgtgatcgtcgatcacttcgtattaattag

SEQ ID NO: 69086 - DNA, 265 bp, Heterodera glycines
ggaatatgcgctagcgacttttttggatgtgcgattcaaggacaaagtgctgactgaaaattccgcaacttttcgcgctcgagtcactgtctggatcaaaaatgagttgaaggaatgggaaattgataatgacctcgatggactacaacaaaatgaatttgttcgtcctgttatgtcgccccaacccgaaaatccgccggctaaacgacgaatgtcattttttgaacgtctgaaacacattacaggcgcaaacacagtgaacagg

SEQ ID NO: 69087 - DNA, 1135 bp, Heterodera glycines
atgagttctatatggcaaattggtctatttaaaaaaaacgtccaagactacagcaatttgtctcgagtgtcaagcaaatgaaaagcctaaatttgaatacacgcttgccaaaggatcacttaaaagtttgcaagtccatcttcacgccattcacgaaaactccgaatttgctgaaaagctgaatgctgttgaatcgaaagccgaaaaggacaaacaaaaacaaaagacaatctcagactttcagtcatccaccggaccgactctttcactgtaattcaaccattttctttaaatatttaatttttatttcagctcaactctcctttgataagaaaattcttcattttttggtgacaaaaaacatttccttcggcgctgtggatgaccaaacatttcattctttgtttccccatcaaaaagtgaagagcgaatggttttataggtaattttcaattaaacgaaacttaatttttaaactctaagaaaaactgccttgccgattgtttaccaacgtgtcagacaaaaattaatgatgaattaaaagaatgcgcatttattactctgacgtctgattgttggagcggaagcacttgcaaccttttgtggtacaatttacgtttttctttttaattatgattggtttaattacagcttaaccgcgcactcaatttcaaaatggaagtcgttatcacgtgttttggcaatcacggaattttcggaatcacacacagggaaaaacatcgcactcaaaattgaggatttactgctcaaatggggcattcctaaggaatgtgttcatataatcatgtcagattcggcagcaaatatgaaaagggtgataaatttatttatttttctttccatttgtttttatttgcaggctttcgtcgagagggatgaaaatgaaaatcgcattttgccaatcccgaacgggccttgcgctgctcatttattgaatttggctgtacaggaggcgttcaagagagatgaatcaatcagcagtttattggccaaaactcgtcatattgttggccgtttcaaacacagtaacactgccttcagcgaattgaaaaaaattcaaaaattactcgatgccccttctcatactcttttgcaggttaaagttaaatactaa

SEQ ID NO: 69088 - DNA, 1289 bp, Heterodera glycines
atgcgaagtgaacaattaaaatccggtaattatattgaatttgccaattccaaggacacttcgcgggacatgcaacattctgatcgcaatggaaagtgccttcgcactgattctcgacctcggcttttatgccagctttttcgtccttttgtccggcaggacattcgtccgttacgagtactgcttctgggccctgctgttgccggctgtgttcggcgacatggcccaacttacgatggtgttgaccggcgtggaccgactttgttgtgtgatgttcccaatttggtaaaattattaaatttgaaaatggtaatttatttgtccgttttttttattaaggtacaaaaaacggaatgccaagtgctatttggcattcgtttggacacttctctgctgctacgccacctatcagttcataatcgattacatcgactatcagaacagcaaggatttgtaaggatcactcgtttaaatgaatttggcctttttcgattagcatggtctcctgttccaccaacgaaatgggaaacggcggcatgggaagtctaatgagagtcaacggactgacactgagcggcactctgatggctgtgtattcgctgtgttggttcattgtgttcagaatcagtgccgtctcagaaagtgacaaaaattattaatattttaaatatttaacaaattgctcagatgtaaactcggacaatcgcacactgatcaaatccctcgggtttatcatctctctcaatttggcatgcgttttcataaagtgcggcgtcaatttgcttttccaaactgttttccaagtgaatgtgttcaccaaatcggctttttccattgctttttccttcctcaccataactgtgtacagtgcaaatgcgccggttctgttcgttgtcaggtggtcatttaattaattaaatttaatgccaattaattagcaatttgtaccgtgatcactttatccgacacttcccgtggctttcgaaattggttcgaagcaatgaaaaagtttcttcaatttgtacttcgaccacaacaatcattgtccagccgaagaatggcaccccaaacggtgccaatcgcttttacaatgaaaaattggcatctgattgaactcaaaaaagcgactcaaattttttgattgattttgtaaaaatgatttaaatagtttgtttttctgatcaatataaagctgtttatttggtggatctttatttaaatattttacatattattttgtttttattcattttatgtaaatttgggtaaatattttttattttttgaga

SEQ ID NO: 69089 - DNA, 54 bp, Heterodera glycines; identical to SEQ ID NO: 53113

SEQ ID NO: 69090 - DNA, 573 bp, Heterodera glycines
atgaatttagaccgagtatttgtgaatgatagaagtaatgataatgaacagaatttggaatatgcatatgtttttgataatgattatgaagtagttgagagcagttatgatatattggaagagcataattatagtaaacggtcaagaatggatgttgttggtggcgaaagccaggtatctctgaattcagatattggtattgctggaccgtcacgtatgagtgatagtcaatttgaagaaaggagaagaactgagtatttgaaaagaaagagagaacgtgagagaatgagaagagaaaacgaatcacaaaaccagagagttttgcgtttagaacagatgcgagatagaaataatagtcaacgaacggaagaaaatgcaaatgaacgtcgtttgcgtttagaacagatgagaaatagaaataatagtcaaagatcggaagagaatgcatatgagagacagttacgtctagaacagcaaagaattagacagagagtgattagacaaggtgaaattaatgtttatgcagcagggtcttatgtgaatgctcatgaacatggacttggtcttatgaat

SEQ ID NO: 69091 - DNA, 438 bp, Heterodera glycines
aaaatggtgtaagtaaaaatcgtaattactctcaaaaagcttctcaaacaattttagcgcttccaattccttctacaatcgcctttatacatcccattatgagcgctaaaattatcagagtgccgaaaatcgcatgtgatctaagcctagaaaaaaatggtgtaagtaaaaatcgtaattacgctcaaaaagcttctcaaacaattttagcgcttccattccttctacaatcgcctttatacatcccattatgagcgctaaaattatcagagtgccgaaaatcgcatgtgatctaagcctagaaaaaaatggtctaagtaaaaatcgtaattacgctcaaaaagcttctcaaacaattttagcgcttccaattccttctacaatcgcctttatacatcccattatgaacgctaaaattatcagagtgccgaaaatcgc

SEQ ID NO: 69092 - DNA, 270 bp, Heterodera glycines
tatacatcccattatgaacgctaaaattatcagagtgccgaaaatcgcatgtgatctaagcctagcaaaaaatggtctaagtaaaaatcgtaattacgctcaaaaagcttctcaaacaattttagcgcttccaattccttctacaatcgcctttatacatcccattatgagcgctaaaattatcagagtgccgaaaatcgcatgtgatctaagcctagaaaaaatggtgtaagtaaaaatcgtaattacgctcaaaaagcttctcaaaca

SEQ ID NO: 69093 - DNA, 361 bp, Heterodera glycines
atgtatgttaaaagtatcaggtaaacttgaaaagtaccgaaatttttgcggaaattatttcttttatgactccaaaataagtctattaatattgaacgctcttaaaatgttcgaaatcccttgaactatttctatcgtttcatgcattttttgcttaagtaattcgattttcgcttgctccttttaggtatattgtatagaatggtcaatttttttaattacctctcttttgggttcgttttttacaattttcctttttgtatattatcgtatcaaaattcaaaattacagtgcaattcgtgtgctgctggaaaagtcgcccagcttgctgcatgaacgggacccgacaaacggaaacacg

SEQ ID NO: 69094 - DNA, 892 bp, Heterodera glycines
atgccaattatttttaattttcattttctattattcaattggatacattttttagcagaggaaaagcagcagaaggaaagtgttggtcaacagaacaaaaacaccgaacagaaattggatggaaaatatgccgtggtggacaaaaacaatgttttgggtgggcacaattggcaaattatttaaaattaaaaattggcgttataaaaaaatgcattttttgagaggggacaaaaccctcgtattatatcgggattttatacatatttggtacatatttcggacttttttcttacatattttcattttttttacatatttgaggattttttacggaaatttttggaaattctcaaaaaaaaatccaaaaatttcggcaaatttttcatttttttacatagctattctgagaatttttgaaaatttttagaaatttcttgtgaaaaaattaaaaaatctttttttaaatgtacccctccaaaaataatttttcaaatgttaaaaggtgattttaaacattttggtcatttttatggcattttgtgcctatttaacactttatgaaaaatgtacatattttttacagccctaattataaatatttaggtgttaaaaaattaatttttctttttaaaatgtatttattgctaatttagttgctttagtgacgtcatcgggcgaccattcgccgtcggcggttgtctcagcgaaagttgcaaaggtgggaaggaaaccttaattatttcacaaatgccatttaatttcaggaagtgcctaattcgcagcaacaaaatgattgggatgccaaagtttgccacaaagacatcgaaatcattggggaaaagcaattgacgatcaattgcaagggcaacagatttggtatttaatataaaaa

SEQ ID NO: 69095 - DNA, 706 bp, Heterodera glycines
atgaaagtgttcaaattggaaaggtgttcattttgatgatttcttagcgttttatttataattttgaatttattttaacagttttgctgcgattggattcgccacgaaggaagtgccattggacgggtcaattggtcaaattttgaacagttacgggtaccgaagcgatggctcatttggctgtaatggcatcaatcggccgtgcaaaatgccaatgtcattatttggttcgtcattttcccccgtggcaatgcaatcggcggacgtggaaatggcatacaaatcatcggagttttccactggtgacgtggtcggatgtggcattttcttggatactcgactgatcttcttgacgaagaatggccaacgaatgggtgggccaattaaaatgaaaaaacaaattaattaaaattttatttttaagattattcctcttttttcattcaaactcccgccaattctctcaattctctgtttccgtgcgtttctttgtgggtgggcgacaaaatcgaggcgaactttgggccaaatttcaaattcaatttggcgactctctgaagaaagcaaaaagaatggaagaaggagaaattcatctaattgctgtcatttttactttatttatgtttattttttaaattctttttttcaattttcattttggctttataatactaattactattttatttgctattaatttcgttta

SEQ ID NO: 69096 - DNA, 153 bp, Heterodera glycines
atggaattggtattgaaaatcaccaaactggagcttaaaaatgtgagtgttatttaaagtgtcattttttgaaaattaaatgggaattgctaattaattttgaaaaaaaataaattttttaatattaaatgattttagaagggactccaataa

SEQ ID NO: 69097 - DNA, 594 bp, Heterodera glycines
atggtgatcagttggacaattttcttcttcgcacttcgccgacaattctcactgatctcaatcagttgaattcaatcgattcatatggtctgttgcccgaggcaattgcgattggtgacgatttggcacacaccgagaaaagatggccaacccaagcgattgtgttgcacacttttgaacgacaagtgtacttcgattgggtcaacaatttcaagaaggtatggtcccatatttttttgcatattactgattttgactacttctatttttattttccaaattatttagcaatttctccgtgccaatgccatttcttccgtcagttaccaaattcattttactgttcatgcgccatcaattgtgacatttgaattggtgaacgaatggacaaaggaaaagctgacattggccaaagcaaaggaattggacaaccgatggataatgcagcgatgcaaaattggggaggccgtgacggttcagcagcagaagaacgatgaaaattgggataacaattgtaacaatgtgttctttttgcttttagtggcactaattgcatcgggatcttcggaaaaatccttaacaaaaatgcaataa

SEQ ID NO: 69098 - DNA, 723 bp, Heterodera glycines
agaaaattaagcaaaaaggaagaaaatactcaacaaaagaatggaataaaattgaaagaaaaatagcgaagaaattggggacaaatcgaacgaaaatttataaatggatcaaagaattaggacttcaacaacaaatacagaaaagttacaattcaaaaagtgatgaagaaaaaatagaaattgtgcaaaaatttattgaactgacaaaagaatataagcaaaaaagaaaatattcgccaaaagaatggaaacaaaattatgccgaaatttgtaaggaaattggagttagccatttcataattaacaaatggaagaaacaatttggcattcgatatatgagaataacggagaaagaaaaaatggaaaaaatgaaaatttattcgcaaataaaaagagaaaatccaaaaatgagtgataatgcaattgcgaaaactgtgaacacttctcatcagaatatttttaattggaagaagcaatttggagaagaaatgtttcagagaacaacagaagaagaagcgtgaagtgccttgtgcttgcttttcaatttgaaaatatttttttggatatctttttcaattttagtttcagtatttactgaattagtaaccccctagcttctaattcagtaaaaacggtatttgggctgggattttttatgccataaaaatgaccttttttggcattttatattttctttaccattattttaattgaatttaatta

SEQ ID NO: 69099 - DNA, 469 bp, Heterodera glycines
gtttcaaatatcgtaagattgtttgatagggccagacaagagaaggcaactgttggtaccaagtttgcggtaaaaaaatgaaaaaaaagagatagccattttttggtcaagaattttttttgtttgcgtttcaaatatcgtaagattgtttgatagggccagacaagagaaggcaactgttggtaccaagtttgcagtaaaaaaatgacaaaaaagagatagccattttttggtcaagaattttttttgtttgcgtttcaaatatcgtaagattgtttgatagggccagacaagaaaaggcaactgttggtaccaagtttgcggtaaaaaaatgagaaaaaagagatagctattttttggtcaagaattttttttgtttgcgtttcaaatatcgtaagattgtttgatagggccagacaagagaaggcaactgttggtaccaagtttgcggtaaaaaaatgagaaaaaa

SEQ ID NO: 69100 - DNA, 75 bp, Heterodera glycines; identical to SEQ ID NO: 54636

SEQ ID NO: 69101 - DNA, 940 bp, Heterodera glycines
  unsure (1)..(940): unsure at all n locations
gcattttcaaatgcttcttcacgagtgacttcngtcattatcttgacgcttcgtnccactttggttggctcgtttttgccatttgaactgatcaacgaagcgactggcgaacaattggcactggaacaatatgacacagatgaattgagctcctccgttgtccaattggatgggtttgggaaaattgggaaaatgagtggaaagaattgtgtgctgctcgaccgaaacggatggacatttggatcagagacggcggatttgacgaggggtgaacaacaatttaattaaaatgatcaatgcttttttacaggagcaaaaaagttatgatcaaaaatgctcgaaaagcatggttttttgggattctcaggccattaaccttttttggaagttaacaaaatttttaatggttttttgtctaatgtcccagcatctttgaaattgacaggattgtgtggcactaaaaatcaaggattgttaattggttggactcataaaatgccattggaaccataaaaattgaatgagcttaaaatacaatttaaatctttatttttcagtcttctcgacaccgctactcccgggtcaagtggtcagcaacaatgaagcagcagaaatgaattaattaattaattgatggttgattgatgcgttttatgtggcccaaatgatggttgctggcactatgccattccaacaatattgtattgtgtatagttagttagctaatttatttgtattgtagttgacctttgcttgcttaccgtaaattcgtccatttccattgtattttatgtgtatgtacatttaattaattcattgtgaataatcgttgataaaaatggctaatgataaaactgacatgaaattcacgacttaaaaaaaatggatttcatccatattttggtgatactgaataattggtgtcccggtgaaaaataaa

SEQ ID NO: 69102 - DNA, 816 bp, Heterodera glycines
atgcagtggatcaaattcaactgcacgctttgcccaattggacttcagtgtttctatccgcgcaagtacgcgaagcttgtgctgtgtgcgcatcccagcgtccgcaacatcacggactttttgagcaccggtcagcttgacgaagctgcaacaacaacaacaacatcagtacttccgacaactgcggaaacggcggcggcggcagaatgtgcacctccgcccgcgcatttgaccgcgtggatcgcggtgtgcacagcgctgatggcgcttttggtcatcgcgcaggtcgttaattttgggcatttatccaccaaatccatattcctcaatttagcttgtgcgcgccggattcaaagtgcgcaaatttttgaaggaccgcgcctacaaaaaggggatgctgagccgacatcgtcagcgtgagtttctcactatttgaattacatttttagcaaattgtaattaacaatttgtacaggaatgagtgccgcccgtcgcaactgccaaccggtgagcgcgccgactccgcttattttgccggcaatgttggccggcgtttctctgcgcccgacgggcgtcaatttgacggtggaccgggtgggcaaatttaattaaattaaaatctttatatattttaatttctcactcattaaaattacaatttaaatttaaaagcagcgaggcagcgccgcgcggatggtgcaattgaggagggcgaagagcccgtctacgatgaggtgccgcttgacagcgacatcgtggtcgagatgcgcgatgaaatggggaggaggatgaggaagaagatgacaatgatttttg

SEQ ID NO: 69103 - DNA, 875 bp, Heterodera glycines
atgcgattgttttcaaattttgttataaaatgccgtacctatcaatatgagaggcccgacatgaaatatggtctaccatctcctcaatataaacacgtatgcatatactacagtatgattagtaaatagcctttttaatgagatccctaaaatggccggtatgaactttatagctttttttgacaaatcccagccataattaatcatttttaaaataccaatcctctaatacaatagtcaaaattccggccctgatgaagtgattttcaaaaaaaacacaaagaaatttattcaactttaatccatcaccatgctaggtgatcgtgaccggtgcagaggaacacggactgcccaccaactacattcagtggttgcgcgaaaattttgaggacaatggctatgacgggcctgtggaagtgaatctgaaggcacttgagacaatgccgaggccgactaagaaaagaaagctaagccacaaaaaagaaggggaagctgaaagctcgaacatggcgctgaacaactgatggatgagtgagtgagtagccgtggagttggctttgtgttgatcagcaaagaaatacagaaaattagcaaccaaattaatcagcagaatgacaaaatattttttatttttttgcaattattagataaattttcaatttttagcaataattctaaaaagcaatatattttttttgtgtgttaatttctaatcccgctaaaggattgggattcaaattttagcggaacgggattttgtgtgattaatcacaaaaaatgagggattgcggactggggatcgagcgaaacccgcttttaaaatatattttctaatctttcatttagttttttatattaatctatcatgaactata

SEQ ID NO: 69104 - DNA, 56 bp, Heterodera glycines
tgccctaccgggaccggaacctgagcttttcaaaatccgggaccgggaaccgggac

SEQ ID NO: 69105 - DNA, 843 bp, Heterodera glycines
atgattggatttcggcttccacaaaacggcggaaattgtgacggagggtgggaattttcaaaacaaaacataaaattgttaaattaaaacatttttgaatacctgttgagacttaaactttattcatattaatatatctgtctaattaattaattatatcaattaattcaatgaattaaatccaatccgattacaagcgaatgcgcagtataaaagaccaatgatgatcatagaaatagctcaactcattggtgtggcataaactgcgcacagtgcaaatgccaacaaacaacagcacagtttttggcaccattatgctggtgccatcaattgttccgcttcattagcttaggataaaattaatttattaaaataattgtcataaattaaataattattgcctatcgaattattggggaaaatcaacgtcaattttcaattgtctttgatggaaaaataattggcgtgcgttttagctattttgactaaatatgatggaactattaaattaacaaaattattatttaaattttcagaaagttttttttgcttcctgtttatgagagcgccatgcaaagagcctttttatgtcatcttcgtcaaaatggggatatatttttaaaagattatgccgaactttggctgctcgagtttgacatggtgcggataatgaaacagcagggggagataaagctgttagtcagtcgcagctgcaactgcaccatggaagaattggtaatgcaatctttgactaattggacgtgctttggcatgactaatggcaattttccaaacaaaatgatatttgtttgtttttatgtatttaaagctgcatgtatttaa

SEQ ID NO: 69106 - DNA, 366 bp, Heterodera glycines
tatacatcccattatgagcgctaaaattatcagagtgccgaaaatcgcatgtgatctaagcctagcaaaaaatggtgtaagtaaaaatcgtaattacgctcaaaaagctcctcaaacaattttagcgcttccaattccttctacaatcgcctttatacatcccattatgagcgctaaaattatcagagtgccgaaaatcgcatgtgatctaagcctagaaaaaaatggtgtaagtaaaatcgtaattacgctcaaaaagcttttcaaacaattttagcgcttccaattccttctacaatcgcctttatacatcccatttatgagcgcagaaaattatcagagtgccgaaaatcgcatgtgatctaa

SEQ ID NO: 69107 - DNA, 235 bp, Heterodera glycines
ggaaataaattcaaggacattattgaaaaaaaattcagaaaaaaagaaaacggtgatcactaacagtttaaatgatagggaggtgattttgtggcgatcagaggtcatttgaagcccaaagattgaattattctgtggtgacatagatggaaaaataaatcccataaaataaatatgtggtaatatcccatactctgtataacttggtcctatttcctatggtatttctttagtg

SEQ ID NO: 69108 - DNA, 309 bp, Heterodera glycines
aaaatctataaaaaatttaaaaatgagaattcatgcgagattttctggaaataagcttaatagggcctagttaagctgtaaaaaaaatttggggcgatttgaaagagaatagaaagaaccaggttcgatgaagttttggtaagccaaaaaaatccaaacatttaaaaatctataaaaaatttaaaaatgagaattcatgcgagattttctggaaataagcttaatagggcctagttaagctgtaaaaaaaatttggggcgatttgaaagagaatagaaagagccaggttcgatgaagttttggtaagcc

SEQ ID NO: 69109 - DNA, 1021 bp, Heterodera glycines
  unsure (1)..(1021): unsure at all n locations
atgaaattagaattaacaaacaaaaactatgacgaatattttgggcatttntaagcaatgcgtttatttctttgttattaccctgctgatgtgaagtagttattttatattaatttttttagaataattactctcaccgaaattatttttccaaaattgctcagaagcttatgaatgaaattgcagaaaaaatcaaagaacaacagcacaaccagcagatgaagcaacaaaagaaacagaaactgaagcaaaagcggacgacgaaaggacaaatgggaggtaaacaaataaatgaataatgacctttgtttggggcaaaagagtagaaggaaatgaaaattgatcaccaaggctgcaaaaaatatgcacgaaaaatgacctaaatatgcaaataaaattgccaaatatgcacaaaaaaacttgaaaattaggggtacaaattaattaaaaaattttattcctcataaattttatcggttgtttttgtaattgcaaatcaaaaatttctcaagcttttcggcagtgaagctcactgttgacccactcgcgcatccattcaaatttggatttaattttaggcataatcaaaagagatattcaaatcggaaaatatttgacgaaaaatggcaaaatatacatgaaatatgcataaaaacccaaaatatgcaaataaaagtaccgatatttgcatgttttttgcagccctgttgatcactttcttactatgaatgcactcaactcaacggcactgaaaggggtgcaattaaaaatgaaaatttaataaatttatcatattcaaattcattttttcatttttttgatttgctcttttccactttaaaatttgctttttgtcaagaattttgattgaattttggtcatttgattttcctaaacctcccttcgtttgatgaaatagatatgcttgttaagctacttttcgagttttatgtttgttttgattctagtgcagaacacgcattggctttctcccaaaattctttgagaagaattcaataaa

SEQ ID NO: 69110 - DNA, 403 bp, Heterodera glycines
atgaaatcaccaaaagggaaaaataacaccgcacaagcggtcgaggccaatggcaatttgaagcgcaacggtaacagcggagccaatgatgggaagaagctgaatggagaggcaaaagcggagggaaaggtagttgaagccgaagaggaagatgaagaatttgaaggtgaagccgagcagcaggaaggaggcggagaaggcgtaaagagcgatcagaacattgcaatgggaatggagtgatctgagggagggaaaaggaaaggaactcggcgccgacgggactcgaacacgcggccaaccaaaccgaccgcgcaattacgcattattttctcccgtaatttttgtcaacaaatgggaagcttatttcgattattttctgacaaacttctcctaataattgcca

SEQ ID NO: 69111 - DNA, 419 bp, Heterodera glycines
atgtacggcaaaagggcgaacgtcgccaccggcggacgaaacgcgtcatcatcaaccacacaaacagaggaaaagcgtggtaataaagcagcggaaattaacaattttattagaaattttattatttaaagttttgaatttagtttttttttcattttatttccgaacatttaaaattatttaaaaattaattctgattaaaatatattattaatagggctcacatttatagttgctaaaaagtgccaaaataattaatttttagtttctaaaaaacccacaaaatagttgctaaaaatgggaaaatagttgctaaaaactttcaaatttaggggtgtaaaatgacaaattttatccaaaaaggtaagaaaattaaaccaataatttttaaaatcaaaaattctcgtcaaaaaaataaa

SEQ ID NO: 69112 - DNA, 664 bp, Heterodera glycines
atgacgcctccgccttttactgcccttcaatttgctctgtttggctatatgattcttctcaatgccttcgtcccgtccgacacgaatttgtcatctaaacccaaatcggatgctgttgaacaagttgaccatgaacatgaccatcggaacagtaagaacgagactgatcaagaagtgaacaaagagcagcagttcaatgatcgtgatttggaccatgaaaatgacgaagacaatgatcgggagaagaacaaaaaggaaaaagatagccacgaaaatgggaatggtcaaacatcggatgaagaacaaaatggagaaaaagatggaaagagtaaaatggatgcataatgtaattaactaatcattaaatcatttaattaaaggctacaaaaatcgtcactccaaaaaatatctgactgaacggcagaggattctcgatcgattggaaaaactggataaatcaattgtaaaacaaccagctgaacacaacgagaaccgatcaaattttgctaatcatggaagccatcagaagacgactgatcaagagggaaataatgaggaacacgatgatcagaatgagaaaagtgatcaggaaaaaaagcaaaatgatgaagacgatgttgaacagaaggaaaaaaaggggggagagaaaagtaattcccattaa

SEQ ID NO: 69113 - DNA, 830 bp, Heterodera glycines
atgggagggctaaactatgcactgccaatcatcagtgacgggtaaggaaatgtgtcatcatcagatacaaaaaaaggcttacaacctccccccctgccgccgtatcaattccccgtgaaatatttaaaaaaattttcaaaccaaaattttctttaaataacttttcattttttttgaaaaattctttctttaaattttcttgcaattttccgaggggaaacaatacggagggatgtggaaacgaacttccccgttccgatttatttaaaaggtttttttcgttactgtcatttcatgttgcgcatttttcagcatgctcatggagacattggtgatcggttttgccgtcaaccaccccgccggtggtttcggcatggattcggaccagaaaaatggcaacggaagcaatggcacaagcgacacgggcagtgacgcggcgagtgacaatggcaacggcgccaacggacacaaaccgcagaaaaagccgcaagtcttcgagaagagcgtcccgtcagtggtcggggtaagaagtgaacacagtcaagggacgacggagcaggacaaaacgtcgtcgccgaaacgtcgtcagccaaaaaggccgaaaaatttactaacttagaaaaattttcaaagaaaaaatttttagaatttttcttctgaaaaatttctaagttagtaaatttcacggaattttccggcgctttttggcatgacgaatttttgagaaatttaagtgatgttgttttttgagggggcaccaataatgaaaaacaaaaatgtttcccttaaaatttcgactgaggatatcgagttgggtttttgcttaaaaa

SEQ ID NO: 69114 - DNA, 79 bp, Heterodera glycines
cggacaaatgatgaaaatgattaaatatccattcaattggttcccaacgaagagtaaccagaagactaaaatcgcaaaa

SEQ ID NO: 69115 - DNA, 800 bp, Heterodera glycines
catggacaagcagcgaacccgcagcagttcaagtgcgaattgtgctcgaaaactttcagtgcccattacaatttgacacggcacatgccggtgattgatcgatttaatttaattttatcatttaaatttaaatgcttttcaggtccataccggtgccagaccgtttcaatgcaaagtgccgttttattcacttatgaaaaattggcaaaatttaaggtttgcggaaaggcctttcgccaggcttcgacactttgtcgacacaaaatcattcacacggaggacaaaccgcacagggtaaaaaaaaatgaaatgagaaaagtcaaattaatttaaatttggtttaatcggcgccttttcagtgcaaaatttgtgggaaatgcttcaacaggtaaatcagagattaaaaaaagaagtgaaatgcttatttacacttgcttcattttacgccaaatgcttaattaaggtcctcaactctaaatacgcatttgcggattcacaccggtaattaacttaaatgccaatgattaatgtttttaattttatttaatttagggttcaagccgtacacatggtgtgttttgtttattgattatatgtttccattaaattatttgaaagatggataattaaatagcaaactgaaaagtttctttgtttaccatttcatttattatttttatctttcccattcattgctcagcgaatactgtggaaaaggcttccatcagaacggcaattacaaaaatcacaaattgacacatcaacaggagaagcggtacaaatgcgaagtgtgcgcaaag

SEQ ID NO: 69116 - DNA, 196 bp, Heterodera glycines
atgagcgcaaacgtaccgaccgatatctgcttcagctttaccggcctggtacagcgcggcggccgcaccgggccgcataaggatggctggggcattaccttctatgaagggaacggctgccgcacattcaaggatccgcagccgagcttcaactcgccgatcgcccgcctggtgcaggactacccgatcaagtcct

SEQ ID NO: 69117 - DNA, 1010 bp, Heterodera glycines
  unsure (1)..(1010): unsure at all n locations
taattaaatccattccttcgggggaccgtgccgggtgccgcggggtaagcagtgctggttcgtttcatcacggcaccgaaccttttggctagtcagcaatcgttgcttaacttgccagatcggacgggtgcgcatgattccactgttccaagcaccccaccaaaagcaaaacgatataaccaaaatataaggaaaaatttttaaaaaattttttctccatcttcctttttgatactanagcatcagagtgctnaaattaacttgtaaataaattttggtgcgctttagagcactttctgaaaaatatttatgaaataaaaaatcgatttattcaagtgtccgtttggggtactcaaacaattatggggagcaaaaatccaacgcagaattaaagtacaggctatagggaagctattccggaaggattcggtctccccataaatctgggcgcatcggctcggggggactgccccgaaaacaaaaaaatcgattttttcaagtgtccgtttggggtactcaaacaattatggggagcaaaaatccaacgcagaattaaagtacaggctatagggaagctattcccgaaggattcggtctccccataaatctgggcgcatcggttcggggggactgccccgaaaacaaaaaaatcgattttttcaagtgtccgtttggggtactcaaacaattatggggagcaaaaatccaacgcagaattaaagtacaggctatagggaagctattcccgaaggattcggtctccccataaatctgggcgcatcggttcggggggactgccccgaaaacaaaaataaatcgattttttcaagtgtccgtttggggggtactcaaacaattatggggagcaaaaatccaacgcagaattaaagtacaggctatagtgaagctattccggaaggattcggtctccccataaatctgggcgcatcggttcagggggactgccccgaaaacccaaaaaaaaattttttggataaataatatttaaa

SEQ ID NO: 69118 - DNA, 545 bp, Heterodera glycines
atgcacttctttgaagacgatcaacgggctactgttgctctttcaagagctcgccacgctgtcttcatcattggagacttggtctcaataaatgcaggacaagtgtggaaacgtttcatcgaaatggcgataacaagaacaagcgtagtccgagccgagtatgttttggcacttttgggacgaacactcgtgaggtcgtcgacatgcctatttgattcggccaaaagagaatcggtggaggatgaaggctttcttgaaagttgggcattgaagcatgggttgcgcctggaccgaacgaatgcctttggacaacaacaatcacagcagccgcgagctccctcattccaattccagaatcgccactttcctgcctacagacgacagggccctcagatcaagccggtccatctggcagcggtggtcaacaaagaggtgcgcctactttggcaccacagtatggaagaggtcaaggaagacgtggcccggacaaccagtggatgcactacggcggaaacccgaaacgacagaagggtggcagacgctga

SEQ ID NO: 69119 - DNA, 437 bp, Heterodera glycines
aaaatggtgtaagtaaaatcgtaattacgctcaaaaagcttctcaaacaattttagcgcttccaattccttctacaatcgcctttatacatcccattatgagcgctaaaattatcagagtgccgaaaatcgcatgtgatctaagcctagaaaaaaatggtgtaagtaaaatcgtaattacgctcaaaaagctcttcaaacaattttagcgcttccaattccttctacaatcgcctttatacatcccattatgagcgctaaaattatcagagtgccgaaaatcgcatgtgatctaagcctagcaaaaaatggtgtaagtaaaaatcgtaattacgctcaaaaagctcctcaaacaattttagcgcttccaattccttctacaatcgcctttatacatcccattatgagcgctaaaattatcagagtgccgaaaatcgc

SEQ ID NO: 69120 - DNA, 372 bp, Heterodera glycines
tatacatcccattatgagcgctaaaattatcagagtgccgaaaatcgcatgtgatctaagcctagaaaaaaatggtgtaagtaaaatcgtaattacgctcaaaaagcttttcaaacaattttagcgcttccaattccttctacaatcgcctttatacatcccattatgagctctaaaattatcagagtgccgaaaatcgcatgtgatctaagcctagaaaaaaatggtgtaagtaaaatcgtaattacgctcaaaaagcttttcaaacaattttagcgcttccaattccttctacaatcgcctttatacatcccattatgagcgctaaaattatcagagtgccgaaaatcgcatgtgatctaagcctagaaa

SEQ ID NO: 69121 - DNA, 799 bp, Heterodera glycines
tgattagaagagtgattagaagaggtcaaaaagtgattagaagtggtacaaaagtgattagaagaggtacaactgtgattaggagtggtacaaaagtgattagaagagtgattagaagaggtacaacagcgattagaagagtgaatagaagaggttcaacagtgattagaagagtgattagaagaggttcaacagtgattagaagtggtacaacagcgattagaagagtgattagaagtggtacaacagtgattagaagaggtacaacagcgattagaagagtgattagaagtggtacaacagtgattagaagaggtacaacagcgattagaagaggtacaacagcgattagaagaggtacaacagagattagaagaggtacaacagtgatcagaagaggtacaacagtgattagaagaggtacaacagtaaatagaagaggtacaacagtgattaggagaggtacaacagtaaatagaagaggtacaacagtgattaaaagaggtacaaaagtgattaaaagaggtacaaaagtgattaaaagaggtacaaaagtgattaaaagaggtacaaaagtgattaaaagaggtacaaaaatgattaaaagaggtacaacagtgattaaaagaggtacaaaaatgattagaagaggtacaacagtgattagaagaggtacaacagtgataaaagaggtacaaaagtgattaaaagaggtacaaaagtgattaaaagaggtacaaaagtgattaaaagaggtacaaaaattgaatgcaatttattataaattttaaaaaataaa

SEQ ID NO: 69122 - DNA, 505 bp, Heterodera glycines
caaaagttttttacaaccacttattgctaatctaatttcttgcagatttaaagccatccattgcctgccggttctcggcacagcaaagcactaatagggtgtttgactcacttcaaaaaataattcattacccaaaagttttttacaaccacttattgccaatctaatttcttgcagatttaaagctatccattgcctgccggttctcggcacagcaaagcactaatagggtgtttgactcacttcaaaaaataattcattacccaaaagttttttacaaccacttattgccaatctaatttcttgcagattgaaagccatccattgcctgccggttctcggcacagcaaagcactaatagggtgtttgactcacttcaaaaaataattccatacccaaaagttttttacaaccacttattgccaatctaatttcttgcagatttaaagccatccattgcctgccggttctcggcacagcaaagcactaatacggtgtttgactc

SEQ ID NO: 69123 - DNA, 544 bp, Heterodera glycines
tttattattttgtttttgatatttgtgctatttagcaattccgtgtcggactgtcgaaatgcgcactcccaaaactgcggacataaaattcgggaagagaaagcctattgtttgaccaggcaaacgcaaaacggaaaaggttattaattattgctaaagttacaaatgaattgataaatctttaaatgggtgaattggtaataaaaattaattttaaaaaatattatttagttaattaattaactctaatttctgttaagatgcatttattgtggaaaaaagttgtgtgacaacgcgccaattttaccagcaattccctgaagaattggagaagcatagtgccgacgaagtgccaattggctgtgatgccacttatgacggtgaaaattcaaagatattacaaaaataataatttaaaatgttttaaggctttgtgaattattgcttatgtgacgagcaaatgtgcaacagaaattcgttaagcgaacaagcggaaagaaatgggaaaaggcgagaaatttaaatgaaaatgaaattgaaagaa

SEQ ID NO: 69124 - DNA, 712 bp, Heterodera glycines
atgagaaacaaaacgagaacagataaagaagaaaagcacggaaaaagcagtgaagaaaaaaagcgaccattatttgtaccatcagcagcaggtgagaaaacaaaaatgatttaaataataaattaatttgacagatttaacgccaataattaacatgagaccaataaaatcatcagcagaattggctaatcagaaagaaacggggtacttttatcatcaaattaatttaaacgccatttacaatattttttaaagtgttagatcctttggcgacgatccttcgccgcccaattggctctcaaattggccatcttcggatgcccccaattggccgacttccgccgcttctcccattttggtgccggccaccactccgccgtcgaatttaaccgaacaaaatgaccgactcaaaaaatggaagcaaaacagcgaaagggccaaaaggccattcgaaagtgacggaggcgaagagtcatcagacggaaagcggacgattttatccatgggaattggaattgttcacgcaatactcacactttttgcctccctttatctaatgctatgaaagaattttattcgcttaaatatttattttaaataatttatcacataaacaatttattcacttttcaataattttaaataactcaattaaagattgaaattgtttctgactttttttagttttagttttattcgccaaaagtcaata

SEQ ID NO: 69125 - DNA, 581 bp, Heterodera glycines
atgcgcgggctccaaataccggcgaatttgcacaatctcagcgaacgctatcaggtaaatcccattcattcattcattattcgtcattcgtttaaattcctccaatttcatttttataatttgattttatttaaattaaatttagttggccgaaaatattcgaacggggcgccaactcgcgccgacttttctgttccatttcattaacatttgcgggtccgtcttcaccccatttgtcgtcttttcatctgtctgatcaccgacccaattttgctgaatttaattgtgttcacttattactccgtcctttctctcagcaacgctttgattgaattgactttaatgaggtcattaaaagtgataatagaataaaactcattatttaaatgcattttaattaattaatttttagacgtcatccaattttgaggaaaaatgcattgaaaattttggcaaaatttcttccaaatcgctgcttctccaataatcgcatcactgacagtggcaaaagtcagaaaatggtccaaagaattgacgggcaaaagcggtgggaaaagcgacagcaaaaaagagacaataaa

SEQ ID NO: 69126 - DNA, 1270 bp, Heterodera glycines
atgggcatggcattattattttttggtcattcattccacggcactttgtctctaaaggcattccgcgtgaacaccgactcggcatggaacgaactgatggaagtacaaattacggtcactcctccggcaaaaccccgcgagaatcctttcgtctccatcttccgctccaagcggcagctgcctggacattgtcaatgtgccggcgtccaacagccccaatgtccgcctggcccaccgggacccgcgggggcacccggacagcccggataccctggacaagccggagagccaggacagccgggagtgcctggacagcccggttggataatatatattaagtttttatgtttttttttactttttcctctaaaacattttcttcttctcttaatttcggtaccaaaaatcacttagctaccaaaaaaagttgtctaatttctaaataaccatcgccattacatacagtagaaaaaagagaatattttgcaacgaagaaaaaagattatctgatcatcaaaggagcgccatgcccggatgttcctcacgtctgccagcattgcccagctgggccgcctggaaagcccggagatcaaggacctgccggccaagccggtcaacctggcaggccaggccagcctggacagagcggaggagtgggcccacccggacctcctggcccgcaaggacaagccggaagcccaggacgacctgggggatcgggacaaccaggacaacccggaccaaaatggcgttgtgtagtaagtggcattttgttttcacttttggcaccgcatgaaccatttaaccctttgcagtaagaccgttcctggaccgaagggacaacccgggccaacctggagcaccgggacagcctggcgcacctggacgacctgggaagcctggagaccaaggacaacccggagccccggggcacccaggacagccaggccaacccggagcaccgggacagcctggtcatcctggcgctgctggagcacccggcaaagatgcctcgtactgcgcctgcccgccccggtcgggcggcggttatggcgtttccgggggaggcggaggcggtgccaaagtcgaacacgcgcccttgcccgctgaacaggcacctgtgccggaacaaccggcagaaagcgtcggcgtagcgcctgcaccggccgaagtggcgtcaaacgccgccggtggccaaggcgaagcagaagcggcgaaaggatacaggaagaaaatgtgaaagatcggataattattaatgcagaataaa

SEQ ID NO: 69127 - DNA, 465 bp, Heterodera glycines
atgaaggtgcacacggccactttcttggcctcctccatttcgggaatttctctgctcggctgtctgctgctgatcgccaacatttacaacgacgtgcaacaaatttggcaggagttggaccagcaaatctttctgttccgctccgagacggatgacttgtggcgcgacatgatgaagttgggccaaaaggcgcgaactcgtcgcgctgccgcggggtacgaaggcggaagtgcgtcggtcagcggcgggccaagcgtatcggcaccgtcgggcaatcgtaatggaaaacagaagtcaattttatttaacttattattttcaggcgcatcatctcatgctaatggcggtgcttcccccggagttcccccagggagcgttaatccgcccagcgtcccgccaagcatccaaaccggaacagctgggggagctggatgcagtgagtactatcaatacgggacccgctaa

SEQ ID NO: 69128 - DNA, 291 bp, Heterodera glycines
atgaaggcgtggaaggaatggacgcagcaaaaaaatcaatgggaaagtggtggcacggcacaaggagggaaaagattttttgagaacacgctgaaatccgcagtgatctcggcgaacgaaacacgagccatcccaccagaaggaatgagctggaaacgtcatgtttcgagctttcaaacagcgccgcctggccccggcttcaagcgccgataccacgacgtgagcccaatcagaagaatggacaacacgggacaagtgacgtcggcggcgagcggaacggaagaaaagatt

SEQ ID NO: 69129 - DNA, 49 bp, Heterodera glycines; identical to SEQ ID NO: 51181

SEQ ID NO: 69130 - DNA, 928 bp, Heterodera glycines
atgcaaaaacctactcctttaaaccgccccaattcttctgtctccaaaacccttgcctgcgggcttgaaaaaattgtgaatttgagtggaaatgagccactctcggtgccggtgctggcggatcggagtgatccgctgggactcaagtcggtccaacccgacgcggtgccaatggagagtgctgagggcaccaaggaagtggaaataatggaagtggatgaaatgagtggaggaaaagggaaaagggatgaaatgggtaaagaaaaggtgaaaagtggtggaatggaagaggaagaagaaagtgagggcagtgaaagtgaactgctcggagaaggtggatttggttcgatacaattaaaccccagcctgagggcgggaaataaagcagttgaaaaggaggataaggggaaaccttatctgatcgcccaagtgaggggcgatggtgtgatcgccgcccggatgaaacttttctgggatttcccggaattggtttttgtcccgtttagcctcttcgacaacgcccagccgatcgaaatcggcgacactttccgcctacataagtgcgaatggaccaagagcgagacaggatgggaagagcgcggagattggctctatgaagtcaccggacggctcaactaccaagccacggcgacggacgtgagccgactgcgccaacgcctccccactcgtgcggtcggcattttggtcgacgtccagagggcccgtgacagacacgtcaaagtggcgctggtctcagcacctgagctaagctgcgtcatgcgagcctaccgtcgccacttcccggccgaattcacggagaccgacatccggtaccgatccgttgtccgtcttcaacttcggcagatcaacagtccgccatgggtgctgtattcgcagcaatttgcgtacgttttgccatccgattttg

SEQ ID NO: 69131 - DNA, 888 bp, Heterodera glycines
atggcaagcctaatccagaagggcatcacattcacactcaaggcgctggataatgccagaacaaccacggcactttcactacatccagacgccgacctctcaaactgggaaaacgcagtcaaattggaggctcaatgcacacgcgtcaacagagaagtccaaacaattgaagcacaactggacaatctacgcgacctctccaacaattggattgacctactaaaccgcctcgaaggaacagaaaaagacaaaggcgagaaagaatacgtcaaattcgacacgtatgagaaaattgctgaacgccatgacgcagccacaaccaaactccgggatctgcgggatctcgaagcaacgctcagtgccgatgccaaactttaccgaggcagagcagaaagagaagcaagagcggatcagcaagcaaatccgccaccacaaactgcaacgcctccaatagcagctcctacattcacggcaccgctctatcaattccagccaatccagctggacaaattcttcggtcaaaagcgaaaatggcccgaattctacgagtccttcaaatcggccatcggcagccaatcaatcagcaaagcacagaagctgaacttgctccgcaatcttctgggcggagaagcacgggaactcatcgctgggttccgcctggaggaccaaaactacgagacggtccttcagttgctgaaggacacttacggcgcacctgaagagcacatcagggcgctacactttgagctggccaatctcaagacgtgccgaagtctccgagacacaaaagacttcctgcttcagctcgaacgactgacaagagagctgaacaatgccggagaggacatcgagggaccgcaggtgttcctcatgttggagaaatggtga

SEQ ID NO: 69132 - DNA, 503 bp, Heterodera glycines
atggagaaggcctgcaaaatttggagagattatatcgattttagtgcgctaggttcgatgaaactttttaaaatataagcctaaactttttggcctgtttaaaaaggaattaaaaatttttaaaaattttattcatctcccttttgatagaaaaagcatcagagagccttatttaacttttaattaacatttggtgcgtttcagagcagtttctgaaaaaatatttatgaattgattttgctaaaaaaataaaatagtgaagctttaaaaattaataaaaaattttaaattcagaattactggagttagcatcatagcagtgcttttccttgtctttttgatgctctcgcaaaatctggttcgcttctgaccagtttataaaaaaaaagttaagcctaaaatttttcgcatatttaaaaagcaattaaaaatttttagatttttattcatctccctttttgatagtgaaagcatctgagtgcctaaaataacttgtaaataaa

SEQ ID NO: 69133 - DNA, 1189 bp, Heterodera glycines
atgtttgaacagctcgaaaaagaatttgatgaagacggtttaacggaaataatcaaacataaattatatgggtttatcagtgatggagcttctgtaatgcgtggaacacgaggtggtttatttgctcatttagaaaagttcataaatcatgataaaaaactcacgggaatccattgctttgctcatcgtttttcagtcacgtcttaagaatgtttatgactggcaattaaaactcagactatgaggctgattttctgtgtgcaactgatggtaaaagatatgaacatgctcaatatatgttaagacaacaagcacatacacgatcgactgccgaagagaatctagttgttggaatttcccctcctattcctgaattcaataaagcccttcgggaaaaattgattaataatattgttgcggaaatcaaacagtattttcctttcggaacgcttatggatgagattgatctcttagatcctagtaatttacccaatcgttcagctgatataaatcaatatgcaaacaagctaaagaaattggcgaattattacaactatgttgggcatttaatttatcaggaattttcaaacgttctttctcttattttgaatgacaaccggctttgtagtttgaagaactcactaactcctcaaagattttggaaattagttatagaaaaactaggggatacttttggagaagaattgaaaaattttgtacaccatatgcttatttttggtttgggttcagctgatgctgagagagccttttctgtcttatttcatgtacgaggaaaaaggttgttttacttttttggatgttataattttccaaaattagatctgcaaggattacggcgcttaatctagatgctaagttgagagtgcgcctcaatggcccacctgttgaacaaatttcaatgcattcatttaaagaacgttggttattggaagaatgacattttgctagtgatagtaaaatgcgtacgcatggttttacaacaaaaagtggctttgatgaaaatgacgaacctttgttgatatatggagaaaggttgaacaaattgatattgacggatttattgaaacaaatagaaaagatgcatattttaaagacccggaaaggaaggctatttatagtatatttctttgagttctttttttcacttttctagccgctgcggaataaa

SEQ ID NO: 69134 - DNA, 186 bp, Heterodera glycines
gtcaaattgatacgaaaaaacaaaagcctaaaataacgcatgaaggccagcttcggccggtgggctgatcgaatgaaagaatgtttcggagacggcacattttcattggcacctccaatgttctaccaaataaattgtttccatttcttcattttgttaattattatatttaacgaaaaatttcat

SEQ ID NO: 69135 - DNA, 671 bp, Heterodera glycines
atgaaacgccaaaatgtgcggacactttcgctgattgtctgcacactcacttatctgatggtcggctccgccgttttcgatgcgctcgaatcggaggccgaacttcgacaagtgagcaataattaatgggggaagtgacagagaaaagtaatcagacaaaggaaagcattggacgaaagagagggaaattttggaggggaaaaagtaattattggaaggaattgtcagaggcaacaagtggaggcagtgaagagccgattagtggccaagtacaacatcacggagacggactacgctctgctcgagtcaatcatcgtccgtgccatcccccacaaggcgggccatcagtggaaattcagtggggtaattggagaggggattagagagagagagagagagaggagacaaagaagagggggaggaggggagagagagagagggcaaagcggaagttagagagaaagagagacaattatgaaagtctgattcccttttcaagatttttagaaatttctttcttttgttttggttgcggctcttatacattgccattaaaggcattttacttctccaccaccgtaattaccaccttcggatacgggcacagctgttgggtgacaatgggcggcaaaatcttgtgtatgttctacgctttggttggttttcgtttg

SEQ ID NO: 69136 - DNA, 56 bp, Heterodera glycines
  unsure (1)..(56): unsure at all n locations
cntatagggaagctattcccgaaggattcggtctccccataaatctgggcgcatcg

SEQ ID NO: 69137 - DNA, 387 bp, Heterodera glycines; identical to SEQ ID NO: 52041

SEQ ID NO: 69138 - DNA, 441 bp, Heterodera glycines
gttgaggaggagcagcgtcggcgtgaggaacagcgagagaactttttgatgagtgaaaagtgagagaacaattaaaaatataattaatattttaatttataaattattcaacaaaaaaaaatcttccaaaatttaaattatttaataaaattaaaaatatttgtttcaggaaattgaacattgtgctgtccgaacgcgatgaacttgttgtgcgccgagagcaaatggaacgggataaacaacgggtggaagccgaagtgcaggaggaacgggcgcgcaagacggagctgcaaatggacaactcacagctgagcgccgcgcgacgccaagtggacaatgacctacaattgacgaaggcaaaaaatataaaaataaaatttgaataaaatatatttcaaaattgaaaaaatgacaattttaaaaggctataaaatgaaatga

SEQ ID NO: 69139 - DNA, 748 bp, Heterodera glycines
atgccctccctccttctcctcccaacattttgcttcttcgcctttgccgtcgtagtggcccattcccagatgactttctccgatggttggggaaaacgttcagcggttgcgccattcgcattgcttgcggacagacatatggcgggaaacaaacggcacgaaaagccgagggcggcggccaatctgttcatcagtcgtaagtacatttttggaaatgaaagattggacggatggttcagcgacggatgaggacgcactggcgatgagcccggcaatggaagcgtgtcaagtgggatacgcgcaaagactgatgcaactgcacgagcaaatgctggtgagaccgatggaccaatcactgacagtcggaagcaaaatgttccgtccgtcgcttttagactttgttcagcacgtaccaacaatgtcagacaaaagcgacgatgatggagacgaagaaagcgtagagaacgacgagagaaagaaagggacgaaaagcaaaacgaagccaaaagcgaaaagacaccaaaggaaaagccagtgtcactcaaaagtaattcattgtgtttaaagctaaattagtcattcgttgaagcaaaatgccgaggggaaaagaaaaactcaccggaaaatgcccaggaaaaggttcagtccgtcctgcttctcaaagtcgccgaaagtgttgctgtaatagcgcgaaattgtttggaacacatctcgacttctttcctttaataacaaatttggagaataa

SEQ ID NO: 69140 - DNA, 1534 bp, Heterodera glycines
atgcaactgcacgagcaaatgctggtgagaccgatggaccaatcactgacaatcggaggcaaaacgttccgtccgtcgcttttagactttgttcagcacgtaccaacaatgtcagacaaaagcgacgatgatggagacgaagaaagcgtagagagaacgacgagagaaagaaagggacgaaaagcaaaacgaagccaaaagcgaaaagacaccaaaggaaaagccagtgtcactcaaaagtaattcattgtgtttaaagctaaaattagtcattcgttgaagcaaaatgccgaggggaaaagaaaaactcaccggaaaatgcccaggaaaaggttcagtccgtcctgcttctcaaagtcgccgaaagtgttgctgtaatagcgcgaaattgtttggaacacatctcgacttctttcctttaataacaaatttggagaataattaaaaccattcgcttgcctttccatacctgaaaaacggctgtccttttgtacgtttttatggaatggaccaattgagaaccggcatattgccatgccaaagtgttgccgtgctcatcgaacatttcctcaaaaacacggcacacctcactgtgaagctgcaacgaccatggcaaagccaaaaagcccatggagtaaagttgccagccaagtgccaccttcccttacaaggaaaagcctaatgtagtcacgtgtatgaaatttaagtggtattaacagataaaaggctcgacgcaacacacccaaatggaaaggaaatccaaccgattccgaattggacgacatttgtccggtccaaacagtccacgcaattcgaacgaacgacgccatgctgcaaaagcattcgcgcgtccggcgaagtttgggcagtgaaatgagaaatgttttcttcgatttttggaggtgccgcggaggacatttggtcaagcaaaatgtgagggagtcgagaatgaagaagagggaaattctgaaggggggtgtattttgaaaacgaagcaaaccaacttggaaccatccgccggacattgccacccgttgcccaatttcctccaaacgctgcaaaacgcggccacttttgttgcaacgactgacatcgaaactgatgtaatcaatgcattcgccaactctgcggaaatcgtttaaatagcgaacagtctgaaaaaccaaacgaaatgaacaatggaagaaccaaacaaatgcactttcagaaatattttgtggagtaggttctcgttatgtctgtgctcctctctcttcaccaaattcagcaccaccaacggatgtccgtattttctgcccaattctctgaagtgtttggccgtggtcagtgcgtgcggctccacccgatcgatcaaaatgggcggctttccgacgaccattggggagccgcggtgggtggggtcctgcgaccaaaaaagcggcacggagccgcggcgttggacgaaggaggagaatttgccggaacgaaaggacagaggactgctcgtgtcccaaacgacctgctcagtctcaacgtcgttggccacagctcctga

SEQ ID NO: 69141 - DNA, 585 bp, Heterodera glycines
atgtgttttttaaacattgtgtcaaccaaatatgagaaacgcagagccccgcttcttgatcacgttaacattataattaatgatgcggtgagagtggtatgtaagattaaacaccaaaaaatttgtaattaacaacaaaaataatataaattacttgaactaactatactcattcactatttttagcaaatacttggtgtgatgtgtgaaggaatcgtgtcgacagagcaggatgattacaaatttcatcgtcttcagataagggagtatgatcgactgactaaaaatacggcgcttgcaatgtcagcctgggttgaggctgatttggtatgttcatgccttgttgtcagttaaatccgtcaccaaaattaaaaattataattttctccttttaattaatattttaaaaaaattttgtttttcttaatatgtgataattattaaggattcggcttggccagacgtgatcttatcccacacaaagttggcgttggaaacagaccggaacgatgacatttctgaggccgaatttgaaaaatttgcattgctaattcaacagattgctgatgagagaggaaaacaaaa

SEQ ID NO: 69142 - DNA, 522 bp, Heterodera glycines
atgaacgctaaaattatcagagtgccgaaaatcgcatgtgatctaagcctagcaaaaaatggtgtaagtaaaaatcgtaattacgctcaaaaagcttctcaaacaattttaacgcttccaattccttctacaatcgcctttatacatcccattatgagcgctaaaattatcagagtgccgaaaatcgcatgtgatctaagcctagcaaaaaatggtgtaagtaaaaatcgtaattacgctcaaaaagctcctcaaacaattttagcgcttccaattccttctacaatcgcctttatacatcccattatgaacgctaaaattatcagagtgccgaaaatcgcgtgtgatctacgcctagaaaaaaatggtgtaagtaaaaatcgtaattacgctcaaaaagcttctcaaacaattttagcgcatccaattccttctacaatcgcctttatacatcccattatgagcgctaaaattatcagagtgccgaaaatcgcatgtgatctaagcctagcaaaaaatggt

SEQ ID NO: 69143 - DNA, 438 bp, Heterodera glycines
aagatggtctaagtaaaaatcgtaattacgctcttaaagcttctcaaacaattttagcgcttccaattccttctacaatcgcctttatacatcccattatgagcgctaaaattatcagagtgccgaaaatcgcatgtgatctaagcctagaaaaaatggtctaagtaaaaatcgtaattacgctcaaaaagcttctcaaacaattttagcgcttccaattccttctacaatcgcctttatacatcccattatgaacgctaaaattatcagagtgccgaaaatcgcatgtgatctaagcctagcaaaaaatggtgtaagtaaaaatcgtaattacgctcaaaaagcttctcaaacaattttaacgcttccaattccttctacaatcgcctttatacatcccattatgagcgctaaaattatcagagtgccgaaaatcgc

SEQ ID NO: 69144 - DNA, 767 bp, Heterodera glycines
gtctatcgaccaagcacatgaaccaaatgtctgaaccctctcttcctctcgtactaagcaggattactatcatagcaacaggtctttagtagggtaaaactaacctgtctcacgacggtctaaacccagctcacgttccctattggtgggtgaacaatccaacgcttggcgaattctgcttcgcaatgataggaagagccgacatcgaaggatcaaaaagcgacgtcgctatggacgcttggccgccacaagccagttatccctgtggtaacttttctgacacctcttgctggaaactttacacattcaaaaggatcgataagccacgctttcgcggtccgtattcgtactgaaaatcaggatcaagtaagcatttgcctttttgctctacgagaggtttccgtcctctctgagctcgccttaggacacctgcgttacgctttgacagatgtaccgccccagtcaaactccccgcctgacactgtcatcggcgcgggtcgccgggccaccgggtggcccgacttaacaccaaaatggacaccctttcgggcgcactcccgttttaccgattaagtaaggaatcgatgaaagtagtggtatttcactggcgccttgcggctcccacttatgctacacctctcatgattcttcacaaagtcagactagagtcaagctcaacagggtcttctttccccgctaaatttgccaagcccgttcccttggctgtggtttcgctagatagtagatagggacagtgggaatctcgt

SEQ ID NO: 69145 - DNA, 1932 bp, Heterodera glycines
agttcaaccaaaagttggattttgctaaaataaaaattgtgcgctcttatttaaatatattaaatttaattaaaatgacttcaaaacgcaacgggactttgcaaaaaggcggtccgtcgaccaaaaaatgggattttcgagctatagggtaagcaatttttaataatatatttaagagacaagtgtaatcaataatttttcaggaacaattttactgaggaaatggaaaattataaattaattgacgaacggtcgacgatttgcgaaaaatttggattcacgaagaacattacggaatttcggatcaattcggatgtgagacgccctgacgaagcgatgagggacgcaatcgacacaatgattaaggcggcttttaagactacggaagaaaggatgaagcggaaagtgcggatgtttggtgtggcaataacgggtgccgggcttgcttccccggtatggttaccgtacagggcgtacccgcagaacaatgcggatgttattatgcaggagattaataagttagggcagagcggggacggggatgaaaataagaaaacgcttttgttgtctgagcctattatgatgaaaattacttgcgtcaccgtgcccagtggagaagggccgagaaatgtacacaaatttgatttcggattcaaggaacaccaacggataaggtgagtttttgagaaaaaaaagagaaaaaaaaaaggaaaacagaaaaaaaaattataattatttattaaggatttcgaatgtggataaaatttgtttgttttatgctttggtggcgtcaaagctttatttggaagtgcatcggaatatttttaatcgttttatgaataatattatgagacaacgagaggcggctgttgaactattacgtaattgtggaattgatattaacgaatatagctatggagtggagcacttatcgaatgttcagaattattgggtgagtttaaaaattgttaacacagaaatgaccgatttttaggatgagatttaccccggaaaattccggattgttgagtttgagaagtctgcggatccgcggaaatcgatccgtgttttatggaaggggcctatggggcgagagatggtcgtgccgatatttttggagaacactcactgggatggtctgaagaattacgtctgcttttttaatcgcgggaggaaattttgcgttgattgtgagtgcttttactcgcgtgatatttatcatactttggagtgtcgggcaaggtgttattattgcaacagagtgggcggagtaccgtgtggaaaggagagtggagtgaagattgaatgcccgaagtgtcgccgttacttttacaattgggagtgttataactatcatcaaggacatcagacttgtaaattatggaaacgttgtgtgatttgtgataagacttatttatttaatccgaagaaggaccatgaatgtggtgagacttattgccaactttgtagtgtgagccacgaccccaagcggggatgttatattatgccgattgaggaaaaagaggacaaggacgtctacagaattgtagtttgggtaagttttacaacaaaacaacaaaataggtcttgttttacaggattcggaaacatcgcaggattcgatttataagggggaccagaaagagcatgtgatcaattatatttcggtgagagttacgtgtacggaatgttgtgacgacaaaaataggacgaattgcaaaatttgtggggaggtgaggaccaaggattggagtgaggctgagggacatgagccgatgaaggattttgtggagtggattttaactgcttttaccagttatgatacgtacatttttgcgcacaacgccggacgatttgatggtaatgataaaatttaatccttacttttttaatcctaaaatttcaggacattttgtatttaattatctctaa

SEQ ID NO: 69146 - DNA, 330 bp, Heterodera glycines
cggagtacctggataactggcattcctgcttggatttttcgtcctgaactcagacgtgaacacccgctgaacttaagcatatcagtaagcggaggaaaagaaactaacgaggattcccgtagtaacggcgagtgaactgggaagagtccagcgctgaatcgcagctcctctggggttgcgaggtgtagcgtatagaccgtgagcttgggttggcccgcttgttcaagtttcccttgaccggggctccagagaaggtgcaagacctgtccaactggcggtgcctacccatctttacgtgtcttggagtcgggttgtttgggatcgcacccc

SEQ ID NO: 69147 - DNA, 431 bp, Heterodera glycines
atggtatcagtgtggggaaggaccgaatttataaaaagctcaacaaattcacatctacaatttctgttaatttctacaattatttttagaggagaagaaggtaaattttcgaactttcacaagggtgatcgagaaaattgaaaccggaaattgttgacgctaatcaactcggtccttctgcaccactgataatgtttaatatttagactgtaatgagatgatttttaataagtccaagagaatttcggagtttcgactccttaggctacaaaaatgaaatgaatcagtgttgcagaagaactcagttgataaggtcaataatctccactttactattttcgctcgactaatttgtgaaattgttcacaatttcagctcctcattctaaaaatataaatggtatcagtgttggggaaggaccgaatttataa

SEQ ID NO: 69148 - DNA, 1269 bp, Heterodera glycines
tcccaaaaagtcgtgtccccaaatgacgaatccccaaatgtcgggtccccaaatgtcgggatccccaaatgtcgggtccccaaatgtcgggatcccccaaaagtcgggtccccaaatgtcgggatccccaaatgtcgggtccccaaatgtcgggatccccaaatgtcgtgatccccaaaagtcaggtccccaaaagtcgggtccccaaatgtcgggatcccaaaagtcgggtccccaaaagtcgggtccccaaaagtcgtgtccccaaatgtcgggtccccaaatgtcgggttccttaagtgtcgggctccaaagttagtccccaaatgtcgggttccttaagtgtcgggtctccaaagttagtccccaaaagtcgggtccccaaatgtcgggttccttaagtgtcgggctccaaagttagtccccaaatgtcgggttccttaagtgtcgggtctccaaagttagtccccaaatgtcgggttccttaagtgtcgggtctccaaagttagtccccaaaagtcgggttccttaagtgtcgggtctccaaagttagtccccaaatgtcgggtccccaaatgtcgggatccccaaaagtcgggtccccaaatgtcgggatccccaaaagtcgggtccccaaatgtcgggatccccaaaagtcgggtccccaaatgtcgggatccccaaaagtcgggtccccaaatgtcgggatccccaaaagtcgggttcccaaatgttgggatccccaaaagtcgtgtccccaaatgacgggtccccaaatgtcgggtccccaaatgtcgggatccccaaatgtcgggatccccaaaagtcaggtccccaaaagtcgggtccccaaatgtcgggatcccaaaagtcgggtccccaaaagtcgggtccccaaaagtcgtgtccccaaatgtcgggtccccaaatgtcgggttccttaagtgtcgggctccaaagttagtccccaaaagtcgggtccccaaatgtcgggttccttaagtgtcgggctccaaagttagtccccaaatgtcgggttccttaagtgtcgggtctccaaagttagtccccaaatgtcgggttccttaagtgtcgggtctccaaagttagtccccaaaagtcgggttccttaagtgtcgggtctcctaagttagtccccaaatgtcgggttccccaaaagtcgggtccccaaatgtcgggatccccaaatgtcgggatccccaaaagtcaggtccccaaaagtcgggtcccctaaatgtcgggatcccc

SEQ ID NO: 69149 - DNA, 723 bp, Heterodera glycines
atgaggacccctttttattggcgaacactcactcttcgcactttggcggtggccagcgaagaacggtgagaaaagggacaacaaatttcttacacttaaaatacgaacattaaaaaatcaaatatatatatgtgtagctttgaaatccatctgcatttttatatttttaaaattaagcatgtgggccgttcaattttgcaacgacgcgtgaatttccgtggacaacagcagggggaagactttgaccaagaccaagactcggaggacgggggcagtgaggtggaaaatcaaatacaaaatttatgagcggatttgtgaaataggactcctcctgtggattcggtagccaatggggaggaaggagtgattgagggggtgggtacacgggggtacatattaaggaaaaattccttaaaaaaacacaaaattggctgagagaaatctttttgcgttacttataaatcagtaaagtatcaaaaaaatgacttttgtttgtaaataatattttttcttgtagattcaaggccatttagtgaatttgaatcgattttggacaatacatatgaattttggtgaaaaattaatttgtgttagaattcgggttcgggattcgaaataggtcaaaactgacgtcatattcgtgatcagcgcccccgaaaaccctcgagtactacgaaatgcataaaaacaactttttaatcttttttttatgggaccaataaa

SEQ ID NO: 69150 - DNA, 96 bp, Heterodera glycines
atgaatggcccctcaattaagcaactgagcactcactttgcacaagtccaatttcgaattcagcaaattgcgaaggcaccggacgaacagcgaaat

SEQ ID NO: 69151 - DNA, 1123 bp, Heterodera glycines
  unsure (1)..(1123): unsure at all n locations
ccccccccccctcattagacatccaattgcactcggacgccttctgtttggtgatgaccacgaaatttttgcgctcaatgctttacaacgggtcggaagtcatcggaannttggagtggtgcatttttgacgaggtaatggcacaaacacaatttttggttgtttttttttgttgcaacttttgggataataaattttataaattagccgaaatttttcggatttaaaaattttggatgctttaatttccattttattgtttctgttttcaggtccactacatcaacgatgccgaggttggtgtgcttttttttttattaaaaaaatcgctttttttacgagaaaaattcattaaaatttgaaaaacaatttccagcgaggccatgtctgggaggaggtgctgatcatgttgccggcccatgtcaaaattgtgatgttgtccgccacggtgcccaactgtatggaatttgcggattgggttgggtgagcaaaattggcaaaaactgaattttaaaaagccaaaaaaaagtttaggcgcataaaaaatcgaaaaatttttgtcatccaaacgctgaagcggcccgtgcccctcgaacagtaaaattggaattatattttaaattttattgttttaattttgtaacagttatttgtacacgggacaggacgggaagaccaagaaggacatgttcctgattttggacaaacgtggcgactttttgacatccgggcaagtgcaattaaattaaatctaattttgattttttgaaaagaaaaccgagcagggtaaaacatttgccggaaaatatagtgccaaaaatctatactaaaaaaagaggggttttctgaaattttcccggcgattttttttaatgttttgtgcttaccgaaataaactttaaaacccttgaaaagttacaataaaaactacaggttaatccttagaaaaaaaaattacattaaaaatacagtaattgaagaaacttaaaaaataggcgcattttttttgttttgaacttttaggattaaaaaattccacatacattctggataaataatttttacattttacaatactacaatatcgcaaaaatgatataaaaaaaatttaagctaccaaaaa

SEQ ID NO: 69152 - DNA, 489 bp, Heterodera glycines
atgcaaaaaaatttggcacgcattttgccatggtaaaaaatttaaaaaaaaaatttctttttaagcccaagtgctcatctgttgagaacatcgacaaagcaaatgggtgaagatggtgatgatgatggtggaaatcagcagcaaattgaaaatgttggacgaacacggccatggaaaggggcaaacaaaaagaaagcggcggcatggaaaggcggtgccggcggaggacgggtggaaaagagacggcagagacgagaagcgaagagagagcgcaggaaaggcggagattggcacagagatggacagcagaagagacaaacagaggaaaatgatggggaagaaatggagcaatgacagagagaggaagagagagagagagcacaggaaaagtggagagaaattagagatggagaaggacagaagagagattgtggcgattctaattcaaatttttgtttattgttttcttcaattgttactttaaataaa

SEQ ID NO: 69153 - DNA, 659 bp, Heterodera glycines
aaacaaaaaaatcgattttttcaagtgtccgtttggggtactcaaacaattatggggagcaaaaatccaacgcagaattaaagtacaggctatagggaagctattcccgaaggattcggtctccccataaatctgggcgcatcggttcggggggactgccccgaaaacaaaaataaatcgattttttcaagtgtccgtttggggtactcaaacaattatggggagcaaaaatccaacgcagaattaaagtacaggctatagggaagctattcccgaaggattcggtctccccataaatctgggcgcatcggttcagggggactgccccgaaaacccaaaaaaaaattttttggataaaaattatttaaatgaactgactagataatatttaaaataggttatttctcttcctttcagtatccctgcaaagtttggtgcgcttctgatcagtttctgaaaaaaaaagttaagcctaaactttttggcctgtttaaaaaggaattaaaaatttttaaaaattttattcatctccctttttgatagaaaaagcatcagagtgcctaaactaacatgtaaataaaatttggtgcgtttcagaaccctttctgaaaaaatatttaagaattaattttgcaaaaaataaataaaaacgaaagact

SEQ ID NO: 69154 - DNA, 206 bp, Heterodera glycines
atttataagcatttgaagggttctcagcagtttccctgcaaaatttggtgagcttctgatcagtgtagaacgttgggtgatcaaatgcaaaaaataatttaaaaaaaataatgctggtgtggtaagtgtgaagaactgtgttcctccaggcaaaaaattctaagaaaatttataagcatttgtagggttctcagcagtttccttgc

SEQ ID NO: 69155 - DNA, 742 bp, Heterodera glycines
atggtgcacaacattacctcattcctttccactcccccgcacattcctaatggtattttttctgtttgcttataatttaattttgttaaacaataacttattttccagaatcggcacccgcgtctctttcctcgggctccgtgctgcagctgcttatcgtgctccaaattttcatcattttgcttacggtgagtaaaaattatttatcataaaagcgaaaaataatttatttatgaaaaatatttaatttctttaaggtggctttatgctgctgtttgctcgtttgtgccgcgcgaggtcgaacttacacggtgaatggtcgccgttccactcggcgccgcgctgccgctgcaactttgagcgcctttcaggcgcgcacttcgggtgggcgtttttatattaatttgttataataaaaatttattattatgtttggggtgagggaagggctggatttcggtttttgaaaatcatttttccaatttcagcacttggtcttggcaccgttggtccgttggcggttccaaaccgtccggcggattccacttctcatcgtgtgccgggtagcgtgacttttccaatttatttttttattttaattttcatttattttttaggctgaattgtgccagatggtcaacgaatgaatgatgtgtgaagaaaatggggataaaatttttaaaaagaagaatgattggataatatttaatcttttttttgccttttatttttttaaaattta

SEQ ID NO: 69156 - DNA, 518 bp, Heterodera glycines
atgtcctccccaagcaaattctctccgacaaaaagctcccccgtcaaaaaggagaacaatgttggaaaagctgaatttgtggttccttccttgaaagcgcccacccgtaagcagtcgtcaaaaaatgtgggaatgaatggtggtgaggagcagcagccgtcaatgaaaaagcgaaaagtcgaggaccgagacctgtggaaactcgccaaaggaaaatacatgctgggtttctacctctgcgttggtgaataactatttattttttattgttaaatacttataaatctcagatgattggaacaaattgtacaacaacaagcagagggtgttgcgcaaggatgatggccgcttcgctgtcaattttgaactgtgcgaggagtgcacttgggtgaacgctcgggccactgatttgatcgcgccgcccaaggcaaagaaacgcaccgagtaaaaaccggacagcagtaaaaatccgaaattacacaataataatttgtaatgtttatttttcaattaataaa

SEQ ID NO: 69157 - DNA, 969 bp, Heterodera glycines
atggccatcaacatgagcgacaagcggggcttgctccgacagattctcggcgaagcggaaatcaccgtaactacgtctggcctgacaattagcggcccccgtctgtccacacctcgattcctgccatttgacgagtgcggtcgctgccgctcatgtaaggcaaccgaagtggaggttgacacaatggtgacgaaagagggggtcacgatttggtgcacgcgcatcgacaaagtgcagttcgtgccatttgacatggtctacgaattgccagggcactgcttcttccgactgaaaaacaagtcgcgcgtgttcaaccttccatatggcgacctgccctctgagtcgtgtgaaattccgctaattcaacacgctgatgatgaacgggacctcaagcgaaaggcaaaagctgcgctcgaattggtggaggccggactgattgcggacagcactgtgcaggacggggcccgattgaaaaaagccaaaactgcgatgaaagtgatcagtgacattctgctctctgaaccggagggagatgatcacaagaagacggttgaagtggcagatgtcgacaagcaggcacaagagcagcaaccagcccctgtacaacagaagaccgcctcggtacccgctgtggaacagagcactgttgaagagaatacggaagaagataccaaagatgatcttgactgacattgatcgaacactctatgaaatttttgcgacgcgtcaagccgcacccacctaaatgattacgaatactaatatacatcctacatatatattagtgcacgatatcacttgttcacagtaatctctgataaatacacatcgcgcattcaattcaatatatttggatattttgccctaatgagaaacatatataaaagatatcttcgtatgaaaaatgacaatatctactatataatatggacagatacttccaaattgactcttgcacactgttattga

SEQ ID NO: 69158 - DNA, 939 bp, Heterodera glycines
atgtcaaatgaaaaggcgcattttcacgtcactaaatacaattgtaaaatgtcaaatgaaaaggcgcattttcggtaactaaatacaattgtaaaatgtcaaatgaaaaggcgcattttcggtaaccaaatacaattgtaaaatatcaaatgaaaagcgcattttcggtaactaaatacaattgtaaaaatcaaataaaaaggcgcatttttcgataacaaattacaattgtaaaagtcaattaaaaatgcgcattttcggtaactaaatacaattgtaaaatgtcaaatgaaaaggcgcattttcggtaaccaaatacaattgtaaaatatcaaataaaaaggcgcattttccctaactaaatacaattgtaaaatatcaaatgaaaaggcgcatttccgttaatacctaacttattttccagtaactaaattacaattgtgaaaggcattttccgataacgaaattacaaatgtatttttctataaaatgcaaaaaacacaagcagtccgaccagcctacctactatcccctccgccccaaaagcatttaaaaatttctagacataacaattccgtccaccactgcgaaaaaaagaccggaaatttttgcgccaattccgtacgtgccttggccgtgccgtcccggcacacatcgcgaagttcgatctccgtcaacgggtcatccgtttcggttgatttaccaccgcctgtcgtcgccgatgatttggtcgctgtcccctcttcgtccgacgtggtggacgcgctggaacagatggagtacggcttggtaacgctgtcatcaccgccaacaccgctctcgttcaaactgatctgtgggtgtgcaaaaatttaggtaaaatttaaaaattggcgtttttttaattattcgtgatgcgaaagaattctcgaaaaattcgaaaaaagaaagcagattaaa

SEQ ID NO: 69159 - DNA, 503 bp, Heterodera glycines
caagttttttacaaccacttattgccaatttaatttcttgcagatttaaagccatccattgcctgccggttctcggcacagcaaagcactaatacggtgtttgactcacttcaaaaaataattcattacccaaaagttttttacaaccacttattgccaatctaatttcttgcagattgaaagccatccattgcctgccggttctcggcacagcaaagcactaatagggtgtttgactcacttcaaaaaataattcattacccaaaagttttttacaaccacttattgccaatctaatttcttgcagatttaaagctatccattgcctgccggttctcggcacagcaaagcactaatagggtgtttgactcacttcaaaaaataattccatacccaaaagttttttacaaccacatattgccaatctaatttcttgcagattgaaagccatccattgcctgccggttctcggcacagcaaagcactaatagggtgtttgactc

SEQ ID NO: 69160 - DNA, 59 bp, Heterodera glycines; identical to SEQ ID NO: 52421

SEQ ID NO: 69161 - DNA, 59 bp, Heterodera glycines; identical to SEQ ID NO: 52422

SEQ ID NO: 69162 - DNA, 59 bp, Heterodera glycines; identical to SEQ ID NO: 52421

SEQ ID NO: 69163 - DNA, 59 bp, Heterodera glycines; identical to SEQ ID NO: 52421

SEQ ID NO: 69164 - DNA, 59 bp, Heterodera glycines; identical to SEQ ID NO: 52421

SEQ ID NO: 69165 - DNA, 59 bp, Heterodera glycines; identical to SEQ ID NO: 52421

SEQ ID NO: 69166 - DNA, 59 bp, Heterodera glycines; identical to SEQ ID NO: 52421

SEQ ID NO: 69167 - DNA, 450 bp, Heterodera glycines
atgtcaatttcaagcggcatttctttttggcagaatgtcaccaaaccggtgccatttgaaaacgaaaaatttttggacattttgactgccgacaaatttccggaggccgaagcgaagcaatgggttgacggacgttttccattgaccattcaggtgaaaaattaattacgctttatcagcataaaatttaaaaatatttgactaattttacaattaatatttttggccgcttaaattttgaactttttcccggccctctccgatttggcaaatcccttttccccaaccttgggcctctagccttaataagacagatttttacaaatattattttaaagttaccaaaaagcactctcaactctttataattgaaaaaatcgagaccgagactcgagaccaaaattctcgagcaacattaatgaatagggctataattttgtgggcaataaa

SEQ ID NO: 69168 - DNA, 788 bp, Heterodera glycines
atggcccctccttcagcaagtgccgttgggtcgcacatcggcggtccgtcgccgtcaccgccgctgggcatccgcgcacaatttcggcgacagggatcaagctgtaattaattaactaattgtttttaaatgagctacttacagttctgtttatcttgccctaatttattgttcaatttgaacaaaaatccgaaaatttaatttattattgcaaatttacaaattgtaaggaattgaaaaaacccctaaaaaagtattttaaactatttaaaaatatgttaaaaataataaaattaatcaattaacagatggccattcgcatgtccatcacatggccctaatggtgacccccaaacgagtggattacagtgtaaataaggtggaaaattcaaaattcaaaaattaaatttccaattttttttcaaaagggtggcttaaaaacgtggattgtgctcattgtgtttgtgttgttgtgctccgccattttgaccattttttcggacgaaaatgaaagcggtaaattttaaaaatgcaatttaaaataaaatttaattggaaaaaatagaaaaattaaatttaaatttaattggaaaaaaatagaattggccaacgaagcgccgctggcggaccaaaaagatggggatgaagaagacaatgatggaggaggaggagaagcagcaaaaaatattcaatcagcggagggaataactgggactgatgatggggaagaggatgaggaaacggaagaggatgaagaagaggaggaggaggaagagaaagaggaaaaa

SEQ ID NO: 69169 - DNA, 2311 bp, Heterodera glycines
atgccttcatcaaactcattctatgtgatcgttccttccaacacaaatgttgaaggaaatcgcacaaactcttttcgagttcgactaccaagaaaacttcaatttaattcggaatgggatgtgggcttaggtgtgataatatacccccattcgtggccctcactcggcacatcagaggaccaatttgttcaaattgaatggaaaattggagagaatgttcaaataccaattccatcctctaacgtgacaaaccccgttgagctttggaaaagtctttacaaactgcttgaagaaggcaacaaaccgttcgcagttaaagtggaaggcgtacagaaaaaatttactgaagcggccaatacagcacgtcaattgggcagagccgagtacatcaataaacaacaacaacaacaacaaagagacaaaagaaatgttaatgatgatgatgatgatgatgatgacgaaaacgaagaacaattattaaacgcccttttagcgggggttgacacgttgcttgacctttacggagcaaccagtggtggtctacttgagagagaaaaacgtgcagcaacaagcaaggtccccctgcggaattgggatgacactgaagaggaatatcaggaaaagcttgataaatattttttgcgtctacgtggccgtaatttagaacacttagagggactgataacagaaaagttgaatgcggaaattgcactgatggatgacgaagaaaggaagattctcgatcaaaccaaagaattaggcatgacagcatggataaaagttttccaatcagcgtactctgcatgtttcctgcattttgacagtgcaacgaacagattttcgttgaaactggacgatcgttatgtgcaaaaaataaaaatttcagaccaattggcctacattttgggttttaactcaaccgatttcactgaaaaagaaacgattgcaaaatttatgccagacatgagtggaggagttgcttcttttcatgtttatgcacctgatctaattgaaccaatgatgattggtgacgtgattgccccagttttgcgtatcgttacgattcggggaaaacctgacgaaattatagaggagcagtttctctccgtccaataccatcgcgtactagtcaaagaaataagtgaaattttcatcgaaatcagaacatccggtggtaacctaatgccatttcaatacggtacatgtacattaaccttacactttagaaaaagttcctacttttaaaaatgaacagtgttcaaataaataaaattcttgctcgaaacccagtcacgcgttcgacctttttagggtgttttccatcagatcaaattccagcagtagcagccacaccagctccttattcaatggtgattaacgttgatccgagcggttcacctggttcacattgggttgccgtgtattgcgagcagcaaaatcgggtggaatactacgattccacaggaatttggccaccactaagccctttcatccaaaaatttttaaagagttttgctcaaattcagtttcatcaactctcgctccaagcaccatactcacactcatgtgggaagcatgtgattttctttatatttggacggtgtatggggatgcactttgaagcaattttgcaactgctaaaacgcgcaaaaatatcaccagatttttttgtaaacaaatttatgcaaaaaaatgtgtttaaacaaatataaataactagaaaactcaatttaaaaagcgcaaaaaaaaagaaagaaaaatgcacgttgattttgatccttttaaagttgaatggtcagaattaactcaaatttctccagaagtagtcgtccaatacggtggttataatgtgttcagagaagttccataccagcgcggtagtggtatcgggtctgtttttaggagtctattgcgttacctaataccaatcgggaaagaaatcgggacagccatcgggcgccaaggacttgaatctggaaatcgagttctatccaatgtattagagggtagggacctcaaagagtcacttgttagtgagggaaaaacggggctcaaaaatttgctagagaaagcagccaacaacataaatgcccaaaaaagtcaagggttcgacttcaaacgatacacaaagagaaatgatacaagagaaggtggtgcaattggtaaagcgaaaaaaggtataaataaactacaatcaaggttgggaccacacgatttcctaccagcaaacaccccagcaggtcggaagaaaaaacacactaaacagaaatcggtcaaacgccttcgtaccgatatacttggaacctattaa

SEQ ID NO: 69170 - DNA, 54 bp, Heterodera glycines; identical to SEQ ID NO: 53113

SEQ ID NO: 69171 - DNA, 489 bp, Heterodera glycines
  unsure (1)..(489): unsure at all n locations
aaacaaaaaaatcgattttttcaagtgtccgtttggggtactcaaacaattatggggagcaaaaatccaacgcagaattaaagtacaggctatagggaagctattccggaaggattcggtctccccataaatctgggcgcatcggctcggggggactgccccgaaaacaaaaaaatcgattttttcaagtgtccgtttggggtactcaaacaattatggggagcaaaaatccaacgcagaattaaagtacaggctatagggaagctattccggaaggattcggtctccccataaatctgggcgcatcggctcggggggactgccccgaaaacaaaaaaatcgattttttcaagtgtcccgtttggggtactcaaacaattatggggagcaaaaatccaacgcagaattanagtacaggctatagggaagctattnccgnaagcgatcggtctccccataaatctgngcgcatcgggttcgggggggact

SEQ ID NO: 69172 - DNA, 438 bp, Heterodera glycines
aaaatggtgtaagtaaaaatcgtaattacgctcaaaaagcttctcaaacaattttagcgcttccaattccttctacaatcgcctttatacatcccattatgagcgctaaaattatcagagtgccgaaaatcgcatgtgatctaagcctagaaaaaaatggtctaagtaaaaatcgtaattacgctcaaaaagcttctcaaacaattttagcgcttccaattccttctacaatcgcctttatacatcccattatgagcgctaaaattatcagagtgccgaaaatcgcatgtgatctaagcctagaaaaaatggtctaagtaaaaatcgtaattacgctcaaaaagcttctcaaacaattttagcgcttccaattccttctacaatcgcctttatacatcccattatgagcgctaaaattatcagagtgccgaaaatcgc

SEQ ID NO: 69173 - DNA, 438 bp, Heterodera glycines
aaaatggtttaagtaaaaatcgtaattacgctcaaaaagcttctcaaacaattttagcgcttccaattccttctacaatcgcctttatacatcccattatgagcgctaaaattatcagagtgccgaaaatcgcatgtgatttaagcctagaaaaaaatggtctaagtaaaaatcgtaattacgctcaaaaagcttctcaaacaattttagcgcttccaattccttctacaatcgcctttatacatcccattatgagcgctaaaattatcagagtgccgaaaatcgcatgtgatctaagcctagaaaaaatggtctaagtaaaaatcgtaattacgctcaaaaagcttctcaaacaattttagcgcttccaattccttctacaatcgcctttatacatcccattatgagcgctaaaattatcagagtgccgaaaatcgc

SEQ ID NO: 69174 - DNA, 669 bp, Heterodera glycines
tgccccgaaaacaaaaaaatcgattttttcaagtgtccgtttggggtactcaaacaattatcggggagcaaaaatccaacgcataattaaagtacaggctatagggaagctattccggaaggattcggtctccccataaatctgggcgcatcggttcggggggactgccccgaaaacaaaaaaatcgattttttcaagtgtccgtttggggtactcaaacaattatggggagcaaaaatccaacgcagaattaaagtacaggctatagggaagctattccggaaggattcggtctccccataaatctgggcgcatcggctcggggggactgccccgaaaacaaaaaaatcgattttttcaagtgtccgtttggggtactcaaacaattatggggagtaaaaatccaacgcagaattaaagtacaggctatagggaagctattcccgaaggattcggtctccccataaatctgggcgcatcggttcggggggactgccccgaaaacaaaaaaatcgattttttcaagtgtccgtttggggtactcaaacaattatggggagcaaaaatccaacgcagaattaaagtacaggctatagggaagctactcccgaaggattcggtctccccataaatctgggcgcatcggttcggggggactgccccgaaaac

SEQ ID NO: 69175 - DNA, 780 bp, Heterodera glycines
atgtcaagctctaatattattttatgccttttttctaatcattgtaagattctcaatatgatgggttccatggcgtttgggttagtgttgttaatgaatccgctgcacgtctatttgccatttatccgtcattttggctcacttgctgaactgatgccggcttttatggcactttgtacgtccgtcatggtaatgatcaatttttggtttctcatgctcggtgcgttcacttatgtgctcattcgtgacaagcgtagcttattcgtgtataaagagtaagtgatgcttaatcgggtccaaattatatttaatttttaaatatttggttttaattgttgaagtcggtaattaaatttttagaattttgaaaatttgttcaagtcagagactcggtattggatggtttcgtattcctgatcactgatctgtgacccgaaaacctgctgaaacaaacgtgttcccgacttgacttcaacctaaattttttttttgtaaccaaaagccctccccctggttttcaataacgaaaaaatactccgatttatattaattgatcaaaattgataaatttttctgtaaaatgagtaaaaatatgaaaaacatttgaacttttaagagaatatttcaataatggttatacggatgaagaaaaaatgaatgtcaaattggcgatgattcgtcgttcatcatccgctccaattagccgaatgtacagtggctgatgaatatcattgattttgcaattttttaacctctttttgaatttgtattaaatttgga

SEQ ID NO: 69176 - DNA, 537 bp, Heterodera glycines
agcccttgaagagctgcaccggatgcgagtgccgccgttgctgtacgctcaacggttgctgtgcaaagacggaaaattgcttatcagaaaaaacgaaataaaatcaggaatactcacgcccgtagacaaaccgttggatatatgggaacaaacctatattggactaccatacccaattaattatttttgggatgcgaattgttttgtgcgaaactgttatgaaaaaagggtacgaaaaactgggaaaaccccactcagagactagctaacaaaatcagcataggcttggacttccgtaccaattattatttttataatgggtgtgttaaatgcaaaacaattcacaaaagttgttataactccattcagagatgaaatagaaaaaaaacaaaaataagtttgaagagcccttgaagagctgcaccggatgcgagtgccgccgttgctgtacgctcaacggttgctgtgcaaagacggaaaattgcttatcagaaaaaacgaaataaaatcaggaatactcacgcccgtagacaaacc

SEQ ID NO: 69177 - DNA, 232 bp, Heterodera glycines
  unsure (1)..(232): unsure at all n locations
ctcagagactagctaacaaaatcagcataggcttggacttccgtaccaattattatttttataatgggtttgttaaatgcaaaacaattcacaacagttgttataactccattcagagatganatagaaaaaaaacaaaaataagtttgaagagccctttgagagctgcaccggatgcgagtggccgccgntgntgtacgctcaatcggtgctgtgcaaagacggaaaattg

SEQ ID NO: 69178 - DNA, 1500 bp, Heterodera glycines
  unsure (1)..(1500): unsure at all n locations
tgccgaaaattttatttttgcttctgttgttgccaaatatattgtgctggataaatgaaaatcggagaatagaagaagaaattttgcgtaattatgaccgaaggcacaggttgaccttttgttttttgtttttgaaaaaggctcaaaaatttaggccagtgaaaagggagtcaacggtcactcaagtccaattgtttctgacaataaatcacattgaaaaagtggtgagtgaaaaatggaagtttaatttctgaattattttatgataattctcattttatattaaattgtttttcgtaaaattttcgaaatttggcacttttaacaattttttattcgtgttattaaaaaattaataaaataatttttaaaataggaccaatcggagggaacaatgctactgcatggcgttttatggtaagatgaattttttatatacatttttaatgttaaaaaataattatatttcatattttgaaatataaattaaataaaatttattaaggacttcatggacagatgaatatctgcagtggaacccatctgaacacaactacacctatgtggtttcgttggagacatggaaaatttggcagcccacttttgctctgtataattcggcacgttccactaattggttcgtctacatgaatggagtcagttttatttttagtaaaaattttctggaaaattttcatttatcaaacaattagcaccgtcaaattaggaggggggggggatcttttagatttgaaaattattttgttgtaatattagttaacttaagggtgttaggggtcgtttgtaagtaaccaattgataccaattttgaccaattccgacccaaactcaacaaaaaatcgaaacacgattttcgaatttggtttttttttttaaatttaggttaggaattggatgaaattgatgtagattcgtgagcagcaacccggaaaatcaccatgtacaattttcacttattaagtagcgcaaaattgtagttattcaaaattgtatcgcaagttggaaattaaaaatttgcaaaagatataccatcttaaaaagtgccaaactcaaaaagtgataaatgtcagcaaaatgaaaatctgatttacacatagataaaatattccacttttttcaccacaaggtttccgccactgtggcaaatgatggcaaagttatcgcggctggcactttcaccttccatgtgacgtgccaatttgacttcagtgcctttcccaacgatgtgcaggaatgcccaattgttttagcggattggatgtaaaatgccataaaagaatattagaaaatttaaaaggtttttaaagatttgataattcaaaagtgaatttgtccgggatggtgccacgttcaattggtggcattaatgtgaaaccagctgtacgccttagttttgatccgttgtcggaaacagtgaaaaagcatgtctcaggtggatattcgaatttattttttcattanatttttaaatattttaat

SEQ ID NO: 69179 - DNA, 528 bp, Heterodera glycines
ctacccgattgaaataaaatggaaaaaaaaagcaaagtcaaaagacaaaataggaactttatacaaatttaaaaaagtaatatttttgtatattgtatatgcatttaatcaaatttctactttctttataaaatgttagctaattagtcagcgtctatttattttctgtaaaaatttgccctctttatttaaaattaaattaatataatttcatgaaataagacactaaatgtatagagaatgaattaacgtggtcgattggaataaatggaaaaaaaagcaaagtcaaaacacaaaaccttaaagcactagccgattgaaataaatggaaaaaaaagcaaagtcaaagacaaaaccttaaagcactagccgattgaaataaatggacaaaaaagcaaagtcaaagacaaaaccttaaagcactagccgattgaaataaatggaaaaaaagcaaagtcaaagacaaaaccttaaagcactagccgaagcaaagtcaaagacaaaaccttaaagcactagccgattgaa

SEQ ID NO: 69180 - DNA, 62 bp, Heterodera glycines
atgccaatgccggacaaagcattgcccagcaaagtgatcggattcaaaagcattatgatcag

SEQ ID NO: 69181 - DNA, 733 bp, Heterodera glycines
atgccatcttttaattccgggttggttgcaggtgcagcgcttggtagcgccattggttattatgtgagaaaaaaacgcaataaaataggataatcttttctacagttagggagtcaaacaagcaacgacaatttggtgatccaggcagagcataaccacccaccggtaaacccgcgaggacgcggggaagcgcaggaggatgtgttcaacgaagtccgagaggctcttcgtggacaaggagttcatcagccgactatagagcagcaagtggagactgttgttgcattgagcgacttcattcgtcgcgaacttggcggagttggaaatgtaggaagcgacattgtcataacattgaaacttttcacatttcagactgaacaggtgagcaacgtcggcgagacgtttcagactgaaccggcgagcaacgtcggtgagatgtttcagactgaaccggcgagcaacgtcggcgagacgtttaagactgaaccggcgagcaacgtcaacgtcggggagaccaatcatgtggtagatagggtcgcatatgaagtttataatcttctaacttttataattaaggctgggaacgaagcaaccggcaatggcggtgaatgaccaccaaagaaggaaattgtggtgtgtaatagtgtgttgttatgtcgtgacatttgaatggcatatttgttctttattacatgcataaaattggtgcttttttagaagttatgcaaataaa

SEQ ID NO: 69182 - DNA, 403 bp, Heterodera glycines
atggtcccgtttcgtgatccaaaaactgttgccgagaagcgtttcaacactgctttatgcaaaggccgttcagttattgagcatgcttttggaatttttaaacggcgattttcaattgcaaagttataaagattttttttaaaattaaaaacgctatttcagaacatcatgccgtttgaagcttaggcggatcgcaactgccattctagcagccgctgttctacataatattgcaattgaaatgcgtttgcctgaaccaccagcgacggaagatttaaatgaaaatgatgatttaaacgaaatcaacaatgagaatgaaaatcggaatgccattttaaatgatcgtcaatcgcgccaagctggaattgagaaaagacaagaattggtggcccgttttacctaa

SEQ ID NO: 69183 - DNA, 304 bp, Heterodera glycines
aaaattccctcaaaaataaaaggtctattgcgcaccgccctccctatcatgctcgagagcatttgtatgtgtataaaatttatcaaaaaaagagatagccatttttctgggataacctctaaatataaaaatcctctgtgaaataaaatggcgattgtgcacagccctccgtctcatacgcaagcgcttttgtgaggtataaaatttctcaaaaaaagagatagccatttttctgggatagagtataaatttaaaaattccctcaaaaataaaaagtctattgcgcaccgccctccctatcatg

SEQ ID NO: 69184 - DNA, 304 bp, Heterodera glycines; identical to SEQ ID NO: 51570

SEQ ID NO: 69185 - DNA, 101 bp, Heterodera glycines
  unsure (1)..(101): unsure at all n locations
aaaattccctcaanaataaaaggtctattgcgcaccgccctcccctatcatgctcgagagcatttgtatgtgtataaaatttatcaaaaaaagagatagcc

SEQ ID NO: 69186 - DNA, 323 bp, Heterodera glycines
atttataagcatttgaagggttctcagcagtttccctgcaaaatttggtgagcttctgatcagtctagaacgttgggtgataaaatgaaaaaaataattaaaaaaaaataatgctggtgtggtaagtgtgaagaactgtgttcctccaggcaaaaaattctaagaaaatttataagcatttgtagggttctcagcagtttccctgcaaaatttggtgagcttctgatcagtctagaacgttgggtgataaaatgaaaaaaataatttaaaaaaaataatgctggtgtggtaagtgtgaagaactgtgttcctccaggcaaaaa

SEQ ID NO: 69187 - DNA, 720 bp, Heterodera glycines
atgttggttcagcacaaacatcgcccggcgatcattcccgaattgcaagcgcagatcactgccgaattggaagtggccgaaaagcacaaaaatatccgccgtttatttgcgagaaccttgaagggatgtgaaacggagaataatcaaagcggaataccaatttacgactttgaggagagggagtgcgaatatttggacgtgaagagggcattggaggaggacagagagaccgaaaaaaatagggacaaaaggccaaaaaaggaaactccggcttacgaaatttacgatttaaacgttatttacaaacgaaataacaacccgaaatggcctaatggagaagcattggacaaatatttgacggcaataattgaaatgtacacggaaaagaacaaagataatcgaagagagacaattgcgcgctctttggaacacgcgaaaaggcaactattggatgcggtgcattttgacgggatggtccaattggaggacggcgcctcacaatcagccgccgtcagtaatgcaccgtcagtgactgttaccccggtggtggaaaagcggcaaacggtgcaaacaaaggcgcctacggagaagacgaaagaagcaagtacacctttgaggtgtacaggtggaatcatttattgcctttcaattttcatattcgcgattaacagaggtcgaagcgacagcaacggcgactgccgggcaaaccaatgtggctga

SEQ ID NO: 69188 - DNA, 692 bp, Heterodera glycines
atgagtgaaaaatcccatcatttgttgaactgcttcattggcctgctggcgatgatgcttttcatcagcggaggcaaagcacaagagcaaacaacaccgtaagaagacaaaatgccagataaataaaaatgcaaatatttggacaataattagtgtcctcaattaagccccttgggcacatttttaaatgtttttaaatagtggccctgaatcttgagacaaacatggggcaagggacaagggccagaatttttagaaaaattcaggaaaaccctttttgcttggaaaccctggcattttccgaaaaaccgtagcgttaaatgccaaaaaaatttcaaaattatataaatttccaaaaaaatagcattcgtctgactggtggtgacacctctatgttctccattccaattgccacggtggaccaatgcatgccgcatgaagaatggaatacttttggcatcgaatttcgcctgccaaaacagggaggacactgtgatgaagggtacggtagatcagtggtagaaaattttcaattaaatttcggaaattcacagtatgctcatctgttacccgagcacattggcctaccatgatgtgaacaccgtccacacggttgacgaatttgcagtgcgctctgagctgtacaacctccgcaacatggtcaacaaataggggaaattttagtgacaaaa

SEQ ID NO: 69189 - DNA, 1061 bp, Heterodera glycines
atgaagattcgaccgatggagaaacaatggaagtgagtgcaatgaatgaatggatgcgtttggtagggaatgcaccgcttaaatacgcagaaaattgcataaatttgtcagtcgttgttttcaaaaagtgtgtataaatagccaaaattttgagtcttttccatttttttttggttggttcgaattcattcaaattcactcttctgttctgtccattttcgaccttttgtcctttttaattgtaccattttttggacaatttaggttcgagttttcgatagaaacattaaagagcccccttaatgttttcaaaggatttttaagggcgtagaccaaaaaatagtgcattctaaattgttctccgatgattttgagttcttttccattttttgtttggttcgaatttcattcttcactctctgttcaagtcggctttactttatccctccctaattgaattatttgcaattaaattttagcgcttacacatttccctctctctgctctctgttgcgctatcacaacacaattccaattcgtcaacagcttcttcttccacaattccaattcgtcaacagcttcgatgaatttcaagggcattgtgggttggatgtgcgtggcagtgcttgcgttcgtcggtggagtggtgggttctgagggtcgggggaatcgctttttaatttcggacacggaaaccctatccccctttcagttctgtggcatcaattggatgctccattcgctcagtaagatttgccactatttttctgttcatgttaatgtttgtttcttttatttcagtgaccctgccgggcagaatcgaacggcgtgccggacggcgtgcacagtgggcgggggcagtggcgactaaaaccgatgcaaccggagcggcgactacgacgacgaacgcggcgactaacactgacgcaactggagctgcgactacggcgaaaacgactacgaccacggatggggcggcggcgactacgacgacgaatgccaacaacaatacgacccatgggaatgcgaccagaagcgcctcaaacagcgacagtgactga

SEQ ID NO: 69190 - DNA, 306 bp, Heterodera glycines
atggtcagagcaacaacggccaggacaagggcatcagcagcgcgagcacggagcatcaaaatcaatcgtcgaaatgccaagaaggcgcgtgccgcaattggacgagccggacatgtgagtgaagcggagggcaattaatacactaattaattcaattcggcaccttttttaaatgtgccaatttttcagacacgcaatgcgatggcacgagagaagtgcatgatgtgtctgggcaaagtgagctccatgacgcgtgtgaccatgggctgtgtgcacgaatttcatcgcaggtggaggcggggctaa

SEQ ID NO: 69191 - DNA, 2476 bp, Heterodera glycines
atggcggtacgaaaacgtcccccgtacgaaaacggcggtacgaaaacggcggtacgaaaatggcggtacgaaaacgtccctgaccgcaaaagttatgacaattttttttctcgaaaaacagtacgagttgggtttcgtcccttttttaatctaatataattttttcaaattttgcaggcttataaaaaacacttaggcttatcgtttgatatcaaaataatttatttggttgcaaaataaaaaaaaattagaaaacttcaaaattggcggcgccaaaatgtcccgcgtcaaagtgacccccgactctctccgcgtttccaacgaaatttggcagtataaaaggaacgaaatttacggccaattccacacacacaattcatttttatatttccgccttccgtcggctgatgcccaacacctttgccttccttcgttattttttgtcgccactccgttttttgaattagtaagtatttcaaatttcaacttaatttgcttactcccttctgggttttgaacctaaactcttaaaaaacattttccccaccaattaacaaaaacagcgaaaaaaacaatttttttttgttttcaaaactcatggaaaaatgtttctcccaatgtattttcggtttcgcgctgatcacgaatagggcacatccatttcgactaaactcgaacccccgggcgtgaattcgaacaaaaagtttgaaaacttcaaatttttcgagtttcgcatttttgttttcaaaacaacggcttaaaaacaaagaaacaaacaaaagtcatcaatgaaaaaaaaaattgttagaccatttttgagaccaaaaacacgcgattctaaatatttgagttttcgactgtttgttcgagttcgggcccggggttcgagattggcctaaatggaatgccagttttgtgaaaaactttctaatgacattttctggagtttccctaacttactttttttcaccccatgtaaaaatgccgaaaattttttgtataacttcccgactttttcacaattaatgtctttgcatttaccatatatcaattctccattacattttagctccgtatccctgcttctgtcttctgtataccaatccgtctacaatttggccgaaatgactgtggacatcgtcacgccgggcaccacccaaacagcgaccaggacaaggacgaggaggactgcttcacgccgtcgcgcgtcaacagcagcgcgttcggtgagccgtccctggcgctagtggtcggtcaactgcgtctaatgagacaactttaagaagccatcacatttttcggcacttttgctgtttggtgaatcccgaaaagacaaaaagtcttacacgcgctattttcgtgtttctctttctctgcttccactgtcccttgttatgagcggtagaagagacgcatacttttataagtaaagcaaaagcaacattttttttaaaactatgcgttctctacctctcataacaaggggacagtggaaacagagaaagagaattgtgcaaatagtgtgtgaaaatgaaattctctgtcgttctttttcgggaccctcttaaacagcaaaagtgccgaaaaagatggcttctgaaagttttctcaagctcagttggcccccgcttcagtccctcttttttgctgcaactatttccgtgtctcattttacgccctccccgccgttgttcagagagctcgtcgacgacagcagggcgcctcaaccaacaacagacggacagcgccagtgcgtggtcgaagcagcgcccgagcgcgtgtgagtgcagcggtgcgccgcgcgtcacgtcggcaggggaacaacaacgacggcgacgggaccaggacgaggaagaagcgcggctcggcaatgcgtcgtccgctcaagctcaaaccgctccttggacgaccgaagggatcgcgtaaatcgagggcggcgccgcgcactgctggacaaaagcgtggccgtggacgtccgaggaccgtgaaaaaaggccgtgcccgacgggggaagaacgctgcccagcagcagacgacgacgactgcggatgcagccaccaacactgacgcaaccggagctgcgactgtgacaacggacgcggcgaccactgcgactactccaccgacaacgacgaccgcggacggagcgacggtgaccaacgccaacgaacccggtgcgactacggcgaccaacactgaggcgcccgctgcgactactccagcgacaacgacgaacgcggacggagcgacggtgaccaacgccaacgaacccggtgcgactacgacgacgatggctgcgacgaccaatactgaggcgaccgctgcgacgacaacgacggcgattgcggatggcgcggtggcgactaacactgatccaaccggagcggcgactactccgacgacgaatgcggcgaccaacactgaggcgcccgctgcgactactccagcgacaaccgcggatgtggctttggattag

SEQ ID NO: 69192 - DNA, 52 bp, Heterodera glycines; identical to SEQ ID NO: 52019

SEQ ID NO: 69193 - DNA, 534 bp, Heterodera glycines
ttattttttgcaaaattaattcataagtattttttcagaaagtgctctgaaacgcaccaaatgttaattaaaagttaaataaggctctctgatgctttttctatcaaaagggagatgaataaattttttaaaaatttttaattcctttttaaacaggccaaaaagtttaggcttatattttaaaaagtttcatcgaacctagcgcactaaaatctatataatctctccaaattttgcaggccttctccattgtaaaggactaacttaacctgaaaaaatgccaacgcttgttgtttttaaaatttttcaaaattctgactttttcattacttatttattattttgcaaaattaattcataaatattttttcagaacgtgctctgaaacgcaccaaatgttaattaaaagttaaataaggctctctgatgctttttctatcaaaagggagatgaataaatattttaaaaatttttaattcctttttaaacaggccaaaaagtttaggcttatattttaaaaagtttcatcgaacc

SEQ ID NO: 69194 - DNA, 49 bp, Heterodera glycines; identical to SEQ ID NO: 60106

SEQ ID NO: 69195 - DNA, 235 bp, Heterodera glycines
atcgtttcggggggactgccccgaaaacaaaaaaatcgatttttcaagtgtccgtttggggtactcaaacaattatggggagcaaaaatccaacgcagaattaaagtacaggctatagggaagctactcccgaaggattcggtctccccataaatctgggcgcatcggttcggggggactgccccgaaaacaaaaaaatcgattttttcaagtgtccgtttggggtactcaaaca

SEQ ID NO: 69196 - DNA, 480 bp, Heterodera glycines
ttaattctgcgttggatttttgctccccataattgtcctactaccccaaacggacacttgaaaaaatcgatttatttttgttttcggggcagtccccccgaaccgatgcgcccagatttatggggagaccgaatccttcgggaatagcttccctatagcctgtactttaattctgcgttggatttttgctccccataaatgtttgagtaccccaaacggacacttgaaaaaatcgatttttttgtttcataaatatttttttcagaaagtgctctaaagcgcaccaaattttatttacaacttaattttagcactctgatgctttagtatcaaaaaggaagatggagaaaaaattttttaaaaaatttttccttatattttggttatatcgttttgcttttggtggggtgcttggaacagtggaatcatgcgcacccgtccgatctggcaagttaagcaacgattgctgactagccaaaa

SEQ ID NO: 69197 - DNA, 703 bp, Heterodera glycines
atggtcatgattcacgtgttaattcaaaatcatgatttacgtgttaatttacggtcatgtaagtttaacttacagtcattattcacgtgtcaatttaggggttaattcacgtgacaattcacagtcatgatttacgtgttaatacacggtcatgattcacgtgttaattcacggtcatgtacgtttaattttcagtcattattcacgtgtcaatttacgggttaaatcacgtgtcaattcacgctcattattcacatgtcaatttacgggttaaatcacgtgtcaattcacggtcatgagttacgtgttaattcacgatcatgatttacgtgttaatacacggtcatgattcacgtgttaatacacggtcatgattcacgtgttaattcaaaatcatgatttacgtgttaatttacggtcatgattcacgtgttaattcacggtcatgtacgttaaatttacagtcattattcacgtgtctatttacgggttaaatcacgtgtttcactgtcatgattcacgtgctcaatcaggggcgaattaaaggtaacggtcataattcactatccataattaattagtccaaattaaagttgataaataattgaagactctaatacatcaaatttaaaagaattaaattaaaaggcatgaaatatatatatatatatatatataaattagtcataaattaatagtatga

SEQ ID NO: 69198 - DNA, 101 bp, Heterodera glycines
ctgtgccaagtgtatgggacacaaattcaacttggccaaagaaacggaacagtacggaaaagaggacgaggaggaggaggaagaagaggagcaggaggatg

SEQ ID NO: 69199 - DNA, 428 bp, Heterodera glycines
atgcgaaatgcgctaagaaacaatgcacagaatcggtggacaacggaaaaggacgaaacggacggaaaatttgtgataccctaccgaataacgggcaatttcagtgggtctaaaaagcactcaaatgaaataaataattaatcgaagcgaattaaaaaggaaaatttaattaccccaattaaattcaataaattaattttagcacaaaaggaattggcagtgattttcggagcaatggaagaaattgagcggaatacgtgcataaaattcaggacaaaaaggagcagcggaggaggggacaaagactttgtggacattcaaaacgaatacggcgaagggtaaaaagcaattcattaatcattaggaattgtttaattatggcatttaaagcaatagtttaaatggggccttcccaaatccaaattaaa

SEQ ID NO: 69200 - DNA, 857 bp, Heterodera glycines
atggaccaaagggacttcggcacttttatgccaaaagttacgaaattaatgcttaaggaattgccggccgatttagccgcccttttgccttccaaagtcgtagcggatattaatgcattgctggccaacaagtcgctggactgtgctcagaaattggaaaagatcgacgaactgatgaaaacggtgccggacgaagtgatggaaaagctgccgatgccgccgcatttggcacaacttccggaggaagtccgtgccatgaaatagcaaaattccaataaatttaaatcgaatttcgtgtaaattgttaggtgcaagcccaaatcaagaaattgtgcctagaaacgaagcacaaatcggtggaagaaaagaaagaagcattcaaagcgtacgctggcactttgcccgcggaacagcgagcgatcatttgcaaggaaaagccatcatgtggcaaatgatagaaccgatcagaaatggggacggacggaggacggaaaagttatcagaggaaaatgcgatcagataatcagcccaatccattgtagtcaatttttagtgtaattaatccgaccaatttgtaacttttttgtgcaattggcaatggcttttgtcattaaaaaacaattttggaaaggaaattaagcacaataatccatctttttgtatccatttttgtgttgtgcaatttttggaccaagaaaaaaaattgattgatgatcttccctaattatttttttattttgaaagtttttccattatttaaatttttccgattcttttttttgcgtcatcccactgaacaaataataatttctttccaaatgaatgggaattttgctgaactaattccaattaataaa

SEQ ID NO: 69201 - DNA, 731 bp, Heterodera glycines
atgaatccatcccttcggcattctttcagcatcgaaaacattttaacaaaaagcgtaaattttgagaccttttctgagtaagtccgaaatgaaattgtttacaaaattttgtctgaattattaggccagaatttgccaacaaatctctccaacaattttcgccatcttttctattctcgtgagaaattgtttaaattattatgaaaattgaccaaaatattaaggccattgcttccgcaccatttcctcggccgctgttttgacaaagtgccaacatttgtcttagaaccgccgccaaaagcatttccaactgaatttagcagcgcattttttgagcggaataatggagaacgagaaggtgttagaagttagaaaacgcaaaatacagtaacataaatgcaaaaatcccacgataaacccataaatacggtaaagcacagtaatcgtaaggaagaagctgactgctgggcgcttaaaatgctgaaagcgataagatccataaaaagaaagagcggatgtgcctcgatagctcaatggtagaattgtccacggaatggggtggacgagtgggttcgattcccatgcgatgcctaacattttgcccatttcttatttaatgtatacatatcacaccgaaagaaatagaaaatataaatagaaaaatgaattcaaattttaaccgatgcttcactctttttgattcgtattttagtcgaatttgaaatatttaa

SEQ ID NO: 69202 - DNA, 596 bp, Heterodera glycines
atggcaagtcaagcggaaatggcaaatttatttcggcaattaacggatgccctccaaaacattgcaacccaaacaaacccaaacccgaataaacaaaattccgacctattcactacaattaattcacaattgtctgagtttgtgtataatccggaaacggattctacatttgacatttggcatgatcggtttggcgctttcatcgagaaggacggacagcaaatgccagacgacatgaaaacgcggttacttttgggtaaaatgagttcacaggattacgcgaggtattctgagagtattttgccacaaaaaccaacaagtcggacaaagaacgtggcgatcaaattcgaagcaattgtcgaggagtgccgcaccattttgtcacttcgtagtgcagcggcagctctggaacaacccggccaaagtttcaatgccaatgcaattgctttaaaaccccaacaggcaaaagagcgacatagtcggcatcaaaagttcagtccttcatcacgccgtgaaaacagcggaaatcagtcccgctctccatcattgaacattcgccgatcatcaaattcgcgtccaccgttcccctgcaagtg

SEQ ID NO: 69203 - DNA, 783 bp, Heterodera glycines
tttgagaacagctcggtccgatcgtgttgcccttcgcaaacgtcgcttcatcggtgatctgatcgacattggcaaatttgcttttgatactggctgcaaattgttccacaccgtgatctgcgacttgggcaaaaaacggaagcgtgaggccgcctatggcaaagacgagccggcaccaaacccggcagcggtgaacgagttcaaagtcctgcagagcacccctattgacgagcttgtggaaaaggtgaagaaacagctgagagaagtggcggagaagcctggcttcaaggatctgagcccggtggaccaggaagacacacttttggatgcaatcagcgcagacgatcagtttatgaaggtaaaaccaattgttgggtggacgagccgatttctattgtttaggacctcgttagagaatctatcgacgattcagtggtacagctgcggaaagtgacggacgactttgtcacgtactctcatgcaaatttggaggggaggaaggccatgaagaaagtgttcgacgcctacgagaacacctacaagacgccgaagcagaagctggacaaagtgaagcagctgcaagcggaaatgtcggatgagctgcgcaacagcctgaagatgaccacggatcctgaggtgctgaaggaggcgtcgttcgccttcggcgatgtgccgaccttcaccggaatcaccaagagagtgtcggcgttgccgcccaaatacttgagcatcaaaggccatgaacaatgcgtggacaagtacgtcgtgtacggttggcactag

SEQ ID NO: 69204 - DNA, 560 bp, Heterodera glycines
atggcaaaattaattttgttggcgttggcctttctgagcatgtttggcattgtgtgcagtttggaggaaccgtaaaattttgaaaaataaaattcgatataaattttaaaaataatttaaaatagaaatttgtaaaaaataatttaacatataaaaaaacaacattatctacaatgtttaatatttttttggggtttcagcattcatttggattgattcagtttaattatcttttcggaaaagatgagatgattgaaaaaatttggattatgtgtaatttaattggccctaattaaatcggaggccaagtgaatttaaatttcaagtctttctttgttcgataaatttttggaatttttaattttaaaaatttatttttattttttagctccgtttgctgccaccagtgcggcaaagagtttttggaatgccaaagcacgtgcaaaccggaggatcgggcgggcaatgtggaatgtcctgagtactgcaatttcgggttggaagactgctcgcgcgataagtgtcgtaagccatgccctcgtccgaaagaggaacactga

SEQ ID NO: 69205 - DNA, 1126 bp, Heterodera glycines
  unsure (1)..(1126): unsure at all n locations
atgcccactgtgttgatctatccgattgatgcgcacnaaaaattggatgaacaggtgaaatgtttgctcaaacgtgcctctggcgacgtgtcgtccacgacaaagaaattgaaggcgcaggtgagcgggcaaatacttttaaccaaaattaatcacttgtataacttttcatgtttttctatatttttgctaattaacctccctccccccttctctaaaaggatgccattctcgaagcattggagaccatcgaaggcacttccttccaatacatgaagcgcgaccaaattgcacgtctgatgaccaacaaaggcattttattggctcggatggaaaagtagaaaagataaaattaaaaacaaaatttaagatttttgcccgtttcagacgcgacgaggcgggccgtgccttctctgcagctgcacaactcgagctgagcgacacggccatgccatcgtcattcgcttccgtgtggaagcattgggccaattttctgggcaatctttacctggctaaccagtgagtttacttcacttttttcaatgagttttgattaattttaagacgttgctatttgaatttaaatttaaaaataaaataaatttttgaaaaattttcatagcagattttaaaatttatgataaattattaacaatgcaattaaaaaatttcaaaattcaccactttagctctgagagttcagcactgagcaccggtgtgcaggccatggcgtccactttggagcacatttcgatggtcggtgcgcaaaagtcgcgcacttctgtggccaaattgttgtggctgctcaaaattgcctccgcatgcccttccgaaaagctgatgaatgccgtggatgagctgctgttccgctacgtggacaccattcagccggcgaattggcttttttggtgggaatggcacattttaaaatgggcactgttttctcttaatttgcactaaatccaggttgaacgaactgatcactgatgttcaacagcggaggggtaacgcgatggccgagattctaaagcgagtcggtctcctgcagccgcaagaagtgttctgcgcattgcgcgtcgaacttgggccaagccatgttggccgttacatccaacaatgttcgtaa

SEQ ID NO: 69206 - DNA, 154 bp, Heterodera glycines
taagcctaaactttttggcctgtttaaaaaggaattaaaaatttttaaaaattttattcatctcccttttgataaaaaagcatcagagagccttatttaacttttaattaacatttggtgcgtttcagagcacgttctaaaaaatatttatgaa

SEQ ID NO: 69207 - DNA, 72 bp, Heterodera glycines
ttaaaaaggaattaaaaatttttaaaaattttattcatctccctttgatagaaaaagcatcagagagcctta

SEQ ID NO: 69208 - DNA, 1397 bp, Heterodera glycines
  unsure (1)..(1397): unsure at all n locations
atgacccagtttctcaatgacggcttngctgccacatacttggcatacttggcaaccatatcacaacgaaaagtggtcgttgttgacccaatggtatggagcaatggcctggacagagtcatgccttacaaaaatatgacatttgggtacgaccctaatgttccggcagaagttatacttttgccagtacatttccctggacattggactctcattgtccatgatgttcaatgtggtactcattttgccgactctttgcctacccaatatggcagattggatgtgcaactgacggacaaaattagaaagataatttctgacattttgccgtccacattgttgaccgggattgttgatgtccaaaatcttacggcccaacacgatggaaatagctgcgggtactttgtgtgcctgtatgctgaatcatggcttatgaacaaccgcacatttgttctaccagatttatccatcaattatgaaaaaaagcgcattttgtggcacatcaatgagctgtatggctctgataatgtgccatatcatccaagggaaggggtgccaactccttacccaattgtctacagacatgcggatgaagcgcagtctacatccaaggccgctgagccaatggaaattgatgaagaagatgacataatgatcatcgggccacagatgagtggacaggcagttaatgctattctcacccaagcccaagtggcaggtgaaaaccaagctgacacgcttggtttggtgtcggagtcttgcgcaccgcaagagccaattgcgcaggcagacgatgcaatatttgtcagaccgaagacgccaccgaggcgatcatcgcggataggcagacggcaatcagcttcgattagccgttcgccttcacccgcaccgagacgcagcttattagcaaaggctgttgagaaagtcactgcatttacgcagcgttgctaccttgcccacaagggttggtgctgtgctgccgcagcagcaaagcattatccaggatattcaaattctggtaagcttggtgacaagaagtgctctcattgtggagcactactcttcccgcatgaggacagcagagtttgctgtcgtcaaggaagagttgttttgccaaagcttaacccgcacccaaaagagcttgaagagctcatcgtgtgcgacaaacaaccccgcgaagggaaggagtttgttcggaatatgtcgcggtacaataatttgctccaatttgcgagtgtttcggctggcaataagccatgccctgctggcggaccgatggcagtaattctcaacggagaattccatcgccgcataagcagcatgcaggctggcacaacccagatagtacccattgttctactagaaagaactgcatctgttttagtgaaaagtgctag

SEQ ID NO: 69209 - DNA, 75 bp, Heterodera glycines
tccaagtggggaattgaacccaggcgaaaaattatgaaagatagaaagtttaaccactacaccacatgtgcatgt

SEQ ID NO: 69210 - DNA, 2500 bp, Heterodera glycines
  unsure (1)..(2500): unsure at all n locations
ttccntttttctaactaaacaaaatgttatcccaattcacattttacccttttcagttatgtttgcgccactttcatttttgaatcgatggcaattgcgttttgcgaagggcaccgcctcgtgagcaattgcaggagggtgcctttgtggtggaggacgatgtgccgtcgagtgcggacggggaaatgagcgaggttcgcgtaggaagtgtcgtggtggacgcggacggctcctccgaacaacgcttctatttcccggcaaaccccgcgggcgcatcggcgtacattcagtcgcaaaacgaacgccgcgggcaaacgccgaccgaatccgatttcgaaatcgaaaggagaatcgaaattgtaacgcaatgcgattttggcttaaaaatattacatttgcttgtcagagtgaaatggcccatttgtttctgggacagtcgggcaccattctctcctatcttttgctcaccatttatctgttcggcgacctcgcggtgagaatttgcatttttaatttcaaaagcctgaatcatacatagttcaactaactgccataataaatattaggatttggttctctctcagttaatgtaacagaaaagtatactttgggaaaagatgttttttatggagaaaatgagtgtcaaatttcaaattgtcgggtcggagaaacattttctttgccccaattcacgcttttttctcaaaatcacttgcttttcagtcctaaatttgcctttttccaatgcttttgctttatgttcgtccccattctttttgggtactttcccattatgagaccacaagccaaaattttaaaaaatcaacaaaggtgcgcggttgcattactttggaggcataaacataaattgctaatttatgcggtgggaatgtggaatttgcgcgccctttgtagattttttaaaatttttgcttgtggtctcataatgggaaagaacctctttttgccttctctgctgatattgccccttttctcaggtgtattcctccactgtccccaagtcccttatgaatgtgatttgctcttcgctgaatgtttctgccgtttccatcagtcccttctccccgtgccattctcatccaaatgatcttttccattcgctcagtcgcttcgccgtttatcgcatttgcatcttcgcttttctcctcttctgtctgccaatggtttttcccttttattccaataaaattgctaattcttttgttcagattttgatgggaatcactcggacgaaatggcttcaattggccacgactctttcgagatggacaggcgagaaaacggggggggggggattattaattggtgaaattgtatcaatcacttaaaaattgacaattttaatgtaaaatcttttaaaatatttcgtccttttttgattttttcctccaaaaagttaaatttgctcatttcggatcgcaaatccatttataaattttacaaaataaaaaaaaattatttcacggcaacgccgtttttcgaaaatttttgacgaggaaaaagaaaacgtcacacgccgaggacggcactccgtccgagtcgtcaaagtatgggatttccctgcaacaaagccgagaattgggtccttaacacaaaccatgggcccaatctcacgccgtttgttgccaaacaattggaaaggggcaaaaggtgctttcagccgctgggcatttgccgtaagcgaaaagcaaatttgttcccacaatttacaattttattaccaactatttggttttaaatttatcctacatttgcgttggtttagcctttttgctgatgattgtcttggccatcgcccaattggcccacaacggcccaaagggttcgccggcacctgttaattttcacggcttcggatctttgttcggcgtcgccgtttacgcctttatgtgccaccattcactccctgctctgatcaccccaattaggcgagtgccttcgcccaatttgctcacattttgccctgttcaggaataagcatcatttgagtgccaaattgacttccgtttactctctcgttttccttttttactgcgccctttctttgagcggtgccttcacttttgcgcatgtccaagacatttacaccatcaattttctcgtccgtttccatccgttttctctcccatttttcctgtattttcgcttcctttcagcacgacgaacaaacgggcggtcttctgagactgaccgattactttttggcactgttccccgtctttatgctcacttcctcctacgtaattgtggccattacgctgtgcaataacatccgcgtgctcggcactttgtttgaccgttgcaaaagggtcggggggacggacggaagagcgaagtgagtgaccgatcggagaagggatgccctaattggctttgggttcctcttcttcgtaattgatggtgccctccttttcagtgcttcttccgtcaatgaggagagtgaagcgcttttgtccgactttgcccacccaaattggca

SEQ ID NO: 69211 - DNA, 315 bp, Heterodera glycines
ccggtcaccatgtccaaccgtcagcacaccaacgttttggagctgttctttcgccgaccccaccaccttcggcttatccgtccgctggtgtcgtcatctcttccaaagtcccgtcattctttcgcagtgttccgcccgcttccccctttgtttgtcccgcacctccttcggttgttctctctcaaccgcccccgatgggctctccactgccccaacgggcgcagctgagccgtgagcagttgctgagcaggcacagccgagacgtggaggcacgcaaagtcacggtcaaactgtaccacttgcagcggacaatca

SEQ ID NO: 69212 - DNA, 132 bp, Heterodera glycines
ggacctaccttttccactatttttacaagttttttgccttaaaacggccaaaatttggtcatttttaatgaaaaagtgcagttgttacccagcagtggaaaaaaagttattggttaaatagcaaaaaaaaaa

SEQ ID NO: 69213 - DNA, 687 bp, Heterodera glycines
atgaaagtatgcttattaatttcttcatttgcatttttgattaccatcttaattagtaataattatgttggatcagaaaagaaaaaaatggaacaaaaaacatttgacgaaatatttggagaaaaatgggaagaaaaaagaaacgaagaacagaaaaaaagagaaataattggaaaatttaataaaataaaagagaaaattaagcaaaaaggaagaaaatacgcaagaaaagaatggagtaaaattgaaggaaaaatagcaaaaaaattgggcacaaatcgccaatatatttatgaatggatcaaagaattgggattaaatcaaaagaattgctacaaatcaaaaactgaagaagaaaagattgaaattatcaataaattcattgaaatgcaaaatgaatttaagcaaaaaagaaaatattcaagaaaagaatggaacaaaaattatgaagaaatttgtaagaaaatcggagttagccttttcataattaaaaaatggatgaaacaatttggaattagccgaaaaataacggagaaagaaaaaatggagaaaatgaaaatttattggcacataaaaaaagaaaagccgaaaatgagtgacaaagaaattggaaaaatgttgaaaattcatcaaaataccattggcaattggaagaaacaatttgtacacggactaatggaagattga

SEQ ID NO: 69214 - DNA, 1040 bp, Heterodera glycines
atgcaccaagggacaccaaacgtgccaacagtgtcgaacaacggaacatcgtttggacgaatagcacctccgggaatttcggacggcacaatgcaccaaggcataccaaatgtgccaacagtgtcgaacaacggaacatcgtttgggcgagtggcacctccgggaatttcggacggcacaatgaaccaagggataccaaatgtgccaacagtgtcgaacaacggaacatcgtttggacgaataacgcctcagggaatttccgacggcataatgcaccaagggacaccaaacgtgccaacagtgtcgaacaacggaacatcgtttggacgaataacacctcagggaatttcggacggcataatgcaccaagggacaccaaacgtgccaacagtgtcgaacaacggaacatcgtttgggcgagtggcacctccgggaatttcggacggcacaatgaaccaagggataccaaatgtgccaacagtgtcgaacaacggaacatcgtttggacgaataacacctcagggaatttcggacggcataatgcaccaagggacaccaaacgtgccaacagtgtcgaacaacggaacatcgtttgggcgagtggcacctcagggaatttcggacggcacaatgcaccaagggacaccaaatgtgccaacactgtcgaacaacggaacatcgtttggacgaataacgcctcagggaatttcggacggcataatgcaccaaggcataccaaatgtgccaacactgtcgaacaacggaacatcgtttggacgaataacgcctcagggaatttcgcacggcataatgcaccaaggcataccaaatgtgccaacagtgtcgaacaacggaacatcgtttgggcgagtggcacctccggggatttcggacggcacaatgaaccaaggcataccaaatgtgccaacattgtcgaacaacggaacatcgtttgggcgagtggcacctccgggaatttcggacggcacaatgaaccaagggacaccaaatgtgccaacactgtcgaacaacggaacatc

SEQ ID NO: 69215 - DNA, 82 bp, Heterodera glycines
cgaaattcccggaggtgccactcgcccaaacgatgttccgttgttcgacaatgttggcacatttggtatgccttggttcatt

SEQ ID NO: 69216 - DNA, 552 bp, Heterodera glycines
atgtgtacttatcaaagaatgtacttggaaaaaggaaaacagaaaccaaaaacagaaaccaaacaatgtaagtgtccttatcgcgttggacaaaaacaaacaaaaacaagaacaataaaaaaatttttggcatttatggcattttatgccttttcaaattttgccacatttttgaaaaaaaatggtaacatgtgatttcgtcagtgagtgatttcgtcagtacggggttcgtagtaataataatattttttttacgaaaaaattttaataattcataaattaaattcgttcaaaatatattaaaaaatatgtaaattcaaaaataaagattatttgttcgattatcaacctattttcggccggtcacttacatataagcaaaataatttgtatttgagcctcgtctttgctacttttatctcctatatgttcattctagatggtcgtcagccattatcattctgcattaacctcgaaatttcgctttcaattttcttaacagtgttggagcgcgaccgcgagttttctgtccgcgttccacctctttcttaa

SEQ ID NO: 69217 - DNA, 910 bp, Heterodera glycines
atgtcgtcaaccaacagcaacaacaacgggagagcagttcaacaacaacagcaaaacaatggccgggaaagtgccggcggtgccatcaaacaaagggacggagcagcgaaagagccgacggcacagcttcagcaacaacaacagaaaattatcagtgagtttattatatatgtgtcgtttggtgcatggatgggagtatcaatgccaaaaagtaatcgaaaagcggcacttgccgtactccaatggcatagccggggttggggctgagggggctaagccccgccctcccccaaaaatataaattgaattcagccccccccccccgtattataaaaaagttttaggaattttgtgatcggcttgtttaccggccgagttttcggcagatttgtgaggttttatactgcttgagattgcccctcttggcaacattcccgataaaggaaagggtgccatcaagcatttcaacttttattggcatttctaagggaatcagtcccaacttaccaacgagttgctgttttgttttagggtcaaacatttttgtggcattaaatatggccattctcaaactcgagagtcccgacccgggcagcgcccaattaactaattaattaattatcacttaattaattgcccagcaaaaagtcaatggttggattggacacggtggagtcgttgtgagaacggtgaacgaattcgggtgcgcaaatgtttgagcatcaacggtggtccatgtgaggtcagttgtggtgcagggcgtggtgagcttaaaaaccccaccaacgaagaaaaaattgtattttagcatttcccaatcaaaaattgtccaattttaaaaacagaaagaaaattaatcgagaacgaagaccgagaagaaaatagccctgggaaaaagtaggaaaagtga

SEQ ID NO: 69218 - DNA, 930 bp, Heterodera glycines
aagcactcactttgcccatcaccgtggaacagttgcgcatctttgccaattctccaattgacgtggcggaggaagaacggcttgaccaggtggcctccccccccccccccacaatttgttcggagaccgaaagaatttggcccattaaattgacattttctgttttacgattaaaaaaacgaatagctagcagcaacattctttatttaggagaaaagtcgcaaggtgctggagctttaccgtggcaaaacggtcaaacagttggaggcgttgttgtttcaacagcagcaacagaatggtaatggttggtcacattggggtgcactgtgttctcccccccccccttcaaattaattttgaaaaaaattttagaatgttttttataaaaaacttcaataattttgaaacatatttcagcgttattgaaaatttttttgaaaaactaagtaattgactataaaatttgtaagaatcgctagaagattttttgaaaaaaaaatctttaatttttttttataaaaatttttctatttttatttctaaaatcctctaattggctattttagtgtctctgcatttttttataacaaaaattattaaaaaatattcataaaattgaattaaaataaaatccaagcaaaattgaaaaaaaaaactgaaaataaaggaaatccacttcctctgcaagaatttaaaaaatccaaaaaaactattttttaaggtggtgctgccatcaattgcaattgtgccaatgaattgaccaacggtgagaatggcactggtgcagtaacggtcaaccaacaccatcatcaccagcccaattgtgctgccatcgccacaacaaaaacatcgccgacagtggccacagaggccgtcgttgtggaaacattggcacaagcggtccaccggctcacccaacggcacgaagaa

SEQ ID NO: 69219 - DNA, 260 bp, Heterodera glycines
  unsure (1)..(260): unsure at all n locations
atgcgcaactgttccacggtgatgggcaaagtgagtgcttctgaagaggaaaaaccaattcaaaataattcaaatttctagcaaaaaaaagtaaaacaaacccgagcttggaatattccgaaagatttagtaaaacaaagaatacacatttggaaaaaggcaatgagaagcggagcaaattaaaaaaaactccctatccttattatgcaaatttttagaanaaagtgactaaatttgtcggaaaaactccgagcatgtaa

SEQ ID NO: 69220 - DNA, 593 bp, Heterodera glycines
  unsure (1)..(593): unsure at all n locations
gntaagttagtcctgtaccggggagtatgcctataaaatttggtacgattttatagcttattgaaagagctagagccgaagaaaatttttttaatttaagcctaaactttttggcatgtttaaaaagcaattaaaaattttattcatctccctttttgatagtaaaagcatcagagagccttatttaacttgtacataaaatttggtgcgtttcagagcactttctgaaaaaatatttatgaattaatttttcaaaaaataaataaacagttaaaaactcagaatttctaaaaaaatttaaaatcaattacaattgtcattttttcaggtcaagttagtcctgtaccggggagtatgcctataaaatttggtacgattttattgcttattgaaagagctagagccgaagaaaattttttaatttaagcctaaactttttggcatgtttaaaaagcaaattaaaaattttattcatctccctttttgatagtaaaagcatcagagagccttatttaacttgtaaataacttggttgcgtttaagagcactttctgaaaaaatatttatgaattaattttgcaaaaaataataaa

SEQ ID NO: 69221 - DNA, 892 bp, Heterodera glycines
  unsure (1)..(892): unsure at all n locations
atgggagncaaaaagattggccaccatttgaaacgtgtctttttatttggaaaaatcttcgcctatttttggtaatttaatttatttattaaaataaaagaattattaagtgagtggagcaaaggagaaaaatatgaagaaagtcacgaaaaattgtggaaaatatttgtaaataatttgtcggatttgaacaaaaattcaaacgaaaaacaattaaattttattaaaatgatggaaaatcttttgaattatttgcgaaatcaatcgccccaaatcagtgccgacgcccaaaggaactcaaaagaattgttggccaattgtgtcaatcagtttttacttctttgcgaaagcaatgccgagttttttgaaaattttcgggaattgtccaaaagtcgcgcagttttcaaagaaattctcgattttgcttccaaaggaatggaagaaatgcttcccaaccgattaatgaattggtttaatggtgggaaaaaataaaaaattaattaggaaaattaactaatttttaaataaaaatctagatcataacaaaaaccaaaaggaccttgaaaatttcggtgttggacgatcttttgctgatcgcatctttgagaagagtaatatcaaaaagtcatacgacgaatgcccaaaggaaaatatgacgaacaaagaactgatcagggctgatcagaaagcacaaagcaatggtgaaaaaatctttttcattaaattttaaatcctctaaatttttttaattaatcaaaattattatttattaaatgattttttgtttgtcagatcctgaggcttattacttgatgacttcttacattgacttcttgcaaacatcagcagatgatcggtaaattgaattttacgaattgccaaaaatctttaa

SEQ ID NO: 69222 - DNA, 652 bp, Heterodera glycines
atgccaaaacaaaacgaaatcgttttaaaatattcctttctggacttgacttggtttcttgatatcgaagctgttttctacgctatttctaaaacggttataccaaaccccagatttttgaatccggttttcagaaaaaatgccttgtggtgaaaacaatatttcacatttcactccataactttgtgagttcggcacggatcgagaccgggataagaccattgaaaagagcagctcgagctctacaagaaggtatggaaagaaaaaatagttatttctgggactttttcagaaatcagaattaattctccaatgtggcccaaattttagggccccagccacagccccttgcttctcccagttttaagtcttggatttgtcaaataaattcaagacttcaaaataataatcaaaaattctcttaaaatttttttgaacccaattcaaaaaaggaaaaaaatttgcagtcaaaaaattattcgaatttctccaattttgtttccataatttccgaaagttattcggtatcataatgccaaaacaaaacgaaatcgttttaaaatattcctttctggacttgacttggtttcttgatatcgaagctgttttctacgctatttctaaaacggttataccaaaccccagattgtga

SEQ ID NO: 69223 - DNA, 1042 bp, Heterodera glycines
ccaaagtgattaacgacaatgataaagctgaaggaagcactgggccttctgcggctaatcatcagcagaatgtcagtgaacaatacctcacaaaattggagcttgaaaaggtgagttaatttttttaaaaaaagttttgccaatttctttttttccgatggtttttcatctaaattccggttttcgacagattttatggtaccaaatttccagttgctaaatgaatttttccaacgaaattcggatttccggtttttaattccaaatcgacaaccatggggcttattgcgagaaaaaaaaaattgacatttaagcgaatttgttggcatattttggctctcccaagacaaaatttcaagaaaatttacctgtttttctgggaatttccctgtttggttattggctgctaaagaaacaatggcatttggtgaaaaaaaaaacatttttgtatttcagaggctgctcaaagccgaattgaagcaaagagaaatgatggaagagcttaaagagttgaaagatgccaacattgaacagcagaaaaaggagaatggtaatggaaaattacgataggaaattaaaaagtttaaaaattaataaattacaaattaaagaattaggtatttgtttttcaaaaagttcgctaattaaacaaaaatatttaagcgttcattggacaaatccaagagttgaaggatgaacagcagaagtgcttggacaaatatgaagcattggaaaaagaattggccagaaaatacagcaagcttttttaaaattaattgcttgcaaattttctttgaaaatatacgaagttatggttcctagggttttaacatatattttttgtgctggttttcttcactaaaaatacacgaaaaatccatttttttcatggtttcaatttcgcctatatttttgccgttttcgccccgatttcgacacttatttttggtgtttgttaaacaaatcttaattatttcccaatcaaattccgatccaaattcgaaaatcaatttttaattcttcaatttcattcgaaaattaa

SEQ ID NO: 69224 - DNA, 694 bp, Heterodera glycines
atgctgatcaaaaaaggtagcaacaccaagttgatcagatcactccttcatggtgatctgatcagcccattttggctgggaacgaggggtaaatttcaaaaaaaatttctagggggttgggaaaatttttctggaaattttgagtaggccgattttatagagcacaaaattctctacaatattcaaaaaaccgcatgtctctatgacttataccggctgaggtatgggcaagcgccaattcgaatcttaatggagtattaattattgctgttaattagtactaattaacaattaatttgcacctcctttttccgaagcggtgcaccaaaggtaaatggagtgaaggtgctgatgtccagcccagaatatgaggaagggaacgagtgagaccgaggattggatttggggggaaaaaggaataagccaaaatccgggccctggataaatgacctccccaaattggtaataccttggccgctctctagctcgcattcgcgtacggcgatgggcgagaaggagtaaactataagatatatattggccaatctcatgggatgataattgccccgcgctcctctcttgtctctcgtttttcgactatctcttctctccactgctacggtatagagtgcactctttccgtataaaatactcgaatttagtgccgttgtaagtcaaatagatggtaacaata

SEQ ID NO: 69225 - DNA, 517 bp, Heterodera glycines
tcaaaaaaaaatttgaaaaaaataaatttcagataaaaatatatatttccgaaagattaataaattaaattttaaaaaaatgcaaaacctaggctttttaataataacgtacgttctatagaaacctaacagatattctcattttttaaaatacaagaatttagtggataacaaattattatatattattattttctttggttgctgtcgatggtcaatagaaatggataaaattgctcattgcttgctggtctgctgtttattaataattttttttcgattgtacggactatggagaaaatgaaaaatgtataaattaacatttgttgcattaatcatccatcaatagggatgcgatttttaggcaaatgcctaaaatttttgcgcacttaatacgtacagataagcacgaacaacgcattttccgcttgatttggcgtgtctacgatgacttttataatgcctaactttgcctattttggattttttgtgcttaatgcctatttcgccgattttt

SEQ ID NO: 69226 - DNA, 74 bp, Heterodera glycines
ttttgtgacataaacatttatttgatttattttaccatattcacaatttgatcaaaatataggtggtcaaaagt

SEQ ID NO: 69227 - DNA, 1158 bp, Heterodera glycines
atgactgaaaagggcataaattccaaaaaattgaaaaaaaatacaaaacaagcacaggttggaaactaaaaacaagaaaatttatcggggtctaaacccttggtctaggttaaaattttcatttttacctaaattaaagaatttttaattgccaaaaattgccggtccgtgcaattgtaatttttgaagttttttaaaaaatggaataaaataaatcgcaaaaccaaaaactcagatcattttttctcctcatcaatatgcctttttaagctattgagttcactaaaactggataccattatttgttgattattttttaatcctttttcttttctacattatctatttttcggaataattttgattccatatacaattgattatttctttgttgttgtattttacaaattatatattgcatatttgctacggaatattttatttattgtatatgtatttatttaatatgattttgcagagacttttagcatttaaagaagccgacatgaattatcttcttgccactattttgattcaacaatttatcattttagtatgtggtgcgaatgaaaaggtaaacttagattgattaattactttaattaatttttaaattattaaaatatttaaaaaaattaaggaaattattacattatacaaatttatgtgcaaagagttgactgaaaatgatgaagcaaatttatacagaaacactaaagattggcaacatatcaaaacaattatccacaatgagcaaattatggacaaatttgagactttaattgagtggcaaattcgctattcatctattgaacgttggttcaactattgtgaaaagctcaaaacatatatcaattctaaaaatggtatatttaaatttaaaataataaaataggaaaaaaatggattttttttaaatcagttaatggcgaagcattactaatgtcaatttcactgaagccaaagtttacattgccaaacggaaatggcattttgccaattgccaaggcaatggctaacattgttgaagcatacaaaaatattttcatgggaaactgtgaaaaaattttccgaaattgttacaaaaaaataattaagcaagaagaaaattcttcagaaatgaattttgaaaacaaagaagattcaatcaaggtttga

SEQ ID NO: 69228 - DNA, 836 bp, Heterodera glycines
atggactacggcttgggacgcatacgccgaagactctccaactatggagcgatgtcaccgacaaagagtgtccaggaggtgcaacccgtggctttgtcttgggaccgtctcaccgttcggcaatttcttggtaaaccagtcggagttgtgtcctctatgtcaaagattgtttcgactttcttagactacgtgtccggcaaggccgacactgaccaactcgtggcactaatgggcgacggcggagtgggcaaaacaacgcttttgaacactttgctgaaccgaaatttgaagaatctgagcatggaggaccaagtgctgatcaacgcgcattccttgggccaattcatcaattacgtcatcaaggtgagtcttagcgatgcgaagtgcggaggttcgtgattccttgactcggatattccccaaatagtttttcgaaccccttttattatccttataatttgcatccaatttcagtacgtgcaacatgacgacttgttcatgggcacgctgactatgaaggagcatctgatggcgcaggcacagcttcggatggtcggacacacccaacggacgatgcgcagacgcgtcaatgaggtgggatttgggggatggacagaggcagtagcaaactggaaatcatttaaggtaattgacgagtttggtctgcaagagtgtcgccacgagcccgttggattcagcggggtaattatcatttttttcaaatttacaaatacaatttttaggacaaaaagggcattttcggggtggtgaggcggcgtccgtttgctgttcgcttccgaacttatgaacaatccgcaaatcatttttgccgatga

SEQ ID NO: 69229 - DNA, 2262 bp, Heterodera glycines
atggactacggcttgggacgcatacgccgaagactctccaactatggagcgatgtcaccgacaaagagtgtccaggaggtgcaacccgtggctttgtcttgggaccgtctcaccgtttggcaatttcttggtaaaccagtcggagttgtgtcctctatgtcaaagattgtttcgactttcttagactacgtgtccggcaaggccgacactgaccaactcgtggcactaatgggcgacggcggagtgggcaaaacaacgcttttgaacactttgctgaaccgaaatttgaagaatctgagcatggaggaccaagtgctgatcaacgcgcattccttgggccaattcatcaattacgtcatcaaggtgagtcttagcgatgcgaagtgcggaggttcgtgattccttgactcggatattccccaaatagtttttcgaaccccttttattatccttataatttgcatccaatttcagtacgtgcaacatgacgacttgttcatgggcacgctgactatgaaggagcatctgatggcgcaggcacagcttcggatggtcggacacacccaacggacgatgcgcagacgcgtcaatgaggtgggatttgggggatggacagaggcagtagcaaactggaaatcatttaaggtaattgacgagtttggtctgcaagagtgtcgtcacgagcccgttggattcagcggggtaattatcattttttttcaaatttacaaatacaatttttaggacaaaaagggcatttcgggtggtgaggcgcgtcgtttgctgttcgcttccgaacttatgaacaatccgcaaatcatttttgccgatgaaccgaacaaagtcaatttttggttgaaaattttcaaaaagtccccctttagagcctcgacttgtcggtggcggacagtgtggtcttgaaagttctgcgtgccctgacttcctacgggtgtacaataattttcaccatccatcagacttcgttaaatttttactgggtacgaattcgcgtaaaacttaatgttcaatgtggtcccgatccctcttcaatgtgtaaattatgacctttttatctaaaaattaaccccagtaatttgcattaaaaaaaatttgaagagaagaaacaaaaagtttgcacttatgccctatgccaaattctttattattaggcccattatttttgaaaaaacctggtttaaccagtttgggagaggccggactcgggaaccggctgcctaagaaaatctcggtctattcatgttattgactattttatttgcatttgaatttctggccatttgtagttgaaacacagcgcaagtgacgcattgaccatggactacggcttgggacgcaaacgccgaagacagtccaattatggagcgatgtcaccgacaaagagtgtccaggaggtgcaacccgtggctttgtcatgggacggtctcaccgttgtccatgccaaatcgggacggaaaattcttggtaaaacatgttggggttgcactcattgtgtatataaatttctaccttttacagacaatgtgtccggcatggtcgacgcgggccaactcgtggcactgatgggcgccagcggggcgggcaaaactacgctactgaacacgttactcaaccgaaatctgaagagtctgagcgtggaaggtcaagtgctgatcaacggacattcctttggccggttcatcacttacgtcagcggggtgagtcgttgtgattcaatgttcaggtgttgcggttcggaacctggattcggaaatcccttgggtttttggggcctcgtttttcgaaccctttttttcataataattttccacccaatttcagtacgtgcagcaggacgacatgttcatgggctcgctgacggtggagcatttcatggcgcaggattggatggtcggagacactcaacggacgaagcgcacacgcgccaagaatgttctggaggtgcaacccgtggcattgtcttggcacggtcttaccgctgtccatgcaaaatcgggacggaaaatccctggtaaacacagccgagttatgtccattatgtcaaacactgtcaagttttttttagacgccgtgtccggcttgaccgacgcgggccaactcgtggcactgacgggtgccagtggggtggacagaaccacgctgttcaacactttgctgaacaggaacttgaagagtctgagcgtggagggtcaattgctgatcaacgcgcactctttgggccaattcatcaattacgccagcggg

SEQ ID NO: 69230 - DNA, 199 bp, Heterodera glycines
atgcgcaacctcttcaaattgcccaagccggcaattttcaaaacctcaatcagctcccaaattgttagtcaacgaaaatttccattcaaaattaccatttagtgcaacaaaatcaacagcaatatggtcagtatccgtttgttcctactcctcttgggtatccgccggcgcctcagggaaatccgtaatttgttcgtcg

SEQ ID NO: 69231 - DNA, 907 bp, Heterodera glycines
atggccgcctttgatgcgaataacaatagccgtttatctccagaagtaaattttatttgcatattgcttagggtaatttggtctcagtttgttatcacgggtccggaggaattttcagtggaagaattcagaacaaaaatttatgagcatggaacttaatgtattaattctggttcggctgaattgtttaaaatttcacttcgtttaatgtttaagctgaaatccctatgagttttaaatttaccaaaaaataattttttggcgttttgccttaaagcttaatggaattcgttgtcagctttgttgcactataatttaacaattttctgtttaacttcttatgtacatccgagagttagaatccccgggtgagctccctttggttttgttaaatgcgcctcgttcttgctgtcgtccgactaagcatgttcggatttattaacatattacttttgcgttaaataaatacctattgtgattttttgagaaaggaaaaattttcaaactaatagtttgattatgattttggttcagtaacaccaattcaaccagtaaaattttaggaacaattccgagcagttttaaatctgagaagaactgcgcaacgccttacggtcgaaaactcgaggttggacagaatgaacgcgatgctggttgtactttttcagcgtcttacaggtttttttttttttggtttaccttggtgactaaaagtgcaaattttacttttattaaaaaatctaaaattgtgttgaatagaaatgtcgctttttcattgtttcattttactatggcatgtatggtcaatcatttatataatttcacaatattttcagcttttgccgttccaccggttgtacctgttgtgcctgtcaacgcgaacaataacaacagacacagctacaat

SEQ ID NO: 69232 - DNA, 222 bp, Heterodera glycines
atgtcaaccccaacccgccgggagttttccaaccgggtcagcaattgtttgacgacaattgtatgcgcatgatttttccaataagaaattttctacaaaaatttaatttgcagttgttgatgcttatcttcagaatatggacccgaactaaaagaaattcatccgccgatgatctttcactttattcattttaaaatatttaatgtgtgtgtgacaatgaga

SEQ ID NO: 69233 - DNA, 1415 bp, Heterodera glycines
atgctaacgaaggggaaagtgtttggggtgggccacagtcgatggatgctgttgccttgttccccgtcccgcggggtcaaagtccgctgcttttgccacccgcgggcgcagattgctgcattattagcttgtctgtccattctttggactgtgaagtccatcaaaagcacatcaatcgcatttcctataatggtgggtttaagtttcgcttattaaaaaatattaggataaattttgtataattaaattaaaaaatattttgaaaaaatgtcttgtttcttgttatttatgccaaaacaaatttttttaatatatttttccattttgagacgattcatcagttgcataaaattgcttggtcggggacgcaacactccggccattttcgaacaagcgacgtgcgcattggtgacaaactttgcccagagtgggagaaagttgggggactaatggatggattggtaacacgcatcagagctgcggtggcgaatgatgacgatgacactttcatgaaaaacgcgataaaatatcacgtggagtttgtgagttaaaccataaaaataatagttttggctgcttttgagcaaaactgatttttaacattatctaaaatggtagatttaaaaaatccaacatgaatttacatcatcccaaatcgttgttcatcaaacgagttgttttattggccaatttcaaaaaattttcaagcattttcttaggtttgaaatcgctcaaaaatgtggctcttttcacaaatcaaacaattaatatagattagctagcagaattgtaaaaaaaattcttttcttttagctaaatgtgcatccttacatagacgccaatgggcgaacatcgcggcttttattaaatctgcttcttctgaaaagattggtgacttacatctatcctccaatatttaaaatgaacaaaaattttagaacttgtcatttgtccttccaaaaaacaaatggaaggattatgaagataccattaacaaagccacaattaaatctgatgaaaatcctcacccggcaccaacagcggcattgattttcttacgtggtttatccataatcatgaggagagcaaagacgagtaaagagacgaacatatattttaaaataaaaaaataataatatatattctcaaaattagagttgggtgggaacgggagtcccatcccttgggaaacccgggaatcccttcccttttttcgtttacatttcccataaattaaaaatgttggtatcaccttattttaaaataatcaatcccgaaaattcaatttattaattttttgaccattaataccaattttaatcatatcacttacataggtgaatggaagccgaatttgcgagattttgtataattaaattaaaaaatattttgaaaaaatgtcttgattaaataaa

SEQ ID NO: 69234 - DNA, 651 bp, Heterodera glycines
tttacaatatcttttcgttcatccgtccatgtttcagttgatcctggcgtcacaccgttccaaccggtcaaagggcggccaaatgtggtgatgtttgtcggtctgcagggtgccggaaaaacgaccacctgcacaaaggtttgggggcccaaaaccattgacagatttcattttatattttggatttaacccctcgggcgaattttgtaattttgggaatatttttgactgggcgagttaccttttatgttctacataacgaattcctcttgaccatttttttatacaaacgcttaaacggtttgaaaaattttttaccacgctccaaatttttaacaaaaaattaatgaaaaataaaaagaggtcacaaaaaccttttccttacaatttgcgactctgtgcctttgttcattattcatttgtctatttgcaatcagataatggcaccactactaaaaaaataataatattttttcatgaatttccgggcattattctagttacactgaggtggacccggtgatcatcgcagcgaatggggtggacaaattcaaaaatgacggcttcgaaatgattgtcgtcgacacgtccggacggcacaagcaggaagtggcactgttcgaggagatgcttcaagttttaaatgccgtt

SEQ ID NO: 69235 - DNA, 548 bp, Heterodera glycines
atgattgttgtcgacacgtccggacgacacaagcaggaagtggcactgttcgaggagatgctccaagtttcaaatgccgttgtacgtacttttcaaaaataacccatgccatggggttggctcgtaaaaaatcgggcctaaattggagttcgttcctaaaaacttgactttcatcgctctccaccaccctttttggagtaattttagttttttaagactttgtcattaaaagttcacttttttaccaatttgtaaccccccccccctctccactcgaaatttttgagggaaaaatagtattttaggctgaaattttcggtttttcttgttcgtagcccttccatgatctgcttttcctggaaccgtctctggtttcctgccgtttttacgcgaaatttcctgggtattgggtttaaaaaaaaagtgacaccttttttcttggtcggtttttgtccctttatgatttaaaaataataatttttataactattaaataatttcagaaaccagacaacgttgtcttcgtcatggacgcctccattggacag

SEQ ID NO: 69236 - DNA, 804 bp, Heterodera glycines
atggaatatgccgaaaaaggagatcccgaaatgcataaacagttgcaaaatttaattggtgcctttcatacactgagcggaatgaatcgttttcgaagtatattcgctcgcgtaaaatattaatttatttttataattttgccgtgctaggttaaattgaaatttaaaaaaaatatagcataggaaataaaattttcggactttttttctcacactttttaaaaaatcaaaagaatttttttttgaaattttgctgcctaacagagacaatctttaggattagcgaatgatactttatttcttgaaaaatattgtgacaatattgttcgtaaaaatgccaaaagagacgaaattaacaaaatatgctctctcaaatttgtttcgctaataaatttactaaaactgaaaaacaaaaataattaaaaatttaaatctaattagcagatttacaatatttaagagcccttttgggatgaacaacaatacaattccattcacaaattagtcatgggaagtgccaattattttcagcatcgttttggcattaatttggccgatttttcgcagaatccaacgcaatttggcgatatgaactcaaaaattgtgccattaattaatttggtgcgaaatcgtctgctgattgaagatgggccaaagcaacagaagaaggcgaaggatggagaaaaacaacagaaaaacaaaaaagatgggcaaaagcgaacgatgccaaaggagggggcaaacgatgccaaagatgatggagtcaatgggcattttaggaaattggccaaatggcggccgacg

SEQ ID NO: 69237 - DNA, 632 bp, Heterodera glycines
atggagaaggcctgcaaaattaggagagattatatcgattttagtgcgctaggttcgatgaaactttttaaaatataagcctaaatagggaagctattcccgaaggattcggtctccccataaatctgggcgcatcggttcggggggactgccccgaaaacaaaaaaatcgattttttcaagtgtccgtttggggtactcaaacaattatggggagcaaaaatccaacgcagaattaaagtattaaaaatttttagattttttattcatctccctttttgatagtgaaagcatctgagtgcctaaaataacttgtaaataaaatttggtgcgtttcagagcagtttgtgaaaaaatatttatgaattaattttgctaaaaaaataaaatagtgaagctttaaaaattaataaaaaattttaaattcagaattactggagttagcatcatagcagtgcttttccttgtctttttgatgccctcgcaaaatctggttcgcttctgatcagtttataaaaaaaaagttaagcctaaagtttttcgctcgtttaaaaagcaattaaaaatttttagatttttattcatctccctttttgatagtgaaagcatctgagtgcctaaactaacctgtaa

SEQ ID NO: 69238 - DNA, 83 bp, Heterodera glycines
gatagaaaagcatcagagagccttattatctttaaattaacatttggtgcgtttcagagcacgttctaaaaaatatttatgaa

SEQ ID NO: 69239 - DNA, 152 bp, Heterodera glycines
ttcataaatattttttagaacgtgctctgaaacgcaccaaatgttaattaaaagataaataaggctctctgatgctttttctatcaaaagggagatgaataaaatttttaaaaatttttaattcctttttaaacaggccaaaaagtttaggc

SEQ ID NO: 69240 - DNA, 145 bp, Heterodera glycines
actttttggcctgtttaaaaaggaattaaaaatttttaaaaattttattcatctccctttgatagaaaaagcatcagagagccttatttaacttttaattaacatttggtgcgtttcagagcacgttctaaaaaatatttatgaa

SEQ ID NO: 69241 - DNA, 59 bp, Heterodera glycines; identical to SEQ ID NO: 52421

SEQ ID NO: 69242 - DNA, 59 bp, Heterodera glycines; identical to SEQ ID NO: 52421

SEQ ID NO: 69243 - DNA, 59 bp, Heterodera glycines; identical to SEQ ID NO: 52422

SEQ ID NO: 69244 - DNA, 59 bp, Heterodera glycines; identical to SEQ ID NO: 52421

SEQ ID NO: 69245 - DNA, 59 bp, Heterodera glycines; identical to SEQ ID NO: 52422

SEQ ID NO: 69246 - DNA, 59 bp, Heterodera glycines; identical to SEQ ID NO: 52422

SEQ ID NO: 69247 - DNA, 295 bp, Heterodera glycines
aatttcgaatcatggtatcattcgaaagccctagatgtttagaagaaatttataagctatttctcagtgattaatcagctctcaaaaaagttgtcagtttaaaaccgcaaaaaaggcagaattttcaaagttttttatttctatctttttttatagttcgaaatttttgtaatttttagtaggctaatagagcctgtgaagagctttcgaatgatatcaagattgtttgattcggtcaataacttcaagagttatattgactcaaagttggctcagacggagttggcccgttccg

SEQ ID NO: 69248 - DNA, 601 bp, Heterodera glycines
tggcgaattctgcttcgcaatgataggaagagccgacctccaaggatcaaaaagcgacgtcgctatggacgcttggccgccacaagccagttatccctgtggtaacttttctgacacctcttgctggaaactttacacattcaaaaggatcgataagccacgctttcgcggtccgtattcgtactgaaaatcaggatcaagtaagcatttgcctttttgctctacgagaggtttccgtcctctctgagctcgccttaggacacctgcgttacgctttgacagatgtaccgccccagtcaaactccccgcctgacactgtcatcggcgcgggtcgccgggccaccgggtggcccgacttaacaccaaaatggacaccctttcgggcgcactcccgttttaccgattaagtaaggaatcgatgaaagtagtggtatttcactggcgccttgcggctcccacttatgctacacctctcatgattcttcacaaagtcagactagagtcaagctcaacagggtcttctttccccgctaaatttgccaagcccgttcccttggctgtggtttcgctagatagtagatagggacagtgggaatctcgt

SEQ ID NO: 69249 - DNA, 936 bp, Heterodera glycines
atgtgtccgcccatccaaatgtgcacattggtgtgagttatctccaacactgccgaggcgttgctctccgtgaacagttggcgagtgcggtcctcattctaaacagttcattttcgactcctagaagaacaagtcggtggatgggaaagtcactccgtcgggtgtgaaggcgaatatgtgggcgaagttttggtgtgtgtagtgtggtatcgactctgaaatcatttaattctttttggtgagttaaaatgatattaattaaactgactggtgaacggtcagcaacgagccttggtctccatttctgggcgcaagacgtcgttgcacgggtttatcatccggcttaatcagatcgatgatttaactgactttgagtgattgtgcatttattggatggtcatttttgtttgaaaaatgtttcagcagcaggaattatacaacaatttagttaattttctaaaagctattttgtttgtacttttcagggtattttttaattgctataattaaaagtgaaacgatttgggcaagaaattccaaggaaacgttttgaggctgagaccccgaggagaaaatgttaagtaccgtaccactctcaaaaagtggaagaaagggcgggttttaatttaaaaaatgttataaaaccaaattatctgatcctattagtgttttttgtaaataccaataaataattacagtaatccaattagtcaaaaagccgtcaatgacataaccactgtcatttttggatcccatgaatttgtcggtccaaatgatggaatcggcctgtcaaatattttcttggtaaacaaaaagtaagccgggaaagcacagggttaggaagtccttggtccaacgacgagtcccaatagggaagggccaccgaagggtcaatggaacgaaggccgaattccaaactgaaggtgaatttggaaa

SEQ ID NO: 69250 - DNA, 778 bp, Heterodera glycines
atgcgtattgttttgtcttctctaactctgatcattttcctctgtattttcaccgttagcggccaatcagctgaaaatgccaccaaatcggtgccacattcagtgccaaacggaaaggaaaagccgaactactccatttgtgccagatttggggccaacaagcagagagcgtgcagaataatggtgcacaatttgtttgagacgcgcaatgtgcgtcgaaagggcattttactacattttcatattggaaaaacatattgaagaacagaatgaatttataataaaattattgtgcaattccaattaattagttaattaactaatccaattatttacaataatgacgctttttaggccgaaagggagggaagggttgcgaaggaagatgatctgctcccaccatccatcaaaattggttcctttttgaattatttgccaaatttaggttaaaatttgtttttttaaaggtttgcccacttctgtgccctcttcacgagctgccgaacttttggatgagaaacccccgccaaattacaggccgaaaagctcgcttgtcttaacctcacctgcttctgctcatatgttgatggtaataataaacaaatacaattgtttaactaagctaattaatggttaaattctaattcaattccaatttcaggaatttcctcttcgcctgctcagtgctcaatcaatgggaaaagttatgggaaggcattgcgcatggaataccgaatgctcagtgatgagcaacgggaccgattcgtaagcaattaaa

SEQ ID NO: 69251 - DNA, 372 bp, Heterodera glycines
atgcaaagagacggtgtgccaagcagcgccagcagcagcagcattgcttgttcagagccgagtgtaattgtcagaagcacggtacctgtgctgtcaaatgagaacaaaaatgctgaaaagattagagaaaattatcaaagtgatgataatgagaacggcgaaagcagttgtgatgcttgtgaagctgatgaagaagacgacgtggaagagaatatgcaaaatgaagagagcggtgatagtggtagtgaagattcgcacgacaatgatagcgatggacactacagtgataacaatcaggcggagagtagtgatgagaagcggaaggaaacttacaaggaacatagtgatggtcattcgaggggaagtatctga

SEQ ID NO: 69252 - DNA, 1047 bp, Heterodera glycines
atgagcgaaaaacttgcatttttcctaaaatcaactcaggaaaagcaatcttcacctaagctacggacgaaacttaacacaccgatggcacaaaaaacaaaggctccaacgaaggcagctaaaaatcaagcaattccaaaaaaccaaaagcacacggcttcgtcagatagacaaaaaaaagtgacagaaaagaaagcggtttctcttggcaatgataaattccgccgtcgacgacgtgccataacgccaattgactcttcgacaattcacgctttattaatcgctcttgctattctttgtatcactgtactagccttcagcagtgaccttaacccatgggcgattgttgcaattgtctttcttacacttaattctcaacaagcaaataatcggcccaatcaaattgccaaagtaattgctaatgttgcaaatcggatttatgggacgacagatcgtcacacagagcgagagccattgctcaacagtgatgatgagccgcacagaaatgttccacaaacacatggactacaagcatttcataggggtagttacacagaaagggatcgtcatggaaatgcccaacaagcgacgcctggtttattaaagcagcaattatctaccccagaatttgagtttaaacttgactactacccgccgaccaatcggaacaacaacaagaacagtcgcaccgctggtgaggcttctcatcaaagccgaccggctgctcctatcgccacgatggcattggcgaggagtgggaacaatcagcagattgaaaggtcggcatcaaacaaatcaacagcgagaagtgagagaagtggcaagaagatggaaagcggagagtgttgtgatgaggacggagagtgtggtggcggggacggagagtgttgtgatgaggacggagagtgtgctggtgtaagcagaacgagtagttggaacaatgatccgaatgaaagtgcggcatcaaataagttaacagcgaaaagtgagagaagtagcgagaagaaagagagaaatgacgactcggttggcacttctgcttattaa

SEQ ID NO: 69253 - DNA, 3236 bp, Heterodera glycines
atgattagaaaccagcccaccccggcaacaaatgcgaatactgttccattgaatgctccaaatcgaactcaaaatcaaaattttcgtccctacggttctaatgcaattgttgtaaccgaaaaaaatgaggatgattcgccagtaatttctgtcgcccattttgaacaaaaagagactagggactatgaaaaattttttaatgctctttcaactcattccacggagttcccaacgaacaatcccgcacttgtcaaaacatcaaaatgtttagacatcacattaagcgttgtggaaaaagaggctaaaggcttaatggattcgggagctgaggccaacattgcaaaccctgaattcttataccaaatttcagtggaaaagggaattaatctcacagattggggattttgtccaaattctggtcccaccaaattgccattttcagttgcttcattcaatggcggaaatatttcagtaatcggtgtaattaatgtgccaattcgtaaaggaaatatcgaaagtgttatttcatgcctaatttcactaaaaccttttagttacgattttgttttggggccaaacgcattagacgcattgggttattatatcgggaacacaattacaaatgaaatcctgaattttacatcgaaatttcccactaaaaatgcacttctaaatactgtttacgtttcttcttttaaatctattcctccgttttcatcctgttttgtcgaatcattcgtcaaaacccaaaataactgtcaaaaaaggtcccaatttcttatagaaaacagtatgagcgaacaagaccttcttgactatgaatcggaaacggagcgtgatgaaaatgtgatggaattatgcggcgaggaggaagagaaaatgctcaaaaagttcgggattttggacgaaaagccaaaaattgtccgctcaaaatcagctccggaaacagacgatgtaaaagttcctattaataatttgatggtcgttgagcgggcaattgtcggatcgaaacgtggtaagttcaaaattctaattcacaacaaaagtaatgaacggatttttttggaaccgggtatgaaggtggcacaagctgaagtaattgagagagtttttgatcctttttccgaactaatgcccaaaagttttgatcaattgcttcttccacaaattttcataagaaacctttccaaaattgattcaaaaaacagaatcaatgatcttttttctattctcgatccgaaaacaggcccactttccgagtcggaaaaagaacaaatgcacgaagtctggtgtgaatttaacgaaattttggcgttagacgaatcagaattgacccaaaccggtcttataaagcaccatataaacacggaaaattcgaacccaatcaaaagtcctccaaggcctatcccatttggggtgagagcaaaagttactgaaatgatcaacgattatctgaatcgaggcgtaatacaaccatcttcttccccatgggcctccccaatagttttggttacaaaaaaggatggaactgttcgattttgtgtggattacagaaaattgaatgcggtaacagtaaaagattcatatccactcccaaacattgagcaaattcttatgtatttggggaaccgaaaatttttctctgttttagacttaatctcaggctattggcaagtcaaagttaatccggaggatgttcccaaaacagcatttactatgcccgagggactatacgaatttttagttcttccatttggtctttgtaatgccccggccaccttccaacgtttcatgaataatattttgggcgaatttgtgaatgattttgtctatcttgacgatattctaatcgcctcaaaaacgtttgatgaacatatcattcatctcaaaaaagtttttcaaaaactcaaagattttgaagtcaaagttaaggcgaaaaaatgtggtttcgcacaatccaatttaccgtacctggggcatattcttacaagacaaggccttgccaaggatcccgaaaaatataaaccgattttggattttccgcaacctaaaacaattaaacagcttcaaagatttttgggcatgactggttggcacagaaaattcataaaagactacgcaaaaattgcggcacctcttaccaaaatttttaagaaaaacccaaccaacaaatcttgggagtgggacgaaggggctgaaaaggcatttacaaatctgaaagaaagcattgttaaagaagttgttttaaaatatcctgattttgaacttgcccaaaaagacccaaaatacaaattccatattttctgtgacgcgtcaaaagaaggcctaggagcggttctttgtcaaagggataaatccgggaaattgaggccgatttgttatgcttcaagaaaatgtaataaggcagagtcaaattacggtcccacagttttggaatgtttaggaattaaattttccgttcaaaaatttaaacagtttattgcttggctcccaacaattgtcgttaccgatcataaagcacttccggggatgtttcggagcaaaaattcagttgggaatccgaaagttgaccgttggatcatggaattaggtgccccttttcaattggaagttgtttacagtccgggaaaagaaaattatgtcgctgacgcactttcaagagcattcccgaatgatgccctatttcaatttggtgataatgaggaaaatgagaacgtgacaatttcagtgatggtcattcaaaaaaataattccttgcccaaaaatagttcaaaagaagaatggttaaaagaagtcaaaaattcggaattaggctttatctttgaatttttggaccataaaatcttgccatccgatcaaaaacttcgccaaaaagttattggattcccttggaagatttactgttgatgacggaattctttttcgtttaaatgaacacatggaaactgaacttttcattccaacaaaattccgagaatccctcatcgcagaacatcactcaggaccatgtgcaggccaccagagcgggaaaaagatgtttaagcgactaaaagctttaaattttttttggcctaatatgtactccgactgccaacgtttttcaaggtcatgcagaatttgtgctcataatcgtgttccaaaaaaaaatcatccgggtttaaatccaattgttacaattagaccacttcaattagtctgtatggacattttaaaactcggtccaacacgtaatggga

SEQ ID NO: 69254 - DNA, 720 bp, Heterodera glycines
atgaatataaaaaagggaaaaccgttcattggaactgaatgtccgctcaacgccacattcgtagacaatggtgaatttttgcgggtcattaatatcacggacaaggcaaacaatctgaaaaattaaaaaagtcgaaaactttagagattcatagatttaaaacatggatttattaagtcacttgagactgaatgttatttggaaaacaacatagaattaacttatataacttaatcaaaaaaattttagtgtgatttttttctacaagtctatttaataatttcgatttggtcagtttccatgagtaatattattgtcgttgaacaattagtgagggttttgtggaattatttgagttctaattagcaattattggaatgggaagaagtttttctatctaatgaaatcatttgcataagatttaaatataacaatttaatgaacatcattacaggacaacttatgaaaaatgatgccacaaattccctttatttttgttatcccaccgttcgaagtgatctggcacaaatgacagcgtaactgatcgggtctctctctatgatgcacgactcgctaaggcataacaatcgccgcgtggacaacgcattttgtcgggcctccgacgacgcgccgctggcgcattttgcagtgaatttttgcacattaaattccacgtaagaagcgagttgctcatccttgctgaattaaatcgaaaataaa

SEQ ID NO: 69255 - DNA, 905 bp, Heterodera glycines
atgcgcgaaattgcgatagaatttgtggttgtggaccttcaattggccagggattctctcagtttggacgattttatgctgactcgtttgggtctttgcaggtttcaacagacaaacacattaattgctttattttcgatttaattcagcaaggatgagcaactcgcttcttacgtggaatttaatgtgcaaaaattcactgcaaaatgcgccagcggcgcgtcgtcggaggcccgacaaaatgcgttgtccacgcggcgattgttatgccttagcgagtcgtgcatcatagagagagacccgatcagttacgctgtcatttgtgccagatcacttcgaacggtgggataacaaaaataaagggaatttgtggcatcatttttcataagttgtcctgtaatgatgttcattaaattgttatatttaaatcttatgcaaatgatttcattagatagaaaaacttcttcccattccaataattgctaattagaactcaaataattccacaaaaccctcactaattgttcaacgacaataatattactcatggaaactgaccaaatcgaaattattaaatagacttgtagaaaaaaatcacactaaaatttttttgattaagttatataagttaattctatgttgttttccaaataacattcagtctcaagtgacttaataaatccatgttttaaatctatgaatctctaaagttttcgacttttttaatttttcagattgtttgccttgtccgtgatattaatgacccgcaaaaattcaccattgtctacgaatgtggcgttgagcggacattcagttccaatgaacggttttcccttttttatattcattttcctttttatttttcagggattctctgctggctgcccttttggatggaattcgtg

SEQ ID NO: 69256 - DNA, 310 bp, Heterodera glycines
gagcaaaaacgcaaaaaacaaagtgctttccttaaaaaagcattacgtctaaagattggagcattatggaagcagtatagatcggagcgggcaaaagtggttgaggaatacaccgcggctataggtcaattaaatttagttttttttttttttaattttgattttaattacttatttttcagcgatcttgggaccacaagaaaatgtttggtcttcgcctgatcctgacccaaaagtgccatccacaagtgcagcttgggagcacaactacgtgccaatctcgccggattatgcggctactttaatgtag

SEQ ID NO: 69257 - DNA, 462 bp, Heterodera glycines
atgaaattattcctatttttctttttaattgtattatttttaattattcaaattgaaattggagcggaaaagaaaaaattggaacaaaaaacatttgaagaaatatttggggaaaaatgggaagaaaaagaaaatgaacagaaaaaaagagaaattgttcaaaaattcaacaaaattaaagaaaaaatcaaacaaaaagagagaaaatattcaacaaaagaatggaataaaattaaagataaaattttgaaaaaattgggaacaaatcgaaccaaaatttataaatggatcaaagaattaaatcttcaagaaataaaatcatataaatcaaaaacggatgaacaaaaaattgaaattgtgcaaaaatttatggcaatgaaaaatgaatataagcaaaaaggaagaaaatattcgacaaaagaatggcaccaaaattatgcagaaattgtgaagaaaattgga

SEQ ID NO: 69258 - DNA, 145 bp, Heterodera glycines
ttgggcctagttaagctgtcaaaaaaatttggagcgattgaaagagaatagaaagagccaggttcgatgaagttttggtaagccaaaaaaaaatccaaaccatttaaaaatctataaaaaatttaaaaatgagaattcatgcgag

SEQ ID NO: 69259 - DNA, 551 bp, Heterodera glycines
atggcctttgaagccgtgatggtgaaacagaactttccacaaggtaaggtccaagattcattgcaacgtggtggaatagtctgagccagcatttcagttgacgacgatgttaaatttaagatgaacaaccccgaaaacgccctagaaattttttaaatgatttaaaaaataattttattttttatggtctgtaaagtgcataagtaccttttttttagataagtattggtacataaatatttgattgtttttcaaacacacacatatatatgcttcacaggcttttgccttttttgtcgaactcacttgttcaaaggcaaatccgtttccgttatgcaattaaaaattatttttcagaaacattgtctcaaaatttgcaagaatggtatcgtcagccgaatcgacagttcaccagcaccagtctgaatccaataatgacgtgtcgacatttgacccaaaatcagtggaaatattgccgcactgctacccgcaagcgccaaggggggacgtcagagacaattaccacggcacaatggtttgctggtagctga

SEQ ID NO: 69260 - DNA, 913 bp, Heterodera glycines
atgccaaaacaaaacgaaatcgttttaaaatattcctttctggacttgacttggtttcttgatatcgaagctgttttctacgctatttctaaaacggttataccaaaccccagatttttgaatccggttttcagaaaaaatgccttgtggtgaaaacaatatttcacatttcactccataactttgtgagttcggcacggatcgagaccgggataagaccattggaaagagcagctcgagctctacaagaaggtatggaaagaaaaaatagttatttctgggactttttcagaaatcagaattaattctccaatgtggcccaaattttaggcccccagccacagccccttgcttctcccagttttaagtcttggatttgtcaaataaattcaagacttcaaaataataatcaaaaattctcttaaaatttttttgaacccaattcaaaaaaggaaaaaaatttgcagtcaaaaaattattcgaatttctccaattttgtttccataatttccgaaagttattcggtatcataatgccaaaacaaaacgaaatcgttttaaaatattcctttctggacttgacttggtttcttgatatcgaagctgttttctacgctatttctaaaacggttataccaaaccccagatttttgaatccggttttcagaaaaaatgccttgtggtgaaaacaatatttcacatttcactccataactttgtgagttcggcacggatcgagaccgggataagaccattggaaagagcagctcgagctctacaagaaggtatggaaagaaaaaatagttatttctgggactttttcagaaatcagaattaattctccatgtggcccaaattttaggcccccagccacagccccttgcttctcccaggtttaagtcttggatttgtca

SEQ ID NO: 69261 - DNA, 975 bp, Heterodera glycines
gattttgcccatcactgttttcgttacatttgtcaaaatgcgttcgaattgttcgaatctgacgaattcttgcaaattgatcagaatttgctgtgtgaattattcgaacgtgatcaattactgatcaacgatgaatatgaactttggcaagctgtaattttaacatatattttgttgtatttaaattatattgttcatttttaatttaggcacttcgttgggctgacgaaaagtgccgtcaaaagggtaatgtgtgttccgccaaaaagcgtcgtgctttgcttggcccggcactattcaaaattcgttttcctctcatctcaccggaggaatttaccaaaaacatcggtaacattttttttaaatgatagaaattattttgttatttttttgcagttccttctggcgttttgacaaacgatgaaattgtttccatttatcaattccattctcaccccaatctccgtggtgtgcccggccttaaaacattgaaattcccatggcatggacgaatttccgattggaacacagccaaaggcaacagggggacattggctttggaaattgagaaattttcggaatttgcgcgagaggaagtggggagcagacgatttagtgattatgaaatacgaataaatggatttggatggaaaatattggcagaaataaagacgaaggaaaaaagcactgatgagaaatgcctgggatttttcctttcgtgcaccgcttcgggaaaaggtgaagtcaaaattaagattttttgattacattacctaattttgattgccaaagatggaaattggagttgcaaatgttcggcaacccttcgaattgtttcacaaaagaacggaacgaaggatttgacgggaaaatatgaccatgtttttaagaaagaagaaaaaaactggggattcccaaattttattattttttcggtgagtttgtagccaaaacaccatttattggcttaataaa

SEQ ID NO: 69262 - DNA, 1753 bp, Heterodera glycines
ctgttgtcaaatcgccggtcggcggtgactttgtcgtggaccaatgccgcaaaatgttggtcaaagagggcgtggatattgtgccctattacaaagtggcatccaaagtgcgcgtcttttggcactctctattttcggaagttaaaattttttaaattgcagaaagaggtcaaagaaggcgacgcgcccatttggacaccgcgtgccaatttgccggcggtgacgcaaagctatgaaaattttatgggctcagtgagtagcagggatgggccgaggtttcgcctttcgcattattcgcattttttggcgtttcgcatttcgctttttggcgcgaaatgcgacttttacacccctaagaattggattaaattcccatgaaatttttcaaaattttacctataaattggctaattttcagtgaaaaactgtttataaatgatcaaaatttccaatttttttcccgtagaaaattgcccaaaatcgcaaaatttggtaatttgatgaaaaactgttctcagcggcgcgccaaaactcttatttctcattagaaaaatgatacaaaaatcacaaaatttgatgatttgttggtgaaaatctgtcaacaattttaatcaaattttcaaaaattttcccggcgccgcctgccccctcttcccaaaaagtttttttggaaaaagcgcgcctcaaaaaagcgttttattgatttttaaatttttataaaattttaaaaaaatttttgctttatgattttaactattaaaaagttgtagaaaaaatttcgcttttcgcatttcgcttttttttttcatttcgcatttttcagtttcgcaaatttcgcatttcgctttttatttttcaatttggcccatccctgatgcatacctctatatagatgaacaacatatttcctacatattattgacgattttctggcgcacaaacaataataattctcattaggggtcaattccacaagaaaacatagtaagtacactatttcttcgctctctttttcttttctattttctctcagttaggcgtactatctcttcatttttaaatagaaaaaaacaacatttactcatttacttttcgctgcaatcttccacaaatataccaacaaaaaatctgaacagtgaaatgttttttgggcaaattaaggggttcctaaaaagttatgagctgatgaaatttgtctttctttttctctcgttttggtgtactatttttgtgtctctaagatcatgaaaaaaattttaatcaaaattttagcgaagaaattttgtttttttacctaattattaccaaataaatgtctctgccgtcatcggaatcagcgaatttgtcggatcggatgaaagtgttgctgagcacggccaatggggcggacattcaatttttggtgggagaggaaaaaaaggcaagaaaaattcaaaaagaaaattcattttttcatttatattttaattttagctttttcgagcccacaagcacattttgacgttgagttcggatgtatttgaagcaatgtttcgttttgacgcccaaaatgcaaaaagcggaggtggaaaaagcatttttcaacttctttttttagatttttcataatttttaggcccttccgctgatcagtcaagcctcgtgaaagtgcccgatgttgaagcagcagcgttcaaagtgatgctcagctttatttatgcggatgatttgagcgaattggacggagaaaacgcaatggctgtgctttacgccg

SEQ ID NO: 69263 - DNA, 112 bp, Heterodera glycines
gcatcgtaatgtcatcaaacttggacaaaaacctggagaacattcgccgaattgaccaattcgcccgcaaagtgatcgaacattgcacccatgcggcactgttcaatttcag

SEQ ID NO: 69264 - DNA, 938 bp, Heterodera glycines; identical to SEQ ID NO: 41044

SEQ ID NO: 69265 - DNA, 720 bp, Heterodera glycines
atgcttcacaacacggtgattgaggtcatcgaccgagtgtgcaaagagatggcaattcgccagcacaaggatctcctcttcggagggaaaacagtcattttcagcggtgacttcaaacagtcgctgccggtcgtgcctcatgaaggcttaaccgctcaggtgacagcctgttttcaaacatctccattgtttggtcaattcaccacgatgaaattgaccatcaaccagagattgggcaaaggtcagcaagcgtacttgcaaatgtgccgccaaatcgggctcggagaaaccggagagcacttctggattcctccacagttcatcgttaagagcaaggaagagctgatagattatgtctatcctaacttccaacaactccttggcaatgacaaagagctgctcaatcgtttgattctcgctccgcacattgacacgtgtgatgaagtcaacgagatcatgatggcgaatgtgccaggtcaagtgcgggaatacttgtccacggataagccccttgacgaccgtccactggacatcgatgagatcgagtccgaagtggctgcgttgaaccggcgcacagactcgggcatgcccccgcacagtctccggcttaaagtcagatgcgtcgtcgtccttcttatcaataaaagtgataaggaaggactgatcaatggcacacgcatagttcaggaagaacttggcgatgatcgcctcattggtcgt

SEQ ID NO: 69266 - DNA, 90 bp, Heterodera glycines
atgacagagatcgaaaaagaaatgaaagcaatcgaaacgctactgggggaaatttctcatcatatggcagattggattgaagaaaagctt

SEQ ID NO: 69267 - DNA, 551 bp, Heterodera glycines
atgttcgaatttcttttaccgttttcaaaaggtcttgtcgtgcaaaatcggcaaaacgtaaaagttcagcacggagccattcatttccctcaattgcggttttaagccaacaccttaattttcgaccaaaaaatttgatacaataaaggaatgtttatgatgacctcaattattttgtttttccaatttcgtgaatcccaagaattatgtgcaataaaaattattaaggcattaaattatggaaaaccatatttcccccgcggattatgagggttgtttttaaaaaaattattttgagcttcagggatggattctgcccatatttgaatttttattatggtattttttacgagtctgcatccaataatgaataccgcaacataatatacaatctatacagttggcataatcgaagtgttaaatttgtaatttatgtccgtacccctgttcaggcccaatgcgcaatttatgaagctctttttcaatacgagtagtgcttaaattgtctccggcaactgtaaaggtaaagcataatatattttcaaatgcaa

SEQ ID NO: 69268 - DNA, 1469 bp, Heterodera glycines
atgccggttgcgtcaaatttgctaaagacagtttctcgtgaaggacttaaggccggaaatcgagtgcttgaagacatttctcagggcaaagcgctccgagagtcaattcaagcacatgcaaaacatggtatggagaatttggttgaaaaactgagacaatgtggaatgggtgccgccaagactggtaaaaaataaagcaggtgctaaagaagccgctcttattaattctagatgaccttttaataataattgatgagaaaaacctgtctgaatcattcatcaaaaaagctcaccatcttaatatgggtgtgattttcataacacagaatttatttgaaaaaaaggtgaaggtagcccgaattaattcacagtacattgtcttaatgtctgctccgaatgccgcgctacaaattcgtaatttaggcgttcaactgtttccaaaaaatcttgcatttttcctaagtgcttataaagatgccactttatcaccgtatggatatttatttttggatttacaaccggcatcaaatccattgctgagaatacggacaaaaatatttaaagagatgaaaaaaaagcattgtatattcaaaatgattaatttacctaaaaatgttcttcaaaacttggattttttaaagaaattggcaaaaacaaaatcttttaaaaagatgcaagaaatatttaaagaagcgtctactgaacaaattggattattaattgaaattagttattatatattaaaggggtacttcccgctcacgaagagacaaaaatatagacttttaccatacgcaaattttgtaagaaaattagcaaaagttagactgagaagggtgcaaagaaagtttttcaacaaaacggtggtggttttttcgttaatttgtctcctttattattaccagtacttattgctgcgttaaaatatggagaatatatttattcttgttccttccgacttgtacaaaaatttattaaacctgagtctggcgagattaacgttgaaaatgctaaaaataaattgtcatcacttttgaagcagagaaaattagacgctacttcaaaaaatttaatttataatcaggaattgaggcgtttcttgaaactaaggaaggaaattgaagacaaacccgtaaaggttgaactcactgatggatctttgatggtgtttaaaccaaaacagcgtgaaagagatagcaaaataattcctacacaaattgttaatgacgaaggattggatgaaacaggctctattccaacacttgaagacccttacactactgctgaagagagtgatgctgagccaacaacatcaacaccaaagacgagaccactgataagaccaatgcgtgtaggaacaactaaatttcgtcaaaagcaaaagtcttttgtagtcaagaaaaaagttataaataatgaccctgagaaatttggggttggctctagaggacatatactgagagctgatg

SEQ ID NO: 69269 - DNA, 387 bp, Heterodera glycines
cagcaaatcgaccgagcaaaacaactgctggaatacagacgtaagagatttgccgcattggaatttgaggcaaagaaacgtgatgaacagcagcaacagtcctccccgttctcttcaccaatctcagctgcattgaccgctggagaggcgttaaaggagcgaataggtgccgctcaagtgaaggagacagaaaagtcggatcaggataataataattcgatggaaaaaccaaaaacccacgctgaggttctcaaagaaaaaatacagcaacaacaacaacaggagataaccacggcaactccaacagaattgcaaatgacggtggcaaagcggcaacagactaaaaacccatgccaagcttctaaaggagaagatagaacaaaataa

SEQ ID NO: 69270 - DNA, 805 bp, Heterodera glycines; identical to SEQ ID NO: 41059

SEQ ID NO: 69271 - DNA, 131 bp, Heterodera glycines
atgcagatgttatacagtttagcgcagaaaatggactcatacttattggaaacttgtaagttcttaattctaagctttaatttgaaggttttaatttgactatattgtttgcaaggtttggaattgtttga

SEQ ID NO: 69272 - DNA, 333 bp, Heterodera glycines
atgcggtcaggttcaccaccactgactaacttttgcagtaataatggaaatccgccgtcacttccgcccaggccaaactttggcacagttcaacagcaaagtcagcagcaactctttgttggccaacaaccggcatttgtgccgtacaatgccagtggaatgtacaattacaatttgtgtgtattctgtggcgtttttcgacattgaattaccattttcaatttcagttatcaacagagtgctgctcccttcacaaatccatggcccgccattcactcgaaaaataattttttgttggcagccgaaggttttgataacattaggataatataa

SEQ ID NO: 69273 - DNA, 601 bp, Heterodera glycines
atggcaacaattcaatttttgaaaagcttaggcaaatgtatggcaaaggtgagttagggaatgccaacaaaatattatgatgataatgaaatatttacaatatttatttcttaatatttttaattatttctacaatttgaatttttaaaatgtccaatatcaaaaggcaaaaatccaaaaaaaaacatttaacattttaaaaagatcaacaaatgcaattgaccagcataatatgtgaagcggataaaatgtattgcattttggaggcaattaaaacggaagtaaaaattaatttattataattcatataaattttaatttctcaattaaagaaaccaatttgttgcaatttggcaaaaagtgatgaatacaattttattaaaaagcgtatcacattaattaatcacaatgatccgccgttgagccaagtgatggacactttaattgttacactaatgagccttaaaaaggcaatggaatcgggtaaaaagcaaataatatttttattttaataaaaaaaactcctattattttgataatttttaatataactttaatttaaagttaaaataattttttattataaaaaaacaaatttaaa

SEQ ID NO: 69274 - DNA, 1088 bp, Heterodera glycines
atgggaacgactatagaaaaaatattaactcatgtttattatgatctccgttcgccggcaagctatgcaggagttcaaaaaattttacttgaagctataaaaaagaattcaaatataaaattaaaagatgttcaaaactttttagaaaaacaacgcacttacaccttgtttaagccaaaaagaaacaaatttaaaaggcttaaaactgtacctagtggattacacactgattggcaatgtgatctatgtgttatggatactttgaaagatcagaatgacggattccgttatattctcgtatgtattgatgtgttaagtcgaatgttatatgtttcgcctacgttatccaaaaagggtgatcacatgattgaagcatttgaaaaaatttttaaaaagtctggtgttttgcccaataaaatgtatagtgatagtggagtagaatttcagtctaaacaaatgcttaattattgtaaggaaaaggatattataaaaaaatgtaatgtacagccctcatctacatgccggcgttgttgaaagggcaaatcgtacaatcaaggaacggctttataaatattttagcgaaaaaaatactcttagatgggtggaagccgtcgatcaaatagcaaaaaatattaataattcggttaatcggataacaggtctaaaacctattggtgttaatttcaaaaatgctgtagcattacaacaaaggctatataaaggaaacaattctgcaaatatgataacacaacagataaaatttaaagtgaatgatatagtaagaataacaaaagaaaaaggaaaaattttcaaaaggttattacccaaattatactgacgaactttttaaaatcgaacgcgtaaataacacaaatcctgtcacataccgtttgagtgatttaaaaggtgaagaaatcaaaggaatattttacaaccaagaattggttaaaaccacagaacagaccacccatagggccgaaattttaaaaactcgtattacaaagggtgtaaaggagcattttgtaaggtggataggtcattcagaaaaacagaacagttggattcctgattcaaatcttattcattaa

SEQ ID NO: 69275 - DNA, 852 bp, Heterodera glycines
  unsure (1)..(852): unsure at all n locations
aaagtgtcaacagacttttggaaaaatatatttgcaatttatcaacaattttgagaagtgagttagaaatgataaacttcacgattcaaaccaattttcggtgctctaattaaccgcgataaaaacatccgaatcaattaaatagcttctgagataataaggtttatcataaaatttcatttaaaaataaaccctcaattattggtatgaacgctactttccaaacatgcacgcgttttgcgctcgagctatttatcatcgggcttgtcaatccaaagcgaaacaacaaagatgctgttttgaacgaataaagggcatagtttattttgaagaagtgtccaagaacatgcagcaataagcctgcaaaatctaataagtggaaaatacatgagtatagaatttattttcagaaagtgtccacagacttttggaaaaatatatttgcaatttatcaacaattttgagaagtgagttagaaatgataaacttcacgattcaaaccaattttcgttgctctaattaatccaaagcgaaacaacaaagatggtgttttgaacgaataaagggcataggttattttgaaaaagtgcaaagaacatgcagcaataagcctgcaaaatctaataagtggaaaatacatgagtatagaatttattttcagaaagtgtcaacagacttttggaaaaatatatttgcaatttatcaacaattttgagaagtgagttagaaatgataatcttcacgattcaaaccaattttcgttgctctaattaacctcgataaaaacattcgaatcaattaaatagcttctgagataataaggtttatcataaaatttcaattanaaataaa

SEQ ID NO: 69276 - DNA, 679 bp, Heterodera glycines
atgacaatttcgttgcatcagacaaagggcgatgtgattgaccaattggtggacgctttgaagaaatgttgtgacaaaatattaaccgcaacggaagaatacaaataccccgtaaaaacggtgggaaaaaataaatattaaaaatatatttcgtttgtttatgttttagaatgtgattttcggcatttccgccgctttcgccgaccgcgatatttcgcatttgttgcccaatttgttcgtcgatgcgctttactccacgccgacttcgccccacggggatggcattcgaaagcggacgttgagcattgaggggcggaaactgtcccaactgcaagtgagcaccggtacgtttcacaaacaaatggtgaagcactttggcatggagagggcaataaatgcgagcctttggcatttgaaatggatgattcgcttattaattgcagcgggactagcggcactccaagagcaattcgggcacgagtacgcgctgacctccttccaagcgccgccggcggagaagcaaacccaaaaggaggaaggggcaaaagaagagacaccgaagacgaacccagcggaagatgaggaggaaaagaagacgaagacgaactcacagtcagcggaagagcaggaaaagagtacgaagacaaagacggaggaggaaagggagggagggcaatga

SEQ ID NO: 69277 - DNA, 132 bp, Heterodera glycines
atgaccttgcgcaatgatactccgatgcctccggacgaagaattgagagtgcctcatgagatttcgctgtcttcgccttggctaagggctgtggcggtttatatgggaatcgcctgcgagaaggaggccaaa

SEQ ID NO: 69278 - DNA, 511 bp, Heterodera glycines
atggccccccaatccgtcgtctctcccccgctgccctctcgtccgtctcccccatggttgggcccgtcaccggcggaagaagtgaccgaggagctgaacatcgtaacaacgcccaaagtgatctcgaataattcgggcagttatacgggcggtcggccgaacttcggcacaccgccgatgccattgcatcacatttctctgccgtcgccccaggagatggcaccggtgacccgacagattccgccggagatggaacgcgagacgaatcggtggggcgggggaaatcgtacgaaacgaattcaaaaccaacgaaaaaatggaaactttggaaaaggaacggcagaaaatctaacgctttctaaaatgcacttttatgttcagatggcgtcagtacgctgctgctgtgctggtccatggccgcaagggaatgccaccgaaaagtttggacgaatacgaaaatgaggaggacgacgaggagttcagaggacgacggatgaccgtcacttaccgg

SEQ ID NO: 69279 - DNA, 572 bp, Heterodera glycines
atgaaattatttccgctactattagtaattatattatttttaattgtcaaaattggatcagaaaagaaaaaattgcaacaaaagtcatttggcgaaatatttggagaaaaatggcaagaaaaagaagaagaaaaacgaaatgaactcaaaaaaagagaaataattggaaaatattataaaattaaagaaaaaattaagcaaaaagggagaaaatattcaagaaaagaatgggataaaattaactcaaaaatagcgaagaaattggggacaaatagttgttatattcaaaaatggattaaagaatttggtcttcaaaaaaagaaaagttataaatcaaaaagtgatgaacaaaaacttgaaattgttcaaaaatttattgaaatgaaaaatgaatataagcaaaaaggaaaatattcggaaaaagaatgggaccaaaattatgctggaatttgtaagaaaattggcgtaagctatggaacaatttgcagatggaagaaacaatttggcattcgctgtaaaagaataacggagaaagaaaaaatggaaaaaatgaaaaaatattggaaaataaa

SEQ ID NO: 69280 - DNA, 278 bp, Heterodera glycines
atggattttacgacaatcgaagttaattatgtgagaaaaatgccatacttttttccattaatcattttttttctaatttcagaaatcgccgttttttgccctccctttttaccactctgagcctggagtaaaaaaggaatcctgggccactttccatgtcgaatttttcgacccaccggaaaatgagtttaacatttctcttctgcacgactcacccgaacacagcgaaaaaggcaagacaaaactttgaaaagctgagcaattaatggattaataaa

SEQ ID NO: 69281 - DNA, 519 bp, Heterodera glycines
taattaaatccattccttcgggggaccgtgccgggtgccgcggggtaagcagtgctggttcgtttcatcacggcaccgaaccttttggctagtcagcaatcgttgcttaacttgccagatcggacgggtgcgcatgattccactgttccaagcaccccaccaaaagcaaaacgatataaccaaaatataaggaaaaattttttaaaaaattttttctccatcttcctttttgatactaaagcatcagagtgctaaaattaagttgtaaataaaatttggtgcgctttagagcactttctgaaaaaaatatttatgaaacaaaaaaatcgattttttcaagtgtccgtttggggtactcaaacaattatggggagcaaaaatccaacgcagaattaaagtacaggctatagggaagctattcgcgaaggattctgactccccataaatctaagggcatcggctcggggggactgccccgaaaactaaatattatcgtttttttctggtgtccgattgggg

SEQ ID NO: 69282 - DNA, 104 bp, Heterodera glycines
cgcatccaattccttctacaatcgcctttatacatcccattatgaacgctaaaattatcagagtgccgaaaatcgcatgtgatctaagccctagcaaaaatggt

SEQ ID NO: 69283 - DNA, 389 bp, Heterodera glycines
gcttaaaagcattgtactgcataattaaaagcgaaaataattttcgtatatttttcacaattatttcaaaaagcaaaaaaaaatgattcaattttgaaacgaaatagtgcacaaaagggaaggatggttagacgaaaagaggaatttttagaaaagagcgcaccccatctgatattcccatttttccgttccacaactggccaaaggcgactgtgctcattgacacgtagttgtccaataaggtacttggactttccacagtaaaatgtggtacaaaattttggaactgtcccgcctcacggcggggcttaaaagcattgtacagcataattaaaaccgaaaataattttcgtatatttttcacaattatttcaaaagacaaaaaaaaa

SEQ ID NO: 69284 - DNA, 225 bp, Heterodera glycines; identical to SEQ ID NO: 50965

SEQ ID NO: 69285 - DNA, 1258 bp, Heterodera glycines
atgcgtggagcggaccaaccaacaattttctatggtaaaaaaggcggtgaatatgtgtgtataaattgtgttttcaagcttaaatgcgcatggaatcgcttcaaattgggttcagaaaaaccgcgttttggctgtgtgcgaatttccgggctcacatactggacaagaaatcgcaaaattgctggacaaaatcatcggtgaatggcaaattggtgatgagaaaatacattgttttgtgagcgattctgcggcgaacatgaaagcggttgatattgttttgttttcaattatttgctattttattttaggcattttctgagacaagggctgaggaacgaggcctaatgaacccacttttaccatttgcaaatgtgagctgtggtgcacatttactcaatctcgtcgttcaaaagagtatcaggcttgagaaaattgccaatttgctcaaacagtgtcgaaaagttgtctcacattttaaacattcaaacaaagcgttgggcatgctgcagaacattcagtcaattcttgagttaccggagcattcacttttacaagtttttactaaaaactttttgcgtctaatatttgtatttaggaaatccctgtgcgttggaattcggcgttggcaatgatttcacgtttgttagagcaaaaagatgctatttatcaatatgcgttcgagaatcggagttttgatttgacattagccgaagaagaatggaaacttattgaagaattaatttctttgcttcagccaatttaagaagcttcaaaaatgctcatgaaatcacctttgtcgggttaacaaaattttttaattctaagttaaatcgaatatttttagcccaaattccaattgctgtgacactccacagcaagttatttaatgccaaattgatgaacaaagaaatcgacagtgttcgatgctcgttggtcaatgagatcgaaaaatatttctttggcctacgcgaaaaacggttcataaacacatatttatttagttcattccaattttctgtgttttagtgttcattgcctatcaacattttttgacgttcggttcaaggacaaatttttgctggaacgtagaaacatctttctggcaaaaattttgacatggataaaagaagaaaatgccgtgttcattagcccgccaattacggaaattgatgagcttgactgtccaccgccgcctataaaaaaacaaagggcttctctgtttgacgaactcaatgaaattgcgtcatcaagcaataaa

SEQ ID NO: 69286 - DNA, 484 bp, Heterodera glycines
attgaactgcaaattgctctgaaaaactacgacccacagaaggacaagcgtttcagtggaactgttaggtaaatgatggccggcctttgttggtgtcagacagacccgaacccagggtctttaaaccgtctggggaggaaacaaaaagtggcaattcggtcactgtttccgttaaaaatggttcaaatttctggtgaaagtttgtttttgtctttttttttatccggattggtttattcaatttgttcagcatttgctttttagactgaagcacatccctcgtccgaaaacgaaggtttgcattcttggcgaccagaaacactgtgacgaggccaatgccaacggaattccatgcatgacagcggacgacctgaagaagttgaacaaggacaagaagctgatcaaaaagctcagcaaaagctacgacgctttccttgcctccgaatcactcatcaagtttgtgaaatgggttaaggatttgggg

SEQ ID NO: 69287 - DNA, 385 bp, Heterodera glycines
atggatattgccgctcaactgtcacggatcccaccaaagcattatcgttcagttgatctgatgaaccgaatcattgacgatgaagatacggaggaaatgggggcagaggacgaaggtaatcttgatacaattgatagaggaacctttatgctttacaatttgtttgtgttaatttttattttaagagcttgctgagtcggttatcaatgatcaaaggtctcccagcgattcgccagcactgcgaaaatctcctaccgattctccaattggccaaagagttttttcgatttcaccggctgagggtgcttcgtcaaacagtgttttgacctcaactgttcagcaacattctccggatgatgatgaagtatttgagacagctagctga

SEQ ID NO: 69288 - DNA, 395 bp, Heterodera glycines
aacgaattaatcgaagaagttccatcatatttgactgatttttcaccaattgaacgtgccgaaaaagaaattaaaattctggcagaacaaaatgccaaaaatggacacattgaaattgagaaagtgttgcaaatattggcaaaattaattcttaaatttgatctcgacattttgataaatgagttcaatgccaaactttccaaaacaaacaatgtgaatgtgttaaacagaattgggcacaaatttactgaagaatggcactcaatttgtgccaaaattgtctcagaaaattctgaatattccggcattgaaaaagaattggagcaaaaaatgaaaaatttactgatcatggagcatgaaatttcgacaataaaatttgccaacatcatggaaaa

SEQ ID NO: 69289 - DNA, 499 bp, Heterodera glycines
atgacaaaattggtcgctgtcagctgcgcaaaaggtatgttttgcgatggatatcgttactataaacacaaaaagaccaagaataaaatatggtggaagtttgagcttaaccattatggatgtaagggttggggttatgagagcaatggcgaatttattagcacgcgaagacataatcatcagccagattctgtcttacttcagatcgagagggaacagtagattttatattcgcctgaggcatgaattatatgttgctttttttaatgaacaacaggtttaaccaagcgcgtataaacactattagtgtccaaaacttcataatttacgatgttaactcataatacgtatttaacataatttacgacgttaactcataatacatattcgactatctcgttgaaccactcaagcaaacgaaattttgtcaaattaccttttttttgaaagtcaaaaattttccattttttggttaaattaatataaaaaatacaataaa

SEQ ID NO: 69290 - DNA, 1517 bp, Heterodera glycines
atgactttgatgaaaaaaaaattcgaggcacagcttatggacttactgaagttggacccgaacactccgctcaactcacacgaggcgggttttgaagcgacacaaacaaaccgattagtcaaataatggaaattctttttcagttggccattgcttcactcatgtgtcagtattttttgggctttgccgtcggtccttttgaaaatcttcgtttagcattttccgaggatgtcgcttcgttcgagaaagtgggcggctgttcttccattttggaacttctgaggcagaaagttgttgtccctcttcaactggcggccaacaagaccactcttccgtcgttgctgtacagtgcgccgaaaggtcgcctttgtcttatgaaattggaccagtaaaaatgagtgcataatgaatgcttttaaggaattcttctttatggaccaaatggttgtggaaaaactctgattgcgcgtgccattgccaaagaggtggatgcgtgcttcatcaattttggaacttcgctcgtcggtcggttgtggattaaaaacaacaatttaattgcaataattttatttttcagattttgtcaacggatcatccgttactatgaagtctctgttcactttggtcagtctttttttgaactttctgccaatccttccttttccaggcagagaaaattcagccgtgtgtcattttcatcgatgaaattggtgtgtttttcatgtttttgcaattcgcttttgttcttgtctcacagatttgctgttccatcgcagtcggaatgactttcagctgctgaagacgcaattcctcgcgcaatgggatgagtttgtgcgctgctattccgactgcaacgtgatcgtcatcggtgccaccaatcgtgtgctcgatttgggtgagaatgccttcaccacatccttcgctcttttgtacaatttcattgttttgtagatgaaacggtgttctgtcgcttttcactcaaagttcatgtccctttgcccgacgaggaatctcgcgagaaactccttcgtatgcttttggcacaagaaaatgtggatgttggcttcgactacgccgaggttgttgaggtgacgaaaaagctgaccagctccgagctgaaggaagtcatccgtttcgcattccttttgcgttaccaccatgtcgcactgagtcggctcaatgcgtgagttcaaaccgattctatagcttaataactaaatacccatttttcctttgctttaaggccagcttcactgcttgctgtgggggctcaactcgacaaccaaatcaaattgtcatctgaagacgtcatccaagcgtttcacagtttcaagaattatgcgatggcaccgttttccgagtcagtagtgacagaagagatcgttgaggtggattgatgctgttaagttttacggatgaatatgaccctatgtgttactctatttccctcatcaattcatttgatgtatctgtaaagtattttgtagtccgatacacgttcttttaaattaaataaa

SEQ ID NO: 69291 - DNA, 387 bp, Heterodera glycines; identical to SEQ ID NO: 52041

SEQ ID NO: 69292 - DNA, 327 bp, Heterodera glycines
agctgctctactgctaacaaccccctgaccagtagtcaccttgtatacaagtgattttgcgccccgacgttccaccatggctcacgagtgctacggctttggcaatgtgcgagcaattaagcacgcacatcgggccagatgctggggcatttgtgctgcaccgcaagcggcgcataagtagtgcctcccgacaccggggagcaagaatattgctatcttgcctaggcgggattctgacttagaggcgttcagtcataatccctcagatggtagcttcgcaccattggtctatcgaccaagcacatgaaccaaatgtctgaacctgcg

SEQ ID NO: 69293 - DNA, 544 bp, Heterodera glycines
atgatggtttttaagtatcgacccagcaccgaccgaacgactgacggctccggtggttcagctacagaaaacagcggacagcaggtgaacaaaacaccgaacattgtttgttttaatacgatctcggaagaattaatttctttgaaatttaattttagaaagattcatttttagcatcagctccgccacgagcagcaaattgtcgttgcattagttggagtgttgcacgggcgcggaccgggacgaggtgcgcggggcgggcactctcgtggcaatcactgtgcaaagtttgacgctgatcgagaacagcttgggcaatcttaaatattttaataggtcaattaattaagttttgtgcgccattttccattgcaccacgggcagctgcgaattgtctccgtttttgttgctcccgtttatgttagaaacagtggaaaatttatcatttaattatttcataaaattccgtcgtttagtgaatcattggaataatttttaaacatcacaaaacatttgcaattttccatttatccgatttgtaaaa

SEQ ID NO: 69294 - DNA, 51 bp, Heterodera glycines
atgacgacattccatgtcctcctgttgctgctgtttgtgggaatgtttgtg

SEQ ID NO: 69295 - DNA, 1971 bp, Heterodera glycines
ccattcaaaaaataataggtggcttttttaaggggcagggcaacagccgagcggtttttaccgtacgtacgagccaaaagaggtgagtgtgtgcaaatcgtaacgaatccgatttgattacaacacggaatcggccatcgtcaggtgatcggccggggactcgcttcggttgtgaggcgttgtgtggagaaaggtgatttagggagaaccgctcgaaagcacatcttaacaatcgccattttcattttgaagagtcgaggaaggaatacgcagtcaaaatcgtcgatctgagcaccgaaagacagtccgaaagggaagcgaagcgcctaagcgaagagactttttcggaggttcgcctcctcaaattgttgtcgggccatccgtccataagtacgttcttacgccttcgtaaatttcctctgatttttctgcgtttttcagtttgtttgcatgagttctttataacgccaacatttgtatttgccattttcgagttggcacgctgcgaattgttcgaagcgttgaacaaatcggtgacattcagcgaaaaacggacgcgactcgtcatgcgacaactgtttgttctgattactttacataaagttgaaaattgtcattacgtttcaggtttgacggtgtccattatttgcactcggttagtcatttacaaagtgacgagaaaaaataaacgcgatattattttaatgatccaatgatgataaataactaatgatttctaaattttcagaaaagtattgtccatcgagatttgaaggttttatttttaaaagtcatttaaatttaaaaataatataaacgtcgttaaaacagctcgaaaacattttgtgtgttgatgacaaacgcgttgtgatcagtgactttggttttgccaaacaattggagccgggccaaaaactcaaaggtggacactgcatcaatttgcataactaatcagtgttttcattaacaaaacttttaagatctcttcggcacccccgggtatttggcgcccgaaactttgcgctgtcaaatgtatgaaaacgcggagggctacgggttggaggtggacgagtgggcacttggcgtaatcatgtacacactgctggcggggtacgcccctttctaccacagacaacagttgcgaatgatgcgactggtgcaggagggacgttacgaatttgacaaggaacactgggaaaacatttcggaggaggcgaaggatttggtcggttttgggaagtactcctctcaccaacaataattctcacaatccactcactaattgtgagaatatcttgtttttggaatctcaaaatttacgaaagtgcctgtatttccagacagtgaaagtcccctaatcatggctgatgattcacccacctgctttacaattagcattgatttaatttcaactaattgagtggtctttcgtcagattcggcgtctgctcatggtgaatccgtcagtcagaatttcgagttgcgactgtttgtcccatgtttggatggccgcttgggtcggcgttcccccttcccccgctcgaatggtggaacccacaccattcaaacgctcccctgaacaaatccgtcgccttttccgtgttgcacaattttctgtctgttttatggtgcggcttcggaacttcaagcagttcaaactcaaattcgatagaggttatcataaaatccggccaattgaaattgcagaacattcatttcttccattttcagctgcgcttagaacgcggccctaccggtccagggaaatacggcacgaagccgaaagtaaataatgcttttcataatttttaaaaggatttatctattgttacaggcgcttccttcgccatctacggacattgggtcaaccgcggctttttttattccagggatatgctttttgcaaacaaacctcgacctagatatgttaaaatgaacaacggaagtcgtgatagtaaaagccctcaaaaaa

SEQ ID NO: 69296 - DNA, 87 bp, Heterodera glycines
attgaaaactaccttaattgatttagctctacaccttttttcatgtcgtgtaaatatctgaataaaatatcttaatgcttttaaaaa

SEQ ID NO: 69297 - DNA, 2270 bp, Heterodera glycines
tattcatttaagcgatttgttggttaatggattcactttaacccattttcgctttccttttagacccgggggttcaacaacaaatggccggtcaaaagtccaagtcactcatcgcattcgtgtgccggtgtcgattaaattcgagaccgtttcacattcgcacttcgcatcaaaaacggtccgtgtccgtgccaaaaacgtctcgtcaattaatcggtccctccctttcagagggcactctctcatcttcaatcgtccttatcgattctgatggtgttcaacagttttgcttttcgttctctcttgagcagcattgtttctcctttctgaagacgttggaaggcgcactttccccacttttcaaaatcgacccaccattaaattccattaaaatcgaatgcggtgccacaggtcgtctactaattggaattcggttttacttttccatttgtttttttagaaccatttgccgttgattcgacaactttgtataaagcgactgattgttctcaccaaaaaggacctctcgttgaaaagcccggttctgaattggtatttcgcattatttccttcgcttctccgagttttgaccagaaaatgccgttagaaaagcaagtgccaatgggaaagttcataaaattcgaccatttaaaaaagttttagtcgtccattttcgcgctcttccacgcaagaatcggcaaaatgcgaaggacaacaaccgaagatttctttacggttggccgaacatttaattggattttcttttgtctttaataagttttgattatgtgttatccatttaacttcagtgaatcgctgagcaatgcgaccaaagcgatgcaaagtcaaattttggccagggcattcctcggatggctcacctactcacaacacttgcgcaaaatccgactaaacttggcctccattgtgaccatcgagagatttatcccaaattcggacggaatggaaatgccggtgaacgaagcattttggcggatttgtcgttctgaaaaaacagtgagacaattaaataacacaatcagtcatttgctcacgctttgcagattgtccttttcaagcagttcctcaccagagtttacttttgtggcattgagccaactttgagggccaaagtgtggccgtatttgctgcgattgatcgaatggcacgaggattttggacgtcgcgaattggacgccatcgacgagacgtacagaaacgatttgaaagagtggacagaaatggatgcgaaattaatagctgataatgagcagagaaatggagtggatgaggaggaagaaggtttgtcatccgaaattacttttttacatcatcccatcaacagcactctccgactcattgtcaacccaccaaagtgaggaagacatttcccggcatttccctcccattggggctattggctcaatgaatagcgaagtgtttgaagagagcgacgtttatttggaagagaaaaggaccaccgacttttccaagaagagaaaggtgatggtgcatttatctaaatataaccaattggcacttttcctcctttaggcattttctaaggaattcgccaacaatttgctcagaatcaaaaaggacgtcgaccgttgcgatcgaaccaccaaattttactcatgccacgacaatttggacattttgcatcgcatcatttgcacgtacattttccgtcgactgaagttggacttggaggacggttacgtgcagggaatgtgcgatttggtggccccccttttggtggtatttcggcacgaggctctgacgttggcttgttttgagcgattgatgctgcgactgcgacggaacttcccacagagctcccaaaacaatggcggaatggaggaaaatttgaataattttgtgagtattttcgccgttcatatttttcattttgttttaatttttatcctttcagcgttctctggtcgaagtgatggaccccgagctgtactgtcagctaatgcgcaacatcgactattccttcgtcgttttctatcggtggcttttgctcgacttcaaaagaggcatcagaaaaaatgaattattcccaaaacaatggctaatttcctttcagaattggtttataaagaagtgttccaactttgggaagtgatttgggctgcggaaatgagctgttctcgtcatttcgaactgttttttgggctggcgctgctcagccaatacaggcaaatgggaaaataaaggcaaaacaattgccgaccaaataaataattatttagagatgttct

SEQ ID NO: 69298 - DNA, 1077 bp, Heterodera glycines
atggaaaacccgcgccaaaagccatcaaaagtattggcagaaatccgtgcaaacaccaaggacgaaacctttgtttccatgggcactgacctcgcactggtggcagtaatgagaaggttcttctcttttgatacgtgtattcctctttcactcttatttcaaaatttttaggcagaaaaggaagatttacggcaacatggaccgtgtcaaccctttgagtgttgtcttacccgatgccctgcttattaaggatggcgaaagcacattgttgtatgacagccgagcgcatcgccaaggagaatcggatgtggtcttggtctttgcacacccgaagttaagttcattcatttcatgttcaatttttcgcttttgttttcagctgttggacgttttgaagcgggcgaggaaaatttcagttgatggaacattcaaagtgtcaccagccgcatggacgcagtgtttcgtgatcggcgcttttgtcaaccggcggctcgcattatgtgtgcttttagtgaatttggaccatgtttatggtaacaatttcatccaattcggcatcccttcacctgttccatcaacgccaacaacccaatcgtcaacaattgtttccgtcgtgccgcgctgggagctgccaattgtgcgtccaccactgtaccctgtgcacttctggaatgtccacgaccgtgcgaagtcagcagtggagaaaacgaacaatgctatggaggcatcacacctccaattttcggttgtgcgatttttagtgcgagtttaatttggtttttaaaacttaagcgtggtctagtccatcacccatctttgtcagactttctagcagctattctggatgatgttgacaagcaggtggacatcgcaagatctgcccgagtgttcccgtacaaacgccgcatcaaatacattttgaaggagcaattgatcggagatgcattggacgaggcggagtacaacgccgacgaagacgtcatgaacatcctttcactgctgagtctgcagatgcaaggatatgtgggtggcctgcgtgcaaaaggggctcaacacgaacatgaggaccgtgaatga

SEQ ID NO: 69299 - DNA, 60 bp, Heterodera glycines; identical to SEQ ID NO: 52045

SEQ ID NO: 69300 - DNA, 401 bp, Heterodera glycines
atgtggacggaggaacagatgaagcggatgatgaagcggcggcagcggcggtggctgacaaatgaagcaattgacgatgatgaagttgatgatgatgattatgattgttgttattattatatgatgagacagagtgatgatgatgatgatgctgctgcggtggcggaaacattcgcggcggacgcaaatgaacggacattggggaaagaagcgcggatgatgccggaggcggtgatgagaacaaatggtgggcaaccgcaggcaaaccgagcggattttgaaacatcagtgccaacgctgtgaccgcttggagctggtcctgcgcataattggaacacacagttcagcttaattgtatccgcatatcggtggggggaggtcagttagttccgtctgacaaa

SEQ ID NO: 69301 - DNA, 249 bp, Heterodera glycines
taaaattatcagagtgccgaaaatcgcatgtgatctaagcctagcaaaaaatggtgtaagtaaaaatcgtaattacgctcaaaaagcttctcaaacaattttagcgcatccaattccttctacaatcgcctttatacatcccattatgaacgctaaaattatcagagtgccgaaaatcgcatgtgatctaagcctagcaaaaaatggtgtaagtaaaaatcgtaattacgctcaaaaagcttctcaaac

SEQ ID NO: 69302 - DNA, 505 bp, Heterodera glycines
atgaaaccaaaatttgtatataaaaaacaaaatgaaattgaaggaccactaattattgcggtgaattgtctaatcaaaatttcgaaattttattttaaatcatcttcgaatgaatattatgaagatcaattaaaaagaagtattcgaaggttagttgatccaaaactgttgaatgaagagcgattgaattatgaatttcaattaaaaaacgaatcaaaagtgccaaataatgaacaaaaaatgctaattaatgaaatgattttgcaattaataattgatccatcaaatgaatgccaatcaaataaaagtttagacggaataattcatataatttattgtatttccataatacttaacctgtgaaataattacaattaaacttaaagtcaagaaacaaatttaacaaaaaaaaatgtattagcaaaaaaacaaaaaaaaatagaattattagaattttattaaatatttaatgaaaaatttcagaaaaaacaaaaaatttttataa

SEQ ID NO: 69303 - DNA, 580 bp, Heterodera glycines
atggggcgcatggaattggacttggaccaaatggtcaagggaaggcccaatttggtggaggaggaggctgcgtatgggcagcgaaagcgcgagatcactgcctccatcgccaacatgttcgagcagtacatcgactcattggtgagtggattcaaaataaataacagggctcttggaccggtttcttctggtattctcaaaacggcatattttcagtcgcaagaaatactaaataaacaattctgaatcagaaatacagattttttaaacttttttgaatttatcgtttcgaactctacaattgtattaaactgaatataaacgagtatcataaactgaaactaattgtaaaatttcaaaattaagaatcggttgcgccctttgagcgtgaaatgtgtgctggcggatgacgaattgaaaaggctgaaacgacgacggcgcgtgatgggcatggacgacgacgacatcggcgaacagctgaacgctgttaaggtgggaacattcaaataataattattccgaacattgggcaaaggatgaaaggaacttttggctctattgcagttcaaacgaacaaaaa

SEQ ID NO: 69304 - DNA, 675 bp, Heterodera glycines
  unsure (1)..(675): unsure at all n locations
atgccagaacaaagtgtttatgaaaaatttgacgacctccaaaacagaggttacactgttacgttcaggaacacactacaaaatgccagagtttggacatcagtgatgtaggcaaaatgtcattattagaattttaatttttttgccatggttttgctaaacttgtcatgatcatttggtcatttttcggatttttaatccaaatttcgtggttttttgatccatcttttatctcgccattttttttttgtccattaaaaaacattggcccaaaattactaaaacttaaataaataatttattcttaaacaaataaaaatttatatgcatttaagcttcactgttgtggctaattcaacccaagatgagaacctgagaaatctttcttctctgtatggtgccaaccgtcaacattcgaatactctaattagtccaattttgtaagttaatatgcctaattaatgcgtttcaattcgtgaattattcaacaattttttatttagcattgaactcaacaaagttcaaccgtggtattatggcctgttggtttaccgcattggcatgaccggcaatgatggaaatgaaatccaaagtgaatattttgtgccatataaagatggcatttcggcagttaaagcggtaattagagaatttataatcatanaggttgngtaa

SEQ ID NO: 69305 - DNA, 534 bp, Heterodera glycines
atgtcatctttcacaactttttcatctgcggacgaattttctcctctccaacgtaaatactttgcaatcctaaagaatggggatccctattttaacttctttttttcggctcaaaaccagtttattgggttttcaagtgatgacattttaaaaattagtaagtgcaacaaaggatgaacatagagagagcggatttctatgcacaaaaaatgataattaagcacttaattcagcattcaaaaatgctaaataagataggaatgaatgaaaaacttctttggctttttaacaatttttacaaaatgatcataatttcattttctgctttttggattaaaaacaaaaatttcttaaacaaatcttaaatatgagtgttcagaagcccagaaaagccccgagattatttttttttatattagaaaatgtttttacaaaaaaattagggaaaaaccgaaaattttgactttatttgaaatttcatgttataactgcagcaacaacagcagtcaaaaggtgggaacaatttaacgaaaa

SEQ ID NO: 69306 - DNA, 277 bp, Heterodera glycines
ggcttcgccttcaccgccccgctctcctccaattgcttttctgtgctggccaaacactgcatcagcccaatggaagaacagcatcagcagagccccaatttgttgtaatgctgaagaaagtgccgggcaaacagaacgccaacaaatcggcacaaaaagcggacaaagtgaacaatttgaaattgaagggacgaaaagcatttataaatgatgacaatgttaaaaaaggtgctgaaagtgatcactgctgagcaacagatcgaatatcagcccaaaa

SEQ ID NO: 69307 - DNA, 1822 bp, Heterodera glycines
atggattctaaaaaatttctcccccttgaacttatttacgaattggttaatgcactgccaattaaccaccattgggcagctcaaagggtttcctccgagttcgacaatttggtttttgagagacaggctgacttgataaaaattattttgcaaaaggtatgggaaaatggtgacccttgaaaaatcagaaaaataaacaactaaacaaaatgaattcaaaataacattttcgtgtaattcaggcaaacgtgtccaccgcgcagtcgtacatcacaactatggtccaattggcaaatgcggatgaacgaatagtatttttgacggagtatgcaattttgaggaccattttgggtggtaatctctttttccattgtcattctgtcagattcacgccctcccaacatgaattctgtagcgaggcggtgacacttggcaatcgattattcaattgcgctgaaacaaaacaaagcattgttgaccattccgttgtgatgactttctgtggccgtatgccccacgtttggtaactgcagatgatgcactgttgaactttttacttttttttgtaatttttagccttgatgtctcttcattctcccaaatgtctccccaacaattcgccttggccgatggcgcctcagcaaatgtccaatttgtcggctgttactctggaggacaactgcttatcaatgatttggcactttttggtggtttgcaaaacagcgttgtcctttgtccgtccgacgcgttctccgctgagcgtgcgactcagttggccatgacgcacaacggaatcacttacattcgaatttccccatatcccactccggcgatttacggcagcagtgaccacgacaaattcgaaattggcttgttcattgtgaggcttttcaattatagaacggtgaatgattaattaacagtggaaaactaattttttggtgaatgttaaccgtctcaaattagcggtataattaggtatttaagtgagtccacgaaattcgcctttctgattaatcattaagaaaatttgtccagtttttgattttgatgggtatttatttgccataactctttttgattaaactaaattaagaatcgacatcaatcgcacaaagacaaagttgttctcgtcggaattggagctgcggtcaatttgtgcgagcaagcatatcgtcaactgttgaatgaaaagattccggtgacggtcctcgacatgttttcgctcaaggtacgtaatcgcaatcagttttttgagtgtttttttaattcttcagctgacgcgtgagtttgctgttttatcgttggttagcattctaaacgtcggtcgagtcgttactgtggaagaaggcgttactcccttttgtcttccactcgcttcatcaattctcagttttatatctgaaaaaaaactccaagtgagagtaattcataaaaaagtcaatcttccatgcaatttgaactattcaggtttctgtgcgaagtctttgcacttgcggtatgtgtgtgttgtctaagtgaaattgtttaatttgggagaatggggcttaattagacattcaatatttcagagtaatccttttcaaaatctctgaggatgaaaattagcgaattaatttgagttttcaattcttccatttttttaagaagatggcttttctgcggattccattgtcgctgctgcgaaagcattctcaaagcgttaaacgaagaacgacgggcaatgctttgccgttttgttgacaaattctccttttgttacgataatttgttgaaacgttaaatgttaagttgagcagatctcttacgtcttttgttttaa

SEQ ID NO: 69308 - DNA, 243 bp, Heterodera glycines
  unsure (1)..(243): unsure at all n locations
ggattgggctgtcggcgtcatcgctcttctgatcgtgctgattttggtcgctgccttcataaatctgatccgctgcatctttgntgcctgatccgtttgagtacgtcggatgaaacaattgaggacaaagcagtgaaattgttgtaaattcaattttcaattgcaacaaattctgggatctttttttccatggcacttaattttgtttttctttgagtgattccatcaatacattttttcatt

SEQ ID NO: 69309 - DNA, 262 bp, Heterodera glycines
atgcttcggccgccacatttcccattgcttttgactgcgattgttgtcgtcatttgtttactctccggcactgcaaatggcgacaaaaacctgttggacgagctgcgcgatttggacattttccagctaaagttggtccatctcaaagccttttttggcacaattttcgccctttgttataggagcggcgtttcggcgtgtccattgctcgtcggcgagcgatgccccgagtcgagtccgctttactacttcaaaatgtgcg

SEQ ID NO: 69310 - DNA, 621 bp, Heterodera glycines
atgagagcatttttgctgataaaaatgtttgccaaagtcttgaccattccgtttacctcttcaaatcattcattcattttcgtccaaatggattcgtcgtcctcagaagaaggagaaattcatgaacccgtcccacaaatccaagcagtccaacccaatccacaaatcccaccaccccctgctaatctgcaaccaaatgaaaaaatcttctttgtttccgaaacaactcagcgcagagaaattttattggccgacgggttcgagtatagctttgaagctttaagccgaattgcagatggttagtctgatgtattttattggcattttccattgcattttacgctccaatagagcattttggcgtccatgatcaccctctatttctatgactagggatgcaatttatagttttttagaacctaaaaactaacgattttggcggttttagttactgtaaatctcatccatacttatggcataactaagtttacttttgattggacacctcaaaatgcatttggccagtaaaatgcatctaatgtcttgaaaatatttttaaaatagaaatttactgtcggattgtccactgtcggattgtcccagtcacgacttgaaattaaa

SEQ ID NO: 69311 - DNA, 60 bp, Heterodera glycines
atgcgcagaaacgacgaagaaacagaaggcaatgagatgaacgaacagcaggaggattct

SEQ ID NO: 69312 - DNA, 723 bp, Heterodera glycines
gtaaaacactacaaaatacgaccgcttgacaacggctcgggtttctttatcaccgcccggaaaacgttcggaaccgtccgggatttgatcgaatattattcgagttagtttcaaatttgaacgcaaacgtaataatataagttatttgtaatctcaataactgatggcttaaaataattttttgaaattttcttataaaaaaatatgagagattttttttgtaatagaaaatctaaaataaaattttgattgattatttatatattaatttatttttcaatagaagaatcgggtggcctttgttatcatctcacttatccggctccaaaaattgctccggttcggcccgatctgagctatgacacggccaaaaattgggaaattccgcgagatgaattgctgttggaccggaagttgggcgagggcaattttggcgaagtttggcttggacgatggagaggggtcattgaaggtgagaaagaatgatgagtttactcaacaattccatctcataccaattttgtttttcataaacgtttttttttgtctcctctcaccgccaccaaaaaattgactaatctgaaaaaaaacagttaatttttagcgaattttagtcggggcctaattttacagtaacctaatagcaaaggaaaaaaatgaatcgacttacaattagctgttaagaatgtgaaaaaaattttctatacaatttttttttcagtt

SEQ ID NO: 69313 - DNA, 1335 bp, Heterodera glycines
  unsure (1)..(1335): unsure at all n locations
catgaattgagcacacttcgagacataaattcggaccttatcgacggttggaggacgcatatgagacgatcagagaactgagcagcaaaaggactaaggacaaagtctgtcggaagaaaaaatggcattttaaagatttaattttacttaacaatgtattaaaattttcaaaaaattactcccggcggcgactatcggaaacgctggacccccatttcccctattttttgaaatttttttttgcgaacaacggctacaaaaaaaattttatgcctacggcttgaactcaaatttaaatggtaaaaagggacatcttaatgatcatttgccattcagatagaccaaggagcacaaattgatgatacttcgatgattgaacatatccatcaattgcagcaggaactgatcgagtcccacaccaaaaaggcaaacattttttggacctgaaaaaatatgggaacctcgcatttcaaggctgatttggagaacactgcgcgagagttaaagaaccgagtccaagagctcgaatcggccaacaaaaggcttaaggaatatccgccggatgggggcgttgcggcgattcaggaggagctaatccaagtgaaaatgagagaagcggaagcgtcgctgtcgttgaaggaaatgcgccaaaggttggccgaagttgagcagcactggacgaggtgtgttggtcttcacattgtgcccaacttctgtttgcttaggttcatgaacctccgcggagtcactgctgcccaactctccgcttctccgtccgtctctttggacattgctcagtcgccgccttcctcttccatggaggaggagccaccgcaagagccatgccaatcgccgacacagcaaacaacaaaccagcagaacacgcatgcgcaacagtgccaaaacccatcggcacagagtgcgcgagcgcgaattgccaaactgaccgccactttgatgggcgcggttgggagcagtgccaattcattggcgagtgccgaaaacggtgggacagcggaagctttagagggatggagtcaaagagagttggaggaccaattcatcggactgaaaattcgagaggcggacacaatggcggagttgaaggaaatgcggcagaaggtgatggagatggagacgcagaaccacgtgtgtacgaaccaactgaaaaggcaggacgaggagatcagacggctgcgtgaagaacgagaaacatttgtgcaggtcgaacagagtggaagaanagaacgaaggaataaaagagaccgggggaaggaggggaaaagagaaggagcgagcgagatatcgccacctcctctcccccacccccccccc

SEQ ID NO: 69314 - DNA, 196 bp, Heterodera glycines
aatcgaacgctaacggacgacctaatggaaaaaaatccccgaaggagagaatttaattaaatccattccttcgggggaccgtgccgggtgccgcggggtaagcagtgctggttcgtttcatcacggcaccgaaccttttggctagtcagcaatcgttgcttaacttgccagatcggacgggtgcgcatgattccac

SEQ ID NO: 69315 - DNA, 620 bp, Heterodera glycines
atgatgtttaattctatttctaaaattccttttattatttttattgctaatcattttttaaatccattttcaaatgctattccattggtgagttaattaattagagaaattaaattaataatccatttgaattaattagggcgaggacaatatgctaattgcaattatgaaggcgatcagcaaattcaaatcagtgaatattcattgcaaaaatatgaggcaaactttggcattgtgttttttatgttcgaaaatggaagttacaaaatttgtgagaaatttgatgctcacttttcggaatttgtcaaaggatttgcgataaattttgacaaatttttaaagatatctaaagaatattcaaattatttatacgatttaaagagaaaagtatggtgatgacctcatgagcacttttgggttattgaaattgagaaaatgatgaagcagatcttggcgttatgcattgatgcgagagaattgacactgtaaaaaaattggaacggaatttaaagaaaaatgccaaaaatattgaaaatatttggatgttttatatgaatactaattcagcttgtatgttgaaggtttgtatgatttttggattaatttaaatttttcattta

SEQ ID NO: 69316 - DNA, 565 bp, Heterodera glycines
  unsure (1)..(565): unsure at all n locations
atgccctgctcgtcctcctcctcctcttccgccgcttcgttttcctccgttttccccgtccctttccccgcttcccatccatggaatcctttcgcttctgccgccccttttgtcatcgcaattggcagtggttctgtgtgcgtcaaaaatggcgaatgtcgccagtacaaccaactgaaacgacaccaccacgagtcagcaccggtcgcagcagaagtgccatcagtcgacgagggaatgaacgcgacggacaaaaggagaaagaaacgcggaccgtcggcactcgcaactctttccgcccttttgctgcttggcgtggcgctaattgtcagtttggcattcgtcgcgtggacaatccatcggatggtaaacgaaaagaaaaggccaaacgatgccagggaaagtgggaaaattgaattgcagaacgaacagcacaaagaatgtgcggaagcgatganaacacaagcggaacgaatcgaagtgttggaaagtgcggtgacaaagcaaaaacggacggaggaaaaggaaacggaagagccaaatgacaatgggaaagaaagccatg

SEQ ID NO: 69317 - DNA, 169 bp, Heterodera glycines
aaatagttcactggaatgccaaaaatggaataataatcttcgacttgtacggatcaacaacttgatgaatgtatcggaaacctggtatgtatatgccaatagtgtcactgatcaaaaatgcgttgatcaagtattcatggttaatgagtttattagtgacaaatggtga

SEQ ID NO: 69318 - DNA, 462 bp, Heterodera glycines
atgggagttctaaattgtggaattataaaattcatgaattaaaattttttccttctttaaaaatttttttatgagttttttaattttttaaaaatttcaaaccaattttcagaaagttttgtccatattttcgtgtttttttgtccatatttcagcatttttgttcatattacgtccatattttgcaattttttcgtccatattataatccatattatggatttttttgtccatataaatccggtttttgtcgaattattttgttcacaatttcatttgtttggcagccatttgctgtggcaattgccaattgcaaaatcatttcattaattggcactttttgatcatttttcaattctattcataattcaatctctcctcgttcaataattttggcttaaaatgataattgaaaaattctttaatttatatattcatattgttgtccttggcgaaaataaa

SEQ ID NO: 69319 - DNA, 3057 bp, Heterodera glycines
ccattatgattaatttaatttttccattattcatatatggtataacaatgctttccgaattggccgaccacggtaatttcaaatttatttaaaaaaaaacccaaaaaatatattatctaatatcaactcaatattctagaaaatgactttccgacatctcttgatctacgctacactcggcgcggagaacgacgtattccttatccacaaaatcaaggtaaattcttgaatgaaaattttgttgaccaacatagttcggtgccactgtttccgtgccattgcggatgaagaatccttaattttttctcagttgaccaattttataaatttgatttatatcgacaaagaaggccattttaagatatttctaagcatttaaaaacattgtcaaaagttgtaacaaaaaacttcaaaaaaagtttaaaaattttgagttctctggcacgaaacgttggcacgaaattgaaactagaaaaatttaataggaatcaaggccaatagatttgttataagaacctggataagaaatggaatttaacatagtaggtcggattagggtcgagtccgacctgaattctgggtcgggatttggtacgcaaaaaacgatagcgataggttctgacgacaaacttgttctgcacccttttaatttttggtattctgattacggagggttcgcctattacagatattttggaatttttccatttccgaaaatttctagagcactgcggtgcctgttgggctttctcggcggcccttgttcattcggcagcagtttttgaaagccgagtcggcgagcgtgatcgtcttgtcctctattccgctcaatatttggttgattgtactattcgtaagaagaagaagaagccttcagaagcttgcaatgggattgccgtcatgaaagcattaaagttcactaatttttaattaaaaagggataaattgtgagggtttttgaatttcatggttttggggcccgacatttttgcctctaaatttgtaaaagcattatatctaaattcgcggctttttttcaacaattcgcaacgaatgcagtcaaaactttataatttttaaatcattggaaagcttaacatgtttcaaagctgcttctaactattgcttctcgattagacaattactaaaatagctatatcagaaaattaatttgaaatatttgaagtttaaagtttttcttccttaattttaacaagctaaaaagcttttcgaattttgtaagggtaaagaaaaggtgaagcgcttttgaatgatcacaagattattagatttggttgacaaaaaagtatagtcaaaaaacttatgttcgcaacgaaacgtctgcgctatacgacctaaaatccccgtaaattttgaaacgtgatccaaaaataaacaatttaacttaatttttacttatacatgtttcctattgtaaattacgaaattccagtaggctttccactgatggtgttccactcgacgcactttacccgtacttgagtggcaaaacaggtcagaaattttattgtacccacaatcattgggtttgatgtaaataaaatccaagaatgcctaattaatgcccttgtgctaagttaagccatttttcggggtgatcacgtccatgaaataggtacgcagaacgagtgcggagttgcaggagaggtggcgcttgtccggaccaaaaagcagggcctcttgtataaagcagagcccgggcaattcggatttgttcgcgggctaacggcgcaaatgacctatttgacgacgtacagactgccacttgcagcccgtatgttttaaaaaaggaaaagccattaatattaaatatatcaaaacatgaggatattttttaattcttaataataaaaatttttcagcttttgtcgattttaatttatttttgattaatctgaacatttttaggtatgtatgccccggaatcattcaaggcaagcccgaacttttagtgccaggatgctaggggctatgtaaaatatcattttaggaaaaatagtagtttaatttttaaaatttacataaagaaaacctttttttttggttttctaaaattaataaattttaaatgttccttttaaagtttttaataaaaatttgtaaatttatctcatctaaaataaacatattgagaatttctaaaatggaaatttggttctaattttattgtatgattttaaatatgtatttatttagaagccttaataaataaatgggtaaaattctggtttgttccccccttttcaagaaaaaataaaagttttcaaaaaagcatctagcacaaatagggatctcgaggtcgctgatcacgaatctgaaacccatttcgaccaattttgaaccccggaccccaactcgaacaaaaaacgggaattaattttaaccaaaattcacttttatgttcgaacctcaacagaatttaatgtccggggttcgaattggggtttagattcgtgatcagagcgacctctaaaaccctaaaaaagtcgattttttgaaaaattttatttttgaaaaggaggggaacaaaccaaccgattaccaataaatgtttccaaatttatacccttaaaaaaatcattttttaagctttaacggtaaaaaaagtggtcaaaataaatttaaaatgtgcctttaaccgagctttctaaaaaatagcataacttttcttttaaacatgatttttttgaaatctaacagtcgttagtttttttcgaaaaaagatactttacatcctctgttaccccaaagtcccgggactcaatattccatgcccacttcaagacttacaaaagcaaggaagtctacgacccttcccctgaggaatgcaaggccgcggaagaggaccctgacaactcaatgcacatcattagcatagtgggctatggcgaagaaggaggcaagccattctggctgatcgttaacagttatggccaagagtggggtgacaatggtgaggccaaatttgttagaggcaacaatgcgtgttgcattgaggattatggatattatgtcaaaagtgtagagcattattga

SEQ ID NO: 69320 - DNA, 195 bp, Heterodera glycines
atgcttactgctaatgaggccgttcaaagagaccaagatgagaaggaagtagaagaagaagagtcgtgggccaaacgttttcctccatacagtgcagaaacggaaattgaacagcttgacgaatttagtttgcttcatcaacaaattgtggccggccgtgttgtgccgtgttgtgtaaatttgccagaaatcacg

SEQ ID NO: 69321 - DNA, 866 bp, Heterodera glycines
atggtcggctcgcagcagcagcaacagtaccatttgctgccaacgcaacagctcaaccacaacaggaacaagcagtacacgacgcaacaacagcagcagcaacagttcacctcgccgtacgccacctcaaactacggttaccacgagctgacccatccaccggcctacagtatgagcatggtcggcggcggaggcacggggcaacgacgatagacaatgggagatgaaccaacaaagaatggaagccagaatgaacaaccatgatcacacagttattttcatgtagatatgaggagttggagcctatctcttgccggaaaattggaaattcattgtctggggtatacaatttcccatagccaggaactttgaaaacgcccgggttagggcacggatttccgagatgaaccggaacagaattccggattgaagtactgttttaacatgatctcctccggtccaaagcattttctaaaacatacagaactctgagccagcacctaaaatactgtaaatctttcggttatttcctgacagagtatttttccgattagagccgaaaaccgaatgaattgaatttttgactaaccgacccaaagaaaattcaacataatgctttcaagaacaccatttattcagaatccattctccgcctttttgtatcgggcagtttctggagatttaaacaatgtccgtcccaacgtcccattcctcttaaacgaaatgccatttaaatttctttatgttttttatcattgcttattttttcattttgaatgattatgtaaaaaaaaaaaataatgaatccaagcgctgatatgtatgtaaattcttataaaatcgtgaaataagcataaatgctgtaa

SEQ ID NO: 69322 - DNA, 831 bp, Heterodera glycines
atgactacttcactggcggacttggatgtggaatgggagacgtacaaaacggaattcgagaaggcagaggtgggcacacaataataaacaaatgacagtcatcaatctttggaaaagtatcgaaaattatccaggccgaacacggtgcatacaatgcgcgtcagcgcgcaaatgtgaacaaattgtaagtgtttttgttttctttgccaattgaattaaaaataatcttcccctttgcaacaaggaagcaaaatttggctctgttttctgggaagatcgaccggtaatataggaaatccgaattttgagggggagtgggttctttccatgatgagaattgttaccttactgtaccacaaaaaacgcattaataaataaataaatagccaacaggctttactaaggatgactctaatgcagttcgtgcgtttaattagctgctcaaactgtgacaaaatcagtttaatttcgaacgaatacgatttgaataaaaaaactgaaagttcacattttcgtataaaatcggcttaaatacacggaaaaaacggagacaacaaaaaagcgaaatttgaacttttcttcattttcttcgaattcgggtccgggttttatgattggtcgaaatgactctcattatcaagatcagtgaaaccttatgatagtgtttttatgacttaaaatgattaataatatttaatgttttcgttggttttcagcttggaaaggggcgaactcagcgacgatgacaaacgcggattggaagcgctgaagacacaggcggagcaaatgcacatcaacctgtccgatttgtggcgtgaggaggtgttttaa

SEQ ID NO: 69323 - DNA, 540 bp, Heterodera glycines
gtggtgatcgaggcacgggacaccgatgggcttgttggccatgctgttgtgttggtccaagcattggccgcagaccatctgccatcaaaagctgctttttcctccccctcctcttccgctgctcgcgcttcgctgttcggcagtggccaagttccggtcattgctgatcatcagccatttccgctttcatcgtccgcatttgtgccaccattagcaaaagccgtcggcgtcggcatacccccggcgtcaccaccgtcggcacaaatgtcctcctccctttctcaaaatgtgccaccagctgcgggttcgcagcagatgatgtcatcggcactgattgcgtcctcggccggtgggtattggcagccgattagcaacggcggcaacaacaaagcaaattccaaccaaaagccgaacccattttggcgagttgatccaacaacaacattagcaacaccagcagcagcagtgaagttgaatccgatgcttataccattcgcaactaccacaactgccgtaccaccgccgccaaatcagttcacg

SEQ ID NO: 69324 - DNA, 369 bp, Heterodera glycines
atgaccggcttttacaccgagaacgcacaactgagagcccgagctggaccgaactggttgctggtacgtgtcgcacgcgaccgccaccgacccccagctcgagtcaacacggacccgaaaccattgcacaattcacccagagtaaacagcactcccccgatccgggtaccagaccccgaaaggctggcctcaagaccgagctcacgcagctactccgagcatctcagcgcactccgcctgcaaatgccccattcgccactgaacagaaggacagcaaaccccagtctggaggctagcaggccaacgtacagcaacaaacgggtgaatgcagacccagatacgccagctctgtccgtttccacctcatcg

SEQ ID NO: 69325 - DNA, 86 bp, Heterodera glycines
ttgaattaacgcgcaaaatttacgccaaatgcgctatttggcgttatgagcaattttgtctgacactggcgcgtacccatagtgct

SEQ ID NO: 69326 - DNA, 282 bp, Heterodera glycines
atgattcccaatgataccttcattttgcttcttctcctctccactgtttctgtgtttgttcaatttgcagaagcccaatggaagcaggaaggagctggtcagaaaatcttttcacacaacattttttaaaatattttttatgcatcttctacgcaacgtgcagctggcaaaaaacattcgaagacggcgacagcggtgcgcaagatgaccgccaacaacaactctgagcagcagcaacatggtcatggtgttgaacgtgtgcgtaaccgtcactcgaacaag

SEQ ID NO: 69327 - DNA, 128 bp, Heterodera glycines
tttggtcatccttgatttcgtgattaaatatatacgtaaattgtatcgcctctttctctatttctatccccaaatggtcattcgttcattcagctcacaattcctaccaaatctgcacatttaaagag

SEQ ID NO: 69328 - DNA, 1983 bp, Heterodera glycines
  unsure (1)..(1983): unsure at all n locations
cgccattctcgcgtattatcatccccaattacnttaattgcttctcctaattgcccttccttcgcttttcattagcatcgtcgcctgtggcattgccatgaaacagtacgtcaagggcaacatgagccacgacgcgaacagttcggtcaaatattttgtcaaaatgttggcacagagcagtgagacaggtcatttggggctttgaattgcgatgttcaaaatggcgcaatgttttggcattcagtcattttcatgttcctcggcttgtcttccatcgccagcaaacaccactgggacactctgttcgtcgcctgcactgtgctcatctgtttcgtttaccgtgtcatcggtaccgaccattgcccattcttaccgtagtgtccaaatggtaccgtaatcttccccaccccaaggcgttctcgtgcagtgtgcctttctgaaccgtttccgcaaaataaagttcagcgccaccgatcagttcgtcctctcctacggggggctgcgcggtgccattgccttcggtttggtcgtttccctcccggcgattattgaagcgaaacgaatgtttggccatttgaaagccaacggacgaattgtcggtctttttaggttcgtcaccacttgcatcgccgtcatttacttcaccgttttcctccaggtgtccttttctttgttttgctgtttttattatcctccgccgttgttttagggcatcacaattcgccctttgctgtctttgcttaaggtggagaagcaggacatggaatacgaggagatgatggtggagaaggtgcctttccaccccaataataccgtattctatcggggttactgtacgcttttgtcaaggtgtacaacaaatactttgactacacaatggccggtattgaggacattgttggtcagcggggcaaacacttcttcagagacgcgtcagtcaattggccaatggacgacggcacatttcattttggaaatttaagtttcgaacggttcaacgccaaaattttgaagccattgctaatgcgcaatatgacacggaaaacattcgacgcaacagacattgtgcgggcgtacaacaaaataacgctacaggaagcgctgaaaattgcgcacattgggcgaaaaatgagaaagtaaatgggtcaagtggacgggggatcaattaagacgaattaagagcaattaggaaaaaggaaaaatggaagagggaaaagtgccaaaattgacagagtgaaagaaaagcaaccgaacacaatgccaaagacagccgaagcacatcgaagggaggaggagcagaacgaaacaatgacaatacgaagcagagaaatggaattgggacaagtgggcgaaggaaagcaattaattcattaattatggtaattacttattaagtatatgtctaatcgggataacgcggaattgctttatgcgatgttctctcgtctgttggacagaaaaattgaagaaatgcaacggaggaaagagacgagaaaccgatcggaggatgacgacataaaagtggccggggaaaagggggggagaaagttaataaaggcaatgaattaaggataattacatggacattctgaacacgagttcggcatcgcaaagcaatgtaaaatttgcggaattaagcatatttttaaagtgtcgaaattttagcaacgatcagcagcagtagcaaaggaaaaagagaaagtaaataatgtgagagagagagaagaagcattggaaatggaaagggggacaaacggaagagaaatagcaaacaatagaagcaaaggaaaagaggaggagaaggaggaggaggaggagagcagcagaacatagtcagcggaataggaggaagagaaagagaggaagaagaaaaaaaggaggagagagagagaaagaagaaagaggaagaaaggaggagaagaggaagagaaagagaggaagaaagaaaaaccttcgccggggaagggggagaattggcacatc

SEQ ID NO: 69329 - DNA, 792 bp, Heterodera glycines
atggacattttccccttttttgaccatgctcaactcagcctcaaattggcacttctttcgccctgtttcgatgcgctggtggacaaacattttcaatggcaaaacgaattgacgtaagtttcaattaaaaaaaacataatcataagaaaaattgcaaaattttctaaaaattttcatttttttttgagacttacaaatgaaggcctctattttttcacttctttttgcttttgaacataaattttgtgtttaatccatatcgaaatttttggttaaatttaattcatagaaatgccgacttatcaaaaaattgcaccgaaataaaaattttccaaattcgacatttttttcttgtaaagcggatttttaggcattttgcacatatcatttttagcctttgcgattttataatttttattacttttttcagcaagtgcgcaacgacacttggtggccttttcccatcttttgaccatgctcaactcgggctcaaattggcactgctttcgccccaattcgatgcgctggcggacaaacattttgatggaccaacgaatttttgtataaattcggcaagttttttttgggttttctttttgtttttttggtcatggccccaaaaatcttaaccgccccgaattttcaaaaatttctgaaatttttttttccaatttcatttttttgtaaaagtaaatagtttttttttgtttttttgaacgtttttgtgcacaaaattttaatggcctcaaattatcaaatggctctgaactccaattttcaatatggctcata

SEQ ID NO: 69330 - DNA, 125 bp, Heterodera glycines
tgccggacggggccgacggcaccaccacttttgtggtgcccttcctgcagatgggcctgttcaacgtgaaccaggaagttgagttgctcagcaaattgttcagcagctgcaccacaaccagcggc

SEQ ID NO: 69331 - DNA, 1187 bp, Heterodera glycines
atgcgtgaaaatgccttccaattatatgagaaaccaaacaatgacacgggaaaggatgaggcatcaatagcagctgatacaggtgccggtatgtaacacggcaatcctgcagaatgggggtttctaatgtatcttttttttggttgaaaattggtacattgggagttttatggggtgctggatacaaatctaacataaattctgaccatttcctagtccctaacccgaactcgatcaaaaactcgaaaaaattgaattttcgatgttcaagttcaagttagggatttgttcgcatctcggaaaactaacccacatacatataccattctcgacccaaaagaaaaaataaacgccccattcttcaggatttccggtaatactatcagtggtttaggggtctgaaactacgttaatgtccataaaaaaaaatccacaaaaaaaaaagtagtgcaaccttgcttaaaagaggaattacattgctataatttaattttttaccgttgattgataaaaactctcctcatcagaactattatttaaatagttcaagtttctaaaaaaaactgaaaatttttagaaacaataacattttcccttccgggaaaaagttttctcgggtcttcggaattggcccgaatgggttgttaacatcatatcagatcaaaaaacatgtttttgtgctaaatttgactttggtattttcaggagagaaaaagctgcctgacgctgaacaaaaacagacgacggacacaaaggagcggaagagtccgataatggtcgacaaagtatggccattcattcaccatttggccactctttccccgcattccctcctcccctttagggagtgcaagtgatccccgaaaggacaatcttcgcctcgccctctttcagttcatcttttcgcactcaattgccggcctctccaattttgcgtacggccaaaaaggaacagacgtcgagtttggtgcttccattgcgggatgcgagcaatcatgaaaaactttcctttgattgatggaccgataaactttgccttttatttgtcgttagtctcgcattacaattagtttcaatagtaaatttctttataatttggttcatttatgtatttcattccaacacttttaagctcagaaaactagagttcggcgggccccgaattgaccgaaatggatattaataaa

SEQ ID NO: 69332 - DNA, 143 bp, Heterodera glycines
atgacgctttgcccgacggcaaagccctgccgaactcttccttttgcgaaagccgcgaacaacattggatttgctgagagcaaaaccgttggcaccattgatcagagacgaggcgatggaaaagcagttcaatcgccgttttg

SEQ ID NO: 69333 - DNA, 785 bp, Heterodera glycines
atgaaattatttccgctactattattaattatattatttttaattgtcaaaattggatcagaaaagaaaaaattgcagcagaagtcatttggcgaaatatttggagaaaaatggcaagaaaaagaagaagaaaaacgaaatgaactcaaaaaaagagaaataattcaaaaatattataaaataaaagaaaaaataaagcaaaaaggaagaaaatattcacgaaaagaatggaataaaattaactcaaaaatagcgaaaaaattggggacaaatcaaacatatattcaaaaatggattaaagaattaggacttaatcaacgcatgcaaaaaagctacaaatcaaaaactgatgaacaaaaaattgaaattgtgcaaaagtttattgcaatgaaaaatgaatttaaacaaaaaagaaaatattcaagaaaagaatggcaacaaaatcataaagaaatttgtaagaaaattggagttggttatgacacaattagaaaatggaagaaacaatttggcatttgctgcaaaaaaataacggagaaagaaaaaatggaaaaaatgaaagtttattggcaaacaaaaaaagaatatccgaaaatgaatgacaaagaaattgcgaaaattatgaaaattaatcactttaacgtttatcgatggaagcagataattggagaaggaataaatgagtaatgcaagaacaacgatatggagactttacgacattcagtattttatttttcagtcctccttatttttattattaattttcgttttttatcagtaataaa

SEQ ID NO: 69334 - DNA, 497 bp, Heterodera glycines
atgttgagaacagtttatcaatataagcaacgacatcccgagctggggcaggaaaaaattgtaaaaaaattattgccaatcagtttaggaacatttaaaaaatggaaaaaatcgctgacgttggacgccgatggtatacaataactcttacaaaagaaaatttatacgatactttaaagaagtattaaaaagatataattagattaaaataaagtttttatcttttgaaagaattgatttttgctttattagtaaattttttcaaaaaaaatttttttgaatttttcataagaaaatttctataaattcacaaaaatttcaaaacaagtaaaaaaaacaatgaaaaaacataaacaaaaatttgaaatatgtagaaaatatgagccatataacttttatttatagaaaattcaattgatgatttgcaagatgacattgaggaggagcctaaacacatgggaattgagtaattcatttttaaatgaaaattgaataaa

SEQ ID NO: 69335 - DNA, 307 bp, Heterodera glycines
tatgaggatgaaaaacaatttgaaaagaagatttcctcaattaaagaagaacacttagatgaagataattttgtcaaacaagaactcattaacatagataatggaccaattagcattaagcaagaaacaattaccattaaaaacgaacccattaacggcatagatgaacaattaagaattggtaatgataaaataaaaattgaacaaaatgaaaatgaagaatcagaaatggatgatagtgaaagttttgaaagtcacagttctgatcagtctatatctacggatgatcaggattcagacgaaatgg

SEQ ID NO: 69336 - DNA, 671 bp, Heterodera glycines
atggacaaaaaggcaaatttggcgatggacaaaaagtgcaaaattgctaaatttcaaaaaaatttattaagtttttcaaaagttatgacaaattttccagtttttggcttgaacttttgaaaaacttaataaaattttttgaaatttggcaagctaataatgcaattcaagggctatcgtatgataccaagattgtttgcaatttggttgtgtctgagaagagttttgagttgatttattcaaaaatttagcaaattttgcactttttgtccttcgacatagcaccgatttttcacaagggttaggatcgactcaaattagtcatgtagctcggcgtcagtccggcgcttttttacagtaagaaaaacggtttttacagccttatatatttaatgagaccgtttgattgagaaattcttaaaatgcttgaattattttgatttaacttacagaaaatgctgtcagttttgctaattttctccgatttccattccttcaatgtgctttggcccatcttcagtttcttagctattttagaatcgctaatttttggattgtcacttttaatttcggaatattttttcatcaacatttccttgtctttttccgaatacgttttgttgactaaaacaaaaaagaagtattaatgtaggaaatttcataatgaaaaa

SEQ ID NO: 69337 - DNA, 675 bp, Heterodera glycines
atggatgtaactccaatggcgcaatgtgcattcgaatgttttgtgttcaaggtttctgcagttcgcactaattatcgcagttggctgcgttcttcatcgatccacgagccgagtgatccaccgataagactagaattcattcttcaacagaagtgtaaaaaaaaataatgaaaaaaaagaaaaagctggcggtgcccgagctgacactcattgagtcttaagccacgtgctaggccaagcacgggccctaccacgtcgtctcatcacggccacggacgtagcagcaagcacaaacacaccgctagttacggcacgtaagaccgggaacgaaaccaccatccccagtcagtgtgttatgtgcctgccacaacaaccgctcaacgacgcacagacgccaacacagccgttaggtcgccccacgagcgtgcaccccacattggcgcagcgaaccaaccaagcgaggcagcccgccaccgacacattgccacgcagcagccatacacaggctttaacatgtgcagcactgagcggtataccacagctccaacgtatggaagcaccccaaaagcatggctcgtgaggcagctgccccgtaatgttgggcagcgtccacaagtcagctcgaacgacctgtgcccgtcagcggacgggggcatttggtggtgccaacgctag

SEQ ID NO: 69338 - DNA, 177 bp, Heterodera glycines; identical to SEQ ID NO: 41144

SEQ ID NO: 69339 - DNA, 414 bp, Heterodera glycines
atgtacaaatttgggttttttctgcttcttcttgtcctctttctcatcgtcgtcaagagtcggtctgaagaaccaagggccgagaatgttcgtccaaagtttgtaaagtgtgaaaaagggaatggacagcagaacgaagaagaagccggtccaaatcagactcagaagctgtgcagacacactcagaatgacgatgtctttgcagtaccttaagggaccgcagttgtggcgaatgttaaagcttttttactctccaaacgcattcggatcgttgaggtccaacccagcatcgaccagctgattacgctcattccgctcggttttcatctgagaaaatgcaaaatttatgacaaagcatcattaaacttgtgcccaaaaatcggtaatccttcggaattggtgtcccgaccaaaa

SEQ ID NO: 69340 - DNA, 394 bp, Heterodera glycines
atgaaaaccgagcggaatgagcgtaatcagctggtcgatgctgggttggacctcaacgatccgaatgcgtttggagagtaaaaaagctttaacattcgccacaactgcggtcccttaaggtactgcaaagacatcgtcattctgagtgtgtctgcacagcttctgagtctgatttggaccggcttcttcttcgttctgctgtccattccctttttcacactttacaaactttggacgaacattctcggcccttggttcttcagaccgactcttgacgacgatgagaaagaggacaagaagaagcagaaaaaacccaaatttgtacatgtgagacgatgaccaattgctgttgttgtttttgtttcataaactcccttataaacacagagaaaaa

SEQ ID NO: 69341 - DNA, 707 bp, Heterodera glycines
atggatttatatttggatttggatgatttgcattatgacaacaacggcattttccagccaatttggaatttttttgctggtgaaatttggcccattttcgcgccaaacattcgccatttgactggccatcatttgggcgatttgcgtcgtcaaatttcaccgacaattttcaccgattgcaaccaattgaattcaattgactccgataatttgttgcccgcgtctattgctgatgatgggccaaatgcaacttctcgtcaagcattgaccaattggttgcacactccgacaaaaaatgggcatccgccgaagcaattgagttgttgtgattatacgtcagaaagcaatgaatggttcaacaatttcaaaaaggtgtgccaatattttcgtaaaattttggatcaaatgccatttacttttcgtttcccattttttaggaatttctccgtgccaactcttctgccagttacataatccaattcaaaacttacaccacaattgcgcagtttgaattggtgaacgaacggactaaagaaaagctgacattgaaggcagaagatgattatgatgtatatacacatattaattttgtgttggagcgatgccaaattgtggcgacaattcaatggcggcaagacaaaaagacggacaatttgaacaatgtcgacattacaataatgtgcgtcatgtttttgctaaaacattag

SEQ ID NO: 69342 - DNA, 334 bp, Heterodera glycines
atggtcattttcgagctaggtattttgatggctgacttaaagaaaatgaaaagagatatagaggtagagaaaacaagagtaaatagagaaaaattaggactataagaatataatacagctccaacttcgtgtatcgagttggagtagtacaagctcagggttaatatagatcaggtttaaaggcatattcggattttactgatctaaaatttacagaaaactttgttatatcaggtttagtattgatcataaaaaattcgagaaaaattattggaccaattttcaactttggcatggtcgggaaaaaattctgaaaaattgacaagcaaataaa

SEQ ID NO: 69343 - DNA, 931 bp, Heterodera glycines
atgcttttcactgggtttgaccgactgattgtattaatttttggtgaaatgtagtttcacggtgaccagatggtcaccggttgctttgttgattttttcagggtaaattaaatgacataaaaaataataaaaaattatttagtttgtgtgtcaatctcccgtttaattattattttgctgatcatcataatgactttaattatttatttgcttgttggaatggtgataaaatttaaatgacgggttgcttaagcttaattacatcattaaaaataattactcctaatttaggtttgccctcggccaaatcgattaatcatcgtgtttttcgagctctttgttgtatcatcacagtgaatgtttgaggctatttaatctgtgtatgttttattactctgatcaatcaattaattgcctctccgatcactgcttggtttctgcaagtaatcactgcaattctgttgaacattggcgccgcatcgaatggacccattttatattttacaaggttcttttaaattaaataattaattgatatttttattttagcacggaatatcggaaagcctttcgagaccaatttccaataatatttaaacaaaatttaaatgtaattcaagtttcgccacagcaaaatggaagctaattcgctgcaagccctcaggacacgaacccaatctcataaattttttaattgtataataaccttttactctttttataaggtttttattatattattttaatttacacaaaggaaattattaaaattcatttcttatttttcttttacaaaaaaactatcgggactgagtttgataatacattatatcaatttgattatttcataacaaaaaatcattcaaccaaagtgtaaaaggatttatatgttttttaaatttattattttatgtaacattaaatgaataaa

SEQ ID NO: 69344 - DNA, 569 bp, Heterodera glycines
atgctgcggtaaatataatctttgtggccaagcgatactcaattaaagtttgtccagaaaaagcgacgtaaacgaacaaaaaatggccagattgttgaagaatttcaaaaaaggagcaaacgaagaaaatttttcggtttatttcgatttttcggtttttttgaatttgttattttttttcaaaaaagcaataaactattctattaatagaaaaagcaaaaattcctctgagtaaaattgtagagctattgaaactctattgaatggtgtactaaaggtttgtaaaatgatagaaaaggcagccaaaaaacatgtgtttgctccttgattctaaaaaaaccacaaagattagttttagcgatttggtgccttttttggcgttttttcccgaaaaattccattaaaaattcaaaaaaatcggaaaaatacacccctaagaaatgatctaaaaaaattcagagaatatacctttatgaattgaacgccaaaattcatatattttttttttgataaaaaattttaggtttaaaaatttccttattgaaaaacattataaaattgaattatca

SEQ ID NO: 69345 - DNA, 419 bp, Heterodera glycines
  unsure (1)..(419): unsure at all n locations
atgacaattgcacctatgagatttgatgaagacgattggtaatgcatttattacnccaataaaattttaaaattaaaattaattctntaggaatgtgttcatgggcaagaactcatcgttgggtcacgcatgcttttcaacgcaaagggactactgcaaacaaatgcaaaaaacattgtgtcctgctgtttcaaattgtgtccgttgaatttgttaaacagcggtgcctgcggtgccattctccgctcgtccaccttttgcgtcaccaaattgaacgacatgtgcccggcataattagcaattgcctaaagaacggaagaactaattgtgagaaaaacccctattgggatgttgttaactactaattaatattaattaatctatgattaaatccatgtgtttgatgagtcatatttcaa

SEQ ID NO: 69346 - DNA, 207 bp, Heterodera glycines
gcaattgctaattatgccgggcacatgtcgttcaatttggtgacgcaaaaggtggacgagcggagaatggcaccgcaggcaccgctgtttaacaaattcaacggacacaatttgaaacagcaggacacaatgttttttgcatttgtttgcagtagtccctttgcgttgaaaagcatgcgtgacccaacgatgagttcttgcccatga

SEQ ID NO: 69347 - DNA, 344 bp, Heterodera glycines
agttttgttataatgccgaaatcctacgaaaggctacgttaacagatgtcagacggatgcgaaaagatttgtttgacaatgatttgcccaaaaaacttgatgtaattgaatgttttgttaaacaaaattcggaatttcaacgcaacaacaacaaaaatttattttaccaaatgaaggatgaactcattttgtatcggaccgtattttttaatgagcaatttgaaattcatttggaaagcattaaacaatttggcgaaaattatggcaggagaattcatgaaattgctaaactgctagaagagatacgcgaagcaaggaatcaaattgaacaacagcaaatgtaa

SEQ ID NO: 69348 - DNA, 803 bp, Heterodera glycines
atgaattctattcgtcttctgcttcaattggttcttccaggcacggtgatcatcagtgacgaatggcccgcatatctgaaaatgtctaattcgtcacaaaaaacaactggtggtggtttctcaaaaatcatcacgcttccaaacgggactgaattcaatgttaatacgaacaaatgcgaaggaatgttttgttgcattttaattataattttaatgattaatcttgttaaatctaataaaatacacattaaaattgcatgaatgtgtaaattttggtgaaaatttacgattttcgactttttgttcgaatccgggtccggggttcgaaattggtcgaaatgaatgtcatattcgtgatcagcggccccgaaagcccccggaaatgtattttcatgacttttttaaaaaattttcaaaaaggacaactttttaactagcgccgtaatgtctaaggtgtcgaaaatttgtttaaatattttttatataaaagaaagatttaaaaacggcttagaaatcctaaaattgttattttgagcaaaatccttcaacgaatggcatcctatttttgaattcatgccattctcatttttggtatactctctccacccccatggcgcataaagtagctcaataggttagactcgaatccaattagcgccgtggtgcactctttttttaagtggcgcgaaaattggggattcaatgaaaaaatattgaaatatttaagaattaagcccaaaattcgacaaattacgtccgcttttgcccacacagacccaaaaaatgacagatgaaccaataaa

SEQ ID NO: 69349 - DNA, 1975 bp, Heterodera glycines
cttttctgatcatttcgtccgttttgggtgtttcaattctcggcgacgttcgtcaaacgcacgcgttgttctgtgttagcgaaggaaaagacagcaaaaaggtgcttagtgaggcgcacatcgaacgcattcaccagggaaagagggcggccaacgacatttgcgcgtggggcggacatttggcggagtgccaattggcggacggaacggcggagagcattcggtaaaaatgccaaaatgagtctcagagtgtcagtccaacaacccctttcaggctgactccaaatcggcacattctgtcccttgccacttccgcattgagtgaccattccattgaggtgccattggaaaagcctttgcactttgggcccaaaaagttccctttggtcgtttgcgtggcaccaatgtatacggtaggaacacggacacggtaggagagtgcccgaccaagatgcctttttgtacagtacaccgaatggcaaattatggtgacgggcatcgaagtttggctggcattgggcgcctccaaaatggttttcttctgaaactgtgcctattgtcctcaatttcccccccccccccccttaaggttttcccaattcaatccgcttcggcagacacaattcaaattctgacggagtatcagcgcattggtcaaattttgtgctaaatcttcatttaaaaaccaattaaactaatgtcaggcattgtccatttgcgcgtgtggcccaaatggccggtgctttccgatgcgaatcccaacggattggtcctttcccgaggcattgaagagtctcacgtcaactgtctgcactttgtcaagccgttcgccgaaatggtggtcataacggacatcgacgacatgtccgtctgccatcgatcgcattgatcgttttttcttttccttccgatcagtcggtccctttttgctttttcaggttgatgccattggacccaatgaaagttcggccgggaataaacgtggacatactcaaggtcaaaagggcaatgcttttactccctgtgaatgctttttaatgcttccgtttgttccctttgttaggatctgttccatcagcatccaaatgccggctctttgctcttcgaacatcgcgatgtccaagtgcgtttttcgcttcctttgtttacctgctattccttaattatcattgctaattgcttttaattattccgctatttgcttcattagcccccactttaaagttcgttctccccgacccatccactcaaaacactttgcgcagtttcaatttcgaattcctcgcccactccaaatggaagacgagttgcaaagtgtggcggatgaaaacgcgcgtggcggtcaatgcgagtcgcgtggacacagtgggcaaccaattaacgaccataattaggatgccgtttctcatgcttgtttgcccattcgaaggtgaacatgcacgaatcgggcatccatcggtttggcttcgtccaggtcagtcccccctcctttcagtccggtcgtccaattctctttctaatctcattcccatctccccgtttcttcgcttttaggtccgtgtgccgtgccgacaagcgcacttttatcacctgcgccactcctacaaaaacattgccatcaacgagtggcccattgacatgtcaaaactccgccaaatgctcaacgaacggtggcatttccgtgccgagtccaatttttcttcagaaatgcaatcgaaaatgttggcacgctcgtcggtggaaagctttgaaggtaaaagcaaaagcaacggccaaaagaggcaaagccatcggcgggaaaaaggggggggggggagggaagccgcggcattcgattggatttcggaatataataaaggtggaagaagtgttttaagattttgacaagtgcatgagtgccatcaatgaggagcactggcgactgcgcgtgtcgcgctgtctgacaccccacgtgtgcttctctcgcctggccaag

SEQ ID NO: 69350 - DNA, 558 bp, Heterodera glycines
atggtggacaaagacaaatgcattgtgatggtcatctgcaacgacaatgtgtacaaggtgggacggaccaccgtactaattgccccgttgatttaatttattattttcacgttttttagcgctcgctgaacgcactgcagcaggtgaaagcccgtgacggatgtcccattgtgattgcggatgagtcggtgccgtcgtctgaacttgccgatgttgagcatgtgctgcgagtgccacggactgtcgactgtctgcagaacattctgactgtcatcccactccaactgttggcataccacgtggccgaactcaatggatttaatgtgcctgttttaatttttggtcttttttaaaaggaatttcaaggttgatcgcccgcgcaacttggccaaatcggtgacggtggaatgagacgaaggaatcccgcaaatcgtgatgccaaaactacccatggacttaattttcgactttgattataattaattaatttattttgttaggattgttcttccgactttgacattgcaattttatccattttacttgtaattaaataaa

SEQ ID NO: 69351 - DNA, 124 bp, Heterodera glycines
atggcagaagtcggaaactcgtacagaccgccgctaagcgaagagaaacaaaacgaactccgcgcaattgctcagaaaattcttcagccgggcaaagggattctcgctgctgacgagagcacag

SEQ ID NO: 69352 - DNA, 169 bp, Heterodera glycines
atgaccagcacaatccgcaattttgggcgttttgctggacatgccaatgtagataggtaattaatctaatgaatgaattatctatatatttataaattaaattttattaccttcaagctttaatcttaggaacgactgggggaatctaattatcattgattataaataa

SEQ ID NO: 69353 - DNA, 433 bp, Heterodera glycines
atgcaagatttgagtctcgccatgagtttcaagcaatggagatcgatgtgagagatggattatgggacagaaaggtggttgccctgagaagcatggttgcacttccgccgaatttggaacggcttcgagtacagccttatacaaaataaaaaatatttaaattattatcacaaacattaaaaaaaatttctttataaataattaaacaaaaattaaaacattcattagttaattgtttgtttattttgcatttttaggtacccaaatcgctcaaaaactaggggatacgccctcatgtggctcaaatgttgaccagcaaaacatcaaaaaactcctcaccgaactcggctacataaattatttaaatataaatgagacagcagcggtaatttctggaattaatcattttaaatataaaatgaaaattaataaa

SEQ ID NO: 69354 - DNA, 222 bp, Heterodera glycines
atgcgcgaattcgtaaccagaaatgctagtcttatgaagcgaaaagtacagttatatttttctgatagtgttagtgagaattgcaattcaaacattatttatcatatattctagcattttttaggaattaaaatatttaggaattcttgtagcatcctattcctacatgttgaaattgagtcgaatacattgtgacatttatgcattattgtaaaaaataaa

SEQ ID NO: 69355 - DNA, 600 bp, Heterodera glycines
atgaaaaaatggatgatggatctgtcccattcagttgttaataaattgcgttcggtgagaaatgaaaccataaaattaattttgaatttgcgtcactcattatttgggattaaaaatgtttggcgatccgtccgtcctcgtctctgcccactttagctgttgcgtctgcttttggttgttatttttgtccatgtcactctcgcgcccctcgccgccctctctttgcgccattgtcttttcactttcttcgcttccctttctttttccactatttttctgctgtccttttccgtttttcagtggcataaatcgcccgtgctgatcgcgtttcgcattgtgtacagtgagcgacaacagatggtgctgatcatcgctttcgagcgcatttggtgagtggtttctgtgtaccgtaaacatttcaattttgttactgtcagtttcactcattttccattctgatcagtttcccttgctggtgtaacacgcctccctttttgctttaaatatcaatgtttcagcttaccccgtcgatgggctgtacgtgtccgacccctggtagcccgagtcgcgtgtggtcttcctcgacaaattgttcggtaa

SEQ ID NO: 69356 - DNA, 320 bp, Heterodera glycines
atgcgcttgcatatggttgcaattgcatttaatcgagctcatgcagtgcttttcccattcaattttgcgcaaaaagtcacaaaaaggttaacaaattattaatataattaattttttaaccgaacttattttttctttgtgtttttgatttaaaaaaataaattaatttaaattaattttattaagatttcaacggctctcaattcccgagtcgagaaatttctcgggctttttgggtctcagttctcgtaccgtttctcggggtcatttcccggttctcaattttccgtaaaaaaaaattagcttctcgcagattccca

SEQ ID NO: 69357 - DNA, 645 bp, Heterodera glycines
taattaaatccattccttcgggggaccgtgccgggtgccgcggggtaagcagtgctggttcgtttcatcacggcaccgaaccttttggctagtcagcaatcgttgcttaacttgccagatcggacgggtgcgcatgattccactgttccaagcaccccaccaaaagcaaaacgatataaccaaaatataaggaaaaattttttaaaaaattttttctccatcttcctttttgatattaaagcatcagagtgctaaaattaagttgtaaataaaatttggtgcgctttagagcactttctgaaaaaaatatttatgaaacaaaaaaatcgattttttcaagtgtccatttggggtactcaaacatttatggggagcaaaaatccaacgcagaattaaagtacaggctatagggaagctactccggaaggattcggtctccccataaatctgggcgcatcggttcggggggactgccccgaaaacaaaaaaatcgattttttcaagtgtccgtttggggtactcaaacaattatgggggagcaaaaatccaacgcagaaataaagtacaggctatagggaagctattccccgaaggattcggtctccccataaatctgggcgcatcgcgttcggggggactgccccg

SEQ ID NO: 69358 - DNA, 728 bp, Heterodera glycines
atgagaaggataatttcttggtcaagtttcaaatgcgaattccgtcgccaaaaagtgacgggtaatgttggaatttggtccgagtagggggccgttttggtactgaaaatgtagtgacattaaatttacattttaaaatcaaattagctggtttacttttaaattttctttttgtataatcatgtctttcctatcgacaaaatatgattcttaatttttttaattgtattttatcattttttaaagaagctccgtacaaattgagcctagtaatcccaaaaaccagccttttttttgttgaaaatctgttaacaaattacacccaaatttcgtaaaaacttttttagaaatagttttaattttaaaaataaaattaatgtgttgcgtttgatagcccgtgaaaaaactttatatttggtgagttgaaattttttattatttttaaatttgaaataatattagacatcgatgaattaatttaccccaagaatatttttattcttgtgcgctacttcctgacaggatggttcagttgactctatacatttcttgatttttttaaagatcaatttattaagttagttaaaagaacggattttaattaaaaattatatttgctattataaaattttttcaaattatctaaaaaattatatatgaatataactgatgaaaaataattataataaataaaattattttttcagctagctaattatttttgtaaa

SEQ ID NO: 69359 - DNA, 1126 bp, Heterodera glycines
atgtgctatcgaatgatacatgaaatatttatttggttgcaaatgaaccaagttatgaatttatgtcttacattttttgttttcctatcacttggcggtttttaggaaaccacccagcacgtaaattttgatgttatattattataatatttaaaatatcacatggcgagttgtgtatagtctgtgtaaatgtcaacagcttcgtatgatatagatattgagtcttatcaattaaaaaatatatatatacaaaaagcgaaagacgaagcctctaatttgttgaacaacttgatttaatgtaaaattgaaaagaaatgtttacatttcaattaacaaaatttatatgaaattctaattatattgtccttgttttctgcaattttcaataaaaatatttataaaaaaataatttaaattcgacaggagattcccgagcggctccggagaaggaaaacttctacgtccttttcacttccccccccccccttttcgattcccggataaaattcatctttggttctctttcccactcccctccccgggccgtccctcaggattctcctcttttcggccattttcactaaaggaacacttagaactcggaccatttccattttcaccaatttctcatttacgtaatcttatttttcaccgattttcatattaaaatcacaaccattctcacatttaatcacaaccattttccattattttaaaataaataaagcgatcaagttaaatggataatggagaagtaaaaagaaaggatatggaaattataaaaagcggagaattattttaagggatttagacaattaaatatggaaaattggggaaaatcacaattatcccggggaacccaaactcgggaaaagttgtactttcggcctggcacgttccctttctaaattaattaattaagaaattttaaataattttcatcttgcaaaaaattaaaagttaattattttaataaatacaagatatttaattttctactaaataatttgaaaacaataatacaaatattttgtgataaaccttaaatatatatagaaaaaaatacatgcatttttatataaatatatttatcttttaatgcttatatagaacgagttaatatcaa

SEQ ID NO: 69360 - DNA, 749 bp, Heterodera glycines
atggaccgaaagaacaaattgacattaccaacaaacgggaacagcagagacagtctgaactgctggcctcactttcctcgtggtaagaacaaattttctttttaaaaatatcataaaacgattatttagtcgacgactccgtctcgaatatgaagatggtcattcaacaaatgcttcaaaagtgacattggggctcaaaaatgcttttttaaattgggtacacatgatttatgggtcggtctgagtgcttatttatagactctcatactactagatatttctgatggtgctctgggcgctttgcatttacgagaatggggcgaggaagggcagcgaagcccgcggtggacaaagtgtcggtctgcgacagaacaatggcggcatcggtgaccaaggaggacgaggcggcagccgtggcggtgcccagcatggcggtccccaaattacttaacgaaaatgcaaaaaccgaaaacaattaaataataaaaaaaaatatacagaataatttagtataaaatgtttttttacagttccctatataagaataatataccccagtttcaagcttaaaaactaatttaagactttttagcgcgttttatgggtcgggagtggtatcattcgataaggttttggactggctataagggaaaaatagtgcggtttcgatcggtttagaactgttcgaactgtgtttgaaaaatgactcaaaaaatcaaacttttttgaatgtttttgtgactattaaa

SEQ ID NO: 69361 - DNA, 292 bp, Heterodera glycines
gaaattggccgacgatgcctttcaaatattgcctttgcccgacatcgacccgagcgtcacttcgactccggcggtcgtcaacaatttgatcgaggtttggcacttaagttcttggcacttactttcccgtctcttttaggcggtcgagtcgctcgactcgcggatgcctttggcgttccaagagcagcagcaaatcctgaaaatgcagagcgaaatgctgcaactcggcgtcagttgcaaggaacactacaagaagatacatgagcagtccgtgatgcgttacaatctcgag

SEQ ID NO: 69362 - DNA, 953 bp, Heterodera glycines
atggcaactgaagcgtgctcaaaaagtacacttcagtaccaggtgaataccgcgccagggtttgatctgagcggggggtggtcagcgaacttattgtagagatttgaaagctcgattttttgacattttaaaatttcgaaaattttcaaaatttttcgagttaggcctaaaaaacggttttcgggtttttgaattttaggattttttaacgatttttcccagagaaacggagaccacttccaaaacatagtttttcgagctctatcgactggtatttttttcggaaaaatttcgattttttcccggaaatagaaaaaaattttggcctcagcgggacatttgagtcccgggcccataactcgtcaggggttggttttatcgaaaaaactccttagggcaaaattgtagagctttttaaatgctatcgaatggtgtactacatgttcgaaaattttcaaaatttttcgagctaggccccctagaaattttcaaaaattttttttgggttgaaaaagggggtcaaaaatatttttctggggtattttgaggtgctgagcacgaatatgatgtttgttttacgtttcagaatttttggaattttttaaaaattccaaaatatttttaatttttttggtccttggaaatttggtcgaatattcgaaaattcataactcaatggaggactggtcaatttaagtgaattaaagctttaaaaatagcaaaaaaatcgggagaattttatgggatttatttggaatttctatcttcaaatgaaaaaaagttattccagaatttctggaaaaatccgaattttcagaaaaaaattcttaactcccttctgaaaagtcattttggaaaaataacatactacaaaaatccgcaattttttgctctaccaaataaattttatttggcatttttatcacatttttaaaaaaagatacaaaaataaa

SEQ ID NO: 69363 - DNA, 895 bp, Heterodera glycines
atgagtgtggacaagaagactaaggttggttgtgccaaaaccgttcccactttgcgctattaaggtagtcagaaaactttggccaatggagcaaattcggagatggaccgccggtccgaccacttttaacattgtctgtttgtctgtttctgtctgtttcagtaccgcgtcgcctttcggcgacttttgcaggactttggcgactaccaagatgggtattactccgtgcagaccaccgaaggggggaaaataaagagtttacttgctgagttcgtcgacgtgatcatttggaagaagaaactcgtcgacccattcggattggagggcgacgaaggtgccattatgatcgaggactttgtacttcgggctcgttctgtgccggtgacctttgatgacgtagtcgaagaggaggaggcgacgccgataatgtccaagtcacacccggcagcactgtccacgccaacaattctgggacccaaagagcgaattgtgcatcggcatgattcaacgaccaattaattggcacttttaaggcatttccggcagattcggaccgattccctcgcccatttggcagtccatcagccactctacccaatgagttcccacggcagtttgacccatcggcgcttcaccagctccaaatgccggacgaagcccccaaactaatggcacttcccgtaaaagcagaacaatacgaccaattgccattccaagaagcaccgccaattgctaccaaatgttaactcacttttgaacttcaaaagtcatttctgcttcagttactcctccaaattctccgtttcgacaacaaattgcgcccgttcaattacgaccgaatttgcccgatgagtcactttctccgccatttccgccgttgtcttattgtaataaa

SEQ ID NO: 69364 - DNA, 83 bp, Heterodera glycines
cttggttaggtggatagagcaccaatgggttcttaagaaaaatggttttattttctgccaaatgagcacgagtgccgagttat

SEQ ID NO: 69365 - DNA, 194 bp, Heterodera glycines
ccgggactcaaatgtcccgctcaggccaaaaattttttctatttccgggaaaaaatcgaaatttttccaaaaaaattaccaatcgatagagctcgaaaaactatgttttggaagtggtcttcgtttctctgggaaaaatcgttaaaaaatcctaaaattcaaaaacccgaaaaccgatttttaggcctaactcg

SEQ ID NO: 69366 - DNA, 655 bp, Heterodera glycines
atgaaaaacagaaaaggtgaaataatggagctattaaagtttctttgcagtttttcaaaagaatgcttggtataccgtcaatagaagtattgtttttatccttaagtttacataatgaaaaataaatttcagcatgtgttatagtaaaaaaatccatacttttttccagagattttttggaaccagtgggttcgggttcaatgttttgactagtgaaaactgagaagaattgtttagccaaggcgtcagatttatccttattggtaaaagcaacctttgaatttttatcgtttttaaaaacaggtatgctattgctttttgttttgacaaatgaattaatatagccaaaacgtttctttgcagaggtcgaatttagtaatttgttctccttgttcttataaaacttcgaggtttcaaatgtaattttcttagaaatttcaacatatttttcccttattctttcttttttaatgtctttccaaagtaatttccgataattaattaatttctgaatgtgttcaggcaatttgggctcaaaattgctttggactaatgggacatattctctaattaaaaacaacaaaaattgattaattttatgaaacattgagtcaatctcagtgcaatctgaaaagaaaaaattccagttaatcga

SEQ ID NO: 69367 - DNA, 1483 bp, Heterodera glycines
tcaccgacaagagggaaaaatttttcttgatcttctatttacaaataataaacaattaatatcaaatgtgcttgttggccctccctttaacattgtgatcataacagtatttcatgtgaaattaagctaaaaacttctaagaaaattctaaaaaaaggtttcgattttcgtagagctaattatttagcgattaactctgttctttattcgattaactggaattttttcttttcagattgcactgagattgactcaatgtttcataaaattaatcaatttttgttgtttttaattagagaatatgtcccattagtccaaagcaattttgagcccaaattgcctgaacacattcagaaattaattaattatcggaaattactttggaaagacattaaaaaagaaagaataagggaaaaatatgttgaaatttctaagaaaattacatttgaaacctcgaagttttataagaacaaggagaacaaattactaaattcgacctctgcaaagaaacgttttggctatattaattcatttgtcaaaacaaaaagcaatagcatacctgtttttaaaaacgataaaaattcaaaggttgcttttaccaataaggataaatctgacgccttggctaaacaattcttctcagttttcactagtcaaaacattgaacccgaacccactggttccaaaaaatctctggaaaaaagtatggatttttttactataacacatgctgaaatttatttttcattatgtaaacttaaggataaaaacaatacttctattgacggtataccaagcattcttttgaaaaactgcaaagaaactttaatagctccattatttcaccttttctgtttttcattaatgtgtggcaaaattcctacaatatggaaaaaatcgattgtttgtccaatcccaaaaattccgaatcctgctaatcccattgattttcgtccaatttctttgctctgtacaatgtcaaaaattttagaagaaaatatagctcgaaatataagagattttgttgaaaccaataagattttaccttaatgtcagcatgggttccgtaaaaatcgatcagttatcactcaactcttagaagtagttgatgattttagccaagctttagaagaaaagaaagcaattgattcaatttattttgatttggcaaaagcttttgatacagttccacacaaccgattaatctctaagctcaaaaacattgggataaatgattcattacttaaatggattagtgattacttgtccaatcgtaccttttatgtaaaagttggctcatctttttctgatgagtataattgtttgagtggtgtaccgcaaggttcgatcctggggcccttactatttttaatatatatattcatgatattacggatttttgtcacacggaaaaggttgaaattaagctatttgcggatgataaagaggcctaatttctgatctccaacttcctaaaattgat

SEQ ID NO: 69368 - DNA, 869 bp, Heterodera glycines
atgaatttgttgtatttaatatttattataattttctttatttttgtaattgactccgacaaaattcgaccaaattttgatgaaatatttggcaacggatgggacaaaaaagaaagtgagcaaacagtgaaaattgaacaaaatgaacgaaatgagaactcacaatcagcagcagttgatcaaatgggtgaagaaatgggaaatgaccgaaatgatcaaatgaaaaatgatcacaaaaagagagaaataattttgaaatttgaagcaattaaagaaaaattgagagaaaaaggaaaatacaaatggaaagatcaaggcaaaattgagacaaaaattggaaatttattaggaattggtcgtcataaaatatacaaatggaaaaatgaattaaatctaaataaaaataaaataaaaaaggaattttatgagatgaaaaagagtgaattcattaaacgatttgatgaatttaaagatttatatggccaaggcaaacagaaagaatttgcgaaggaattgggcatttccaatgacacattttggaaatggaaaaaaagaattggtgccgaattaccataaaagtcaaagtagaatataattttagtaaagttaaatctaattttaatttaagagcaatttaccaatgaggacaaactgaaaaagatgaagcaatattttaaaataaaagaagcaaatccaaaaattattgacgaaataattgccaagaaattgggaattggaagtgcaactctgaaaaaatggaaaaaaagaatgctctcatccatttgatcagtgattttttatttgattctaaactataaaaatattttgtagggcatctaaaactcgccagtttttttagcattagaaaa

SEQ ID NO: 69369 - DNA, 650 bp, Heterodera glycines
atgtcaaatggacaagtggaaagatttttcgacacatttaagagagcattcagaaaattaaaaggggaggggaagccaaacaaggaaatcatcgacacttttctgatcacctatcggacgactccaaacgacacacttcctgatttgaagtgtcccgctgaattgctgctccgtcgaaggccaaggacaacgattgatctccttcggccaccgccacaccaaccatttgaaagtgatttggagatggaaaggcatttcaaccgtagatttggcaccaaaaatcgaaaatttgttttgaatgacaaggtttttgcacgccatcgctcctcgcaaaactggaaattggagtgatcagtggcacatttggagtgatttttgacgtcaaatttcccgacggatcattcggccgttttggcgccaatcaattgtgcgacaggaaaacagccgacaattttgatcagtccttggccatattaaatgaggcatttgatttgccattgcctccggccccgaataatgcgccacccgaagaagaaaatgccaatttagggctcaatcaactggaagatgaggctgcgattcccattcaggacaatttggctgctccaattgaggacgtcccaattcaacgacgcttctgttctctccgt

SEQ ID NO: 69370 - DNA, 946 bp, Heterodera glycines
atgccattattcaattttcttcttccattggcattgtgttgtagtgccattttggcgattggtattccaaatgatggccaaatcgtagaacatgacaagaaactgttgccaaaatgggagcaaacgccgtcacccagcgcaggcacagatgtggcacagatgaggcgtaagctcaaagcatttagtgaaggaacagatttgagacaaaattcacgacgaaatggcaacgggaaggatgtacaaaacggacaaatcggtaatcaattgtgggtttattataatttgattgttttaaattctatttttatgcttttttaaattaaaggcaaagctttttttaaatttattttcaattgaaaaaaaaaataatgtccaaatatagcattgttttttacctcaaaattggtttaaaaattttaaaaaatattgatactttctttttgtacatttttgggggcccgcttttttcaaaaaaattcttgtgatagtcaccgccaaagggaaaattttgcatttttatgcctttctgtaaaataggtattaatcataaaatttgtccaccctcaaaactcagactcattagcttataaattcagtacccattccggacaagaagaaagggttgttgagatggcagaatatgtcgcccagcgcaagtccaacagtgacaaatatgaggcaaatgctcgcggcatgggttgacaagacaaattcgagacgaaattcccgaagaaatgccagcgaaagggagcaacaatcgttgtacggatattcgaattacttggatttgtcggcaaactcaagcccagcggcgtcagattttgctttgaccccgcagcatcggtgggaataaaaattataattatggcatttaggcatttacattcaaaacggttttttatttaggggcggaaaattccaattaaggggactaaaaagcattaaa

SEQ ID NO: 69371 - DNA, 494 bp, Heterodera glycines
atggctttgctttgtgccgccgagcccgactgtatggtgccaattggacagacgattaagtgcgtttatatgcccactcctccgaacttgacttgccatcgacaggaccagagtctgatggaaattctccgctacaacatggaatatcgacagcaaattgagggtatgtttaaaaatcggagtgccaatgccgacttttttggttttcggcacttctatgcccggctttttcaaaaattcctgtcgcattcttattttcaaaataatttatgctttttttaaaaacagacccatcgtttgtgacccaactcgagccctgcccatccgcgcagttcgaaccgaccgttgcaatcgacggggatcagcggatttttcaaattggaccgtcgtcaaaattttaaaggttctgcagctgaatggcgccaaaaagttcagtgttgctgatggacacttttattttttattatttttccaaaatttatattgaaaataaa

SEQ ID NO: 69372 - DNA, 782 bp, Heterodera glycines
ctctttcgcgccacaatcggggtcatcggtacctgtcgttgcggttgatgtcctatccaaacgtctgtttgttgtaccgctgagaaacaagagagccgaggagatgttggaggcattcaagcaactcatcgatcaaatgcccatggcgccccaccgagttttctccgacaagggcaccgagttcaagaacagattgctcaaggatttttttgaggagcgggaaattgagaagcacgaacccgtccattcgacagttaaagcatcaattgcggagcgagcaatccggaatgtgaagcagagattgtataggtattttgcggaaaaggagacactgaattgggtggatacagtacagaaaattgtggacggaattaacagctcgccctcgcgtgttcacgggatgcgtccaatatttcaaatgctcaggtgtagaagcgaatgtaccgaccgcaatcatttgacagaaaaactccccgcttccataaagataaatttgtacgcatgagcagagataaagggcaattagagaagggatatttacaaaattacggggatgaaatactggagattgatgaggtgctggaagcggtgcacccaattcggtacaaactactggatgagcatggcgagaaattcaaagaaagcttctatgagcaggagctggcgcgcgtaagaaaggatgcagagacaagctaccgtatcgagaaggtgttcagaaagaggaaaagagatgatggatcaaccgagatgcttgttaaatttataggatatcccaatcggga

SEQ ID NO: 69373 - DNA, 822 bp, Heterodera glycines
atgaaacagtgagtcataaaaattattattatttttttcaattgattttgccaatctttctttaaatttcattgtgttatttttagtattgccttcatcgggttggctgaaaagcagcaccaaatttcgtttgacgaaacaattcattgcggcacggcgatttacgaatatgcaagcggcggttatctttggattagcggatcatcgagaaaatcaaatgccaagtactcttttggtgtcggtgatattgtcggatgcggcgtcaatttggccattcgacaaattttcttcaccaaaaatggacaccttttgggttggtggaaaataagtatttccattttcaattatcaattttcaaggagtgtttcgagcattttacatttagtttgcttaagaatatataaagtacataaaattagacatattacaacattttatatagttttgaaatttttaattctgtatttctcaatttgtatgaattattgcgattcttaacatttgctacgactgaatgactatttaaattaatgttttttttaattttccttttttttctttttttagcttcttccaaattgttcgttcctcctcctcctcctgcttcgtcgtcttcttcttcctcttctgtttttgatcttccgttggttccatttatttcattgttcagctttgatgatagaatcgaggcgaactttgggcccaatttcaaattcgatttttcaattctttgatgattcaaaaattttaattttcatatttaattatttgtgacaaatttgtcacttaattatctttgtatttatcgaatattcaaataaa

SEQ ID NO: 69374 - DNA, 1552 bp, Heterodera glycines
atgtccaattccgaaagtgttccaccttcgcccacttcgtcatccgctgggggtggtgatcctctgacatattccgctccagtgaaccaacgaagcatggctaggatttcggcgtccactcaagcggcgagtgagttaaagaactttttgttgttttttcaagtctattttagccatgatggtcaattccatcccggctggtcttgctgcgccgcaacaaattccgcaaacttcccaagtaattgccgcaactgttattagtgcgaccggtgcttctggcgttttgcaattgggtcagcaaagctcaaattctgaatttctgtcagccttcgaatgtcccgtttgtcttggtcggtacaaattaaaaagtaattcctaatctttatttttcaagattacatgcttccgccatatctgcaatgtccatcgggtcatctggtttgtggaaattgtcgtcctaaagtcactgcttgcccgacatgtcgaggtttgttatttgatagtcattcctttcttctaaatgttaaatacttctaattcaggtccaattccgagcataagaaatcttggaatggagaaaattgcagcaaggtttgcgaattcatgcaaaagacattcactttccttctcacaatcagcctgcaatttccatgcaaatttgctcattccgggtgcacccaattcttttatcatcatgagaaagttgagcacgaagagatttgcgagtttcggtatactcaaataatttggaaatttattacttgtttttacttagtccttaccaatgcccttgtcctggagcttcctgcaaatggcaagggagtctggcagatgtgatgagccatctaatgaaattgcacaaatcaatcacaactttgcaaggcaattttaaattcccatacaatattttgtctttctttcattgactcccaattctgttaatgcccaaccaacaggcgaagacattgtttttctggcaactgacatcaacctccctggggctgtcgattgggtaggctttgtgcctgttttgaatgtccaaactgcgcttataaggtaatgatgcaatcgtgctacaacgcctttttcatgctcgtcttggagaagcaagacaaacaagagttaaatttatttactttttcgcgctgatttacacaattcagacaatcaggtcaaagctaccaaatgttctacgcagttgttcaactaattgggaccaaaaaggaagccgaaaatttcgtttacaagtattcatatttattaggctagtacataattttattcaaaaaacatatttcaccactttttaaactaagaatttatttaagattggaattatccaacaatcggcgtcgactttgctgggaagccagtccacgaagtaatttaattgacatgggttattaccaaatggggcacaccagacaaaaaacaagcaaatttttatttaacaggtattcacgagggggtcgctgccgcaatttctcaatcagactgtttggcttttgacacaaatcatgcgaatttttttgctgaaaacgggaatttggga

SEQ ID NO: 69375 - DNA, 1915 bp, Heterodera glycines
ttgcgtccagccaggcgatggtgaatttattgaggaggacaaacaacgaaaattagagagagcatggccagttgacggcgacaaacttctcgtctgctacttggaggatgtgatgcattcgactcgaagcaggttctgggtgttaaaagttaacgttttcactgactaaaacaaattttcaaaacaggttttctacccacgcgatgacggcacaaaagtgagtaactcgaactttaaaacattttgaacattaataacagattccgatgttcattgtccaccgaaaaggcgtgaaattggatggcagtaacccggcaattctcaacggcttataagcatgatccatgttcgcagaagtacgtttcctttatttgtctattcaagttttggttatttgtaatttcttttattagatgtgcgattcttccggaagagaagaatattttttttgtaactgcccaaattggcaatgacccgaccaagcagctattttatatggacacaaagggacaagcaataaatggaccgatacctcttgtgcctttgttcaataaatcagatgccaaataccaagtaaccgatcacttactaattctaattgtttttttctttttgaggtgatggattcggacgaacattcggctctcattttgacaaaccacaacgcaccgatgttcaaattagtgcgtgtcaaacttggcgaacatggcgttgtcaactcgaacgatcaatggcaggttgtgattgaggaggacaaacaacgcaacttggggtgggcgtgccctgttgacggcgacaaacttctcatctgctacttggaggatgttaaggtaagttgagtgaccgtttatgagaatttcgaaagcagtcataggacaacggcttaattgtttttagaacgcgctctacgtgcactcactcgacgggcgtgagctttacaaactgccgttgccgatcgggtcggtgggcggtgtttttgcggaaaagtcaaagtccaaaatattcatcggcttcgagtcgttcctcgtcccgttcatccttttccatggcgatttctcaaaatgtccgtcccgcgagtcgcctctccaactgactgagacccgtcgcgtgaatgtgcccgggttggactgtgatgcattcgactcgaagcaggttctgggtgttaaaagttaacgttttcactgactaaaacaaattttcaaaacaggttttctacccacgcgatgacggcacaaaagtgagtaactcgaactttaaaacattttgaacattaataacagattccgatgttcattgtccaccgaaaaggcgtgaaattggatggcagtaacccggtaattctcaacggctatggcggcttcaacattgctcagactccatatttctccgttactcgcctgatgctcgctaaacattttggcattgtatcagtaattgcaaatattcggggtggaaggtattgatgatcgcttgttttttggtttattgtttcaaattcagcgaatatggggaaaaatggcacgaggcggggatgctcggccgtaagcagaacgttttcgacgacttcattgccgcggccgaatttctcatcagcgaaaaatacacgaacaacaaaaagtgagttgtggcgctttatccgttcgtaaaactcgcaattcctttttcaggttggccatccatggcgggtccaacgggggattactgacggcagtctgctctcaacaacggccggacctcttcggggccgtcgtcacccgtgttgggtaagtaagcaataacagcagatttgctatttattatgaactttttttagcgtccttgacatgctccgtttcaacaagttcaccgtcggcgctgcttgggctaccgaatatggcgaccccgacaaaccggacgacttctccttcatttacag

SEQ ID NO: 69376 - DNA, 210 bp, Heterodera glycines
aacacgctctacgtgcactcactcgacgggcgtgagctttacaaactgccgttgccgatcgggtcggtgggcggtgtttttgcggaaaagtcaaagtccaaaatattcgtcggcttcgagtcgttcctcgtcccgttcatccttttccatggcgatttctcaaaatgtccgtcccgcgagtcgcctctccaactgactgagacccgtcgc

SEQ ID NO: 69377 - DNA, 915 bp, Heterodera glycines
atgatcagtggcaagcgttggattgacaaaggacagccctccggggaaaggaacgcagaacaatcgaccgcgaattggaggagtccaaaccctcaaacgtcacaacaccaccaccagcggggtcacttcaacaataaaccgcatcggtcgtcatctgggtacagccaacatcaacagtcccgaccatatcagaatcaatacaacaacaacaaccaaactccatacaaaaacactggcagtagagcctcgaactacgaagcgaatgcttcccataacatgaagtaagcactttaattcgacattagtgaagtcaatcatattttatctctgatagaaacaaatccgacgtaaccaatgagccgagagtgactacaccgtcgggaccaatcgcaaaaccattcgctgaaccagttgttgcagcgaacagcggttgcccatctcagcaagtccaattgcacagggaggaacagcaaaccccacaacaaattccacccgatccggaaatcatgggaaaagaagtcaaaagtgagaaaggatcagaagggactgaaaacaaccagaaggaggaaacggcactgattattgaggagaaaataaaagtgaaggagggaagtgagaatggcgagcaacaaaagtaaagcatttagcatttcacaccttccactttcgtctaatttcagagagaagttcaaaatgaaccccgctgccgccccatttattccaaagtcaaaggatctcaatacaagttcggctgttgtcactgcaaatacgagtccgctaatgtccaacccaattcctcctttcatccaattgcctgcttcaattccaacccaggttctaaattttgtacatcaaatgtccgtttaagttataacgttaaacaaaatattccatgaatttttgagacagattaaa

SEQ ID NO: 69378 - DNA, 121 bp, Heterodera glycines
cctgtcgctgtgctttgtactatcatttccttatcaaatgcctcccccaatttcctctcacagcccaaaatatgagaaaaacgagttgcacacacagaacaaaccgtcgaatgctgttgag

SEQ ID NO: 69379 - DNA, 684 bp, Heterodera glycines
atgagaatctcaatcatttttgcaattttcttctgtattttttctgttgcgcttcgtgactcgtccattttggcaatgcaaaacattcatggaagtgagtgtaaattaaattactatttaaataattaatatttcttttcagccgaatgcaaacggcacattcactgcccggacaagctgttttgcctggaaggattctgtgttagtgcgcaagaattagctaatgaactgcatcttttctcattctccgtcgcacaaccgcgcaatgatcgaatgcgacgacgaaaataaaaacggacgaaaaattcatggaaaaatatttttcaatattcgttttttaagtgaaattccaaaaaggctgataaaatttccaaatgacctacctgctaatgaagtgaattttcctcactttctaaaagtgattattagggcggcaaattatatgtatattttttcctcgactgtttgaggcttaaatgcatgaaaaatattttttagcttgattcaagcttctaggaccaagttccacatgcatattttgtatttttcgcgatttaattattttttaagtgcaaaattatttttattttctcgataaaattaatcaaactgtaactttcattgtaaatatgtgccaaaaatcagtccaaaatggaaatttcgggtttttcttaaattaataaa

SEQ ID NO: 69380 - DNA, 257 bp, Heterodera glycines
  unsure (1)..(257): unsure at all n locations
aacaaagcaaaaatatttattggaaatgaaaaattggaaatattttaccaaaaaataaaatatttaataaatattgtttagccttgctttcattaatccatgctgctttttccacttctttcctctcctccttttccatgaaaaattcaatggaaaatgtttttggcagccgattttgtgccttcaggcaaagtgtccacatatttcatgatctctttcaattagtgctgaatgactttccctgctgncnngtcatt

SEQ ID NO: 69381 - DNA, 1701 bp, Heterodera glycines
tgccattttcgtctttttcgccgtcccttccactgcttttgctgtgctgcttcttctctgcacttctcctcggctccgtcccgtcgttgtgccatttggtcggccgtgccgacggcgacagcgacgacgaccctcgcctgtcgctgccgtttcttctcgctgcaattacgacgtgctttttctcgctgaatctgttgtcccccgtttacggcgatcgcgcagagatcgaatcgcacattcgagaaggtagaaaagtgtttgagcatcaaaatgagacagagttggagccgatgtcgcaacggatgggcgacgtcttcgaggcgtttggcttcttagacttggccgagtcgttgctgcttttggaggcatcgctcaaaaatgtcggaagggacaacggacagcagcagggtatggcacgactaaaggtggttctactggggaatgacatttcagcattttgcacaaaaaaaagcaccgcggttcgccttttcggcactttagtcaaaaaaagcaccacggtggccatattgcaaaatgccattgaatgtgctcttggtgtcatctccattttcttaatttgaaatccaattatctgatggcaggcacttgtaaatgcatgcgttgacaacccgtattaccacgatttgagcggtgctctgatcggattcatcaccaacatgaaggacgaccgtactttgaagaacaatcataataaattgagaaccatcccaaacagaatgttcagtttgctgctcttcgacagaatttacgggacatttgaacaacaaattgccgaaataatcgaccaaaaagtccaattgaaaaattacgcaaataaaaatgccaattttgcaaaatgccattttgttttctttaagattcattctccatgtgatgtgagtcgcgcagaatttgccttaaaatggctgaaacaaatgcgaaaagagatcagcaaacggtacggatcagtccaagtcaaagcgcagattaggggaaacatccgggattttgaacacatcccattgaaattgaaagagagtttctaattttcagttttcctaccgaaacttttggaaattcatttatttcgcaatttgtcattttctttgcttcttctaccgcctcttttattagctaagattgatcgctcgagcatatttcactctcactttgtattggatttaatgttttccatttctatggaaattgtttcagtcttcccgaaaaagggtcctttatctgatcacttactccatggggcccatccttcggcgggagtatttggtggaaccttccccaatttgcccaatttcccttttgatgatccgattgaaaattcagttacgagctgaatgaagcgaagatgaagcatctgttgacagagaaaagcagagatttggagggactgatcaatcggacggaaagcgaacggaaagagacgagagaacggctggggaaagcgttcacacggagaatggaaaagacgcgtgacaaatcggcacgaaatgaggcggcgaattcgcacttgggccaattgggcacggtggacaaaacgcacggagaaacgtcgcaacgattcggcgaggcaatgcaaaatggggacgaaattggccgaatcattggcgaaatgggcggcacgggcgattgggtggtgacggtggtgcgggcacagatcaaactcagtctggcgatcaacgagca

SEQ ID NO: 69382 - DNA, 302 bp, Heterodera glycines
  unsure (1)..(302): unsure at all n locations
caaancagcagcagcgacgcacctgctgcatttggccgtgcattcgcgctttgctggagggccaacaccaacagcaaaaacagccaaacccgcaactgcaggcaaattcattcatgtatacatacattggttattttttcaaggtcctaccgatgggaatgcagcaaatccaaggaagtggaggaatgtgatccttcagcagatggaagaaattcatccctatttgctttacacattgtaaaacagatcagctatttattattttataataatttaaaccgaataaaacgaaaatccgcgaa

SEQ ID NO: 69383 - DNA, 891 bp, Heterodera glycines
gttcaccaatgcttccgctgacaccagcaaaaagattcgtctccaaaaagcattgtgtcgattcaattcgatggctctctctccaaaggacgacttttgcgaagacaattccggtggtttttggttcacttatcaaatgctttctatttccttaatctgggtaaatgccattcagcccggtccgcttctgttttcccatgtttatttgccggaacggacgccggacggacagccgcagcgcaaaccgtccgaacacccggactttatggtgagtacgggcgaacaatcacttcccttctgtggtggcatttgacaattgaaacctaaaaattgtcttttttctgtttattttttacctttgctgtcgcttaatttcccaaaatctaacatttttgtaagttttctacaaaaatggcttttttatcaaaaacttaatattctacggaattaagtcatccggcggtgccgataaataccgactgtgaatttttctaaaatttaaatttttcttgaaattaaaaaaatgggaaacgaaaatttagttttaaaaattttttccagctgggaaaatagttcacccattttaaaaattgcaccaactatagaagcgattttagaaatacgatttcatggcggatcccgaatttgaaaaaccaccgccgccggtcgaactttttcttcttgaggatataaaaggtatttcggaaatacatatacgaaaactttgtattaaactatagaccttggcgaaaagtttgacattgtcaaagtgtccgccgaagtcgcgcgttgggatttgctgctgaagcgaagggcggtgtacgcgtcgccgttcaatttgaaatattacgaggggaagagaaaggcaacaaattgtggagggacattagg

SEQ ID NO: 69384 - DNA, 216 bp, Heterodera glycines
aatattcctactataaacatggtcaatggaagattggaatgatgaagggacacagcaaaatgtggagagaacgccgtgaagaaatcttacgctgggacccaaatgccgacctgtggaaatattagagaggaggacgaattggacagacttttcgatcggacttttaggcgccactgatttgatttgttctttaaaaatgataaaaacaattgtttg

SEQ ID NO: 69385 - DNA, 590 bp, Heterodera glycines
atgacatccgctgaaacggttaaagaagagccggggcgcgagtttatgtcggcagttaaaggacgacgtgagcaggacagaaaggaatgggcagcctattggaatattcgatggaaggaggtggaggttggtcagtttgggggaccaattgaaaggcgttgcttctgtgtcctcttcactgatcatttctgttttgctcagaattcattcgtcggcaaatactcttattacacaaaccgttttttggattggccggtcacttggttccgtgagaacattgtggagcggctgcacgacaagcacaagatgccgtattaccatcgcaaaatcagcagagtgcccgaaatcgacgaatgcggcgtcaacgaccgagttggatgccaatttggggggggggaccaacgaaggactggggggtattataaatgaaatttttatttaaaaagaaattattgtcggaaagtgcggtggcaaaaaattataagcttaaaattataccggcacttttttaaattgtcctttagatttgtctcttcgaagctgaagaacaattccgactggacaaattggtggaacagtacattcgcgat

SEQ ID NO: 69386 - DNA, 766 bp, Heterodera glycines
ctttctgcaaacaaaggcgaaattggcgacgccacccctttcaacgacacagtcaatgtgcagaaaataagtgctttgcttgagggctacggctaccaattgcgtggcaatgaaataatgtacaacggatttaccgggcaaaagttgagcacacaggtcccagaaaaacaatgcgaatgtttgtgatctgtggttaatccatttcctcatgataacaggtgtttctgggcccaacttactaccaacggcttaagcacatggtcgaggacaaaattcactcacgcgcccgagggcctgttcaggggatgaaccgacagccaatggaaggcagggcacggtaagaagtgttaaacaaaaccatgaacacttcaatgccttaagtgacggtggactgcgatttggtgaaatggaaagagattgtcaaatttcacacggcgctgctcaatttttacgggagagactttttgaggtgtccgatccatacacagtttatgtgtgcaatcaatgcggattggtggtgattttcaatcaacggacgaacactttcgagtgcaaagtgagcagcatttgccttcctaatcgagtattcatgctttttaattacgaatttatttaggcatgtcaaaataaaacgcaagtgtcagctgttcgaattccttacgcgtgtaagctgttgttccaggaactcatgtccatgtctatcgcaccgcgaatgatgaccaaatagtctttgtttttgtttgttcatttttttatttttgaattg

SEQ ID NO: 69387 - DNA, 1124 bp, Heterodera glycines; identical to SEQ ID NO: 41210
  unsure (1)..(1124): unsure at all n locations

SEQ ID NO: 69388 - DNA, 419 bp, Heterodera glycines
aggtacaacagtgattaaaagaggtacaacagtgattaaaagaggtacaacagtgattagaagaggtacaaaagtgattaaaagaggtacaaaagtgattaaaagaggtacaacagtgattaaaagaggtacaacagtgattagaagaggtacaaaagtgattaaaagaggtacaacagtgattaaaagaggtacaaaagtgattagaagaggtacaacagtgattaaaagaggaagaacagtgattagaagaggtacaacagtgattaaaagaggtacaactgtgattaaaagaggtacaatagtgattaaaagaggaagaacagtgattagaagaggtacaactgtgattaaaagaggtacaaaagtgataaaagatacaaaagtgattagaagaggtacaaaagtgattagaagag

SEQ ID NO: 69389 - DNA, 2708 bp, Heterodera glycines
atgacccgacaattgaagacttttatcggaaggaaattgaggtttgtttgtcttcaagactttcaatgaaatttaattaccttcaagcaattactaattggttttaatagatatgatttgctcgccctgaggcaaattgccaattaactggtccttcgaaattgtataatttaattggcccattaatatttaactaaaatattttggcattttaagctcacctgatgagacgaattagttcataccttattaggtaatcaattgaattttcttttgcgcattaagacgtgttaattgtttggtttttgcccggaggcacattagcaatattagcattagtttgcccaaataatgaacttttgatccattaatagtgaaaacgaatgattttcgccattaagcagttctttcattaagtaacggtccttccttaaataatgccatcgaaccggggcgataatcaatcattgtgccaattttgcaggtcgatggacagccatgcgtgttggaaattttggacacagccggcacggagcagttcgcctcaatgcgcgacctgtacatcaaaaacgggcagggctttttggtggtctactccatcaccaaccagcagagctttcacgacattcggacaatgcgggaccaaatcatccgggtcaaggtgtttgttgagccaaagatttaggaactgatctggctgaatatgtaatagaaatgccatttcgccaccttttggtggcatttgcttcccccttttggggtcttttcacccattttcgcccattttatgtaaaaaagggattaaataaatactatgtttaaatttttttaatatttttaatagtttctattttttgcgtgtattttaaaaattcccactcctttttcaactaattaaaaaaaatcactcctttttttgcctcccccccccttttttttttcttgtggttacttatgaagtatggataagttggttaaatttatttatttatttggcccggttcaagcccaatcgtctgaaaactttaaaaaaagtcttaacggattgaacatatggccctggcgcctaggacttttcgtaaaacccaccgccttaggcatttctgtaaaattcgccaattcttttttcaacataaacttgccataactttgctaaacccgaataaatttagcattcttggtaccattttgacacttcttattttctttattagtctgcaaaattttaaaaggttcatcgtcttaactaaaagaaaaaaatagcacggaataattaattaaatttgtaagatatgtaaaatttatgcataaatatccaatagagagaaattttatttatttataaaaaataatttttagggtactgatcaagtgcctattttgctggttggcaacaaatgcgacttggcacatcaacggcaggtactgcttgctgttcagctgttatttgtaaattggccaccccagcttttaatgcatggaggcggggtgcatttttctttgaaaatctaagtgacacttccggcgtcaatcagtgaccttcctcagtttcttaggccataacttttttcatactagctcaatgcttatattcttgatgtcaaatgaaagcttaaactctcatgaatttataaatataaaaagcaagcaaatgctgccattaaaaaagaaactaaaatgagaaaagacaaaaatgcattatttcaattatatttcagggcttctttttgtcaattgcatttagctaagaatttagttttatttaaaaaaattcatactccgtgggctttaagcttttgtctgataccaagaatgtaggcattgaaaccaatcaagaaaaaagtgatggcctatgaaactgaggctgttcattgattggacgcctaaagtacaaaagagccaaatatttggcccaagcgccgttgggaattgcccttaatcaatttcggtctcaatcagtccctgtaaaaaaatatttctcgcccacacccctgagttctgtttttgcatttgccaaagaaatggtgggctccgagaggcccatggaaattcggtgcctagttagtagagctcggcatggacctggatccaggtccaggtcattttttgagaacctggatttttcctagacctggattttcctggatttttgtccaggaaatccaggtccaggtcaatttgaaaatccgggtccaggtccaggcatgaaaaaccttcctggataaatttttttcatctttttatggcgaaatatatttaaaatgggtataaaatctgcaaaaaattttccgccggcctctaaaaattattattctcttaaaaaaattggcacaaaatcgccaaaatttgtcattttttgaacaagatcattaacaaatcgcattaaaaattacaaaattttcccggcggcgcttatcggcaccgccgggcttaccgcccctttgttccgcaaaatttttttgaaaaaagcgagccgtaaaaactgttttgaaaagaaaaaaaaggtcgttgcatggcttgagttaacctaagctaaatttgaagattagcaatttttatgttattaatcaacattccacaaattttgaaaaaagctccatgccctgaagcgatttgataaaaatttaaattttttctcaagtatttcaatccaaattgataacaaacgtgtaaagttaggttttggcttttgttcaggtgtcaataaa

SEQ ID NO: 69390 - DNA, 623 bp, Heterodera glycines
atgaatgaatttttggcaaaatcggattttcggcactttattggacacaaattgaacagtgagtgccgatttgccgactccgcccgagcccaacacgaccactttgaactcgcgcattcagctgctgctgctgatgctcactactaattatactgtgcaaaatgcaataaattatgtcgacaattttattaattaatttttaaatattgctaaattggataaaaattaaattattaaaattatttttagtaattcaaaaaattgccccaggctatttaggattatgctcaaaaagaaattgattatttttgggagggattgacgtggcagcgacggcggcagaaactttggccttcctccgctgctgaatgttacagctatatgtgactttatgcaattactcatccaatttttggtggtattggcgacattttcagtcttcgctggatttccaccagtactgaattggcaatgcttttaaattcgaaaattggttaattttttttataaaggtgttttctttattttatttgttataaatccggaaaaattcaaattggcaaggtttgaaaatgaaatatattttagtttagattttttcattttttgaatataccttatta

SEQ ID NO: 69391 - DNA, 96 bp, Heterodera glycines
atgcaatcgtttctccttctcgtaaatattttgctttgttcaattgtgttgctacatttattgtcaaatgaaaatggattggtcaatgccatgccg

SEQ ID NO: 69392 - DNA, 128 bp, Heterodera glycines
taaaaaaatgagaaaaaagagatagccattttttggtcaagaattttttttgtttgcgtttcaaatatcgtaagattgtttgatagggccagacaaaagaaggcaactgttggtaccaagtttgcggt

SEQ ID NO: 69393 - DNA, 77 bp, Heterodera glycines
caagagaatgggaagaggtggaaagagcgttggacgaattgattgagcaacgccgccagcggggcgtactgcccgag

SEQ ID NO: 69394 - DNA, 92 bp, Heterodera glycines
atgtccaacgacaacgacaaaagagatgcatcatcaattccaacgaatgcccttgttaacaaagaagagtctccggacggaaatgaagagaa

SEQ ID NO: 69395 - DNA, 466 bp, Heterodera glycines
atggccaatttaatgccgcaatgcatcacaacgacaatgcctacttttacaataccacatgcattgctgaatatgagggcaccgattcggctggtaaatgggcgaccaattaggggggggggataaagccatttggggggtggataaagccatttggggggggggataatgccatttgggggggggggataaagccatttggcggggggggggggataaagccatttctgttgaggagggcaattatttgcccgatttgatcattcttatgatgaagcatccctatttttaattaattttaaaacaatgcttttccttcctttagccgattattactccaaaattcaaaaaggctgcacggcggggagcaacattaacaacaattgcaacagtaatttcgctgttcatcaacaacagtcaacatttgatgcaaatctcagctatcaggccattcctaatcccgtaa

SEQ ID NO: 69396 - DNA, 877 bp, Heterodera glycines
atggcctcatcaaaatctcgggaccgggacatggaaggaccaagaatttacggttaggtacaatgctaaatccctgttgatagttgatatgatgattcaattttgagcattttgtttattttaattgatgaattgattgacaaaataagaattttttagttaaaaattttgttaattagcccattagccgtaatttagtgtacgcttccgttacaaatgccatttaaacattctctttgcttttttggtcatttattagtgactttttgcccaccgtttgcacataacatgcactcctcgtctcatacggactgcttgccgactgattgtgagtttggtgttgctgtgggtaatggtgatggaagtggtccatgtccatgcaaaattggtttggcgttgtggacgcaacgccataatgttgcagcgaaacggttgaggaggagggcacgccgttgttcagcgggggctccttgggaaatttttcgtgaaaatgtttaatttttttaagtgcctgaatattataaaaattaatgcaaaatgttcatggaactgtcccattaacggtcgggcgagagaaaaagaggaggccgagagtgagggataagaagagaggagaaaacaatcggaagccgacgagagagttgctgcccctctcgccacttcctgtcaccactcccccaccacgttaaaaccaaaaatttttcaaacagaaacttttttaaaaatccctagaaaattttagtgaaattttttttttaatttctctaacgattttttcaattttatgatgaattactaagtttttttcaataatttttctaaaaaattgctgaaaattttttctaaatttttcatattgaaattttgttataataaa

SEQ ID NO: 69397 - DNA, 569 bp, Heterodera glycines
agtaacggtctttgagcccttctcagcaacacatgtccctccacccgggtcaagccaaaccgccgtttcgtccgccgcgtagacatgtgtgtagctgaaaattagtcgtttgaaaaaaaatttctcatttacctacttatttttgtgtatgagttgttgaatatataatatgatgttgatgatgatgtttttgtatgcatcgggttctttttgcgctactgttgtcggtcgacgtaaggaaaatttatgatggtgcatgaatttttccagccatccattactagcctaagagaaaaatgttcaaaaatttttcgaaattttaccgcaaaattttcaatgtcttcgtaggcggcgctcattttgattgcttgcgcagcaatcatatttcgtgtcacccgcactttcttttgtcgcaattcagacacccactggaacacagcttcttcgaagttcctgtttggaactttccttccgcccccttccaaacgttttcgttttgacgattcggccctaaattaaacgaattaaaacattgtgacattacaggcatcttactctttcatcaaatt

SEQ ID NO: 69398 - DNA, 974 bp, Heterodera glycines
caagcaggttggacaacagtcgatttcctagttaaaacataatttttgttttcagttcgagcgcttcatgcggtacaagggtgacgaactgctgctgaagatcggagaacatcagacattgctcaattctattttcgacagacaatcggtttcctttgatcaacaattgttaggaatcattaattttagatttgatcagttgggaataaaatttggcgccctcgttactcatttttttttataatgttaggcaatttttgtcaaaaatatatgccctctaagaatcgaccaacccaaaaatttcaaaaattcactcctaagaaatgaaaaattttctcaaaaatgcatctaaaaaattaatttatttatttttcttattagaatttttggttttcacaattacgcacctcattactgatttggcttaatttttacttttttgaataaattttattagtttacaccccctaaatttgggctttttagagcctattttccatttttatattagagcctattaaatcgaaagcaaaaaataaattaaaaactttattaatcaataattcaaaataaatcatttaccgtatttcctcgattataagccccggggcttctattgttcaacccccctccaaagggggcttatattcgagggggggcttccaatcgagggggggggcttttattgttcaacccttcatttctacaaattaatgcaattttttcagaaccttcttttattcaactttacgaaaaactacgttgctttttaactttcaggtgccaaatacaaatcattttataattaattatggacgcaacaaaaaccttacctgaatcatcgactaaaaaaagtacctacctattaaaaattcttttcaaaattacctatcttaaggtttgctgctactgcagcaatccttgttctggtgcccaccaatgctggaagtgcaaaaaaccttgccatgcgatag

SEQ ID NO: 69399 - DNA, 1002 bp, Heterodera glycines
atggctttcatatgcgcttggatggggcacatgggaccagcctccgtcttcccttgtgcactatgccgaattccatacaaagctctgggcaacaccatcatcgggacaaggacagcaaaatcgatcgtcggtggcgccgcaattttcagttaccgaacagcagacacgggcaagcacactactcgggactcaatttcatgtggcagtcaaaaagccttgccactctttttcgtggcaccgacaaatgtgattccttcaccatttcacacacttcacagcgccggacgtaaatgcattgacttttttgaaaaaaatgggtccccagcagaaaaacgcaaattacaagaaataatggcaaaatcgggagcaattcgtcatgccaagacacaagaatacactggtcctgatatttcttttttccttttttttcaaaatgatttcaggtgaccaaatgaagcgcctaattctcgcctcaaccgaaatcagatcgatcggaacaccgttttcgatggacattgctgacctccttgacgaaattcgggagctccacatttttggacgtgctgacctcatgacccaagaacaaatcgacaatttctcaaataaatgctcctccattcatggctatttcaaggcaaagatactttttttctgtttttctcattttccccttttcaagaaactttgggaaactcatccggctaaattcgacacaaacaatgccgctggattcaccccaaaattacactggcttctcgcccatggtccagactttgccaagcgctggggatggttcgcatggatcagtgaacagggaatcgaacaccttcaccacgttttgaacaagcaggtggggcaatcaaatttctagagcttacaaatctttttctcttttagtctgatcggttcaagcggtacaagggcgatgaactgcttctgaagatcggagaacaccaaacattgctcaattccatttttgataggcatattggattcctttga

SEQ ID NO: 69400 - DNA, 708 bp, Heterodera glycines
atggtatccacacgcagtaaaactgataagttcaagaaaatgggaaattcaagtactgaagcaaagcgaaagcggtcggaatggcgcaggaaaagtggaagaaaaggcggttcaacaccaaaaagtagtgacattttgaccaaaatattcatttaattaaaaaatccaatttttgcaggccaactgcaaactaaagaagctccattaacaacaggagagggaacatcaacagatacaatgccatcgacattcaatgctgagcctcgtaagtccaaaaaacaaaatttttgagataaattccattttttgaggccaacggccaagtccacggccactgtcaacaacgcctataaggcgccatgtccgcacgcgtccaacaactaccgaccaaacaacggacaccgattttcgagcaacagtcaagtcaacccaaacggttttagaaaccgtcgaaactgccacccagacagaaacaggacgaaacgccgaattgcgacactggaacgccagctacagaagagaacagaagagatgaaccagctaaaaaagcgaccgacggagcaacaacgaaaaaggccaagagagtcagttcattggaggacttgtcaagacagagccggacaacacgcgcaaaggaaatagctcgggacctcagtcatcttttccgaccaggtgaacaattccttctttcttatttttgacaataaa

SEQ ID NO: 69401 - DNA, 408 bp, Heterodera glycines
gtgccgccaccgatgcaaatgacgcgtcaacaaagtgtgacattgtgtgggtgtaaagatgatccagtacagactgttccgccgccaccgctgccagcggttttgccaccgccaccgcctccaaattttcctccaccgccgccaccgaatttcccaccaccgccacctccgaatttcccaccgcctccgccacccgccgcgagtgaagcatgccccccaccgccatcggcggtgagcggagtgcaacccgtgccgccatcggcggttagtgaagcgaaccccgcgcgaccatccgcggtgagcggagtgaatagcgcgccacccccgcagcaggtgaacgtggtcaactcaacgaccagcaatgtaccatttgctgtaaataataaagacacagcggatcaaaacgaa

SEQ ID NO: 69402 - DNA, 722 bp, Heterodera glycines
atgaatttaatttataatgtcgccctgcttttcattcttggactgtgccttgttctctacccaatgccatcagctgatggaatgcgttagttttaagcaaaattttaaaaattaaatttaaaatgataaaacatttaaattatctctaaaaagtgaatttatttcacaaaaaaaaattaaatgaattttaatttcttttttaatgtaaattttctttttaagcattaaatgagcaaaacaattctccaactgctggtggaaggagccaaagaaaggagcaaatcacaaaagttcggcgccgacgaccaccaaacagtgaacaaaaaggtggcccaaacaaataatatttaagaagtatcgagtgccatttcttaatttatttgaacatattttgcttataagaattcatatataggtatgcaaagtttacgtttttctgaattcgtagtccaaccttttcctaccaatatgcaaaattttagataaatttgtcgtgtcaaaaaaacctttggaaatattgactactaacggcacgctgcttttggcacctcaaattattttccagaattatttttagaaaatggcacttctgctggtggcactgctgggcccaccttagcccgaactttgaccacgcttggagcgggtgccttagcaattggagcattgccaagggcaaattcagctcgatcgcttccaagtccgcaaatgatggtaataaa

SEQ ID NO: 69403 - DNA, 983 bp, Heterodera glycines
ttttttggagtatttttaatcccgaaattccgtgcggaaaatttgtattttaaagctttttctacaaaaaaacaaattctcagcaccctagtggtgagtaacaaagatttctgcctattttggtcttaatttttgtttgttttttttgtactttttatattcattttaatctttaaagattttatgccatttgaatatcatgcatatttattacagcttaatttaaaactaatttttgttaaaaaacatttaattttaatttatttattttttgtaatagacattgttgatgatgagcagcttgctttggactacacgaaaatgttttcaaaaaatccaacaaatgccaaaacagcggagatagtcatttcattgcgtctaacttttgcaaaaataattaaaaatttcttggccgtttattcctattataatttgcagcttccaaaaaagtccaaagtgtcaaagaaagctgcaaaatttgttgccaaagtggcggaaatttgggaattggaattttgggccattgttttaattcgaattgccaccaaagacagcggagctttggtcatgctttatgacgctctttatgtgctgtcagtgatgctaacattgggcaaaaatggggaatacattaccaaaatgccaacggaactttcgccgcgttcggctgaacggcttttggcggactgtgaaagtacaattcgggcccaattttatgaggaacatacagcaaatatgctaagattttacgagaatggcatgttggcccacgacggtggcaattcgttcagcaactttttggccaagtgccaattggacgggtgcgaccacaaattccgagtgcgcattttttatgctaacggcgagaaaatggcaaatgatcattatgacaaaatggttaccaaatacccaaaactgaagcaaatgctacgcattggttcgtatttttaagattttttctttttttttcttcaactgttcta

SEQ ID NO: 69404 - DNA, 377 bp, Heterodera glycines
atggaagcaattccaatgaaggagattgaccaaaacgaacaccgtttactctccgatttatttgaaaagaaaaatgaacttttcggcgaaaaaattgcgccaaaatattcaaaaaatccatgtgacagggaaaagcatttgaagtttttgtttaatttgcacgaaatcgcaatgaacaaactaatggaggtaaaagatgcatttacgaaacgattggaaggtaaaaaaaagtttatattaaatttagtcaatgaccgaattttttttaaataaataaaataataaaaataattttggagcctatgaaagtaggcatcattttttataagaaggctatttttctgtggctttattatgctaaatttgtagataattaa

SEQ ID NO: 69405 - DNA, 310 bp, Heterodera glycines
atgctttttgggcttctgttaaatataccattttcagctgttaattgcgttgtaaatggtgatgataataaggacgatggtggtgaatttgatgatgatgtgttttgctcagaaatgttggcatttaaatgtaaatttcgtccaaaatgtttcgaatttttattttttggcaacgcatcaaaaataaaattataattcagcaacaaatgttgaaatacttttgaatcatcacaaattatttgttcaagtcggcttttatcaatttgaatgtctgagttttgttgtgtttatttttatcattcaagcataa

SEQ ID NO: 69406 - DNA, 1893 bp, Heterodera glycines
atggaatttgaagatttggatgaaaatgactgcaaagatgcgcgttacctgcagtcatattttgatgtcctattgtccagtgctaattacacattgacagttaatgttttttcagtcatgcaactcttggaccattctccacaatttgtgcaatttgtcaacgacaattgcatccaatttggagcgattggcgccaatgaaaactgtataaattatattttaaaatatatttaattcttagttttctaaatcgtgaccggaaaatgcgtcagtagaaaatgcgtcagtggaattaaaataaagttcggtaaatatggttcatagggcccagactcaaaattaaacaaatgatatatcaatcgatagctctcggtctgtaatggaagaatccgaaagaatttttggcaggaaccaatcaataccatccctggcgagttacagacccgggactgaagtggcaaaatggctttgggactgaaccgtccactgacctaaaacgcatggaacaaacaaattagataccaatcgattcccctcggcatgtaaagcatgaatccgagaatttttggacaaaagagaaattgacaaaagttatgggtgctcaaaagccccaaatgagcttaatataaaaaataatttagttgaattaaaaaacagcttctggatacagattcgtgatcagtgacctataaaacccaatgaatttgtttttatgacattaaaattttcactgacgcattttccgggtgctttctcaattgcttgatttaggccgggtattcagaggaaaatgccggggcgttggcgccgcagttggataattttgtttttgggggatcaccggcataaaataaattaagcaactgagcacagatttcactttctttacaaaagaaaattccctccgcccacaataaaatgccaaaataatttaaattgtatttttttcacagcttcgttgcacgaagaagaaatattcaatttgtacatcacttattttgaaacgaatgacattgagaaaatgcacaaatacgaagcgattattggcctaaaatttatgttaaacaatgtccgactaattgaagcggaattgataccgaaactaaaaaaagagggggatgaaaaagcgcaaatggccaaattccgtgccgaaatgttggcaatgctcaaaatgtttgacttttgcatggaaagtgtggaccaattgattcgcatgagttgcccgctgattgaatacaaggcactgttttccaaattttatctcaaaagtgccgcggcaccgttggccgaatggcaaccgccgtttgactgtttgacaaaatcattcggccaaattttaagcgattttcgcaacagtgtggcgagccaacattttcaattcatgcaaatggcattgaacaaagacagaaaaggaaaattggcacagattttgagggaaaaggaggacacatttatgagattggagaatttgattggcgaagaaatgttcaaatacctttggaacaaaagcgaaaacagacaaaaactgttcaaccaaaaatgtatgttcaagactcgttaattttaggctaggatttcgggttcgggtcgaaaaaagcaaactcagtttttttatcgtgtcaacaaataattccgatagaaaaaattgctatattggttgcactgaaatgacgacaactttttgaagattgtggataaatattttcaaaattttaagtttaggtattctttaatctattttgatacaaattttattaaatattttaacttttttgcaaaatattaacttttatttaaaagaaattttgaattttaaaaccgagatggtcggggtaccctggccgggaattccctgttttttaggttctggtagggccgtgatgaactgggaaa

SEQ ID NO: 69407 - DNA, 348 bp, Heterodera glycines
atgctttcttctgcgaactgtgcacagataatcaggttaatggtgctggcttgaggaattagtacaataatttataagttccacagaaattactccgcaccacttttcagcgcatctatccgttcagcgaaaacgtggccatttgaaagagttgttgtgcagtctatcaccgctcgtgctttgaccgtgccaacaaacggtgtccgcgatgttttacgaagaaaggcgagaagaaaagcggtgatggaagagaatgagggggacgaggaggaagaagaggacggacaacaacaaccgtaggacagcaaacttttttatttttgtataaatcgggtcacaatagtcaaa

SEQ ID NO: 69408 - DNA, 1296 bp, Heterodera glycines
ccctgacaactaaagcgccttttccctgtcctcggcaaacaccttcgcaagggcgactgtggcaaaagcggagtgatcggcggttcgcccgactacaccggtggcatattgcagagaaatgaatgcatttttatggcttttccccgttaggtgcgccttatttcgcttcgatcaccccaatgaaaatcggtgccgattaggcctttgtttacgcccattccgacgctgctccggtgatcaaaagttacagtccggaactgatcgtgggttttcatgttgactagttaactaattggggttggggttgctaattgccctcctccttaataggtttaccccagcaccgatttcgccacgaatagacacagcattgagcggttggacgtgctggtgttcgggccggggcttggccgacagaaacacacacaaaatttgctggcggacggcgtaaatttcgtcaggagcaaacaaaatgtaattcccctccaatctaaatccatctaattattgagatacaatcatcattttctttgcttttcaagctttgtttggtcattgacgcggacggtctgttcttcgtcaaagaatgttcgcagctgttcaaagggtgcacagacaaagtgatcattacgccaaaccacagaggcaaaacgcaccccaaaagcaaagcaaacaaaatgcatgtttcttaagattttgttcgggtttatacccaaatgttccctaaccagcagaagggagaggacacggacgaattgaaaattcaatgtgaaatggcggaacaattggcaaagatttggaagtgcctgtgatgagaaagggtcggtggcacagaaacgcaaccgaaaaatatatgaggtttggattcaataacaattgtcattggcactttaggagagagattgacatagtctccaacggttacgccgcccaaacgcgaattgtccaagcggaaacttcgatgcgccgttgcggtggccatggcgacattctcagcggcgcgacggcccttttcgtattttaggcaaggaaagcctcagatgccgacatttattcctccgagcatttgctggacggggcggaggccgcttcgcttttggtgcgcaacgcatcgctacggacctttaggtcgaatttattttttacaaaacaatttccaaaaaatattttagtctgtcggccgatcgatgaacgctgcccacgtcattgaccacattgtgcccgttgtccgcgacattgactcgggtctttcagcaaaagttgcgacaattacaacacgttgatttgtgtacgaaa

SEQ ID NO: 69409 - DNA, 1142 bp, Heterodera glycines
atgacatcaattaaacgcaggactttcaatgtcattcgaaagtaaaataattaatttaaatttattattttaaaaattttcagattggaaattcaatcggccaaacattcgcttcggtctttggacataaacaacaacaaccaattggaatttgtccatgctcaaattttccagggctttgtgcaactccgatccgttgatctttcgcacaacgatttgatcgttcgtaattaattaaattgattctaatcaaaagaatttaatgattttaattagaacctctgtgccggctctttttggggcagtgtccgtttggagcgaattgtgctgtcggaaaacaatttgcgcacaatttggtggcactgtcagaagcaaatccatctaattaattgatccttttttccgattagactctgatcgttgagcttaatcttgccgggaatgttcttcactcgttggattctgttgaaaattttaaagttttattttgtattttaaaataattaagggagtttttggccaaaacaatttgcagggcttggacctcagtcttaaacaatttcacgttcattccagtccgagcattgtcatcggtccgagcaagccttacggtgctcaaaatgtgaaaaaatggagtgaaagtgctgaatcggagggcttttgaaggaatgcgcaatttaaattcgttggaattgggagaaaatcgcatcgaaacgctggaagaggcattttcaaaggaaaacagtgaattaaaagcgtaactggttaagcaaatgttctcattttttgccaaaattgaagccttttgactttttgaatttgtcgggcaattttttgtatgaattgcatcctacagacattgaccgtttgcctgcacttcaaattaatggctaatttgggtgattttcagttggagtctctttctctttcccaaatgtcgtcactttcgcgactccccgacacttccgaaattcgcacatctgctcagactacaggggcttgagataataccatttttgtattaatttatttacattaattttctttacagatcattccaagccgttaaaaattggccacagcgaaccttcaattattgcgcgaattgagcataactggtgcaaaaaaaatgtcgaaattaa

SEQ ID NO: 69410 - DNA, 141 bp, Heterodera glycines; identical to SEQ ID NO: 66691

SEQ ID NO: 69411 - DNA, 804 bp, Heterodera glycines
  unsure (1)..(804): unsure at all n locations
tgacgacttttctgtgctgncgcagttggtccatccggtgnccgaaaggaaagtgggttaccatcnccacgccaggctagggaaatgacggttcgcaagagctgttttgcgcggtaacgcaaatgaactcgcagacgtcgtgtggagtccgagccagagttctcttttctggtttagggtgtgcgtgcctggaagtggctcagcctgagatagggatgttgcgcccgtaaagcaccgcggttcctgtggtgtctcgtgcgctccacacggcccttgaaaatgcgagggaagctatttgaatctcctgcctgatcgtaccgatatccgcagcaggtctccaaggtgaacagcctctagtcgatagaataatgtaggtaagggaagtcggcaaattagattcgtaacttcgggaaaagaattggctctaaaggtcgggtcagccgggctgttgcgtgaaacaggcggcttttgcccgtggctgcgtgctgttctttcggggatggtgcgtggactagtggtgagagctgcttgtggagcgcttcagctgcgtgtatgctcgtcagggtatgcacttcggttggcgctgaacgaccagtttagaactggcacgaactcggggaatccgactgtctaattaaaacagaggagacggatggtccttgtggacgttgaccgtgtctgatttctgcccagtgctctgaatgttaagccaaggaaacttgattaagcgcgggtaaacggcgggagtaactatgactctcttaaggtagccaaatgcctcgtcggctaactaccgacgcgcac

SEQ ID NO: 69412 - DNA, 920 bp, Heterodera glycines
  unsure (1)..(920): unsure at all n locations
cttatgggcttatcgacaacactaccgggacgagccatctcccggcagcgggctcgaattggcgccacccgtgtggcacttagggactttcgcgacctgccgactgcacaggctccctggaagtttcgaaccaaccacacgtgcgcgtcggtagttagccgacgaggcatttggctaccttaagagagtcatagttactcccgccgtttacccgcgcttaatcaagtttccttggcttaacattcagagcactgggcagaaatcagacacggtcaacgtccacaaggaccatccgtctcctctgttttaattagacagtcggattccccgagttcgtgccagttctaaactggtcgttcagcgccaaccgaagtgcataccctgacgagcatacacgcagctgaagcgctccacaagcagctctcaccactagtccacgcaccatccccgaaagaacagcacgcagccacgggcaaaagccgcctgtttcacgcaacagcccggctgacccgacctttagagccaattcttttcccgaagttacgaatctaatttgccgacttcccttacctacattattctatcgactagaggctgttcaccttggagacctgctgcggatatcggtacgatcaggcaggagattcaaatagcttccctcgcattttcaagggccgtgtggagcgcacgagacaccacaggaaccgcggtgctttacgggcgcaacatccctatctcaggctgagccacttccaggcacgcacaccctaaaccagaaaagagaactctggctcggactccacacgacgtctgcgagttcatttgcgttaccgcgcaaaacagctcttgcgaaccgtcatttccctagcctggcgtggngatggtaacccactttcctttcggncaccggatggaccaac

SEQ ID NO: 69413 - DNA, 538 bp, Heterodera glycines
atggcactgtccctcactgaggcggtcacccgtcgcttttttgaaggagaggaacgacgaattgaggcaatgtcaaaaattcggtgaatatgcacgaattttgtacgactatttgttcgtaatgtatctccaaggtcatagtttattcttcatccataattttttttaataaaactaaccattttattcgatttctaagcgttttaaataaatttgaaataactaactaatcatggtgaactgagagcagagactgtatgagtcctgaggcgagtgcgccccaaaatgtcgcctgaaggtttttggaccataattatgttcttctcaatcaaattaagcattgttggttttgttcaatattctctatgcgtttgttattattcttttacaaaaaaatttcgttaaattcaaaaaaagatgaccggaagtaactcaaatttttcgagtttttgttttccctggttttttttgtacatggaatataaattttaaaaatttcaggttaatagagtttttaagtgcttccgagcaatgctaa

SEQ ID NO: 69414 - DNA, 517 bp, Heterodera glycines
atgcacggcttcaaggcttcaagaaagtcatgtactggtcatccacccctcccgtttaccaattgccaaccccagaaaaaagggaggggtggatgggtcaccggcgctgagctcagcactgacgaagacgaagatgacaaccatcatcgtcaaagaaaaagcggaggaacaacaacttcaagaagttcaacaacaaaaagaccaaaacgacgacggcgagcagtacaacaacaatgacgagtgttaaaaatgacgacgacgacagacagtgggctgcttggatggctagtcattaaaaattggcatttttcttaattattttccattaaattttgacgaaaacatttatttttctcattttaattgattttgacgtttaaatattgacaataatataagagaaaatgtgaatcaaaaaaatttggttaatttttaataattacactacttttttaaaccataaaataagtataaaaaaccaagtttccagcaaaaagatatttttttaaataataaa

SEQ ID NO: 69415 - DNA, 1549 bp, Heterodera glycines
atgcaacgtattgcaggagcgcccgaggcaaatgtggccctgaaagctttggagagactggaggaacgacttaaggcagctcaaatggaagaggaggccaagctgcaggccattttcaaaaccggagcgcccaagtcggagacaagccagaccctgaaaatggcacgagaagaagtggccaaactgcggaccgaagcgaccagggaagagttgctgaccttcttggccaccctgatggctcccgaagagtttgaagcggccaagactctgcagaaaatggcctccaaaagcacagccagcacagtggccaaggctccaacagagttggaagcagagtcaaaggcagaattggctcggccggaagaggcgctcggagtcagcgttgagaagccggaaagaagggaagcgaaggaagagcgccggatgagattggagcggcaagaaatggccttccagctggttcagcagctgttgagtgcaggacgaagtgaagcatcgctttcggaaaagcaacgggcaatggtttccgagcagttcaagcagttcggcctggaggagatgagcaccagcattgtgctggagcagctcgaagaagtggcgggcagacccgaggcaaaagtggcgctcaaagcgtggaagagcctggaagaaggactgagagtgctggctgttatggaagaacgggtcgggtttgaagcaacctggacgaccggagagacggagtcgggtgctgagaagacagtgcagttggcacgtgttgaagctgctcagaagcgagttgaagaagcgcaggagcagctaaggaccttcctgacagtgttggtcgggccggaacagttcgaagaagccaaactgctccagaaaattccatggcacacgtcagccgaataccgaggcccggaatcgcgcgaagaatggacgaaaattggccaacaattggccaaaatggaagcgattggccttgttggtgtggtgaagccactgccggtggtgggcaaggcggaagcgagccgaagaattgaaggacgagaacaggcgtttgacctggtcagaaaggtgctaagtgaagagaagggccagcagacactgtccgaagcacagaagttgtccgttttcgagcagttcagagaattgggcatggaagagacggctgccaccgttgcacttcaacaaatacagcaaattggcggaatgcctgaggcaaaagttgctctgagagattggacaaagctggaagagcatctgaaggccaaagaagcgtttgaggaagaagcgaagcttcaagcagcactgaaaacaggagctccagacgccgaaacgagtcgaacactgcagattgcgcaggaacaagcggctcagctgcgagtgtgccaattgaaagaggagctgctcacattcttggccaccctgatggcacccgaggaatgggaagcagcaatgactttgcaaaaatttgatgtggcgccaaaagccgaagagacgttgcggctgaagattgaggaacagcaacaaatcactgaacttgtggcagccgcacttaagcgtgaag

SEQ ID NO: 69416 - DNA, 886 bp, Heterodera glycines
atggaaaatgtccttgacgttgttggcgaagaaattttggaacgcatccaaaataatgagtttgaaagagatgtaccgtgaattgcaaaaaatgataatttgaaatttaatattttattccttcattaggttgaggggttcatcccggtgtcgggtgagacaccgtcccaatcatttgagctgcttagagactattggctccaggcaataaaaattgataaaatttaaaataagtaataaataattattttgttaatattgtagagagatggtctctttgaagacccggagtttccggtggagtccattcaattgtacttcactggagagccagtggcggtccgatggcgccggcctggtgaacttgctgaacatccgcagttcatcaaccaagggcccatcgctggggatgttcggcagggcagcatcgggaattggtgggcgctggccgcggcatcggtgttggcacaatatgggcccctgttctacagggtggtgccccctgaccagggattcgggcacaattacgccggtaaatttaaaattaatgataattaaatttaaaaattatgtcagaaattttttaaaattttttttttgcaacgattttttttattgacatacaatttcgtagggatcaactgcgtctgggttaatttcatctgaaaatgagccaatttcgtctcgccaactccgtcttcgtatataatgggccaactccgtctcagacaaaaatccaaatttaatttttaaatttaatttttttttttgctataaaacgccatttttggcaatatcattttaaaattaagtgataattttatccgactaccaccaaaaatggtcaattttcccttagaacactgtagtttttgggattaataaa

SEQ ID NO: 69417 - DNA, 481 bp, Heterodera glycines
gtcgacgtacaaagacagtgcgggcaacgaaaagattttggcgtccactcaatttgaggttgttgtcaaagcgttaaaaatgccaataataaaaaaaattgtacacataatttgcgtaatggagaaatattgttgcttaaaaaattggcccaaattttggcagcattaatttttcatccggaaagtgattggcaacactttttcatatagtttttgcatttttgagctaatttgaatagaaattttttgcatttcgcatcatggggaggaattttgggaaatttaagcaaaatcaaaaaaaaaatttttgttttccaattggtcaaacaatggacaccattttcagagcacttacgcccggtctgccttcccctgctgggacgagcccacgtacaaggctcaattcgacatcaaattggaggtggacaagcacatgaccgccctgtccaacatgaacgttgtggcggaggaggaggcggcg

SEQ ID NO: 69418 - DNA, 846 bp, Heterodera glycines
atggcaaacggttcggacaaattcagcaaattgccgcagttggccagcccgtcgctgtaccaaattatgctcagtgtcgacatggagacgtgcaaattcaagggcaacgagatcatccatcttgaggttagttggcactaaaattttggggcaatccttcggaattagtgtcccccggcggtaaaaaaaattgagacccgaattttgaaaaaagcctggacctggatttcctggacacgaattcgggtccagaaaaacccaagtttaccgataatggccttgacctgctcgtatttacataaacattgattccatctatgattttgcatcaagcaaatgattttttcaaaaaaaaaaaaattaattttgtaaaatttattggcgttaaaacgtacgttctgaatagtgtagaaatgattagcacattttcttaccttaaaaaattaaagaaaatttttatctctttttttgggcaccaattccgaaggatttacctaccccaccaattttggggcaaatttcactttcctcccccctcaccaacctaatttttccctctctccattttcagattacaaagccaacaaatttcctgacactccacgcgggtgcattggaggtggaaaaggcgtcgctgaagttggaggatgggacgggtgagtggtggcgaaaaaaaaaattttattttcaaatttttcggcgggggggggggacgacccgggggaaacgacgggagaaaatcccgagtggtggcggtgcttttttacgccattttctttttcttgcacaaaattttgcctacaacaaaaaaaaattgcaggccctgaaaaattcataaatttatga

SEQ ID NO: 69419 - DNA, 1122 bp, Heterodera glycines
atgttcagttttttgcacaggtaattaattttaaatgttggtaaattcggcacttttacgcttggggccaccgaaaaattctttgatcatacgtatgtaaataggaagaattcgatttcctttactctattgagttacagtaccaatcaatgcatcagcaatatttgcaaaaattgaaaatttgaattttttcaaatgttcgaatccgggttcggggttcgaaattaagtcaaaagaaggtcaaattcgtgctcagcgcatcaaataacccctaaaaaagtgttttttgaatttttattccttttttttgtgggaccaataatcttcatgattgccgaaaagagtgagaaagagaaaaaagtcagcgaaaatgtcgatcgtaactatgaaaaaagaaattttataaagaaaaattgccttattttttaacaaacttcattaaaaattccaaattttctacgatcgactaaactctatttgtgaaaaacttatcgatcgtaagaggaaagtgtgtaaaaaaccccaaattttgccggcttttaaaaaattccaaatttttacgatcgactaaaatcaacattttccctttcgtctataattgtctttaaaatttggcttaaaagcataaaattggtcatttttaggtgcaaaaaaaaaatttttttttttttggaaaaagtagcgtaaaaaaagtggtatgaaagttttcctaggcgttcaaaatttttaaataagactggcagaaaatttttattgatctactaatattttggttggacaaattatgattttgctttgtttgtttgttaacattagagctcggggaatttgtgccgaaggtaccccctccactttttgaaaaaaaaattttctcgagaagtcattttagggatttcagggtcgaagaacacggacaaaaatccaaggctgccaaaaatggcctagatttattaaaacggagcgggaatttttttttaattgatacagtactacttttgtccatttacagtaatcgagttattacaagaaggtggctggccaaaataatgatgacaaaactgtgcacacctctccgtggaattacaattccaacaaaatattaaatacattgaaaatgaatta

SEQ ID NO: 69420 - DNA, 854 bp, Heterodera glycines
atgaaaatggtaaaatcagcacaaaaaaatcgaaaaaagcataaaaattttatgatttttaggcaaaaatttttatcagttaacaataaattctcattttttttcttttcacactgaatttaatattttcttagcaaaaatttgtacattttaaagcaatttttcaagaaaaaaaattttttgaggattggatttttgagaaaattttccatttttaggggtgtatttaaaaaaaaaaatttaggtcgattcttaggggtggatttttcgtttttattgctaggaggcggtgttttagtgaaaattttacaaaaaaatgccaattaagcacaaaaataagaatgaaaatgctaaattcagcaccaaaattacctgctcagcattaagcacgaaaataccaatttaagcaaaaatcagcatgaaaaagatggacttagaagcctcaaactaagttagaaatgcgtttttcatgcttattagcacgccccaagttagcaaaaaatttcagcaaatgctgcaaaatccgttctctacatactaatatttcatcaaaatgatttcattttttgttatttattgtctttgtttgtgctcattttgtttgatactttcattctcctcaaaaagggcgtgaaattggacaccaaaaagtgccaaaaattgtgacactgaaaagcgcaaaaactgacatcatttaacaaacgaaaaaatgaaatgacgtcggaaaaatgtcatattaattgtacacactcaagactctcgagtttctccaaattttaaattaatcagattgcaaacgatggcgactttttgccggtctgctcaacgatgccaacttttttatagtaaataaa

SEQ ID NO: 69421 - DNA, 407 bp, Heterodera glycines
atgagcgaattggtcaaggaattggagcgcgaagaacaatgtaaaaatcgcttatttattttaatttcaatttgatcattttaatttaaataaacaaatcaataagaagccgatttatttttaggtcggaaatgtctgtctttaaagaaaaatatcattggcaattaaaattgaataaaatatttttaaattaaaattagcaaatagcaaatagtaataaaattttgaacatatttaaaatttcaattcagtggccgacgaattggtccaaaattcaaatcgacaaatgcaaaattatgcgccttcccgggaagcttctgttggccaacctcttccagcacaaaatgatggcacacgaagaagctgacccttattttgctccattttcacaaaaaaataagaataaa

SEQ ID NO: 69422 - DNA, 78 bp, Heterodera glycines
  unsure (1)..(78): unsure at all n locations
aaatgctctgaacgcaccaaattttatttacatgntagtttaggcactctgatgcttttctatcgaaaagggagatga

SEQ ID NO: 69423 - DNA, 388 bp, Heterodera glycines; identical to SEQ ID NO: 51536

SEQ ID NO: 69424 - DNA, 325 bp, Heterodera glycines
atttataagcatttgaagggttctcagcagtttccctgcaaaatttggtgagcttctgatcagtctagaacgttgggtgataaaataaaaaaaataatttaaaaaaaataatgctggtgtggtaagtgtgaagaactgtgttcctccaggcaaaaaattctaagaaaatttataagcatttgtagggttctcagcagtttccctgcaaaatttggtgagcttctgatcagtctagaacgttgggtgataaatgaaaaaaataattatcgaaaaaataatacttgtgtggtaagtgtgaataactgtgttccctccgggcgaaaaa

SEQ ID NO: 69425 - DNA, 267 bp, Heterodera glycines
atttataagcatttgtagggttctcagcagtttccctgcaaaatttggtgagcttctgatcagtctagaacgttgggtgataaaatgaaaaaaataattttaaaaaaataatgctggtttggtaagtgtgaagaactgtgttcctccaggcaaaaaattctaagaaaatttataagcatttgtagggttctcagcagtttccctgcaaaatttggtgagcttctgatcagtctagaacgttgggtgataaaatgaaaaaaataattt

SEQ ID NO: 69426 - DNA, 640 bp, Heterodera glycines
atgtgccaggatctgatcgaccggctcgatctgatgtatcgggcccggttcaagaagaaaatattgaacaaaactgatgtgaaaaagttcgcgcaaaacattgtgggagggcctcaatttcgtgatcagttgaatgatgagtgggagaagggcgaacagcagcaacaacggcgccgacaaaatgccaatggagaggacgaggacattaagccggtagaattggaaattgtataaattcaaacactctatgaattactgtaaaaatccaataaatttggaaaaaaatccatttcaatgttccaaaattgtttgtgccttagaattccggctttcgcgtttatataatttttgagattctgaaattacggtgctgtgcagaagttacaaaagtatcaatgttagtaatattaaaatttatttattattttatttttatttgcgaaataataaatcataatttagctcgaacttagtcaaattaatgatatggggatattgaagcgatagctcgacgtatccactattattttatgtaattttaatgtcgaaaaatttagactcaataattttgtccataacttttttgaaactcaagaaaattttttgaaattttatagaataatagagcaatcttagtaaa

SEQ ID NO: 69427 - DNA, 2365 bp, Heterodera glycines
atgcgaaggaaggtgaccgttgcactgtacgaagaccacgtcaaggtgttcaagttgttgttctgggcacgcttttatgcgcttgccatcgctttgcaacgaattccagtggaagtgaaagaagtcagtggacggggggggggcaagcagtagttgctgaggatatgtacagcaacagggaccggattaaatgcccaaaaaatcttagaaattcggatttgtggggatttgcgcaaaacccggaaaaactaaaatttggatccttgtaaattggaatttcgaatttgatgacaaaattttttgaccggttttggcatcaaaataagtcggggtttctgtcccccccccaaatttggtgtttaactcttttgtcaggcaaaacccggccaaagaaaagaattatttttgcaaattccatttcatattctgttctttaatttaaactttcatggctttatcgagaaaacgtgcccttctgacatgcttaaaaatagcggcttatctattaaggatgccgtgccgcaaaagatcacaaaagatgagggcgctaaactgttcggctacaatgactatgccgatgtacaaaaggaagaagaaaatgccaacgccacaaccaaagaattggctgctacttttcgtatcgatgtgccgcgcaatgcgtggcctgatgaaacgcgccgacgtacggaggaattgcgcaaaaagtttgaacaggacatggacattttggaggagtacctcctggccaatttcaaccatcaaatgctctacaatggacaatcacgcttttaccaggtaaaacaaaaaacacagaattactttatagcaatttagctttcattaaaatccaaaaaagaccccaacggattgtaccaaattttcgaaaaaattttgccgatgaattggcgccgctggcctccagtaaggtcaccagacaggtgtccatggagtttcggtatgaaatttatgtgcggatatagcagatagcaccactgggttcttaagaaaagggtttccttttttgcaggatgagcctgagtgtcaagaccaaaaatgccataattgttagttcattttacttttctttcctctgtttacgtcttttgcatgtctccaataattatttctttaaaggaataatttaaattaattacaaattaaatgctttgattctcaaattcaggtgggctacgaaacgctgcaaaagttgggctacgatgatgtgctgcaaggggccaaattgcgcacattgttggttcatgagatggaggaaatgttggaggaggcggacaccggaggcaagagagaaaaaaaattaaatttaaattttataaataaatttttaaataaaatttaaatagtaattaaaacattaataattagggttaagaattgtatgcttttgcatatttttctgcgcatattctatgaagaaagaaatgggctcaaaaaaagcatttctacattaaaattttttgatttggtgaagttttttttagtgatataaatgtatattttggggttttctagaataaatgcatattttgccatctttggatttttgagcatatttcggctatttttggcaaaatttcactaagctttttgggaattaaaaaaaacactcttaaaatcgaaaaattttttggaaaaaatttgtttatataaaaaatagaattttataataaaaatttaaaaaattcaaaaatatatataaattaagaaaattaaatatttttttgcaaactctaaaaaacctccttagccattttgtttagtgtttttaagtcaattctgagttttttacgcaatttttggcattttttgagggttaaaactttttaaaggcatttttgtgcataattgggtatttttcgggtttttaggtcatatcaaaatttaacttatattttcgataaagtataatgcgatttatttaaatagttttttactgttcattttgcaaattgtctttaggcataaattaatttgattaatttacatataaaaatttaaataattttatggaaaatgaaaaacatattccaaatatattttttaaattcttattaaataaaatgaattttaaattttttgcacttttaagtgaataaagaagacgaagattattcactgaaaactgttcacttcacaaaagcaaatgtgcaattgttcaagaaaggcaataatggaacagaaaagctaaagggcatagaaaaatggcttcaaaaaattttcaattggttggacggactcgtggacaaatgccataaaaaatcgttgacaaaacgaaatcggatgcaacgatttttattcgagtgaatttttatccaaaattaaataatcaaaaaatttcaatttaaaa

SEQ ID NO: 69428 - DNA, 2181 bp, Heterodera glycines
agatatttttaatgttaagagctccaaggaaaagactggttacaagcacaaaaagcaccgattggagtcaaaaaaggcaatgttcggcttattaatggaagttgacagtgcggttgaggacaacaaaaacatcagagaaaagtggcgtagaaaaggggaccaaatttgggaagaaaacagggaaaatgaaatggaaagtcagtgaaaaatgaaaaaaaaattattaaaattattattttatttaaattttcaataattattaatatatttaaattttcatgtttcaattttgggttttgttatgcgtgaaacgctcattagaaggtgccagccttacgaaatcttgaatattttaaagctttcatattggacagtttaataattaaaaaaaaaattcaatttccctgaaaaaatatcaaaattttgagaaatttttgatttcactcaaattttggtgaaccgggggattttattggacttgcgccataataagcacgcaaaacatcaattttacttcagaagtttaaaaaaataaattttaatccaacataatttttgttggattttagaaatttgggcagaacagatcgaagcagtgaagatggacaagacaaatgaattgtcaaacgatgcgtttaagcaagttaccagcatgctgaaagaaggcaccgatatgccaaagtggatgatcaatacgccaaaagattcaaaggtggaccaaattttaaaattgaccattcatcaaattttaaaataatccaaaaatttatttaaactaaaatctgtcttcattatttttgttttggcatgaatttgcctttgctgctgatgcacgtattgacaaaaaaatcaaaaaagttagatgtctatcgttgtgcatattttttttttgcatttcttttaattgcttttaagttgttgttaattagtctaacaaataagtcaaattcgttgtaaacttttaaaaatattttaaatatgctttgactgagcggcgcaagtgtcaaggcgcaaatttagcggcacaaaagtcgcaacacgtataagtataggtgcacatccgtaaactttatccttatctctaaaatttaatttcggttcttgtttttaggcaaaggctaatttttgttatgccaaattctcatgttccttaactcgagttacattttcactaacaatcaatttggttcaatgaatgactaatgagattatgacataatcttaggaaaccgaaaatttaatgacggaatgtcaaattaaaaaaatttttagagttcatcaaacaaaaatgcggggacatcctcgagagtggaaagcagcaacacgagaagacgtggaaaacgacgcgtaattcgcaacgcgacgacaccagcggacaaatcggtaaaatagaataaaaatttaattaaaaatatacaaaaaaagtatttggatgttagggtgaaaaatcatcttctgtataccgtaaccatttggaaaatgtccttattaatttttagtcattttttcgaaaaatcaagacttatggaaaatcaaaccgaagccttttaaaatacctgagctcactattcattttttaaaattaacaggaaccgtttgagtaataccgtacaattaatttgaaattaggtagaaagtttggataatacaccgtcattttttttttaattttaggaaattcgcacaccgtttaccgaagaaacgctcgtacgtaaaaagcgaaaaggcgggtttggcgcagggcatgctgccggccatgcaatgtctcgttccttttctcatgcgcattattcggccccatactatccgcacggcggatcatactgtatgggctaccattaccattcatcaacttattactactactcgccttatcacatgtcacacaaacaagtaaaggaattataaaaaaaaataattatttaattaatggcctaaccgattattgtcaatgttattgcactatgaagtcgaggcaaaagtcacaacttgtgaaaagtttcgagttcatactgcattggtctcgagttcaagacttggacactcggagtaaagactcgttatcgagcatccattaatagtttaaattattcttatgccaacccaaatttatgctggagtttatatgtaaaaacactagaaaaaatgtattcataacggaattttgaagaaattgtaaaa

SEQ ID NO: 69429 - DNA, 49 bp, Heterodera glycines
ctgtgacctcgagcgttaccaatggacgcagacactcggcgaattggaa

SEQ ID NO: 69430 - DNA, 780 bp, Heterodera glycines
atggttgagatgggaaccgaaattcaaacatcccgaaatgaacttaagtcttttcaagaagaagtagataaagccaaaaacataacattggagcatgtggaaaagaatgacttgaaaaaagcaaagaaatcagccgacgtcgcaaagggaatcgccagacaggcaaagaccaaatatacatcaactctcgagggatataatgataaatcggaaaagggttttagcgggatagtgaataggcttaatgaggctttgggtgagcatattaaacgtaaagatattgaaaatagacaagtatctgaagctgagaaaggactacaaaaaagagaaagactagccaatgaggatgttcaatttcaatatgacagcattgatcaaaaatttattgtctatctttcctctgccgtcacccatatagatttgtcaaaacacctcgcatatgttctggggtttaagaatacaaggctatttcacgcggaagaggcgacttatatgccggatttgacgggaggtgtaaggcagctatacatttatgcaccaaatttaatcgaaaacacaattatcggcaaccagatggccccactcttaagaatagttaacgtcgtcgatgacccaggatcaattagtgaagttatatatagcaccgagtattttcatcgtctacagtcgaaacgaatttcagaaattacaattgaaattcacacaccatttggtgaattcgttaaatttcactggggaagttgtattcttacattacattttaagaaaagtatattttaa

SEQ ID NO: 69431 - DNA, 1319 bp, Heterodera glycines
atggttgcattgattggcgacaatgtgccgttttttacccggaagcgacatgttctggtgaaggaaagtgccattgtccggccggcatgcatccccagcatggcacgtgcgtcgagggcgaaattattggtgaaaaattaaaataaaaaatattttttttattaattttaaacaaaaaatatttgaaaaaattatggttaaattaaaaaatttattttttatttaattgtaaatatacaagaacttttttaaagaggaaaaaatcaaaatattttaacaattatttgagattgatgacaaataataaaaatttaataattaaataaattaaagtatttttttacatgaataataaatatttaaaaatttattttatatgaaataaattattgaaaacaatcttaaaaacttatttattggtatcacatttttataagtaacacacatatttagtattagtttaatttaattaaaaaatatatttcaaaaatttcatttattataaacattgcaaattagatttttacaatttataacaataaaaaaggtgtccaacatgaccaacccccacaattgtcgggccgcgtgccgttgctgccaccaagccaaattgaccccggaggcgacacctcacccattgttgttggcattgccccaggcaaaaaaaatcaaatttttatttttaattaccattttttattaaattttagatggcaaaaggcaaaaaataaaaatgctttttgaacaggttgaaaatgtgggtggaaaaatgaacaattggaagactcctaaccttttaaaacggtcaaacccgcataaattttcattcgaaagctctgggattttcccaagaccctagtcggggtactgtaatttttttgtttggaaaatgcaaaagggacatggcgaaatactttatttcttcctaaaatagaactcccggggcgctttattctccaaccctcttcaaagagtgggctcgaatttaggaaggggagggactgtattttataggaaatacggtaatataattttttaatgcattttttaaatgtaatattattatttaataaggcatcaatcaccgaccgactgagctgggcaagtgccggatttggttctcgcacagcaccagctcggccaggttttgcaggtcgccaatgttcagcggcagttccgtcaattggttcccactgatgtccaacgtgcgcagcgcgcggcaccgcaacagttcgtccggcaaccgggcgaccatgttgcagtgcaagtcgagcagctccaggctgacgagacagtccattttgggcggctgcaaaaaa

SEQ ID NO: 69432 - DNA, 429 bp, Heterodera glycines
  unsure (1)..(429): unsure at all n locations
atgtcatgtcatcttcgtgaatttggtatatccccccnatatatcaaccagaactttttttaattttcatatacatatatttccagggtccggatttatacattttttatttttcacaaaatttgaaaatggatttttctattcatttcgtagttgtaagaatgacttgaatattgcaggaaaataccttgatatgaggactttctatatgtaaaatttaaaaaatttgttaatatacaaatttaaaaaatatatttataaaacttgataatcaaattcagacactgccttgaagagttttatctaacgaaacgaacagaaaaatcgcatttcaaatttggtaaaaaaaaacgaatccgggccctgttaatttccatttttatttttcctggcgtaatttaattaaaaattagtttattttttctttta

SEQ ID NO: 69433 - DNA, 92 bp, Heterodera glycines
atggccatggaagctcagcaacaattagcaattaatggtgccattttgggaatgccgaaaaatgaagcgagttttaaaaataatattgtaaa

SEQ ID NO: 69434 - DNA, 309 bp, Heterodera glycines
  unsure (1)..(309): unsure at all n locations
atgccaaaaattaaatcaaaatcggccagctttcgggaatggattcgaaggatcggaggaactgacttttattcaacaactggcaaaataatttattgtcaattatgtgaacaacaggtaactgcgacaatccgtcgaacaacaacaactaccaatacaaaattcacagattccttgcacgcaattcgcgtatctcaaacaacacaacgaaacggtaaagcacaaggcaaaattggaacggaacaatggaggacacagcagcaatttttgacaacactanacaatattccaaaccnanttcaccnttga

SEQ ID NO: 69435 - DNA, 87 bp, Heterodera glycines
ttgttcttattgcatttttgttaaggaattttccaaaaaatgtcgaaatagtgaaaaaatagtgacaaaacgccaaaatagtgtttt

SEQ ID NO: 69436 - DNA, 504 bp, Heterodera glycines
atggagaaggcctgcaaaatttggagagattatatcgattttagtgcgctaggttcgatgaaactttttaaaatataagcctaaactttttggcctgtttaaaaaggaattaaaaatttttaaaaattttattcatctcccttttgatagaaaaagcatcagagagccttatttaacttttaattaacatttggtgcgtttcagagcagtttctgaaaaaatatttatgaattgattttgctaaaaaaataaaatagtgaagctttaaaaattaataaaaaattttaaattcagaattactggagttagcatcatagcagtgcttttccttgtctttttgatgctctcgcaaaatctggttcgcttctgatcagtttataaaaaaaaagttaagcctaaaatttttcgcatatttaaaaagcaattaaaaatttttagattttttattcatctccctttttgatagtgaaagcatctgagtgcctaaaataacttgtaaataaa

SEQ ID NO: 69437 - DNA, 689 bp, Heterodera glycines
atgcgcgaggcgccctacaaggcggacgccaagccgcgcaagttttggctgggcgtcgagtcgaccggcgcattgcgtgcggaaaacattgtgctcaggtgggcaaatttatgatgaattataatttttcaaaaaaaaaatgctagaaaatttttaaaaagtttttttgaaatttaaaaaaaatcaattttttttttggtaaattttctgtttgagaattttttttgaaacttttttttcaggggcggggaaccgacgcggggggggggaggcatagttcacccagtcaatttacaaaaatgggtaccaatacggcaatttttggggctttttcggctttcccccaaccactcccatcgactctttaaaaattagttcatgataaatcgtgaaaaaaacaggaaaagaaaacattagaaagacagaattttttggagctgggctcggaattccatccctattatataccaaaaatttcttaagaaaattagtaaaaacaattttctttttggcatacccaatgaaatttacttaaattttttttttaattcaaattaaaatgcggtaaaaaattgtttgtttttttttgcagtggtatccaagtgctgaagaagaagctgatcgacatgcaggaacagttgaccattgaacgcagtgccatggagcagcagccgaccacatattattaa

SEQ ID NO: 69438 - DNA, 269 bp, Heterodera glycines
atgttggtgcttctccttagtcttgaccgttctcgacttttgcgctctctctacttcttccaattctcgtctgaatgggctctccgtctttcagcggtatttttttcaattcgcccaaacttctttgttccaaaggtcatcaacatgttgcccggtaaattccccagcgcacttcagccgaggttttttgatctgtgcgaacaattgaccaagcaaattgtgcccactttggagccattcttgcgggaactaattgcagttgatcagag

SEQ ID NO: 69439 - DNA, 923 bp, Heterodera glycines
atgaatggtgtcatttcaagagaatcccgaggcttaaaccatgggctaccattagacactgtaccatttcataatggaatggtaaatttaaaaaataaaactcactcgacggcaaatggaaggaaatgtgccaatggttttcgtccctccgcaacgttttgccggtgatccgggcatagaattcgtaacattcaaagggaaacagtcgcacagcaccgaacgattggatgattttggagatcacttgggaggccaatttgaagcgcattatgtcctcaagcttggcctgaatacaaaatcaattaaagccgaaacaaaaatttgtttttggaaaactttcgtaaaagagaggatgattttttacagaaggaattgaagcatacgtagcagaaaaagcataatttaaaaaaattaagaaaacatttcggctcaatttttgtctatgagacgattcgccaaaaattccatgctaaaaaatgatcatgcttttagaagactaatatattgcttggaaaaagcattctaacgagattacagatttgggcagatatttgtaaataaaaatatgatgatgagttaaagatgccaaagaaccaaaaaatgagggattcaatcgcatttttaaccaaaatttatttttatcgaaaattatttgaattttcagaaactcatgggttgaaattaattcattttcccacaagttttacccgttgtccatcgtgaatgcacgtgtggaacggcgaaggcgcaaccgaaatgccgatggcgtccggcgtcattcgagtgccgaatgtttgtgccgagtcggtgatgacgcgaaaagtgccaaacaaaagggccaacaaatgttgggaagggacgggcaaagcggtgacaattctaagaatggaaatgaaatgtattacttacaattaggattttag

SEQ ID NO: 69440 - DNA, 668 bp, Heterodera glycines
aattgtcaccgctttgcccgtcccttcccaacatttgttggcccttttgtttggcacttttcgcgtcatcaccgactcggcacaaacattcggcactcgaatgacgccggacgccatcggcatttcggttgcgccttcgccgttccacacgtgcattcacgatggacaacgggtaaaacttgtgggaaaatgaattaatttcaacccatgagtttctgaaaattcaaataattttcgataaaaataaattttggttaaaaatgcgattgaatccctcattttttggttctttggcatctttaactcatcatcatatttttatttacaaatatctgcccaaatctgtaatctcgttagaatgctttttccaagcaatatattagtcttctaaaagcatgatcattttttagcatggaatttttggcgaatcgtctcatagacaaaaattgagccgaaatgttttcttaatttttttaaattatgctttttctgctacgtatgcttcaattccttctgtaaaaaatcatcctctcttttacgaaagttttccaaaaacaaatttttgtttcggctttaattgattttgtattcaggccaagcttgaggacataatgcgcttcaaattggcctcccaagtgatctccaaaatcatccaatcgttcggtgct

SEQ ID NO: 69441 - DNA, 1029 bp, Heterodera glycines
ccgatgattttacgaaattgttttttggactctcaacgcatttggcccatctctgagctcatgttctcccactcctccctctttttcagatttgtcgtctcttgggcgctttgtacagcgaaatgattttccgccgcggctacgtccacagcgacccgcaccccggcaatgttttggtcagacgaagtgccaacaccgggcgggaggaaattgtgctgttggaccacggcctttactgtgtaaaaagtccgtttggaaatgccaatgtcaaaacgagcgccaattgtcagactcttcccgacgaattgcgcattgattacgcgaaactgtggctggcgctgatgaagccggaccaggacgaaattcggagggtttgcgaacggatgaacatcggacagaactacggactgttcgcctgcattgtcacaatgcgctcttggaagtcagtcactgcgggcattgcgcggacagaaattgacgacagagaggtggggaaacggagacagggttttgaaaagggttcaaattttcaaaaaaataatccaaaattattatttatttttttggggggctctgtctttgcatctccctcaaatttgagtacttttgaagcgatcgcacatcaaagagtacgccaccggtcttatccctcaaatttccgtggtcctcgattccatcccacgccaaatgttgctgattctgaagacaaacgatctgctccgaagcattgcattcaaattaaaaacggaacaccgactggacagtttttcagaggtgaattcggccggaaatgtcttctctttcctcgttaattaatttttgttccgtcagatgaccaaacattgcactcgcgccgtttaccaccactcaatcgccgccacccaatctttgctgagcaaattgcgactttacttggccatgtacgtccttttggtcaaaataaacatcttcgaggtctttctgattgtgaatggactgctcacagcgaggcaaaggcatttgacactttaacaaatgcttttccttttg

SEQ ID NO: 69442 - DNA, 738 bp, Heterodera glycines
  unsure (1)..(738): unsure at all n locations
atgattggaaagctggtgagattgagtccagagaattggaatgatggagaattgagtccaagtgattggaatgctggtaagttgagtcncagtgattggaatgtcacagaattgagtcccgatgattgcgatgccgaaggaccaggtgaggttaggtcccagtgattggaatgccggagatttgagtcacagtgattggaatgccggagaattgagtcccagtgattgcgataccgaagaatgcgtgaaaagtgagggattgagtcccagtgattggaatgctggtgagattgagtcccgggaattggaataatggagaattgagtccaagtgattggaatgctggtaagttgagtcccagtgattggaatgtcacagaattgagtcccgatgattgcgatgccgaaggaccaggtgaggttaggtcccagtgattggaatgccggagatttgagtcacagtgattggaatgcaggagaattgagtctcggtggttgcgataccgaagaatcaggtgaggttaggtcccggttattggaatgttggtgcaataacgaacccaagacttgtaaagactattaaaaatgttaaaaaatgaaaatttaattgctaaaaattaatatattattttgttaacactacaattcaatacttaaaaaaattttcagttaaatttaaattttaaatatattcataatcttaaataatatcttataaaagcggaaagactcaaataaa

SEQ ID NO: 69443 - DNA, 679 bp, Heterodera glycines
  unsure (1)..(679): unsure at all n locations
gcaattttcatcgccgaagtgttccatcgacgtgaggtgcccacacagttccgctccaagcgtcgtctgctcggcaagtacacgctggtgccaccgaacacggccggcggcagcaacaatgactaccaattggagacggatgggccaccatcaccaccgccaccgggaggaacagcgccgaatcgcaataacaaccatttccaattggacactgtacgggttgcggacgatggattacgacatggacggccagaagctgggagcaactacaacaacaacagggtgggatagggttaggaaatttttttaccaagaatttttatttaaaaaaaattacgtttctccaaccccccnccccatccaatatttttccttctgaaaaattttttttaaataatgaaattttttattacttaaatttcttttagagttttttctattggattgtcccataattacgtttagcgttttaattggtgtcttgtcctccataaatctcttcaatcgtatctcagaaattttaaaagaaattgagttgcccccgatagcgtttcctctcgaaaaaatcttagagggtactaaatttttttaaaatttttttaagtaagttttaaaaattatgcaaatattttgtcattattgggtttgcacccagggatgggccaaatcggaaaataaa

SEQ ID NO: 69444 - DNA, 802 bp, Heterodera glycines
  unsure (1)..(802): unsure at all n locations
gatggagcggacgaagtattgatcaacccaaacatgttagagaacgaacggcataaattgaacgtggaacggcgcaaaaagaaggaccactacaacccgtatgaggaggaggtggacgagttcggacaggtgggagaagggggatggggagttggaagtccaatatatacattaattgactaattaatgtgttgtcaggtcaaaaaacagcaaatgctttccaaatacgacgaaggcattgacggggagaaggaacgcgacacattccgacttggtaacacatttaaacaggcatttgtttcgaaatatacaaatatttgacacaccgaaattccttttatttgggcttaaaatggagccaggatttggtttgaaacccaacggaacgcttggcatatttagatgagagtggacagtacgacttggacgcggagaccgccgagctggaaacacggcgtcggctgatgatgctcaacaaaaagtttgagtcgttagaaagcaccaaatacacattggccaacgaatttcacaccgaggcaagccaaacacatcttcataatacgaaggctcattacaaaaggggaaattgccctgaaaaataaaaaattagaaatttgtttcacattttggcataatctaccaacaaatgttccaatttattggataaattcaggaagaaatgatcgcatttcgtcgtccgaagaanaaggggagggaaaagcacgcggaanagaaaggcattgaaagccgacgatttggagacggaaacgacggaagaaacggagggagaaaaaaggatacg

SEQ ID NO: 69445 - DNA, 1026 bp, Heterodera glycines
gggatggaattggccaacgaacgaacgaacgattcatcagccgagtgatgccatttcattcccttctcagattcgcaattccaccgactttgccaacacgggaatgaggtgactgtgcagaaagtgccctcattttccaataattcttctcctcccctaagatattgctgcttcggcactcccgaatcgcccattgtgtcggatacgcgtgacatgctggtgagtgggcagtgcaacggcacagaatgccctccagcgaagatggcaatggattcccccccccctccccgcaggtgctgttccgctccttttaccgcggcggaaagggctttcaagcgcgtgcccgggcagtcgcgacaactgacgcgccgctgggcgcttggagtgagtggagtgagtgcagtgcctcttgcggtgcgtgcggtgtgcgtcggagggtgcgcgagtgcgcgccccgcggggacgcggtgtgcctgtcagtgtgttctctttttttttgcttatccgttgctgttgttttgcggtcgaaggttctgttttttttgtcgatcactttgttctcttcagcttggttttgtgttcctttacgttttcgattggcttcacttcccaatgctaattatgctaaccgtggcactcgcttcttctctttttatccatggcattatccctttggcttttttgctttctctctctctctgtttgattatcccttcggctttttctctttgcttttcctctctcccctttgtctctttctctgttttgctttatctttccatgcctttctctctctgctttatctccattacccccctctttgttttagaactgaactctcgcaaaccgaagtctgtgcccgtcggccctgcgcctcactctgtgcccgttcattcagcgaagaggcgccctgcgaggggattctctctcttctgaagggcctccgctgccgcacggagagaacgcggatggagccatgtcgatggatgtgttgtgccgggtacacagtgacaaagatggacgagg

SEQ ID NO: 69446 - DNA, 666 bp, Heterodera glycines
atgctttacggtatgacataccgataataaaacagcgtaacaaacggtacatttaattaataagtgcaaataaaaatgtagctttggaatctttaaatttgttcagcacaggaatttctttgtgcacttttcgtccaccacattcacaaaaaacaatcgcagaaacatatgcagtggggcagaagctgtgtacatatccgtgttcattagggcaaatcggcccgatcggatcaaagtgtcaaatgattggaagaattgctggtgggtgtaattggcgatcagagtgttcgggtcgtggacctaaaacagggacaattaagctaaattagtcgcaattagcacttaattgccaaaaacctcaatatttatctgacaaattgagccggtgaaacgctcaaagtgatctggaatatttattgcgttaaaatacagtttagaaaaaaactcaaaaatttatcactttttgtttattggaacataaatatttttacaattattttttaatttaaaatagttacaagcaagcagttcaataatgccaaactctgctccctcaatgtccattagcagcaaatcaacgggctcctgttcccattttgtgtgattattcataaagtcaatgatgccaatttgtgtgactaatttccgctcaatggcatgttctta

SEQ ID NO: 69447 - DNA, 349 bp, Heterodera glycines
atgaacaaagcgaacattctaaaattgaattcaagtgatgagtttaaatattttatgcgcttttgtcccaatgtcaatcttcaaaagcgaacttgcacagttgtcacattcggtacaaacctaaaaaagaaaataaaaattagtctaaattttgaaatttttgcaggtgttggacatacggttagagctgaacgggaactgatcaaaatttaccctgagtgccatttgatcgctgctgatccgtcggctgagattaatgcaaatttgacacaatctgtaggtggcacttttgttcagggcccaattggtgccgagacggctaatcaacaaccagtgatttcatgggaag

SEQ ID NO: 69448 - DNA, 66 bp, Heterodera glycines
atgccattcactggtttttctgccgtcaaatcggatatctaccgtgtgaacccattatattcattg

SEQ ID NO: 69449 - DNA, 186 bp, Heterodera glycines
atggagagaaaggtgctgaatgggctccaaaatccctttaggtatggtttcgtccgtcttcgtatggtcagcaaataccacgcggacatccgcgaatgggaagtgcaaaagaccatccacaagaaggatgcggataagaaggagtcactgagagtgctgcgtgagcaaaacgaatggattatgaag

SEQ ID NO: 69450 - DNA, 446 bp, Heterodera glycines
cgatggcttcggcgctttgcttgtctcatgtgggcggtcagtcgttaaaatgtcaaaaaaggtaaaattcaatttgatgattcactgccaaattactttttatgtttcagggtaatgtgttgcaatgttttacggcaccggagggtgtcaattattcggcactttttgtcagtcaatccgggaggcttttaattcttaacagagcccagagaattctttatttggtcgataaggtgtgattgtgatcactgatcagtcagcagggcatttctctggccaatgccaaatgcctttcttttctttaggattcgaatgctccgattgctcgtctccaccattgtgacggggccgtgggcagcgcctcactttggatttggactcattttggtgtagaccagcaaaatggaactctgtttatcctcgagtacatttcgaatcgcgtcgaa

SEQ ID NO: 69451 - DNA, 455 bp, Heterodera glycines
atgcttgaacatgtttttgttcgtacaataggtaatgtttcttgttttagttgagttcgggatttaatcgaaatctaaatgattaaattaaattaatggtattaaattttagtctatattaaaattataggtttaaatattattttatcatcaatttctaataggcacaaaatcgaaaatgccaagctcggacggcgtttccaattgaatgccacttgccaaacgttggataaacaaatgaaagatgtgccaatgaatcaaattgacttactcggcaatgagtattccgacggggaagtagacgggccgaaatttttgatagaatttgtcccataggaacgatcaaaaaaaggtacaccgtctaaggcttccaaggccatcaaggcaattttatacaatatgaacaagaaacaatcaaaaaacagttcttataacaatgtcaagtcaatgccgaa

SEQ ID NO: 69452 - DNA, 55 bp, Heterodera glycines
atgaagcgccaaatcttggaagctagaggaccatgccgcaataaaatggaaatat

SEQ ID NO: 69453 - DNA, 84 bp, Heterodera glycines
atggccacggttagcaacgaaaaagtcgggggctccactctgatcggagaagaagacgggcgtgatcagcgtaaggtcggggag

SEQ ID NO: 69454 - DNA, 612 bp, Heterodera glycines
  unsure (1)..(612): unsure at all n locations
atcgatcatatnggaaagtccaacttccgacgaggcgatgtgattttgtcgaacagcccgcgggcgggcggttctcacctccccgaccttacgctgatcacgcccgtcttcttctccgatcagagtggagcccccgactttttcgttgctaaccgtggccatcattcggacattggtggccttgtccccggctcaatgcccccacattccacaacattggcccaggagggggccgtctttcacagtttcaaaattatcgacggtggtgtgttcaaggagtctgagctggtggaacaattgatggcaccacaaagagtggccggctgttcaggcactcggaatctgcgcgacaatttggccgatttaaatgcgcaaattgcggccaatcaaaagggcattggccttctgcatgaactcgtccgtgaatattcgctgcccatagtcaaagcgtatatgaaacatatccaacggaacgcagtcgaagcagtgagacaattgttgaaaaatgtggcggaagagagtcagcagaagggacaaaaggttttgagagcgaaggattggatggacgacggaacggagataaaattggaggtggaaattgacagagactca

SEQ ID NO: 69455 - DNA, 519 bp, Heterodera glycines
ataattctgggaaaaaggctgctgaaaatctgaaacaaaacaatgtccaacaggcgaaaaacggggagagcaaacgcagtaaattgcaagaaatgatcggccaagccaaaaaaactgttgaaaatgcgctcggttcttcgcacggatcgttgggtgagaaaatacaaaaaaacatttttgaatattttcacagagagtcaccaaaattcgattgaccttcgtcaagaagtggcggaaatcaattcgaaatgcgcggatttggccaatttgctcaatgcgttggaacagaggctgagagccgtcgaagaactgacggagggggtaattattatacaaaattgccaatttgtaattgtaatgcccacgattttcagattgccaaaaagatcggctacagcagctgatgagtgtttgagtgagcggagtttatcagggcaatccccagaagatgatttcgatgatgatccagtgcagcaccaccaatctgatctttttgctagtgtaacatttgatttttga

SEQ ID NO: 69456 - DNA, 484 bp, Heterodera glycines
atgtcttcttcaagtggaggcgccgcggggccttccgtcgtcgacgaagagacggcggacgaagtgaaagtgttccgctcgaacaacgccgaagacgacccaaccgatatggccgggtcgtcggcggatttggacgcggataagcaggaattggccatggaagcggatatcgaaatgcaatcgaacattggcgagtcaaagaaagggcgagggaattatgcgggaaaaacgatcgaattgtcgtcaatttcaggccaatcgttcaatccgatggccaatccgttgtccggcccacttccgtggccttcgcctggcagcaacttccttttcagccagatccttgccgccgcttctctctcccccgtgtacggtcccgcatttcaaaaagttgccacggcaatggccgcacagcacttcgccaccgccgcggctttagtcgtacggaactcgccaaattatatgaatttgggcccgtcttttgggg

SEQ ID NO: 69457 - DNA, 629 bp, Heterodera glycines
atgcattgccttttctcaattgtctacacgattctgaccatttttatggttgcgcacacactttccaagggcaccgtgggcggccaaccgatgaaaacagagcgggtgagttcggtataatttagttggttcgggacaaaggaaccgcagggaatatttttgtaacttttaaatgcgatgcgattttgttaattgatttatccaaaaaatttcaaaatttgtaaatttttagcagatttttatcaaatttgtaggccttggaatatttttttaagtacgtgtctgtgtgatcacagacatctctcttgcttctctgattctttcccacctaataaaaaaaaacaattttcttcatttccaggttttgctggatgatgaaaaactgcgggaatatctcagttggttccgtttctttgacaatgacaaagatgcgcagctccagcacaaacaatttaaagtaaaaattcaatttatatatttttttcaaaaatttaattttgttaggacatcctttgggcgttggggcgtcttccttattttgaggagcagccgaagttcgagcgggttttggacgtggtggaccccaatcggtaatttattatttatttagaagaacataaaaaaataaa

SEQ ID NO: 69458 - DNA, 144 bp, Heterodera glycines; identical to SEQ ID NO: 57282

SEQ ID NO: 69459 - DNA, 237 bp, Heterodera glycines
atgtactttgctgatttattgcaccactccgtggaaggtaattaattatttattaattgcggtattagcgtgtacgatctcaattaactttaagatgaaaaattaaaattattgtaaacaaattcaaatcatttttagcatttcccataaatgatttcgatctgattcgactgctggtcacacgttccgaagttgatctagccgaaattaaggtgtgatttgtttaagtaaaataaa

SEQ ID NO: 69460 - DNA, 232 bp, Heterodera glycines
ttggactttttcttcgagattgccaggccccaaacgcatggtcatccaattaattgtctgacttcggttgaccggtaagaaaagaaaatccaaaatatcgcagtcgatgaaccgcccatttttcagcaatttgttcgtttccgggggagaagagaaaattttccgcgtgtttcaggccacttcatcattcgccgaaaatttggccaatctctccgattcttcaacaaagacg

SEQ ID NO: 69461 - DNA, 1623 bp, Heterodera glycines
atggctgcgtatgcaggcgacactgacgatgtactgcttgccattcttcaatttgaccacattgatgtccaatttctgaacatggatggcgatgatgatcaaattggtgccgccgtttcatccctcaaatttggcagtgccattccatccacttttgaactttcgcacatttgtggtgccgttgtcatggctgttggcttgtcgaatggactcattgacatttttgtctcggaaacggtcggttttgaagcaaattttgattttaaattattatttttttacttttcgatatttagaattcttactccatccagaagaaattgtcccttgacttatgcggtagcaacaaatcgtggacccgcgccttggcgtttaatggtaacaatttagggagtgactcgtcccattttaaaaattcaattttgaaaattttccatgaaaatatttaggaattttttttcataagaaaatttcaagaaaaaaaattaaaaaatttcttcgcgatttttcataaatttacactgaataattatttttttaaaaatttttccaataaatcgctgaaaactaaaaaaaatttcttgagtttttttctgaataaatttcttaaggttatttcatgaaaaattttaaaatgttttttcgagagaaaaacgtagttcacagcaacaatttatggttttttaaaaattgacgattaattactgacttttttcaaaaagaatttccaaaaaatcgctgaaatataatataaaaagaatctttttctcgattttttaatgaaaaattaaaatttaaagcaaattcagttagcgaagatggacagtgccacaatttgtcgcttgccgcagcaaccgatgggctaatcaaaatttggcaatttgtcggcggcggtgaccaaatcactgtgacaccactcgcaaatgatgatgatgatcaccaacagctcaagatgaaccaacaaacattttgcatccaaagtaagtgctaacagttttattgctttatttttttttggaaaaagtaacaagaaaattttaacttttatgaatttttttttttaaattgggggggggggtgaccgtcaaatcttttcaaatcaatgtttttaaaatcttcagatgttaaactgcggtgggtgtcgactgggcgacgccaacttttttgttgttgttccaaaagttttctgggtcgctgacaatgaatcctgtatccatttcgaaccctcggacccaaattctaacaatttttgttcgaatttgggggtccgggttcgtaatttgtcgaaatggatggcggattcgtgataagcgatccaaaaccccttgaaatcatgctttcatgacttttgaaaataaaaaaaaaaaattttaaaaatacacccttcagaattgaaaataaaaattctcaaaaattttattgcctcttcgaaaatttttgtgtctatttaaacctattttgcttaaactgatctcctttattcttttgttaaatttcgcttttcttttttactatttttaagatggcgtcgctcatccgatctctgtcactttggaatccgtcctacacgcgcagaccggcccaatttatgcacttggtaatgtcccctacaatgctaaatga

SEQ ID NO: 69462 - DNA, 857 bp, Heterodera glycines
atgactgaggatgaaagggcggctgccaattggctggacaaccacgcatggccaccagctgaagccttcaaggacaaattctttgagaaaggtaatttccaagggggggggggggtgggacaaaatacgcctaaactttttccgtttttcagtttggaagaacgcaaaagggcgctcgggatacgcggctcattggcgtaaggagttcatgcactcacacactgaacgcacatcccgtgctgcgagggcggctgccgaagggcgcttcgagaagtgtggagatttggaatacaccagaatgtctgagcgcgtgaacccaaacgaactcacgcttgaagatgcacttcgagaagaggtttttgagagtgttattagtagaatagtctgtcttttggtggcttttagaacaggtgcctctgaatgtacctatagtattctctttcgactaagttgggtgcctttgaatgcaccttaagtatattattattcaccccattttaggacactgacgtcaactcgcccgatttgcttgatgagttttgcaagaccaaagcgcccaacatggtgcgccgacaggaattgtgcggtgaactccagagccgctcgttgcggatctctagactgttcgaacttcttcagcagcatgtatgcattaaagaagaaatcatttcacttagtcgttttcataggcggcggatgcaaaggaggcgaaaaaatgctacaaaaaggtgctaaagcagaagaaggaccagttgaaagaaagggcggatgcactggcgagcacgaatgcggaaaacgaggagctcaagttggaaaacaacttgcttcgtgagcgaatcggcgcgctggaatcaatg

SEQ ID NO: 69463 - DNA, 156 bp, Heterodera glycines
atggggaattgtaagcccgcggatgccactgagtcggagaacgcgtcttctgtcgagacggttgaagttgaagtacctccggaccctctcgttaacccattctggaagatgcaaaaagccttcgagaagaaactgcgtaatctgttgaagcgtgag

SEQ ID NO: 69464 - DNA, 480 bp, Heterodera glycines
atgaaaaaagttgtgctccaaaaaccgggctggcgcccagttggttggcgcccagtcgacccccaccctcgggaaagtaccctaggtttcagggtaattcgaaaagaaaattatttataaatccataaaatatgttttataggcttttcgggttctctggtcacaaatattaggtgtacatccatttcgaactccttccggaccctaattcgaacaaaaggtccaacgcccaaatttcgcatttttttgttttccttctactttgaaaacagcttaaatggtcgttcattgtgggattgacgctttcattttgttttcttgttagtcccgggttcggaattggccgaaatggaagccgaattcgtgatcagcgaccccgaaatgactaaaatttgaaaaaaggtgggggggggggaatttaaatttaccgttttttaggtcttacttttgtacaaactttttaagcactatttgaataaa

SEQ ID NO: 69465 - DNA, 963 bp, Heterodera glycines
atgggactgtaccgggacaccaaggaaaacccgatgcaattgcgcatttgcaggtgagggagagactgtggcaaaaaagcatggttttggtcacaagatattcacgaaagcgaacccggctcattagcaattatacaaatttgaaaaattatttaatggtccgtttaacacccaaggaatatgtcgtaattttatgcacacgaaatatttgtggggcgagtattctgcactttccaagctgtttttttcatgatattttccaacaccaattactatttttcatttttttcagtcgttccaaggacatcattgagcccatcataaaatcgcagtggtacgtgcgctcttcagagatggcgaagcgggccaaagcggcggtggtcgacggacgacttcgactcatcccggaataccacgtgaacacgtggaatgcgtggctgaacgacattcggttcggaacagaaacataatcacataagaagttactaaatcgatcatctaagggattcggtgcatcttctcgtcagcttcggtggggtcaccaaatcccggcctcttttatcaccattgacggcaatcattcttcgacaccgccgggaaacaatgaagagcgttgacgacgaagaatcgtattgggtgtccggaagaacggaggcggaggcgaagacaaaggcggccaagcggttcaacgtttctgaacagtccgtcacactcgaagcggggtatttgaattttaaccggtttaaaaatggaataatatccaccccatccattttcgccagacgaggacgtgctggacacgtggttctccgccggcatcgtggccctttcagtgtggatgggttgggcccgaaacagaacggcggacaggcgccacttttttccccggctctttggctggagaccggacacgacatttcgttcttttgggtggctcggatggtggtcattgtcgcaggcacg

SEQ ID NO: 69466 - DNA, 1574 bp, Heterodera glycines
  unsure (1)..(1574): unsure at all n locations
atggcggaaattagatatttaggctttttattaagcgaaaaaggagtgcgcatggatccaaaacaagtcgaagctgttcaaaattttaaaccccctaaaagtctaactgaattaaaatccttattaggagcacttacttatttccgtcggtttataaaaaattttgcacacattgctaggcctctacagactttaactcaggataaatttgagggtaaaataccagaaaattggggaaatgaacaaaacgaagcattacaaacgctaaagaaaatgctcacttccgccccggtcttacaatcaccaagatttgggaaattatttataattgagtgcgacgcatcgcgcagagcaatcggagctgttttactccaagaaacgggtcccgttgcattttcttcacgagcattaaataaacacgaagcaaattatccctcaattgaaagagaggcgttagcattagtctatgctgtaaaggaattttccccttatataattgggtccggtacaacaaagataataaccgactgtagtgccttaacaggaatgatgagggcaaaagaacttaagggcagattagaaaaataccaagtcacgttacagggatatgacttagaaatagtttataggcccggaaaaaagaacaaagccgcagattttctttcacgatataatatcccaggaattgaagatgaaacagaaacaaatttaactgaaaagaaaaacaaaaaagaaaataaagcacaaaaaattctgagtactgagaatagtgaaaataaaatagaaaatcaggacaatagcaataaaataactttaaaagaaataattgaagaacagcggcaagtaaaggaattagcaaaaattttttatattttgaaaactggaaaatatcccaatgaaattttgaaatggaaaaaggttaattcggaatactgcctaataaatggcgcgatttattaccaaaaagggacagagaattctgaaaatccaaaattaatcatacctcactcattaagaaaaagaattttttgtgaaatacacgacaaaggacattttggatttgacaaaacatggacagaaataaaaagcagattttattgggtcggaatgaaagaagacgtaaaacttttgattgatgcatgtgatgggtgtcagagaaggaaagtccaaccaggtcaatcaaatttctcaccaagtgttccgataaaagcaacggaatacccatttcaaagagttcactgtgacttaatgggcccacttaaaaaaacagaccgtggaaatttatacatttttctgactatcgatagtttttctaaatggataacagcaaaagcaatttctgatcaaaaagctgagactgtctccgaagtttttgtagagacagtaattcataaattttccaccccagaaatagtagttacggaccaaggcagacaatttacttcagaaatatttagtaatttatncaaaaatttacggttttgagcatacaatgtcaacggcttatcatcaacagtcaaatggccaagcagaaggctcaatngagaattgtagctaatattatgtcacaaata

SEQ ID NO: 69467 - DNA, 2095 bp, Heterodera glycines
atgtataatggaccggtcgttcttccattgagggaagcggatgaacccttaaattgggaaaaatttgtcaatgacccaaatttagaattggaggaaaaaacggaagaagaaagttctgatgaggaagaaaaaaatactgagattgaaaaattaaataaagagaaaatgcacaaaaagggagctgaatttaaaaaatcactgaccaaatttggatttgaaagcagtgaggaagagcaggaatcacaaatcgcatttgtgagaaatgtgaatgaaaatgaaggagaaaatgaattggaaattttaataaatgaaaatttaatagaggaatgggaagatccctgcacaattacggaaatatttatagatggggaagcaaagtttgcctatacgagttggccagaagcaaatttgatttcgctgacttcactaatgccaatcgatttggttcaggatcattgggaagtgtttacgaatgattttggaaaggattatgtgattggaaatttattggggaccaactttgagctatttataaatgaagaagtggacaaaatagtgctcggaatccaaattcaatttttattaaatgatgaatgggattctaaaatggaaaatgaaaaagaaacatattgggaaaaattgggagaattaaatggacaaattcttgaattgcaacgaattcctgatataaatattgcttacaaagaaaatttacaaaaaaataaaaatcgtgaaaacaatgaacaaataaatggccaaatacaaattaatgtcataaaaaataaaactacaaaagttggggaaaaggaagaaaatttggaaataatactttcaaatgatttaaataataataaaaataatgaaagaaataatttggaaaatttgggcaaaaatgttgactatttagccatgcaatcgccaaatctgcctccggtcaaagtttttgaagatgatttggatgaaaatgaacggaagttaagggaacagatcgataaattgaaagaagaattggaaaaaacggaagagaagaaaaaggagattgagaagagaagaatggagcaaatgaaattggccactgtggacgaagttgtccttgaagatgaagaggaggaagaggaggaggaaccaacctccaaaaagtcccgtcttaatccgacggcgacgaaagaaattgtgcaaaaaataattaatgaaaaatgggttgccaatgatttggtcatgatcgatccaagagggatcaatgatcggaatggaccggaagatgtgatcgaaagtcggagaattgaagatggaataagagcaaaaaataggagtgtaaatgaaaaagcaatgcgagaattcgtgatgacgaaaacatcgctcgatcatgcaaaagaaattaggacgagagcaatgaatgaagtgaaatatgctgaaaagccaactgatccgtcaaggcttttgagaggtgaaattcgtgcggcggaaatggacatttgcgaaaagcaaacgaaggcaattccgcctgaagggaagcgattggcgatcaaccaactcgaaactcccgaagaggaggccaaaagaaagcaattttgtgcgcgaaccccgccaccatttcaaaatctgatggcacagcagtgggctcaaaagagagaaaaagcggaaaatgaagtgataagcccagaaaagttggaaggaattttgcaaaaaatcgaagaaatgaaagggaagatgaatgtgatttgtgaagaagtgaaagcgttggtgaaccaatcgtccgtgagcagtgatggtgaacccggcacttcgaatttcaaccgctgggaagacaatcagtggcgcaatcgcggacacagagggcgatggtcggcaactcctcgttggcgcgggcgagcacgacaacaatttgggaacgattggaatagtcaaggaaatggattcggaacggatggctactcataaataatttggattcttatcgattaaaatgatatagaaattatattttacatattatatatttaattgtcaagtcgtaattaatttttgttgcattttttttaattttcaaaaacaaacaaaaaaataacaataacataactaaaacaaaattaaa

SEQ ID NO: 69468 - DNA, 456 bp, Heterodera glycines
atgtttcgcggtccgttcactctaattctctcgggggctaccgggagtggtaagacccgttggctattacggtttttaaaacatcataagaatctaattgaaccaccgcctaagaaaattctttattgttatggtgagatgaatgatagtattttaggattaatcggggagggtgttgagacttttaacgggattccagacatgaataagattaaagaacaggaaaaaccccttttactgatacttgacgatttaatgcttaacatgcagaacaattttcttgatttactctttaccaggggctcccataattggaacgtaagcgtaatttttgtaacccagagtctctatggtcgggacattaaaacggcaagagccaacgcacattatctggttttaatgcgcaacccttccggccaattacaagtgagaacattggggttgatttctatgtaa

SEQ ID NO: 69469 - DNA, 1459 bp, Heterodera glycines
atgactgacaaaagtaaaagaaacacgcatttgctttttgctcgattcgcggaggaaactgggcgtttcggtgacatggctcagtcgatgaagcaggtgaaaggaaaacacaataaaagtgtgaaccccaatttcatttttgtttaaggtggtcgaattggacgccaaactgaacgaaagcgaacgcaaatcgttggccgtcgcgtacagaaaggcagtcgctggacaacgttatgcttggcgagccatcacatccatcttggaaaaagggaatgatgccaccgagagacagttggagatgaccaaagagttgctgaacaaaatagagcgcgacgtggaggaaaagtgccgagaaattgtggtcagtggttcagcagttttccagtgaattttcctccaaattaataattttcgttggttttcaggatttgttggaccgtcttctgctcaaagaggctgccaatgacgaagcaaaagtgttctacttgaaactgaaggccgaccacttccgctacttggctgagacccgagctgagaacgccggtaaaacgacgcatcgaaacggaaaaaggcattggttaaacggcaatttcttattccagatgttgtcgagaagtcaaagcaagcgtaccaagaagcatttgacatggcaaaggacaaactcagcccattgcacccgactcgtctcactgtggcgctgaactttgccattctcttattcgaagtgcagaacttgccagccgaagcttgccaactggccacacaggtggacgacggacatacattttaaatatcaatcgcttggaattttgcaggcttatgaagacgcttttaacgaaaaaaaggcgaaacccgaggcggcttgccctgattccgtcacgatcatggagctgttgcaggacaacctggagtattggggcgctgccgcggattagaagcaaattaaacgatccctatgtattgtatataattgttcccaatgtgatgttctgtctgtctgtacatattgctctattccataggcccatttgctgtccttcaattcactcatattttgtcgtgatttgtgtgtgtatatgtattatatatatatatatataaatggaaaataattaaacatttttcacctttcggtaaattttcgtttacaaattttttaagttccatttagaagaaacgactaaaagtgatagagtacttttgatcgcgtccagacatttgcggacaatttcgggaaaaatataaaaaatttataaaatttttttttttaaatgcaatgcaaaatttggactcatcacagaacgtttcttctaattttagatataaaaaaatattttgaagatatgcttaatcatgagcaaaatttactttcactatttcaaattaacaattcgtaaattagtccgttcggtttggtgctgtaacatttcgacagtggctgatttcgacagagaataaa

SEQ ID NO: 69470 - DNA, 711 bp, Heterodera glycines
atagaaagagccaggttcgatgaagttttggtaagccaaaaaaaaatccaaacatttaaaaatctataaaaaatttaaaaatgagaattcatgcgagattttctggaaataagcttaatagggcctagttaagctgtaaaaaatttggggcgatttgaatgagaatagaaagagccaggttcgatgaagttttggtaagccaaaaaaaaatccaaacatttaaaaatctataaaaaatttaaaaatgagaattcatgcgagattttctggaaataagcttaatatggcctagttaagctgtaaaaaaaatttggggcgatttgaatgagaatagaaagagccaggttcgatgaagttttggtaagccaaaaaaaaatccaaacatttaaaaatctataaaaaatttaaaaatgagaattcatgcgagattttctggaaataagcttaatagggcctagttaagctgtaaaaaaaatttggggcgatttgaatgagaatagaaagagccaggttcgatgaattttggtaagccaaaaaaatatccaaacatttaaaaatctataaaaaatttaaaaatgagaattcatgcgagattttctggaaataagcttaatagggcctaattaagctgtaaaaaaaaatttggggcgatttgaatgagaatagaaagagccaggttcgatgaagttttggtaagccaaaaaaaaatcc

SEQ ID NO: 69471 - DNA, 339 bp, Heterodera glycines
  unsure (1)..(339): unsure at all n locations
atgagcaaaaatacctcaacaatgttattattttctctattagcaaaccgaatatttcttgttacgagcggtgattagtgaaaattaataaaaataataattcatttaatctatttcaagcctaaaatgggaaaatattcattttctaaattaaatattaatctttcttttcagtcaatgatttgacagaagcaattggttccatgaaggagaaattgttcaccatttatcaaaaatatgacactgactttacgccaaatattccttcaattcttgaaacggaacgtcaagaattttttaacaaattaaacganattacaaacaagcagttccaaactg

SEQ ID NO: 69472 - DNA, 1121 bp, Heterodera glycines
atgaaggcccactccccatggattgggcaccaaggcgatattggagaggcaggcctgcgaggcccacccggtgaggatgccattggctatgcacgcggtgcaactgggccacaaggcgaacttggcacgccaggcccagtcggtgaagaaggcccgcccggggaacgtggggacgactcgccaccaggtgacgcgtcaaattaatatttttcgagaatttttaatgttaattttttaagggcaacctggtgaatcaggcccacaagggccgcctggcgagccgggcaaggacggttttcctggcgcatcagggccaatcggagcacagggtgagcaaattgataaaacagtagggaaacgaggagatgaaagtgtagacagataagaacaggacataatcccggacatgattagttatgtaaaaggcatttacatgataaaaacattaaccatgcccaaaaaaataataaatcgcaaaaatccctggctaattaaccttaaaaaatttccacaggaattcctctaaaatctgcttgcattttcaaggacatatcttgaatagaaaaacttactgtacaaaacacaagattcttgcgatcgagaaatctaaaattgttattatcaaaatttttaatcaggcgccgatgcagaatattgtccttgcccagaacgctctgatggtcaactgtacgagcagtcaaaacgcactcacgcagaaccatctgcagcagcagcggcaattggaactgatggaattggaggtagaattattttaaatcatatttttattttaattagtctaaaaaagatcattaagactaagcttcgattgatgtcaaatttataaaatttggttgactgtgaagaaaatttatggcttctaagattttttgaatttttcttaaatccttttcctatgtttttccattgaatttgcaaattttagcaaatcctcatgctgaattcgctgccaatgtccctgaagggtatgagggctattattcatatagcaaaatggcacatgcaaatacactccgaagacgccatctctgataaagcaagttatgacaaaatgtcttttcggatttgttgttcttattttaaaatggttagtaattaaa

SEQ ID NO: 69473 - DNA, 775 bp, Heterodera glycines
atgagcgctaaaattatcagagtgccgaaaatcgcatgtgatctaagcctagcaaaaaatggtgtaagtaaaaatcgtaattacgctcaaaaagcttctcaaacaattttagcgcatccaatttccttctacaatcgcctttatacatcccattatgagcgctaaaattatcagagtgccgaaaatcgcatgtgatctaagcttagcaaaaaatgatgtaagtaaaaatcgtaattacgctcaaaaagcttctcaaacaattttagcgcttccaattccttctacaatcgcctttatacatcccattatgagcgctaaaattatcagagtgccgaaaatcgcatgtgatctaagcctagcaaaaaatggtgtaagtaaaaatcgtaattacgctcaaaaagcttctcaaacaattttagcgcttccaattccttctacaatcgcctttatacatcccattatgagcgctaaaattatcagagtgccgaaaatcgcatgtgatctaagcctagcaaaaaatggtgtaagtaaaaatcgtaattacgctcaaaaagctcctcaaacaattttagcgcttccaattccttctacaatcgcctttatacatcccattatgagcgctaaaattatcagagtgccgaaaatcgcatgtgatctaagcctagaaaaaaatggtgtaagtaaaaatcgtaactacgctcaaaaagcttctcaaacaattttagcttccaattccttctacaatcgcctttatacatcccattatgagcgctaa

SEQ ID NO: 69474 - DNA, 705 bp, Heterodera glycines
gaacggggaagtacggaagagcgcagcgctgttggtgaagaatggtgtgctacagggagacacgttgagtccgctgctcttctgcctctcagtggccgttgtttcgtcttcagtgagaaaactctttgactttgaagttctcataccgggacgaggtgtgatgcaacggcagaaccacctgttctatatggatgatttcaaagggttcgcaccgagtgaagagtccttaaaccggatgcttgtaactatggagcggaccgcctcagccgtagggttgaaggttaataagaggaaatgcgccttagtgagtacccgtgaagcggccggcgaggcgtcagggaatgagattccgaccctcggagcccacgacacttataagtatcttggagtcgaagagaggatagacatcgtttttgaggatgcgtgggaaagagtctgtgccaagatgaatgagcgagtgaggtccttgttacgatcggaaccgacatttggtgagcttagaaaagccatcagggtgacggtgaccccagtagcgaggtatctattcctcaatgtaatcgctggcgggcctagctggggaagcgtcctagcaaatgcccaagattttgacacgcgtgtccgtggcctcctacgggaaagagtgagtgatgagcctggatggcggtttaagcattgtaacgctgatcgcctgtacctccggccaca

SEQ ID NO: 69475 - DNA, 407 bp, Heterodera glycines
tttgtgggttctcgttatcgatcgcagccaacgacgaccgagggacaattagcgaagggaacgacgccgccaattccccaaacgtcacaacagcagcaaatacagcaggtggagggggtgaggaaagacaagaatggaacgaagtgggcaatgcttaaattcgtttcccacccttttagccaatgaccatcagcaaaccgaaccagcatcacaacgccaacaccggtggacaccgtgccaacgccagcttgtcgccggcgctgggatcctccggtttcggctcgtccgcctccagcaacgcttccgcccaggtcgagcgcgacctgatcgacctcttcgacgagaagtgttcgattgggccgccgctcaaatggacgccttcccctcctccgcttcaacagcaccag

SEQ ID NO: 69476 - DNA, 312 bp, Heterodera glycines
catgaagaacccccgattgagctcccgcacgagagcaaaacgaccttcaaaatcccccgtatgttttctctcttattttccttttctcccaatcgatcgaaattcgagtttaaataatcccacatttaccggagcgcaaaactgtgccgtttgaaattaatttgtaatcggaatgctaacaaaaagtattttactaatgttgtttttaatggtatccgttatccattcctgtaagcatacatatgtatatgtatttgtttttaaatttaatttaattttttattttaatttattttcgtttaactgtaaatt

SEQ ID NO: 69477 - DNA, 899 bp, Heterodera glycines
atgggtacgccccactgtgcagagaaaagcctagtactatctcgtcgtttctctttttctttgtaatttatctctgtttggcgtactatctctttattttttaattgaaaaaacagaattcaatctgatgctaatatcttttcttcaatgctaccaatcagggatgtgccgaatcggaatcgtaatcgtaatcggaatcgcaattaatcggattttgggccataatcggaatcggataatcgtaatcggattttgccttgaaatccgattattacacccctaagaattgacctttgaaggaatttttttagcgagaataccaatgaattttgaaaaaaatgttttctgaaacgaatcttttaatcttattttaacataatgactgaaattaaatttttctcacaaagcagtgccggattaattctccccgatataatcaagttttttgttatttagcaaaaatgtcaaagtctttgaagggttgttaatggtgtcagtttaagaacatggcagccaattcacctatttttgaatcccggacccgaattcgaaccaaaagtcgaaatttgaagaaaaaatttgttgggacattaaagcagaaaagaaccatgaatgaattattactaagttgcaattttcctatcaggtgcgttggtcatccaccttccaaatgcttgatcgttttttgcaaaacaaaacagttgttgggcttctgtatgcagaagacatttcgtttccgaatctaagctatcaaaaaaatatttctcagccccagctacattgactgaaagcgaacggcttttctccaccgctgggttgattgtgacagatctgagaaaacgtttattgcctcagaatgtggacaaacttttatttttatgattttgattatgaataaa

SEQ ID NO: 69478 - DNA, 73 bp, Heterodera glycines; identical to SEQ ID NO: 56843

SEQ ID NO: 69479 - DNA, 135 bp, Heterodera glycines
atgctttatttaactatggcaccgaatttgccgtgccaaaacggttttcctcctcgtccaagtccaactcctcctccagctcggcatcctccgtctgcttctgttgtgccgttttgcgcaggaaatggtgaccat

SEQ ID NO: 69480 - DNA, 213 bp, Heterodera glycines
atgattagtccaatcactatcaatggcattccaacaccgtggcaactgctcgcgttcttggctaattatgtaaattaaaattgttaataagtaaatatttaaaatttaaattctaggtccttgaaaatgggtgtatccttcaaaaaccgggttcaaatttcaacactggaactcttaacctttcggcttgctattaaatatatttaattttaa

SEQ ID NO: 69481 - DNA, 1466 bp, Heterodera glycines
  unsure (1)..(1466): unsure at all n locations
atggtcttcgtcaaatgcttgcttttcccgtccattttcgccgttcttttgcggttgtgcatcatcagcgttttgcttgaacacgggcacggttacggtcaattcggtggtggtcgaccaggtcaattcaacaccggtaatgaccatttacaaacatttattaaaaaattgctttcaaccggaaacatggccacggtaattaccgtataataaaaatgggttaattaaaaattgctttcaactggaacctaaagctttgcttttcgtaagattatccaaataattttatttaaaaaaaaagaaaaagncatttttatataaggnacattgattgtcgctggtcaaacgcaaattttacgaataacatatagaaaaaaagagagaaacaatgtccttgaaaaattaagtacgcaaaattgctcaaaaaaaccatgctgcctttttccagtatctttccagtacacacacacatttcagtattcccgtaagcactgcactccctcccatttaatgcgttgtttttttaatcattttttttcacttttcatgttagctgctgcattgaagtgcaaggacgccctgaacacggagatattcacagctagtcttgatgaaaaaaaaatcaaaacaatgtgttccaaagccacgcattgtatggcaatgttttgttcatccgctgaaagtgattgaatttatctgacgaaaaatccacccaaaaattcgactaaaaaagtcaccaaaatcccaaaaatagaaaaacaaaaaaatcatggtagaagatacaaaaaatatagaaacaatttttttaaagtctttttaaggcgatttcgagtcagaatcccagccctagtgaatatgggaagggatttttagctgtttttgaagtttgttaagaaaattgcttttaaaattttcaaaccccccccccccgggcgctatgggcctgttttcaagcacttttcatcgaaacaagcggcaaaaaaataattaagtcagtgacctaaatattattgttagaacgttcattttggcttgcattatttacttaaaaaaaattaaaattttgtgaacaaaattatcaaaatttaatatatttttaaaattttaattgactattaaattaaagaaaaaatttattcagaagtttttttaaaaaatttaaaaattttaattattttttttttacattttcagatggatttttcttgaacatgtgggcttgttccccttttggtccagaaaacaaagcaaaatgtgaaaaggaaggtcctgacggtgccaatcaaattcgtgccgatgttgaagctacaaccaaaatgcgtgccccgaccgccaccgattggaaatgcacgtgccattttggggccaaggacaagagcatggacaatgaacagtttgtggcaccggcaccgccggtggtgaagcaaaagaaaggtacagacagaatgccaaagctgaaactatga

SEQ ID NO: 69482 - DNA, 2335 bp, Heterodera glycines
atgtgtttgcgatgtgcaggtgttttgtgcatttctgctgctcctttttcagtgttttgagtttagaaaacggtgcgaatgttgcgggaacagagggcgacgatggttcagacggaggcccaataccgtttcatttactatgtgatctcggcatttatgaaggcatatcgcgacaattctctgacgtcgtctgttttttcaacaaattttatttgtttcgaaattctttttgctgttcagatggacttaactgcaacacaacgatgagcttaaataggcatccactgactgaccgctgtgaatcgctcttcaagacattccccagtgatcagattgttcctttaaaatcggtgacaaatacccaatccatggcgctactaatatttttgaaaattgatcaattgagcatttcggctttcctccgtttttagtatcgccgtgatctccatttgtaaattcccaaaaacataatagtaaaaagattagtgtttgatgatctgtccattctcgccatttgtttcggtttttgcaatattattttttccttcaaattggtgccatttttgtctaattatctctaagctgtccgttcgttcgttctctttggcccattgaaagtgtctgcgatgtccggtccgttttcttctcatttttctttttccaatttgattttttagccgcctttgaacgtttctttgtcgcgtgtgatattcctgccacaatggtgcccaaatatgcgagtcgattcgtcaaggaacgcattcatcccgcactgatgaaagacctcggtgcgagggggggatgctcaatgagacgccttgcaattagtgtcttaactttttgtttgcatcctttaaggcaaagacgatttgcgtgagttgggcgtcacagcgttgggtgaccaagtgggccaactaatcagagacaatcggaatttgggttatacttaagttggcgataatgcgctacataaagcaatgcgaagggaatccgccggagtttaattcggtcgaacaatcaaagcgaaagtcggagtcgcgcggaagggaaactgccgattttgaaagtgacgaaggtggacgaacgaactcaaaaaaaggcgaaaggacacacatcttcagatgaaccgatgctggtcgactcaaactcatcgagcagtttcaaggcccccgaccgagaagacatttaccacataaaaatgccaattggaacattgccgaaaacgcgtaaaattttggaaaagaatcgctctcttcgcgacagaggtgcgttgtttttactggaggatttgtctctgaattcgtccccaattatggcagcttatttgtaggtgtgcttaagcgtggcgtttctggggttcgacggtccggcattgaactgaacaaacctctgaacacaatttcgactcggtccaaagtcatcggtcggaaggcaatcacgcttcaagtcagaacattttgtgatggactttgttccaatgtttttaaaggacaccgacatcacttcctcgacggcatttgtccctttggggtcaatgcgaagcgattcgatctctacgaaaacgaccgttgtggccgacaacactggcaactcgagaccgtgggttttgttaatccaattgcgcaattcgtttgttttagtgtgagtttggcaaatcgttttgcctctctctccggtgctgcgccaaacattcgctttcaattggggaaagtcgtcagtccctccgtacaactcatcccatcgcgtcgccccctcgtccgatacagcagtgacattgacgacttctccacaaccgccgagccattcagcgaacttacaacagaaatggtcagaaaagtgcgcaagaataacagcgtaacatttcaaccgccggcgttccgtgctccaatcaccgaacgtattcaaattgttggacgaagccgaagaagtcgtccggtgatcagcacaacgcggggcataaaaatggtggcagttggaggcaattccgggcgattgggacaaccgacgctgggaaaaaggacttcaattttggatcggatcactgtgaccaaataaacaaacggtggtgagtttggaggtgccgctgattcgttgggttgtattaacttttgcgataaatttgtttgtatccttcgcattgtttgcatttccttccattccctccctttcgatttgtttacattcaaaattattggatgatgctttcttctttttacaataatatttttgtgtgttttttccaatacgcataaactatcggtacaattttattaagttggtttggtccctccgctgttgtttggccatcattttacttttactctttcggaataaa

SEQ ID NO: 69483 - DNA, 416 bp, Heterodera glycines
taaatctgggcgcatcggttcggggggactgaccgccataagagaatcgattttttcaagtgtccgtttggggtactcaaacaattatggggagcaaaaatccaaagcagaattaaagtacaggctatagggaagctattcccgaaggattcggcctccccataaatctgggcgcatcggttcggggggactgccccgaaaacaaaaaaatcgattttttcaagtgtccgtttggggtactcaaacaattatggggagcaaaaatccaacgcagaattaaagtacaggctatagggaagctattcccgaaggattcggtctccccataaatctgggcgcatcggttcggggggactgccccgaaaacaaaaaaatcgattttttcaagtgtccgtttggggtactcaaacaattat

SEQ ID NO: 69484 - DNA, 385 bp, Heterodera glycines
cggtgcaccccaaaacgtcgtcggccgaaacgtcgtcggaagactttttggaccataaatttgttcactgtcaatcaaattaagaattgttggtgttgttcgatagctctatgtgtttattattaatttgcaaaatctcaaaaattttggttaagtttcaaaaaagttatgtccagaaggaactcaaaaacccagtaattcgaactttttttgctctgatttttttgtgcataaataacaatttttgaaaatttgcaggctaatagcatttttcgaatgctttcgaataataccaagaatgtttaatttggttgagaaagataaaagttatggtcgaaaaattcgtacgacgacgtttcggctgacgacgttttgtcctactccg

SEQ ID NO: 69485 - DNA, 149 bp, Heterodera glycines
ttataaacagggtttcactgaaaattagccaatttatatgtaaagttttgaaaaattttatgggaatttaatccaattcttaggggtgtaaaagtcgcgtttcgcgccaaaaagcgaaatgcgaaacgccaaaaaatgcgaaaagcgaa

SEQ ID NO: 69486 - DNA, 497 bp, Heterodera glycines
taattaaatccattccttcgggggaccgtgccgggtgccgcggggtaagcagtgctggttcgtttcatcacggcaccgaaccttttggctagtcagcaatcgttgcttaacttgccagatcggacgggtgcgcatgattccactgttccaagcaccccaccaaaagcaaaacgatataaccaaaatataaggaaaaattttttaaaaaattttttctccatcttcctttttgatactaaagcatcagagtgctaaaattaagttgtaaataaaatttggtgcgctttagagcactttctgaaaaaaatatttatgaaacaaaaaaatcgattttttcaagtgtccgtttggggtactcaaacatttatggggagcaaaaatccacgcagaattaaagtacaggctatagggaagctattcccgaaggattcggtctccccataaatctgggcgcatcggttcggggggactgccccgaaaacaaaaaattcgatttt

SEQ ID NO: 69487 - DNA, 2513 bp, Heterodera glycines
atggcaaagacgacgcaagcccatttggccaagaaaagtgagttttttcaacaatttttactcaaaatcattttttaaaatttcagccgctccacagccgaatcccaatgccgaaacgccacagcaagacgaagtagggccgtcaacatctgctgcaccggccgaagaagcgatggagccgccgccaccaactccaggaccagtgccaacgccagaaatggacgaggaaattttggaatttggcttttcgctgccatcggcatctgtcacaccaatcggcgatttggtgccgttttcgacaacaccaactgcgccaatggacaccggagagacgaccccgccaccgctggccattgacgagcgatcagagcgcatcgaacaactggagaagcagctcaaggaccgggacgacaccatcaaatttctccacgagcaggtgcgcaatcgagaagcgctgatcagtgatctccgtcggcagctggatcaacacatggcaccaccgatggcaccaccaacgaccagcaaaagtgagtgaaatttttccttttttaatttcataaaatctgatcattttttcaattttagcaccaccaaacagaggaagaccgaagaaaagactggaagaactgcagcgcagcgccaggcgcggcatcgtcgaccaaattgtgggcgtcatcgatcgtgatcgctcgcgttccgcgagccacgcatcgctggatcggatccatcgggatatccggcacaaattcgcgcactacacgccaaagaagggccaggagcggaaggagtggatggaagctgaggatgggctcctgctgcttgcccagcttgggacacagatggcttacaaacggatgaaggcgactctgaggctgatcaacaggcgctttgacactttcccaccattgataaaggtacagtttttcagaattttttcatccgaccaatttttttttgggtgatcaaaatcaaacgaagaatttgctcagctttaaaatatgatgtcatttcaacgccaggcgggcctggatatgtttgctctgacattgccggggcactgcgtttcagattgtccacggcaaaggacaatctgatcagcctgatccctgcccatggtctgccactgaaggtcagtggcgatcacgggcagggattcacaaaaattaccatttcattggcccatgcattgcgcccaaattccccttccaacaattttgttgcggctgtttttcccgcaaaagattcacgaacgaatttgaagaatttctgcggatcgttgtgggaacaaattgagcatctcaatgaaattgacgggcgcgaagtgaaatggtgaaaataaattttgttttttgattttttgaaaattttccaggtttcttggcggtgatctgtgttttctgtgggccatcattggccattgcggttcggcaatgacagcattcccatccccagtgtgtaactgccgaagagaccatctgatcagttcagcaaaatgccaaattcgaactgtgcaagaattggagagacaagccgatcagttccagcagctgacccatggaggagacaaagcaacggcagaggctcgggctctgacgaaaggcattgtttgtgcatctctgctgccgtcgatcagttttgagcagatgctgttggccccattccacgtcttccaaggcctcggaaatgctctgatcaaggagttggaagcgggagaaaatgccgaaattgctcagcaattcttcagacgaataggggcaagaagggaagcgttcagaaagcgcgacttgacggggaacagcatccgcaaaatcctcgtccatgccgatcaaatggaggcccttttcgaaacggaatgggccaaaacaatttgcaaaacaatggcacatttggggaaaatccaaattttcaccaaagtaattggttttcatttttgtggaaataattttttttaatttaaggcccagccattgtctccaggtgatttggatggactggagacggcagtttaccagttcaaggcatttctcgacgaacaaccaatggtgcgaacgcttctttcaaaaaagacaaaagcccatttgctgcttcaccactttgttccgtttgcgcgccaacacggatttttgggccttttggatgagcagggtgggaccatatcatttttgggggttcaattttaaaagttgtgattttttaggagatgaggcactgcattccgtgtggcggcgacttgagcaactttggaagacgatgccggactctgaacaaatgcgacaacagctggagcatcatttcgtctcgaattggctgctggacaccggcagactcgacgaattgaagctggtgagttgatggaaggggatttaaaattttaatccaactaattaagcgggaggaggaacaacgggagcaagcggaggaagacaaaacgaatgaagaaagtgatcaagatgccgacgtcgatatcgttgactgatcgaggattgatggttatttttcattacacatgacaa

SEQ ID NO: 69488 - DNA, 716 bp, Heterodera glycines
atgttgggcagcgtccacaagtcatctcgaacgacctgtgcccatcagcggacgggggcatttggtggtgccaacgctagcccaacaggacagcaggtaggtggtgaataggaatcacttgggtaatgatccagcagcaggttcacctacagctaccttgttacgacttttgcccggttcaagccactgcgattaaatcggttccagtctgcataccgaccgaagccggaacactaaccgtccccgaatttctcgaaatggctcagtcccgggcagcgacgggcggtgtgtacaaagggcagggacgtattcagagcgagttgatgactcgcccctacaaggaattcctcgttcacggacaataattgcaatgtccgatcccaatcacggcaaattttcaccggtttaccaacccctttcggggaaggacaagcacgctgattttgccagtgtagcgcgcgtgcagccccggacatctaagggcatcacagacctgttattgctcaatttcgtgcggctgaacaccgaaaaatccctctaagaagtttgcccacagaagcaatgagccaactatttagtaggctagagtctcgctcgttatcggaataaaccagacaaatcgctccacgaactaagaacggccatgcaccaccatccaccgaatcatgaaaaagctatcaatctgtcaatccttacggtgtccgggccgggtgagt

SEQ ID NO: 69489 - DNA, 121 bp, Heterodera glycines
atgcttttggggtgcttccatacgttggagctgtggtataccgctcagtgctgcacgtgtgaaagcctgtgtatggctgctgcgtggcaatgtgtcggtggcgggccgcctcgcttggctg

SEQ ID NO: 69490 - DNA, 696 bp, Heterodera glycines
atgccaacttctaaccatgggaagtatgaaatgggtcaacagtccgtcctccgatgccataacccacaacaaaaagtgttgaacaccgaagtgatgacgaatgtgcagcaaatcgagcgaagaacaaagcaaacggtgctgagacgaagccgggaaggcaaacaaaggcaggggacccttcggaggagcacagggccttaaattaaaaatttttgaattaaaaaaaataaatttccaacccaatcccatcaaaggggaaaagtgtggcgtaaagttggccattcgaatccaacgcgagaagagagccgagcactgtccgattgccatccaccgattgagggggtccaaagtcaaaagaaactgaaaaatgaattaattaatttgaggtaaaaatttactaaaaatcgcaaaaaaaaaattcatgaaatttcttttgaaaatttttaaaaaatttcagggggctctaattgagagaaatctgggaatatggcaaattatttgatcagaaatgtacctagttgagtgatgaaaccaagcgtagaatgggcacgtcctcgtccaaattcgtctccactcgcctcactgtcgtcaggcgttcggtctggcaacaacgcattgaaatcaaattgaatcaacggactgtcgaccgccgatgacacgtcgtaaagcctttaagacggaggatcgtttaataaa

SEQ ID NO: 69491 - DNA, 678 bp, Heterodera glycines
caaccgcatcaccactccgtcgttgtaccaacacatgctcaacacgtacagccacaccatccgacgccgttggccgtgccccaaccgatgcgtccgtcgccgccgcccctttcaatgcccggcactggcgccgcaaagcaccactaccagtgcaccaaagtgcgggcacacaacacatttggactcaaatgccgtttccgacccgacggactcgcggtggccaccacatcagctgaccaaaccgccaaactgtggagttgcagcagcaacacgcacaagctggtcggtgcatttggacgaatttagaaacttcgtaaattataaaattatttcgggatcagctcgccccccccccctcaaattctcgcgggaaaacggggcggggggtgggagacgtagtacaaccaattatttttgtgtgaggagtaattaattaattgttcaccgtgccctgagttgtcgtcggattgatcaattttcgttgtttgttttcagttgaacacttactcagtgccgggcaacaaatgggtttgggactgcgcatttaccaacgattcaagcgtaatattttcttgatggattcatgaaatatgtatgtaaaatttgtttttccagcatatggtgaccgcttcgtctgatggcattctccgaatgtgggagttgaacgcgtgcaaagtg

SEQ ID NO: 69492 - DNA, 530 bp, Heterodera glycines
gttaagttagtcctgtaccgggggagtatgcctataaaatttggtacgattttattgcttattgaaagagctagaaccgaagaaaatttttttaatgtaagcctaaactttttggcatgtttaaaaagcaattaaaaattttattcatctttctttttgatagaaaaagcatcagagtgcctaaactagcatgtaaataaaatttggtgcgtttcagagcagtttctgtaaaaatacttatgaattaattttgtaaaaaaataaataaacagttaaaaactcagaatttctaaaaaatttaaaatcaattacaattgtcattttttcaggttaagttagtcctgtaccggggagtatgcctataaaatttggtacgattttattgcttattgaaagagctagagccgaagaaaatttttttaatttaagcctaaactttttggcatgtttaaaaagcaaattaaaaattttattcatctccctttttgatagtaaaagcatcagagtgcctaaactagcatgtaaataaa

SEQ ID NO: 69493 - DNA, 680 bp, Heterodera glycines
atgcattctggccaacttcaaatcccggataatacggtcaaaaaggtaaacaaaccacttttgaatgcaataaaatgaaagcataaattggacagtgttaaaattgtcccaattttcttcatcccattgaatggccgccgtctccccaatttggcatcggttgatcatccatcggcggtggtcacatttatattcgtttgctttggtcagtaacagcttttcaattggtccgttcattcaccaattcaaatggcaccattgacattggcaccgcatgaacagtaaataagaaatgttctgatttggagggttcaaatcttacaaaaataaaaaatgtttttatagaattatcatccgttgaaacgaagctatcatcgtgtatttacgggctttaaacggtctcaatttttattttaaaaatttagaaaacccccaaaaatttaaaaattgaaattttttttttattttaaaaacagaaaaaccaaaaaaaaagatttgtatttgcattttatgaatgttatggcataatgttcattttttggcaaatgaaatattaaattttcagaacgcatttttttcagtttcacgccaatcaaatcaaaactttctcgccttcgatatctttagagaacataattttaatatttaatcatttcctaattacttttatattaatacaa

SEQ ID NO: 69494 - DNA, 601 bp, Heterodera glycines
atgaatcgacgtttaaggaaaatgtgagaatttttaaatgattgtttttttcggcacttttacagtttaatgagcccctacgaaaaaaatcacagggatggaggggggattttggggtaaaatcattggtaaaaaaccaactcatagtgtgaaaaaacagaaatttacctcaaatctcagtacgagtttgcggtttccggcttttgatttgtaattttttcaaaattacctactccctacttttgtttttcattgggcccttaaactataaaaaagtgccaattttctctttttaagtaattttttacgtttgcatttcagttggatttgtggcgacgtttggatggacattctcccatcttttgaacgtgctgaacttggcctcaaaattgcattgctttcttaccgttacgatgctttggtggacaaacattttgacggaaaaaaagaattgacaatttggagaacaatcgaaatttgcgagggcattggaccagaaccgaaactgtctgtacagatcgatgacaaatttgtggcatttccgttgccggagcgtccgctgccaaacaaaatccgctttaattttctctggattaagtaa

SEQ ID NO: 69495 - DNA, 480 bp, Heterodera glycines
atgtcacgttatgatggtggtggtggtgatttgctgttgaagcgatgcccaattagtgaaaaagcgtcggcggatcaatgggaaaacgaccaaaatttggacgccaatttgaactttgtccaatttaatttgtgtgctggcaaaagttcgactgggtaagcgtaaaaagataattcacagttcacacctaattcaaattgtgtttaatttcaggccttatggccaccagcggacgaagaagaaaaagcgggtcaaagcatcgaaatatcgtcggattgcgcggaagacgaattaattacatttgagaaatggccgatctcacacaattggaatttgattttatgccatcattttctctcggaaatgcttttgtgattctttctttaatacatttatttgctactttttttggtgtgcaattttctttagtatcaatgaaacgattgaccatttgtgaaatactttttacttggttaagaa

SEQ ID NO: 69496 - DNA, 824 bp, Heterodera glycines
agtctttcgtttttatttattttttgcaaaattaattcttaaatattttttcagaaagggttctgaaacgcaccaaattttatttacatgttagtttaggcactctgatgctttttctatcaaaaagggagatgaataaaatttttaaaaatttttaattcctttttaaacaggccaaaaagtttaggcttaacttttttttcagaaactgatcagaagcgcaccaaactttgcagggatactgaaaggaagagaaataacctattttaaatattatctagtcagttcatttaaataatttttatccaaaaaatttttttttgggttttcggggcagtccccctgaaccgatgcgcccagatttatggggagaccgaatccttccggaatagcttcactatagcctgtactttaattctgcgttggatttttgctccccataattgtttgagtaccccaaacggacacttgaaaaaatcgatttatttttgttttcggggcagtccccccgaaccgatgcgcccagatttatggggagaccgaatccttcgggaatagcttccctatagcctgtactttaattctgcgttggatttttgctccccataattgtttgagtaccccaaacggacacttgaaaaaatcgatttttttgttttcggggcagtccccccgaaccgatgcgcccagatttatggggagaccgaatccttccggaatagcttccctatagcctgtactttaattctgcgttggatttttgctccccataattgtttgagtaccccaaacggacacttgaaaaaatcgatttatttttgttt

SEQ ID NO: 69497 - DNA, 404 bp, Heterodera glycines
atgctcgctgagaactgtctgcgaacagttcaagtcagtcgcacttcagtgccaaagggttgcgtcgagataattaaaaagtgcttgggaccgacggatcatttgcgaattgcgatgagactaatgggcgcttttcgtctttccaaatgggacattattgtttaaatgcgaaatcatttcagaggcaatacgtgaaacttggtagtaatttggccaaaatccgagacaatgagcaagtgttggccattacgccgtgggaaagtgcaacagatgcttcggactcagcagagatcacggcaccggcaaatgccgacgaacacccacaaagttggcatggaggaaggcactttgtcgaagtccaaacgacaaaaagttgtacattaaatgccgaagacggacgctag

SEQ ID NO: 69498 - DNA, 855 bp, Heterodera glycines
  unsure (1)..(855): unsure at all n locations
catgagtccacccttggccacnccgtcttcgaaacggcttttggcggtcggttgaccaatcggacatttcttggccaacccaatcatcnacattaagccaaaattgccgtgaacatttgctacgggcgccaccatccgcaaaattgagatgatgtacgcgttgaatggtgtgcttctgctgatgctaccaaatgcacttggttcttctccccnccactgtttgaggtgccgacatcattttcaacccttccgccactgtcagcggactcagcgaagcactttggcccatcgaagcgcgcaacgcggccatcgccaaccacgtgtttacagtgggtgaaatgccatttggaaatggcatttcttttgttggcattttgctcaggtggccatcaatcgcgtgggcaccgaatcgtttccgaatgaattcacttcgggcaacggaagagccggtgggtgggaggacattttggcaatttttgagagaatggccccattgattggttaagcccacaaggaatttggccatttctacggcagcagttacgtgacagcgccggacggaagtcggacgccggtgaaaattggacgaatttggggaggcaaaagtaattttcctccaaaagggcctctcgaggacgcgcgacggcgtactaattgtggaattggacttgaatttgtgcagacaaacgaaggactcttggggatttagggtcaaaactatcgataacattccaagtaaatccaatcttttgttgctgaaaatctcttcagatgactcaacggttggaaatgtacgcccaaagtctaagcgcagccgcagcaagtgaatatcggccgaatgtggtcaaggagaag

SEQ ID NO: 69499 - DNA, 689 bp, Heterodera glycines
atgatttgcggtaattgcattgccttagccgtttatcagccttatcctgcgcaagattcggacatgaaaaacaccgttttggtcggttaaaaatgacaaaaaaaataaaaataaataaatatttttaggaaaatttggagaatcttttcattgttgtattcacagcagaggtaaaagaaaacagagaaaaaatgaaataaatctattttaaaaaggaataattttaatttaaaaaaataattatctcaaaatttttattttattttttcgcatttaaattgaattttaaaatatatttaaataaatattcgtttaaaattataattaactgcgtttattaaatgtaaaaattaattaaatttatattaaataaatttttaacaaataaaaaatattgaaaatccaatcgtcacatttgaaaacaattaatcaattcaacaccaataattaaattggattatcattcaattcccttttctgatcagtgtgtgatcaaagtgatcgcgctcggttttctgtgccatccgggtgcctatctgcgaaacgcgtggaatatcctcgactttatcattgttgttatcgggtgggaattaattttttttaattttaaatttcaatttcaaagaattttaaatcattttcagtctgatcagcacagtgctttcccggatcaacatccaggcatttga

SEQ ID NO: 69500 - DNA, 1831 bp, Heterodera glycines
caaacagaaggtgcacacaaagtgcacaagctgtgcatggagttcggatggctttttctatgcagtcggcttctttgacggcacagtgtctgtccggtcggcatcaggcccaacagtaggccaaaagcaaattttgcccaaataaatttgcaaaaattgtgtttaatagcccattggtgaggagacggcacgcctggaaaggccgggaggtgaacccgtatgggcactgcagtttgcacaaattgcttccaagtgggatgaacgacaaaatcaaaaaaaaaaaaaagttgaacgaaaactcagcaatcagatcagtggtgaaatgctggtggtggcggattgggcccaatccattggattcttggcccattcacagggccatttggttcgtgggttgtttttgagattttttggcactctgccaactctgagcccattaccggggaaccaatgatgctcgagaattatttctttttccgcgggattgaaaattcgtaagcccccgaacttcttttggactctaaactgactgatcagtgatcactcctgctgattaccattccaaggtcattttatttaaccattatttattgttgcagtcccatcgaagtgacaaacaattggactacgacccgactgcagtgcatttgttcaacaacggatgcttcttcctcaccattggatcaaatcgaatgttaaatttgcacaccgtcgggggtaaacaaaaacaaattgttctcgtcctggaaatcttatgcttaaaaaatccaccggtgattttcattgggtcgagatttgaaaacaaaatttctcgagcatgggtcactaaaaaaatggctctgttttcgagaattttgtttgtggaaattggtttcccaactttgcctataagtatggcactttttttacaggcattgacttgggtgccatggcacagttggatgcttggccatggagcatggtgttgttcaagcaacaatttttggttggtaagtgtggagtagtggccaatgatgggttagacagtaatgcaaaatttgaagttggttgtattgatgggtcgttggtttgctaccagctgatgatgaacacgatacatgcactgcacaaaagtcaggaaataacttttgttctttgaaatggcgagtggcaaaatgcagacaaaaaaacctagcctgaagcgagtgcacgagggatatgtgccgattccctcaaaaaaaattcggaaaccggaattccgaagcccaaaaatgtcgtcaatcggaaatcggcatgccgacacatccctggagtgcagcaccacatccccctccaaaaggaacattttcaatcttttaatttcccagtttttccccagtaaaaaaaaactaaaaaattgtaaatttcttttttgagaaacttggatttttttgttaaatttctctgttgaaatacatttcatctgtttgccctccccttccccaaaaaatgtcaattttaaaaaatatatttttaaaaaagtcaaataactgatccaagattattacgcgttccgcgagaaccagacggatgtggttgtgcagcagttggagcaacaaaagtccacgcgcatccgttgccaagatcttgtgcgaaaggtggccatctacaacaatcggctggcaattcaactcactgatcgggtgctgatctatcgccagtcggctggcgaaagggagggcgaacagttggagtacaagctgatggatcggatcagtcaaaattttgagtgctctctgctggtgatcaccagtcagcatttgatcctgtgccagaacaggcgcttgacatgttacgacctgaagggcattaa

SEQ ID NO: 69501 - DNA, 206 bp, Heterodera glycines
catggtcattcatttgactttgctcagctgaaccaaatgatgcatcacttcgattgaataggtctcaggtcacccatagattgtcacatttttgttggttttgtttgtttttatctcctcaagttcatccaatttctaagaattcagtcctaagttaattgtaatactaaataagccaaactaagcctaagcgagttatctaatta

SEQ ID NO: 69502 - DNA, 384 bp, Heterodera glycines
  unsure (1)..(384): unsure at all n locations
atgtccgaggaagttgacagacacatcgtggagcgttacgaaattcaaaagagactcgggaagggtgaggagtaatggacgttttttgtgggtggtgaattggtccctttcaggagcgtatggcattgtttggaaggcgattgaccgaaaaacgaacgatacaattgctctgaagaaaatcttcgacgctttccgaaatgctacggacgcacaacgtacatttaggtgaacagaaggcgcggaaggacagccattaaataaataaatggaacatgaaaatggaattaactaactacggttttcagagaaataatgtttctgcaggagttccggacggnacccaaacatcatcaaactgttcaacattctcagagcggacaatga

SEQ ID NO: 69503 - DNA, 253 bp, Heterodera glycines
atggagaaggcctgcaaaatttggagagattatatcgattttagtgcgctaggttcgatgaaactttttaaaatataagcctaaactttttggcctgtttaaaaaggaattaaaaatttttaaaatttttattcatctcccttttgatagaaaaagcatcagagagccttatttaacttttaattaacattttgtgtgtttcagagcagtttctgaaaaaatatttatgaattgattttgctaaaaaaataaa

SEQ ID NO: 69504 - DNA, 85 bp, Heterodera glycines
aaactgctctgaaacgcaccaaattttatttgcaagttattttaggcactcagatgctttcactatcaaaaagggagatgaataa

SEQ ID NO: 69505 - DNA, 357 bp, Heterodera glycines
atgcgtttgaacaatcgaaatagacagtttatagaagaaacgcgaatttcagtgaaagaaaattattgcattttggcaaattttgttttgaatttattggaaaaggccaatgtagtggaatatttgcaaaaaaatgatgaaaatattgagtatttttttattcggtattcgactgattgtgcacagaggaacggtgagagatttgaaaaaaataatacaaaatttaaaaaacttgctttatttttcattatctatttaatttaaaaaataaaagttaatatttaaaataaaatttcaaaaacttgagatcttccgacccgaacatttgacgaaaatatagtcggaagacaaatttaa

SEQ ID NO: 69506 - DNA, 716 bp, Heterodera glycines
cagtcgccaacactttggtgcccgactttcacaaattggcctttgcgctgctcagcggactgcccaacgaagtttctttcggtcttaacattctcaccgttctctcccaccccggttagttcattttcatttggacatttcactttcttttttcatttaaggcccttttgtgttgaatttcgccaattgtccccagcttatcgctcttttggtcgccctttgcggcgtttgcgttaacgttgaaggttggctgtggtttctttgggtttttcctttttcccttattaaataggttcgtccaatccgtttttgctcttcgattggtggcgtcgttcttcctgctacgacttcgcctccttttgggccgactcgggcgttgaagaggctcaactttggtcgattgtttataatccggacggaatgaaaatgaacgcgacggggagtgaatttgaaaggaacacagcgcaactgatgggcgacgaccgactcgacctcgacagaccgaccaattggagggtcttcaacattttggccgtcttccacaatctttcgtttgaggaggcgaacacggcccttatgggcgaaagtcacgcgcttgtcaggtcgaaattggatcatgaatttcagtttgttttttaaattatttttcaggtttttgctgctttgcttcaattgtcggtggcatttgctgcgtaaaattgcctatgatacactga

SEQ ID NO: 69507 - DNA, 596 bp, Heterodera glycines
atggctgacacagcgacggcgaaccgccaaggattcgctgtcgttggcccatttgcgacaacactccgcgcactttgtggtccatcacaactcatttgcaagtaaacaatgatgagtaatgcattatgaaaatggatactaaatgtgctcaatggtcaggatatccattgcactgaaaatgcgttggagtcggcgatgctccaacgggtggagatgggctaccacggtacaatctgatcttgaataagcgagttcaaatgcaataatccatcggtgcttccctacaaagagtacgtctatcacattcggcaacagttcgagcgcagtagggaacggccatccgcgcagaatgcttactcagactttgccgcccaagaagcgatacgacggcacgcatttgccaatttgcgcaaagagattacggtacgtacagtgcatgcagtgcaagtattctgtaggtattggcgtgattttccattccgtcaggaagattcggagggtccggtgacgcgaagcattcgcctcacttcagcgctcattctgcgcaacatttgtcaccattccgtcgccggacgtcgcaaactccgcacgcatga

SEQ ID NO: 69508 - DNA, 56 bp, Heterodera glycines
ggaagctattccggaaggattcggtctccccataaatctgggcgcatcggttcggg

SEQ ID NO: 69509 - DNA, 391 bp, Heterodera glycines
gtggtgattcattctttcctggactgtgttcacttcttcaatattttacgtttggcggagggtcaatcagccggcaatttccggatcaactcccaggttgtcagtgggttttacgcaaaaaagggaaattcgtccatttcccttttaggctcgtctacaaatactttttgttcatgcataaactcagttacatttttggtattgtcggttacttttcactcgtctttactgtcattggaataaattcggtgttcggtaaaattaaattttctaaaaattcaaaaaaggctttttaaggaattagcagtaatctgagcttggattttggcgtgcatttgttgttttattgcctttattacggtgtgcttggacgtgatttggcacattcatc

SEQ ID NO: 69510 - DNA, 403 bp, Heterodera glycines
ccacttcctcgttgattttcaatgaaatcactttgcacggcttttggatgtcgcgatggtacaattgtggacattcggaggtaaaacagaataaaagatgatgaccgaaacgatggaattttctcaaggaacgttcgaatatgtacagtctttaacgattggtataaaagtgggaagctttcgacgccgccctttcggaaatggaaaattgaggagttcaaagaagcggtcgaatgccatggaaccgatgacgaagttcaaacacgtctttgtgtatgagtgattctccggcacttttaaatatcacagaattccggttatgcacataagtgattccttgctcaaaaattgtctttcacaaacacatatatttctaatacattaaaacaataaataatgttat

SEQ ID NO: 69511 - DNA, 107 bp, Heterodera glycines
  unsure (1)..(107): unsure at all n locations
tgtccgtttnggggtactcaaacaattataggggagcaaaaatccaacgcagaattaaagtacaggctatagggaagctattccggaaggattcggtctccccataa

SEQ ID NO: 69512 - DNA, 855 bp, Heterodera glycines
atgcgcgccattctcttcctggccatggtttgcttggtgatggctgttattcttgagacaggtggccaaaattaattaaaaatttaaaaatattttattattttagccaactcaaaggcagtgaaaaataagaaaggtataaataaattgataataaatattaattggaatatgcttttaaaggaacagttgcaacgccagcaaaaggaaaagcggcgccgaaaggagcagcgaaaggaggtaaagcagaaaagagagagggactaattaatacaaattaactaattaatcaaataattaattaaggaattaaaaaagacgcaaaatcaaagggaaaaggaaaaaaggacgccaaaggcaaaaagggtaaggattttaatataaagcgaaatttaaacagttaatttttgaattttagacaaaaaggctaagccagccaaagggaaaggagtgcctaaaaatggtaattattattaattttaaatgctaattaaaattgaattaatttagacaaaaaatccccagcggcaaaagccaatgacaaaaagagcccaagtaaataattaattatatttaatattgtgccaaaattgccaatttgaagtcaaaccaatggcagcagtgaaagccgtgccaaaggcggcggagaatgctcagaagggaccgtcgagtgcggaagtggtggcggaggaaaacaacttggacactgaggcggtcgacgacttgggggcggaagagtcggactttgaccaattggcagaggacgaactgctcgaggacgacgccatggacggcgaggcggacgaatgggagggcatgggggacgagttggtggacagccaaatggcactttga

SEQ ID NO: 69513 - DNA, 1144 bp, Heterodera glycines
atgagcaacggtccgcgcgaggagcaaaactttcacctgatccgcgttggctttgacgacacgctgcagggcgaactgatcaacgcggcgacaatcaattacaaagtgagtgcaccggcgaactgcttgagagcaataaatgaacgcctcgagcgtctcgaacgggatcagtttccatcccccctgaaaaattattttaaaatcttcaaacacaaatttttcgaaaaaaacatcttagaattttttataagaaaattttaagaaatttaggtaaaaaattttaagcgatttttggaaaactagttttttctcataaaatatgaaaaaagcctgaaaattgtcaaaggatgtttaatttttacttttaaaacttcagtgcataaaagtggagaatggcgatcgaatgccgcagctgatcgagcgtgcgttggacaaacatttgatggacccaactgaagcgcccaactactgcttggtccaattgttgccggacggaagtcggtggcaaatcaattgctgtttttttcaattattataaatacaaaaactatctaaacaattaactacttgctgatcaatcgttttttgtctttccttctgatcaacttgttgtggccaacactcactgatcaatgttgattggtctctcaatcaattagccgatttcattctcggaattctgatcaatcatcttgtcaacaccaattattaaactaaataagacttagtgttttgctcttttcataagttcgccgattagaaaaggatcaatgacgtgaactccacgttaccacttactaatttttcactctattctttacctggcattctcggaattctgttcaatcaactaattgacgccgatcagtaaatttgatttgatatttcttctgattttgctccattgtctgatcacgtttttttcttcttacatcaaaattggatagatgggaatttcatttatggcaaatttttcattaaaaagtttcaatttcaggcgagttcgtgttccccgaccattgcaacccgttctacgcggtcgcgcccgaccccagctcgcccatgttggcctgcgtgttgcgcaagcgtcgtggcatcggccctggaggagcggcggatagcggtagcttggccaccatgttga

SEQ ID NO: 69514 - DNA, 148 bp, Heterodera glycines
tagggtgcggatttttaggggcgaaaaattccaatttagggacctaaataggggcaaaaaattcgcaaaataggggcgaaaaagtttcaaacgtagaggtgaaatttattaaaattgccgttttctctatgtaataagttaaaattaa

SEQ ID NO: 69515 - DNA, 386 bp, Heterodera glycines
cggagtaggacaaaacgtcgtcagcagaaacgtcgtcgaacgaatttttcgaccataacttttttctttctcaaccaaattaaacattcttggtattattcgaaagcattcgaaaaatgctattagcctgcaaattttcaaaaatttttatttatgcacaaaaaaatcagagcaaaaaaaagttcgaattactgggtttttgagttccttctggccataacttttttgaaccttaaccaaactttttgagattttgcaaattaataataaacacatagagctatcgaacaacaccaacaattcttaatttgattgacagtgaacaaagttatggttcaaaaagtcttccgacgacgtttcggccgacgacgttttggggtgcaccg

SEQ ID NO: 69516 - DNA, 67 bp, Heterodera glycines
atgctctcacttttaaccagcctttttgttccaagaccagcaactgtgtgcccaccattttccgaag

SEQ ID NO: 69517 - DNA, 837 bp, Heterodera glycines
aaacgatcatttttttaaagccagcgaaatgaaatcttatatatatgaagctgtaaaactgtggaacgacaacacttgtttgaatattgttgagagtgacaaagtttctcctagaattcaattcacaaatattgtgggcaggggatgcaaagcaaatgttggaatgcaatcctcgaaagcataccaggaagttgatcttgaatacccagattgttacgaagtaagtaaaaatttgtttacaaaaactatatttaatattttcaaaagcttggattaattgcgcatgaaattgggcactctttgggattttttcatcagcatgagcgatatgatagggattcctttgtttggttttaccctgacaatgttgaccctgaaaatcattacgctttccaaaaggaaacaactgagtctactgataattataaagtcccttacgaccttggctcagtgatgcactatagcgcaagtaaacacaaatgcataaaacaaagcacggttttatgccgtcttattttccagaagcattctcaatcaatgggcagtataccttggtgcctcgagcgggtgcttcgtatataaatacaattggacaaagatttggtcccagcatcagtgattatattgtgataaacaagcattactgtggattagagtttctcccagatggatcaaccataaatacaggcacttagaaatttctatactgtgcattgtttttgtaattaagaagcatgtcgtgttacaatgaactgtgacaatgatgggttccagaacccggacacttgctcaacatgcatttgcccacagggttatatcggagcgaaatgccaagat

SEQ ID NO: 69518 - DNA, 3325 bp, Heterodera glycines
gcaacttctgtcgctccgtcagccaatcttttggcacaacaattggccggtcaatccgcggccgccgccaccgccaaatttggcaccactccacaacgccaacaacaacagcaattacccgcaaaacaacagcaacaacgccaaaagcaacaacaccaacagcctggtcaagcaggtgtgccaatgccaaaatcaatacaaaatctgttgtttgatagcttcgagaaatttttctcgacaataaaatttaaattaattacatggagtttttcgaggtcgagaattttcggagggtatcaaagaacaaaagtcgttcagcagcagagatcccgaggcttacttttttaacaatattaaaaaaaactgtgaatatttatttctccctcactcacggccatttaaaattagtaattaattagcgactaattattaattaattggcaattagcaacatcatcggtcaatttccgttataatttttggtcccttccaccaattgacctttgatgtttggcgatgattttcctttgggtgccgccgccctcgcacttttgccttttattggcaccgcgacacagtcattcgttccggcacttttcagcacattttggcattggcggcgctcagcagcagcaagtgccggtgctcattttgccggaccaatcgctgctcgagcggtacgtgcagcacaagcgggacgcccttgaccaattgcacaacagcgacgacgacgaccacgacgccgcgggggacgccgctgctgctgttgacgaaggtgggccccgggggcgatgggggggggggacaaaacgccaaaaactaaccaaaacgacgacaacgaggtcagtcacctaacccatcccatcgtcaattgggtggaatttgagtaccaccaccgacccgccgccaacaaaaaaggaaacttgtgaatgaatggctctgctgcataatatcccttttgccccctggggggatggggcgacaacaagtcgatttggggctgggcgagggggaggaattaaaggaaaagtgccgacgccatcatttgtataatcctattttattagggggccatttttttgcgatttacaaattacgaattatcttaaaaatgcattgcggatcccgtgggaccaagcctgaaatttgcggatcacgctgcgggactggaactaaaaatttttttgcatgacaggatcccgtgggattgccgcggcacacattttcgaatgttttgacattattgctcactcaatctttggcactctccatttttttgtctctcttaagacaaacccctgctggtttcagttgatttgggaattagtttatttagccccgagctctcaatccctcaacatttgggtgctcatttccctcccatccctttggcatgccaatgccacggaatgccaaagaatttgtcagctcgatattttgagtctcggggatttgtaagtcttgcgattcccttttcattccgttccccttttttctcaaatttccttaccccaaaatttctctcggtcttgaccttgactctcggcatcaatttttgccattctcggtataatttgccctcctttcagcgctccacaccgccacaacgccgtcggcaccggcactgttcgttccgcgcactgctgcggccgccgccgtcgtttccgcctcgttgcctggctccaagcggaacagtcagatgttggcggcggtgccctccggcgccgaactgccccagccgttgaccggctcattccactcggccatcgaggcgaccgcggccgatttgcgcgccgctgcggcggcggcacagccgcggctaaggtgggcaaaagccaggggagcaaatgctgaaagaatctgatcaagaagataaggggacgctgatcattgggcagactctgatcggaacactctgatcagtgaactctagaatagaaaccgaaaatttcaaattcgcggatcccgctgcgggattagaactcaacattttttgcgggactgggtgccgcgggattaagccttgcgaatcgggatctcgcaaaatcccgcgcgcgattccgtcccgtgctgctggtctctagtctagaacatagaaggtagctcgagactcgaacccacggcaaaaatcatcaaatggaaattccaaattattcataactttactcaaaatcaatcaaatttttaatttttgatagaagccgatagccctaatttgtaagtgtattttccctcaaaattgcatgcaaaaaactgctaactttcaaaaaaagttatgaccagcagaagaactcaaaaaaccaaatttctcgaacatttttggtcataaagaaattttttgaaattttgtacgcttatagaaaatactgtgccaagggctgatcgccagaaaatcaactgatcaattttcaaatcactctgctgatcacaaaaatttgtctccactaaaatttttaaaactttacaatttttcctttccatttaagccaatttcatgaaattgaatttccaaatcttaccaatgagcacatattgatttgtcccaattagtgttttgttgtttggccttccttgttttgttcgaaaattcatttaagaagaagcccctcataaattggttttgccataattagcacaaccaaaagcagaagaagcggcggcggcacaccgtcaggagaaaaagagaaccgtaccgccgctcattagccattaaccaaatatgcaaatttaattacccatttaattaccccactcctcgcggttttgtcccgcgtgtgtccaaattagtatttatatgtatgtatatttatgtaaactttccattcattcatattcatagaaattgttcaaaaattctttcatttttggcgggggagaagggctgggaaatttttccttttttttgaaaatttatccgctaaatggactgaaatgtatacactaattagcgattagatcacagcaaaaatttaaattccatgccatgtgggacaattaggggaataattaccattaattaattaattgacaataattatggccatttaaagacgtgctcaacagcagcagcaacaaatccctatactcagcacacaaacgtttgagaagcccaagtcgctgtttgaggagcaaatgcagcgccaggccatccaattgcgccagcgtggcgccgtggcgcgccattcgctgcacgacgacgacgctgaggcggcgccggcagcaaagacggtgcaaaaccaacagcggcagcataaacaggcggcccaagcagtgccagcaacacaaccacagcagcggcggcagcgttcgggcgacgccactgctc

SEQ ID NO: 69519 - DNA, 719 bp, Heterodera glycines
attttcacccgaacatttacgcggacggcaaagtgtgtatcaggtgaggggaaagggcctccattttgtacatgtacacaacaatgtttgattctggctgacatttggcatttcatttattcaacaaaatttaagaattatacacaacaccacaacaaaatttattaattattataaaatttaatcattgaacaaaaaagcaagatttttttaaaactcagaaaaattatttaaattttatatattttttaaaacggaaatccacaaaaataatttggttgtattataaaaaaaaacaatttcaatttttttgcatatgagttagttgcctgtgtaatatttctatgggaggattcaacctcataaaatttggtttcaatttttggaatttctgcgcttttttcagcattttgcacaccccgggcgacgacccgaccggttacgagacgagtgccgaacgatggtcccccgtgcagtcggtggaaaagattctcatctcggtggtgtccatgctggcgggtccgtcccttgccaatttgatttggcgttgacattggcttttttcatggcattttgcccatccatcctttgcagagccaaacgacgaaagtgcggccaatgtgaacgcggcaaaaatgtggcgtgacaaccgtgcccaatttgagcgaattgcgcacaaactcgtgcgcaccacactggtaaaacaggggaaaacgtgt

SEQ ID NO: 69520 - DNA, 429 bp, Heterodera glycines
cgcatttattgagctgactcatcgcgggtgtggaaatacaatacccgagctgaatgattatgggcttttaattcttaaatcaattaacgaaaacaatgcagaagtcatatgttcatgtgattttacgaatagagcatttggaaaaagaaacttttttgtaatatctcaaagccaagacgccgatttagtcatgtccaaaaaatcgggattaactggttggattacagaacaaccttctgtgctagatatgttagttggaataacccaaaaaaagaacttagcaaaacttatacttcttataaaaattaataaaaaaaacgaagatgagcttaaaaagtggaattccctaaaattggccaaatttgttaacagaaatttaataaaggagaaaatgcctatcaaactagatgaagataaaatgatattcat

SEQ ID NO: 69521 - DNA, 821 bp, Heterodera glycines
atgcagaaggtggtgagaactcccgggtgtcaattgctctacactgataccgactcgctgattttcgtccatccaatcggcatgtgtccactgaaaacagggccacacttgggacagttcaccgatgaatatcctgagcacgaaatcgtcgaattctgcagtggcggtgcaaagcagtatgggttggctctacggcgtaaaaatggccaagctgatgcggaaatggaatacgtgcttaaactccgtggattgacactcaattatgatgtgatcaacaaccaaggcttaagatacgaaaccttcaagcagcaagtcaaacgttatgctcaaacaggagagattgaaccaattaatgtaatgtacccaaactttattagacccaatattcgtgatggtggatctgtaatatcaagctctatgcaaaaatgttatcagccttatgttgggaagggtattgtaggagccgattataatgttctcaattttggacacactttgtaattgctcacccattataatgtcttttcaccattcattgtaattgttcacacattgtaataccttcttcaccaatcattgtttctctctcatatacacatgtacccttttatgttttttcgcctcttttgtatctctctctcatatacacatgtactcttttatgttttgttgatctgttattgtatctctctctctcacacacacacacacacacatacacacacacacaccccatacacacgtacacacgcatgtaccacctttgtttttcatgttttataccaaaaattgtgtaatttttcattttatttgcgttttta

SEQ ID NO: 69522 - DNA, 351 bp, Heterodera glycines; identical to SEQ ID NO: 53910

SEQ ID NO: 69523 - DNA, 200 bp, Heterodera glycines
  unsure (1)..(200): unsure at all n locations
atgaacactgtacggcgcacaaaatggtggcagttcaccggcgtgaagaagcactccgagctgtaccggcgcccgacgggcccggccgacggatggagcagcgctttgcgtagcacaatcgcagaaacggcaccatcaccaccagtagttgtggctgttgttgctggtgttgtggtggaaaacgaaatgccaaaaaaang

SEQ ID NO: 69524 - DNA, 500 bp, Heterodera glycines
atgccaaaagatgtgctaaaaaatgtgcgaaaattggaagcacttcaagtgtattaatacctaaaaatcacagaaaattctcattatttatcattttcgccaccattgcaaatcaaatacatttcgaggtgttggagggtaaatttggttatttttcagttaaaattatttttataaattgaaagttccagcagggaacttcgaaatccaatgacgaattaagaattcgatttggctttcgacattcgaaataaaaaaggaaattttgaaaatgttgtaaaaatagcaagaaaggtgattttaaggggtgcatttacaatcttcttgtattttttttacaaatttttctcaaaaagccaaaatatgtgccaaacctcgaaatatgtgccatatgttttttgtgccaaaacgtcaaaatttttatgtttttatatgtaagtcgctgaaatcaaaaattgttcggagaaaatgctattttgggcttctctcgccataataaa

SEQ ID NO: 69525 - DNA, 280 bp, Heterodera glycines
ttttatctccgccgattgttggctttgtgtgtacgatctgctcccggcttcacaacttggccttggaattgcactgatcagccaccgttttgacttttatgtggatgaacatttcaagactcgtcgctggactctgagatccatggcaattaaatccaaatccaaatcggatggaaccgtgggaatggatattgtcaattacgctggaaaagcattgccaattccgcaaaatccgttgccaaagaaagtcgtcggattcaaagccatttcaatgaagtga

SEQ ID NO: 69526 - DNA, 325 bp, Heterodera glycines
tggacgacattcaggcggcctgctacaaaatcctcgactcgctttacatggtctcccgcctggccaacagttgcgcgtcgcggcagagcatccaaattgaagtggaaaagcatcggtcggcccttggccaatgtctcagtgccttttccgcctgtttccccgtcgctttcctcgaggccgaattcaacgccaacaacaaattgtccgtgctggccaaaagccgagaccaatctgtgcaagtgcaggaaatgttgcagaatttgtcccagcacattcccatgttggacaaattgttgcaggaaattgagcaaagcgcagcaaaagg

SEQ ID NO: 69527 - DNA, 420 bp, Heterodera glycines
tttgtaacttattggtcaaatacaactcaatccaccaacattccaatcaacgggactcaatcctcaagcatttcaatcagtgggactcaaccctccagcattcaatcacttggactcaacccaccaacattccaatcaacgggactcaatccaccagcatttcaatcagtgggactcaatccaccaacattccaatcaacaggactcaacccaccaacattccaatcaacaggactcaatccaccagcatttcaatcagtgggactcaatccaccaacattccaatcgccgggactcaatccaccagcatttcaatcagtgggactcaaccctccagcatttcaatcagtgggactcaatccaccaacattccaatcaacgggactcaaacggaacttatatccaccagcatttcaatca

SEQ ID NO: 69528 - DNA, 304 bp, Heterodera glycines; identical to SEQ ID NO: 51570

SEQ ID NO: 69529 - DNA, 76 bp, Heterodera glycines; identical to SEQ ID NO: 51235

SEQ ID NO: 69530 - DNA, 759 bp, Heterodera glycines
atggagtactactactgttttaattattcgcaggtgaaacactacatggcactcgtggacactcaacagtacgaggcgtgccaccaagaggcagtgacgcggtgccatgccacagacaattggcacgaaaataccaacaaattgccgggacaggaccaaaaagtggtggtggacccaggaccacaggtaagccgacaatcgcggctcatgctctgactttgccgttaattttacaaataagttcaggtgcttgcttgtctgtaccattcaggtattgttttaccgtacacacttgattttatactgtataatttgaaaaattcaaaggcttcgatgaggcggacccgttgggcaaagagtgcgcgttgtatgttcgccaagtgttgcgcgagcgtgcggcacgcgtcaatctgctcccggacattgaggagaactgttgcgacgcactctcggaatactgtaagtggatttgccatgtgtggcgcatgaaaattaagcattttttaaaataatttataaattttccacccaatgatcaattgcggattttttatcagttccgctcgatttccgactttcaccccatcaattattcaatttataattttcacaggcttccaaattgtgatgcttgacaattactgctcgccaaaggttgacattgagtcggagggcaaaacggtgcacagttttctggtacattcgcaggagaaggacgaaggaaaggtggagaccacttatccgatcagatcagcatga

SEQ ID NO: 69531 - DNA, 638 bp, Heterodera glycines
gaaattggttgaattgaaaaagaaggaagtgtcaaggaagagaaaaagattgatagaaactgaaaaagtggaagggaataaagtgccaacaaatgtaaaagaagtacaagagacggaggatggagaaaagaaggatgaaaaggaattaaaaggaattggaaatgaaagagatttgaaggaagttaatgaagaggaaaaagaaaagaaagacaaaaaaggaaaagaagaagcaaaaaagaaggaaattgtgttaattgattcggaagaagattggaaaaaagtgtcccaacatgaagacgaggtttcgttaggtcctgaggaggaggacgacgaggagcgaattttattcccaactccaaagggtgcagaacttcagaatttgagtttttgggaatcgtgccataataaagcaaaaagtagaggcgaaatggaagaaaagtcgagagaaaaggaaaagagggaaacgaacgccttgcgtttggcacgagccgaaattcgatcggcggaattaagcataattgaaaaaagagacgaagaaattccgccggaagggaagagaatcagaaatgaattggacattaattgcgaaacggaagaagaggaaaggaaccgaaaaaaataccgagctcatactcccg

SEQ ID NO: 69532 - DNA, 344 bp, Heterodera glycines; identical to SEQ ID NO: 52084

SEQ ID NO: 69533 - DNA, 1003 bp, Heterodera glycines
acaaaaataatcgatttttcaagtgtcgtttggggtactcaaacatttatggggagcaaaaatccaacgcagaattaaagtacagactatagggaagctattcccgaaggattcggtctccccataaatctgggcgcatcggttcagggggactgccccgaaaacccaaaaaaaaattttttggataaaaattatttaaatgaactgactagataatatttaaaataggttatttctcttcctttcagtatccctgcaaagtttggtgcgcttctgatcagtttctgaaaaaaaagttaagcctaaactttttggcctgtttaaaaaggaattaaaaatttttaaaaattttattcatctccctttttgatagaaaaagcatcagagtgcctaaactaacatgtaaataaaatttggtgcgtttcagaaccctttctgaaaaaatatttaagaattaattttgcaaaaaataaataaaaacgaaagactcagattttcgaaaatttttttgagccagctagctcggcgctcatttcagtgtaagttagtcctttaccggggagtatccctgcaaagtttggtacgcttctgctcaattagcaaaaaatatgagtgatcgaattttcactaaaaaagttaagcctacattttttggcatatttaaaaagcaatgtccgtttggggtactcaaacaattatggggagcaaaaatccaacgcagaattaaagtacaggctatagggaagctattcccgaaggattcggtctccccataaatctgggcgcatcggttcggggggactgccccgaaaacaaaaataaatcgattttttcaagtgtccgtttggggtactcaaacaattatggggagcaaaaatccaacgcagaattaaagtacaggctatagtgaagctattccggaaggattcggtctccccataaatctgggcgcatcggttcaggagggctgccccgaaaacccaaaaaaaaatttttggataaa

SEQ ID NO: 69534 - DNA, 513 bp, Heterodera glycines
atgacaacttctgctggagaatggaagaataaacagaaagtgagaagatgaaagaccaacgaagcgtgggaggaaatgtgccgaaggcgcggattgtccatcgacaaattaccgtggcgcctgatcgcgatcgcgcaagaaatatcggctctattgtatgcagttcacacgaccataaaaaaaagacgcgaccataaaatatttttgtaaatttaatgcaacataacttcttcaagaagcacccaaattaaacattcttggtatcattcggtagccctaagagtcctttattagcttgcttgaaaaatttcaaaaaatttcgttggggttcaaaaaagttgtgctcaaaagtactaaaaaaccagttttttgaaattttctagccataactttttgaactccaactaaattttttgaaattttacaggctaatagaggactcttaggggctctcaaatgacactaagaatgtttaatttggatgcggatgcttcttgaaaaaattatgttgca

SEQ ID NO: 69535 - DNA, 1333 bp, Heterodera glycines
atgcgacatgagcgccgaacagtggagtgtcagcgacgtgtgacccagctaaaacggcgtgcagttgagacgtggaaagcgccggctacaattcttgcgcaagtcttgcagaacacaacaacaccaatgttagctgcttttccgaacaaagctgcgacaaaaaggtcaacttttcctaatttttatgccaaaattatgatttgttcatttattttaggttataaaacgtgttctccgtgacgaatatgtgccacctgctgttcaactcagtttggacgctgtccacaaaggtgaaaaaatgaaaatcctaaaattccactaaattctgtattaaggcttttggtgtttgctcgatcttcgacttcacaatggacctgtattatgaaaaatgtgtacgcagacggcactttcagtcggcgccacctttttcaggtaaatttatgtcctcgcaaagtaaaagcctaatttctttcatatttattttggtttttaaggcgaattaattggattttgattacgtactgccttctcacttcaagtgtgaagcgttgaacacgtatgcctcaactgattgtcaaagatggccgaatttttcgcctgaaacttttcgttggacttcgaggtggtgatatcgccgatgcgagattcgactcttacgggcatgccaatgtcaatgttaatcccgatatcatcagcgattttctcgttggtacattatctcgaatttatgaaatgtgcccataatgatttttcaatgttttgttttttttattggaaatacattgataaatatgttttagtattaaattaaacatttttcgaaaaaaaaaatcagattagaatccatatgaaacaaatctcgtgtttcgcatttcatattttcgtaaattcgtgattttatggcgtttccttttcgtgtttcgcatttcgtattttgttttaatttcgtttttccgtattttgcatttttttcgattcgcaataaccctggtatgcatcagaaattgcgaattattcaagtgaattgcacaaaatttttccaattaaagttaaaatttattaattgtgacgtcaaatcatgttaaaagaattttttttgttgatttcagatccttccacagttgcggaaaaaataattattagtgctgggacagatatttattaaatccaaaaatatttatataatatttacgataaatcctgtaatgtttagcaaatattgagcataaaaaaaataacagctcataggtattaccacaaaatttattcattaatttaaagttatatatatatatatttttcgagatttttaaatgcatttttccaaaataaa

SEQ ID NO: 69536 - DNA, 584 bp, Heterodera glycines
atgcccgaaattgatgaattcgatggccaagccgaatatggtgcctatggctatgttgatcggttcattcgaaactggatccaacaatcagcaaaccaaaatcgggcagctttgtttccgatggaattgtggaacatgtgtgatcggtaaaaaaaccaaataataagtaaatgaattttgtaaatgatagggtggaaggcgacctctgcagaaccaataacagtgttgaagcttggcacataaatctgaacgcgttattccgttcaccatcgccacgtctaagcatttttcttcggaaagttcggcaagaagaaagccattggcgtcagcaagttgaagactttgcaaacaacccagcaaatggaatacgtggcaagggaatgaaacgcaagcaaacttatgtggaccaagacatgaatcttaatgagttatacgtcacgcgaaacaatcgccatcctctgcaatatttgcgcgcaatttcccaccgaatggcagaacctctttaggacaaaaatcaatgatttttaaaacgtaactaagaacctctttaggaataataattgatttatttttcatttttaaaa

SEQ ID NO: 69537 - DNA, 1113 bp, Heterodera glycines
atggatctgcggatcagcactccaaaaaatctgctgcagtatttggtcaaccaatacaacaggcagcaagcacggcaaaaccccaatgcccaacagaaaactgttgatgacattggcagtgttgttcggctttccgaacacaacgtaaattctctccaatattggaagaaaatgtatgaggattgcaacaccgtttttgcacggtgtcatgacgcgaaaaaggcgcgtctcttcatcacattcacgaacaacagggaatggcctgagttcaaagagaatatatataaaaacggtcaagtatttactgaccgttttgacatgtggatgcgtgtctggagcagcaaaatcgctgagttccgagaagaactttatgacaaaaagttcttcggaacaatccttggttacggtgaatcaatggagttccaaggccgaggaggcccacatgcccacattgtggcgcaaacagacctggacgcagttccatatgtcattcaggaatacatatgggcgcacattccatctttgcctgataaagatgacgacacgcccattgcaaaaatgcatcgcgaaatccgcgaaacaatgcatatgcaactgcacagatgcagtgacagttggtgtggtcctagcgacccaatttacgggcggtgcaagaaggggttcccagccccttactcaaaatgtacgattttgcgcccggacaggcccgcgatgtatttccggccttcaccatctgatggtggtgcccaattagaggtaaacggcttaatatacgacaactcacatgtcgtgccgtataatccttatattctgctgcgttaccgagtacaccataatgtactgtttgcatatggtaacaaagcaaatattaaatacgcactcaagtaccctttcaaagggccaggacattgttatgtcgagtgcaaagaagagtccggcaataaaattggaattgatgagccggctcaatatgccaagatgaacttccgtggtgcaacggaagcatatgccattgttcattcaatgccatttgcccgtctttcgcatcatgttgtcaaattggcaattcatttgccaaaccaacagcccattgtatatagggcattccagctg

SEQ ID NO: 69538 - DNA, 1048 bp, Heterodera glycines
atgaccattgttcgaagatttggaaaaccagacttatttgttacaatgacatgtaacccaaaatgggaagaaattcaagaaaatttatataaagaacaagatcctagcgaccgaccagatattattgaccgtgtttttaatctaaaaattaaggcacttttaagagatgtaacgaaccaagtttttggattttgtattgcttggatgtatcccgttgagtttcaattgagaggactcccacatattcatttacttattacattggcacaaaaagacaaattacacgatggagaagatgtagataaaaggggaattagtgcaaaaattcctaataaaaaccaagacccacaactttatgaattagttaaaaaacatatgattcatggcccatgtggaatattaaacccaaattcaccatgtatggaagaaattaccgacaaaaataatgttaaaattaagcgatgttccaaaggatacccaaaatcatttcaagaaaaaacaattgttttagaaaatgggtttactatctatgcaagaccaaatgatggaaattttgttgaagtaaaaatttttgatggaaaagtttataaattagataatagatgggttgtacctcatatgccatatttattaaaaaaattttcctgtcatatcaatgttgagaaagtcaacagtttatcttctgttaaatatttgcataaatatattcataaaggaccagatagaactggtgttaagttagttgaaaaaatcgattttgatgaagtgaagcaatttaccgacgcaaggtttgtaagtccaacagatgctgtttggagaattttagaaaatccaatttgtgatagaagccatgcaattaaaacattgcctgttcatttatcaggcgaacaaatttattattttgaggaaaatatggaagaagaagagcttagagacaaaataaacagaaatacggaactaatggcatattttgaattaaacaaaaatgatgaattggccaaaaataaatattatcacgaaattccagagttttttgtatttggaaaag

SEQ ID NO: 69539 - DNA, 857 bp, Heterodera glycines
atgcgcacagaaatgaacggcagctttttggaaataaattcagccgaagaaaaaagacgaaccttcagaggtaagaaataccgaaatcagagtcgttggtaattttaaagtttacattggatccggaattggttgaaaaggatgccgaattcgcgatcagcgacccccgaaaagatttcacaccaatttgttgggggaggggggacaaactccaccaaattcctcaatgtccgaaatatcgcaaaaaataatcacaaactttccgagttgatttaagagttaataaaaaacaaagacgacagtttctggtgggttggcttcgtaacgactagagatcgacctggacctggatccaggcctggatttttcctggatccaggtccaggtccaggccatttttcggcaacctggatttttgtccaggaaatcaaggtccaggtcaaatgtgaaaaaaaatccaggtccaggtccaggcaaaacaggaaaaaacctggattttcctggacaaaattttagaatttattttttcaagtgaccgatgttttttcaagttttcaaaaaacagattaaataaatttaaaaacacattattattattaattagatatttttagatgcttctaagcaaataattaattttttcaaacatatttatttttaaaataaatttcaaaaaatccaggtccaggcctggatccaggtcccgaggagcctggatttttcctggacctggatttttgtccaggaaatcaaggtccaggtccaacatggaatccaagtcccggcttttttcaaaatgtcgatctctagtaacgacgatacattccccgcaatgggccaatggcgacgaaaacgga

SEQ ID NO: 69540 - DNA, 424 bp, Heterodera glycines
atggataggtgtaagaaagagaaaaaacagtggataattatttgtgggggaagtgcatattattttgaagacgcgacaattgcacttgggatgaaatttttaaaaaattgtaatgaaaatgttcaattatttctcactccaaacgccactattctaattacaaaaagaaatgtcaaagatgtgataccaattggagaaactcctgaagttgaacgtttgtcgaagaaaagtttatcgccaattcgatatgcgatgatatcccaactattcactgaacgattagccgccataattgtggtcaaaatgatatctgtggcgaatacattgccgacattgttgcaggacagcttaaccatgcgaaattcagcaaagaagtgaacacaacaacctttctgaacaccgggtcttcagtggtggtcagcga

SEQ ID NO: 69541 - DNA, 93 bp, Heterodera glycines
aacatgtcagagttagttccgtgcaagtgtcgcaatccatttttgagtgctctccatgtcgcctcaatgccttgagtgtgcactcttgggtca

SEQ ID NO: 69542 - DNA, 811 bp, Heterodera glycines
atgcaacagcaatacgaccatcgttgggtaaatcatcggatgtacttcgttgatcccaatgacccaagagtgcacactcaaggcattgaggcgacatggagagcactcaaaaatggattgcgacacttgcacggaactaactctgacatgtttgttaccaacctatctttatcagtatatgttccgtcggttccatggaaatgcaaaaattttccaaaatattctggaagaaattcgatatcaatatccactataattgtggctttacattgtgtatttcaattttaggctgacagtttgaaaataaaaattggactcaaacttttattaaaaaatcattggactcataaaaaaatgattggactcataaatttttataggactcataaatatttgattggactcatatattctgattggactcataaaactcgattggactcataaagtgcattagagccaaaaattttattcattccgttaattggagatggtaattattaaaagaaaattatgaattttaaaatcaaatttaattcaggtggaattgctccagcaatgttgttcactggcattgaccgactgattgcaattgctttttcggaattgtatgaaaaattacaatattatcaaattgttaagtacagtaactttcagtcatgatagccttaaaaagcgactgtatttggcactgttaactgtaatttctgtagcctatggtgtctgcttctctgctacggtgtaccaaaatgaaattgtagatggtgatcagatgaccaccggatcatatttggattttataaaggtttag

SEQ ID NO: 69543 - DNA, 551 bp, Heterodera glycines
atggtatccacacgcagtaaaactgataaattcaagaaaatgggaaattcaagtactgaagcaaatcgaaaacggaaggaatggcgccaggagcgtgctcgaaaaggcggctcgacgccaaaaagtgacgaaaattgacaaaaattaattttattttaaaacactgcatttttcagcgctaaagcagaccgaagccgagacaacaggggaattgtcgatgagccacttttgcgatcaatcaaatttgaccggataatcctggcgccttttcacgtcttccagggcattggaaatgcactgatcaaagagctcgaaggattaactgaaagcgcggaaattgcgaacggatttttcagaagcatcgcggccaggagggaagcgttcagaaaaaaagacatgacggggaattcaatcagaaaagttctgattcatgctgaccaattggagaggctttactcagctgaatggcctcaaatcatttgcaaaaccatgggacacttggcaaagatacaaacttttacaaaagagattttattttgtctttcttgaaa

SEQ ID NO: 69544 - DNA, 267 bp, Heterodera glycines
atgcctgacgaagaacaaatgcgtcaattgttggagcaccattttgtctcaaattggcttctcgagacgggaaagctcgacgaaatgaagcgggtcagtttggtgaaaattgggtttcaaataaaattcccatgcctcaggaccgtgaagaacaacaggaacaaatcggaggccgggagagcgacgaagaaagcgatgtagaagaagaacaattcgattttgaatagacacagttcgataaaaggtttttcttcgtttttacaggaa

SEQ ID NO: 69545 - DNA, 1730 bp, Heterodera glycines
atgcccgcgccggtgcaaagtgtgcgcgttatacgctcctacacggacgaggtgggcgagcagttcaccatttgttattcatttcataatgcggtttttggatctgagaataaatcggccaaaagggcaattcggctttgcattttacaaataaaattttaaaaattgcaaatgttttcctcatccgagaaaatagagcattaaaatcccttttgttaaatttagtaaaaaggattaagagaataatgaactaaaaaataattttaaataaatccaactaaaatttggctcaaaacattttaatattagaaatttttcccagtatttccaagcctccgttttgctcggctttgggctgccaccaaaggccgactcggcacactttcagctgtacgaagtgcacatcgcatggtctccgggaaaggtgctgttttgtgttctaaaatatccattcaaaaataactctgtcctaacaaatgagtgccattgaaatgtgtgctgattttggcttttacttaattagttttgtatttatttgtgaaattatcaaaatgctttcagaaggtggtgggccggcaacaagttgtgttccgtggcgaacacattcaaaaaacgggcggcaaaagtgcggagggacgagtgaacatcaccggattggagccagcccgactgtacgggcacaaatttgaaaaatttgtcgttagaaaattaaaaatgaaattcaattatttttggaaaaaaaaaatttagtgcttcactttctataaatgcaaactgttcaggtacactttcgcagtgcgcaatgtgtcgcgcgagttggccgccaaatgcagtgcgcctttgggcgtacgattgatcacacgtaagagagagagagagcgggcagaggagaggcagcagagagagagaggggggggagagagagaaaaggggagagagaagagagagaagagagagagagtgagagagagagaagagagagagagagagaagagagagagagtgagagagagaagagagagagtgagaagagagagaagagagagagagagagaagagagagagagagagagagagagaagagagagagagagaagagagagagagagaagagagagagagagagagaagagagagagaagagagagagagagagagaggggtggggcgtggacgggtccatgtcaaaacgtaataaaaaaaattgctgaattaatttattctttttttttgactgtgtgtagccccggtgatcacttccaccatttacgcgggacagatctccacccattcgatcaacatcaattttggcgagtccgacccttcccatccgtttgatcagtacgaattgcattttgactcctcaagcggagcagaagcagcggaaggggacggagaaacagcgccaaagagtgggaaaaagttggaaaacggagacgaaacgccaaacacactgatccgaaggctggcaaaaaacgacacgtgagcaaaatgccaaaataattagcaaattcaaatggtgaccaaaatggcttttcattgtgccaattcttccacattcacatttttatttgttttgttttttcagcaaatcgttcactttcaacaaattggtgcccggcaaaacgtacactttcgctttgttcacacttctccacggcgttcgcagcagaccggtggacgtcaacatcacaacatgtgaggagcaaaagaaggaccgcaaaaaatga

SEQ ID NO: 69546 - DNA, 808 bp, Heterodera glycines
cgattttttcaagtgtccgtttggggtactcaaacatttatggggagcaaaaatccaacgcagaattaaagtacaggctatagggaagctattcccgaaggattcggtctccccataaatctgggcgcatcggttcggggggactgccccgaaaacaaaaaaatcgattttttcaagtgtccgtttggggtactcaaacaattatggggagcaaaaatccaacgcagaattaaagtacaggctatagggaagctattcccgaaggattcggtctccccataaatctgggcgcatcggttcggggggactgccccgaaaacaaaaaaatcgattttttcaagtgtccgtttggggtactcaaacaattatggggagcaaaaatccaacgcagaattaaagtacaggctatagggaagctattccggaaggattcggtctccccataaatctgggcgcatcggttcagggggactgccccgaaaacccaaaaaaaaattttttggataaaaattatttaaatgaactgactagataatatttaaaataggttatttctcttcctttcagtatccctgcaaagtttggtgcgcttctgatcagtttctgaaaaaaaagttaagcctaaactttttggcctgtttaaaaaggaattaaaaatttttaaaaattttattcatctccctttttgatagaaaaagcatcagagtgcctaaactaacatgtaaataaaatttggtgcgtttcagaaccctttctgaaaaaatatttaagaattaattttgcaaaaaataaataaaaacgaaagact

SEQ ID NO: 69547 - DNA, 630 bp, Heterodera glycines
agtgattctatgctatcaggatgaattattcggtgcaaataaaagttcaatttggaaagtggcacggcgttttcggcttaatgatttgtctaatttgcaaaatacaaattgtgccaaatatgaaaaggaaatccaagtctcaatacaaaatgggactttttcaattggaactgagcatttcaagtgaataattttgaacaaactataatattaatattatttttccaaaagaattggcaataatttgtcggagatattaatccaattaagctcaatggaatcttcatatgcaaaaataattacaaatgatagtaacaaactagaggtaaaattaagtggataattcgtattaaatttaggagaatcgattttatcgaaatttggcaaagaatttgaatcacaaattgcaaatggtgcttttctggaggaatattgaggcttttggttgatgggtgtggccattttgcgaaaaataggacagaaaggcacgaaaattagggtgaacacttcggaaaattgtgaagtgaatgtgatcagcaaatacgagcagcccaaatgccacacatttaacggcagaaaacgatttggccgacacataaatccactcgtaattaattttaaattaataaa

SEQ ID NO: 69548 - DNA, 1322 bp, Heterodera glycines
  unsure (1)..(1322): unsure at all n locations
aaaagctttctnttcagacgtttgtggcggcgaagctcctttgatgcagccaaatccgtgctcagcatccgatccatgtgagttttcgatgccaaatgcgattgattaattagttaattaattgacgagttcgctttgctttttatgtcctacgggctacggatgtcgccaggggcgttgctgccccagcaaaggcgtgtgcccggcggggagtccgctgggcggcatcactcagtgctcaaacgagcggggaaacccgtgccctaacaatttccaatgcgtgacgaacaatgggcaccagtactgctgcccatcgccaggtcagtcaaagtttggcactgttcggctgatcactcaatttgcgattttagcccctgaattatcagaagatctgtccgtttgtttgattttccctccgatttcagaccacgtttgcggactgccaaaggacccgggaattccctgccaagcgcgcggagtgccggcactttcgcgcttttacttcgacggctcaaccggctcttgccgttcatttcaggtacatttttagagctaagcatcttcaatattaaattgtttttctcagttttcgcaatgcggtggcaacgcaaataatttcgattcgttggagcaatgcgaaggcttttgctttgagagtaagttaatttccctttctggcatttcgtccattgtgctccctccttttagcccaatgcccccagggtggcattggccttcgtgccgggcccgcattggccacgtgtgtaccgggggatgccctgtcaaatgcgcatgactcgtgcccatctcagtacggctgctctcagccccgttttgggtccaatttcgtgtgctgttcaaatccggaggaagtgtgccgggtgaatgaaaacaaatccaaattggcactttttaaactgaaattcttttgaaaaaggagcccgtttctgctggcaatgcctgctttggtggattcgttacggttggttgaaaatgagacgaaaggccaataaaaagcatcaaagataaaccgatggagctacaacccggaaaaatcgcagtgcgaaccattccaatattacggtattgaaatgcttaattaaccagctgaaataagctaattactcccctctccacttaggcgcaaagagattaattatttccacttagagtaatcagtttaattaccccgcttatgtcgatcactcactcacttattttgtaattttgtcaggttgcggtggcagtggcaacaatttcctgaccaaaagcgactgcgaaagcatttgccagccgagcatcagaagcggtaagagcatgct

SEQ ID NO: 69549 - DNA, 690 bp, Heterodera glycines
aacaccattcgtcgtcctgcttcaacttctgctgtccctcctgtgccgctgaagatggaggaggacgaacgacggggcgaagtcggcacagacacacgacgacgacgacacgacggagggcacagcggaggaaagaagaaaggcacggatcggtcgcccacttcccgggcaaatgttttggacatggagcagctgcaggacgggggcaatcaggtgcagtttgttttttgttcgttcctttcatttaattcttcgtggaataatttgttttttcacttaatcataagtggacaggggggggggtcaattgcgtaaacagtacgagggtccgagcaatttgtaaaatttttaactaaaatcgaaaaagcacggtaaatatgggaaaattttacgaaattggaaaaaaagtcaaaagtttgtgcaaaattttttacgattttgaattgcattagttctatttcatcttttaaaaatttccatcgattttgcgtttaaaaattttacctgcttttttttcttcctcattttgcagcagcagcagcagtcgatgaacaacacgcaaatgcgcggtggtggcattgcgcagcagcaagcggctggcaatcactcgcagcaaatgctcgcctcgggcagcggcactggactgccacaggacccggagaagccgcagcagcaaccgttcaaacttaa

SEQ ID NO: 69550 - DNA, 427 bp, Heterodera glycines
atggagaaatctttgggctatcttttcatattaagtgtggtgtgaattaattgaagtttgaaccattttcatgcatttaagcgtccttacatttttgtatgcaaataaaaatatgacacatttaatttcttaataattgttttctgaaacaattaattttaattttcttgcaatgattagtagccgaaagatttctctattattctgttaaatttcaaaaaatttttggcttttaaaaaagttagggtcaaaattgcgcagtctaaatttttcgaaagtttttggttacaactttgtgtaaattttgcttgatttttaaaaaaattataatattataatacagggaggatacgtagagctacttttaataccaagattgataaattggttaagtgtttaagcaaaattttgatttattatttggcaa

SEQ ID NO: 69551 - DNA, 1912 bp, Heterodera glycines
  unsure (1)..(1912): unsure at all n locations
atgtgggatgtcgtttctggcaatcccccgcccgtggaaaaaacgaattggactcgtgcccaaagggtcattcgccactttccgaatgatgccgatgggcaaacacttcgccaaggcattgccaaaatgccattcgccaattacgacatttggaccaacgacaacgacgaggtttttactgaacgcacacttcaactcttcacagagattttgactactgcctgcagcggtacggagttaatattttgtgccattgccatctaattcatttaaaatgccatttttgtctctctcccattttccgtgccaatttgccattcgccctaaaatgcagttttatttcgtagctcttcaccgttcttcccaactcttttctgcactcaacagcagcagttcggcgcctgcttttgacgtcgcaatcgccgaatggttcgacttttcctcgttggcactgttccatcggcttggcatccccacaactctgatcacttcggcgcttccgctcgattccgtccttgcgcgttatctcggcattccaatgccggcttatgtgccaagttggaaacacaatttttaaaaccgaaaatattttcatgcaatttgagttgtcaacaaagcatcccccgagggcaccaaaatggacatttggaggagatttgtgaattacattgataaacgaagaaacacgcaactcgatcaaataattaataccgtggccaactcggtgttcggcgaaaattttccaagcccgcaggaattggcacttcgtgccagctttttgttgctgaacaccaacgaaatgctggaccttgccaggccaacttccaacaaaatcaaacacatcggtaacgtcaaactcacaataaacttaaagaacaaaatcctcagaaattctaaccatttttatgagggggttcctggggtgatcaatcccatttccctccccaattccaactccattntaagaatggctttattttggaaaaagcactgaaatcaaattataaataaaattaaacaattaaataatatttaaatacataatggaataaaatgttacataatgttacaaaataacattacaaattaaatacaattaaataaagttgcataataatgattaagtgatcagcagaaggaaagatcgcacattaaatagacataatgnagaaggggaaaagtcattggctaacggaaaataattaaatgaaatgaaacgttgcattaaaatgagtgtggaaatagcgatcaatgcttcggcagtttatgttaattagcttatcattaaatcaagtccgcttttcaggtggttttttgctcgattccgactatccgaagaatgccgtggccaaaagaatggccaaagatccctccatgccttccgcttctgctccgtctgtttttgtctctttcggttcggtcgctgaccccaacaaaatgccaccacaaatgctccgtgcctttttgcacactttcgcctcgtttcccgagttggattttgtttggcgcttcccgacacagaaaggcaccgatgatgaagcacggtgccacaatggcactctgttcggcaacaaaatcccagcaaatgttcgcctcgtccaatgggttgatcaacacgcaattctcggttttttggattgaattggtcttcaattttactaatttgctaattatctaagcccatccgaacacccgtgcatttgtgtcccactgcggccttaatagtctgaacgaggccgccaccgcgggagtgccgttgctttgtgtgcccctttttggcgaccaaaattacaatgcggccattgtacaaaaccatcagaacggaattgttttgctcaagaagcacctgaacaaagagaggctgcaaagtgcgttgaaagaattggtggccgatgaaaaagcgaataggtga

SEQ ID NO: 69552 - DNA, 459 bp, Heterodera glycines
atggtgattgtgccatttgctgtcttttcagaaattcatttccatcatcctggcatcgaattttggaaaccgatggaatattccacgcgttttgttggcggaatgcaccggtatttgtttgttctgggattatttcaaattcaagacttattgggcaatttcttatgatttggccctttgttttcgattcactccaaaataattaatttcttttgactttaattaatccaattaaatttccagcaattatcgaccaatttcttacggcggaaaagaaattttcacccaaaaaacatttggacaaattgtctccgttgtcaacaacttgaagacgatcttcaacccgtccacttacaaattgctgtctcgaaattgtcttctgttcctccgaacattggtccgacaattaacgggtaaaaatggctaattaattaaaatgtacaaaaaatataaaataaa

SEQ ID NO: 69553 - DNA, 748 bp, Heterodera glycines
atgagaccaattccattaaacgcagtgttaattaaggattggcgttactaccaaaagttggaggaggagccggactttgacaaaccaaactacccgaagaaatggaacgaaatggccaaggcggccaaagaagccaaagatcagctgaaaatggcaaacaatggcaccaacgaaaacaacaaaaatggcggaacaaatggcaacggtgccgccaatggaaatgccaaaaatggaagtggggcgaccgaatgaataacggacgattcgcaagtgacaggcggaaattagggaccaatgcttttctgtttgttctgataaatgttttatagcaacatttctctgtattctccttttgtccaatgagttgttctctctgtgaatgatttatttttgttaattatgagcattttatatttttctctataagaaaaagggcatcgagcaatgatcatcaaagaatagtgagtttattatgacgactttaatttatcctttcttttcagtcggctcgttttacctatgaccgtcgatgagtatcaaatcggtcaactgttttccgtggccgaagcatcgcgacaggttggcacttaagcagacgaggagtgtgaacaatttatacgacttttaaggagacgggcggcggagaaggtgttcaggtgttgcgcaacgaaccttttgaaggggagagtctgttcaatggccagttctcttccggacaatatacgcataaaatttaccatttcgattc

SEQ ID NO: 69554 - DNA, 1023 bp, Heterodera glycines; identical to SEQ ID NO: 41436

SEQ ID NO: 69555 - DNA, 505 bp, Heterodera glycines
caaaagttttttacaaccacttattgccaatctaatttcttgcagatttagagctatccattgcctgccggttctcggcacagcaaagcactaatacggtgtttgactcacttcaaaaaataattcattacccaaaagttttttacaaccacatattgccaatctaatttcttgcagatttaaagctatccattgcctgccggttctcggcacagcaaagcactaatagggtgtttgactcacttcaaaaaataattcattacccaaaagttttttacaaccacttattgccaatctaatttcttgcagatttaaagctatccattgcctgccggttctcggcacagcaaagcactaatagggtgtttgactcacttcaaaaaataattctatacccaaaagttttttacaaccacatattgccaatctaatttcttgcagattgaaagccatccattgcctgccggttctcggcacagcaaagcactaatagggtgtttgactc

SEQ ID NO: 69556 - DNA, 926 bp, Heterodera glycines
aaaaatgggaagaaaaagaagaagaaaggcgaaatgaactcaaaaaaagagaaataattcaaaaatattataaaataaaagagaaaattaagcaaaaaggaagaaaatattcaacaaaagaatggaataaaattgaacaaaaaatagcgaaaaaattgggaacaaacaattgttatattaaaaaatggattaaagaatttggtcttcaaaaacaaataaagaaaagctacaaatcaaaaactgatgaagaaaaacgtcaaattattcaaaaattcattgaaatgacaaatgaatttaaacaaaaaggaaaatattctttaaaagaatggaacaaaaattatgccgaaatttgtaagaaaattggagtaagcaaagggacaattatcaaatggaaaaaacagtttggcattagtcttaagagaataacggaaaaagaaaaaatggcaaaaatgaaaatttattggcaaataaaaagagaaaatccaaaaataagtgagcagaaaattgccaaaatgaccaacactcggcgaagaacttttggaaatggaaagccaaatttggagaagcgaaataatgaggaagaaatgaaagccaaaaaagaggacaaagaaattctcgaaattctcgaaaattcggaaaattatattttatgtgacttttgtttttgttcattaacagggctgcaaaaaatatgcaaatgcataaaaaacactttctttttttttgtgtttgcgtataaaagtcgggacttttatttgcatattttggctttatctgcatatttcatgcatattttgccatttttcgtcaaatattttccgattttttgcatattttgccatttttcgtcaaatattttccaattttttgcatattttgccatttttcgtcaaatattttccgattcgaatatctcaattttttaa

SEQ ID NO: 69557 - DNA, 412 bp, Heterodera glycines
atggaaagcatagaaaatggcattccgattatagcgaagggtcgggaaaatggcattggtatttacatttcgcttttttaacttgaataatttccaattcagatgcaaaacaggtcataaagcccgtggctggaccggcagaagcgacagacatttccacaaaacagcagcggatgccacgaatgcaagtcgccgccacccctcctacggaaaagccgaaaacacggaagcgaaagtacgaactcgactttttccctaatttctcaaatcattttattttagtgctttgttttttttattcaacttcattttagagctgatttgtccttcgatgggatgagagaaacggatgctgaatctgagaaagggcagagcgaaaaacgtgcgaggaattttatcagaaaagaatctg

SEQ ID NO: 69558 - DNA, 915 bp, Heterodera glycines
atggacgactcttcaacgctaatcgaccgggatgaagtgatgaaaaatttcaaggaaaacttgtcgttcgtcaacaacaaataccaaatcgcattgccatggaacgacagagtggcacaattgccaacgaattaccatcaagcaaaggcaaggctcataagcctcatcagaaagcttcggacaataaacttggtcgacgaataccaagcaattctggatgaacaacagcagaattccatcatcgaactggtcaattctgatcattcttgtggtccagtccactacctgccacacagggcagtcatccgaaccgacaaatccacaaccaaaatccgcatcgtgatggatgcctctgcaaaacccaaatccactccgtcggcaccatcactcaacgaatgcctgcacacaggcccgctacttttgaaagacctgaccggcattctccttcggttcagacgcatggaaaaagtcatccttgctgacattgaaaaggcattcctacaattgggcgtcagagaacaagatcgcgatgccacacgattcctttggcttgctaacccaaaggaagcaaatctcgaacagctgaaacgagaagacttccgcgttttccgattctgccgagtcagtttcggattaaccgtgtcaccatttctactcaatgccacgatcagggagcacctggcacttcacgacacggatgttgcacaacgcatcagtgacaatctttatgtggacaacatcatggtggaagtcaaaccaagtgaaaacagcaatcaactggtcacagaagcaaaaatcatttttgaatcagccggaatgcggatccgcgaatttttcgggagtcacatcgacgggctaaaagagctcttgactcatccgaattggcccaagacctcgaaaacacaaagatgttag

SEQ ID NO: 69559 - DNA, 2637 bp, Heterodera glycines
atgtcgttggaagaccacaattattgcggcgagatgggcggcaacgaagaaacgcccacaaagagaagaaaaagaaatgatgatgatagggaacagaaatttcaaaaaaactgcattcgcactctgagcgccgacaaacagtacaaccaaaatttcaaagtgcagagcgtaaagtcgacttttgtcatcgaaaatttgcccgccaaccccgagtcaatgctgcgcgcattgttcgctcactgcatgtcaaccgccctggacgagtcacagcagaacgggatcacaccggatcaattgggcgctacaatctcttcagatcttctaaatccgagcatatggattcctatacgccgcatttccgacaacaccgccgactcaattatgaaccgcttccttgaggtggcacagtcaaaatcgcgggagggctctctgtggggctcgccgttcactgtgaccatcacaacgttggatgttgcgcagctacctcagcggcaacaggtgcgtggcagtgggaaaaggacagcaaattcagtgcagcatatcgtcaaagaaagtgctcttctgcggatcaataacaacgatgatgcatattgtcttttttacgctttggagacaagcaggaagtaccacatcaaagagatgagccgacagaccttttctaaatatattaatcggcagaatgggcgacgactggaagacgtgtttggactgatgagcagcgcaaacattcgcaccgatctgagagaatatgacgcggttgtctatgtgccgattgtcgtggactattggaatcggaaatacgccacagcaaaccagcgatttaaggtgttcatttttggcgctacaggcagctatcggccaaaatttcaatatgggccggacaattacaacgtcgaaatcccgctctaccatcacaacggccatttcgacggaattcgaagcggggtgggcaaagcggtgtttgggcgtgactactactgcttttcgtgtgagtgcccctacgataatgccaatgatcattcactgcagtgtaaagcaaagtgcataaactgcggtcgcataggagtggggcgaccgtgctgagcggatgacaacaacgacagttattacagagaatacacagcatgtggcaaggatttcatgagccaagactgtttcagtcatcatttgtcgagcaatgtgtgccgacaattcaagaaatgcaaacagtgcggagttgtgtggaatgtcaaacaaaaccgacgaaaaggacgcagcggacacgtttgcggtgagaaattctgctacacctgcaaatgttaccataagccggagcggggctgcttcatacagcagttgaaggcgcgccgccccacaaagtacagactgatcgcctttgactgtgaaacaacacagaacacgcgaattgagggcgaccgcagacttcattctgtcaacttcatctcatgctatgtcgtctgcaccaagtgcataaacgaaaatttatggcgaaattccctacaagcgccatgtggcatttgcggtcggcagcgcaccgtcacattctcccaccgcgcctatgaacgcacacaaaccgatgcccaattcatcactccgtgcccaatggcggcctttgctcaatggctgctcagcgaattcgatccgcgctatcccacaatgctcttcgcccatttcgggggtcgctttgacaacattatgctgtttcggcagttcttcctcaacgggttttgcccgcaaatgatccgccgtggtaacaaattatacgaaatgaaaattgcgaggggcgaaaaaaacccggaaatcatcgtaagagacagctggaaccttatgccggtgccgctcggcgctctgcccggagcgtttggactcaatgtgcaggataaggagttcttccctcatttggcgaatgttgaggcgaattatgggcacattctgcagtcgctaccgccaaaagctgactacttatacggcgggatgacgcccgaccgacagcgcagattcgaccagtggtacgcggaacaccgccatcagcagttcgacctatgtgaacagctcgcagcctactgcaccaacgacacgcgcatactaattgaggcgttggtcgcttttcgcacggagttcttgacgatcagtgacccgttggagcggcatggatgcttggatgacgacaacgacgacgaagaggaggaggagcaggatgacgacaatgcatttgaagtgatcggcggtggcattgacataacgtgggagccgatgaccatcgccagtgcctcaatgagacactttcgacttaatcacctcaagagggatcagctcgccattgtgcccgagtgcggctacgacactacaaacacgcaaagccttgtagcgctcaaattcatggactggtacgccaaaaagaacggggtgagcatccagacggcacactcgcccggcggagagaaaaaaattggtcagtacactgttgacggatacattgcgtcgaccgacaccgtgattgaggtcaacggctgccactggcacgcgcacgaccacccgcgtcaccgctttcagccccaaacagtgatggcgaatgggaaaacggcgcagcggatacgggaggacgatgcgcgacggatggccttcatcacatctcag

SEQ ID NO: 69560 - DNA, 672 bp, Heterodera glycines
atgccgcgcccatctacctgcgctgactcaggaggtggcatgatgacgaccttaaccgctcgaccggaagccattaccttcgatccgcagcaaagtgcgctgatcgtggtggatatgcaaaacgcttatgccacgccaggcggctacttagatctcgccgggtttgatgtctcaaccactcgcccggtcattgccaacattcaaaccgccgtgaccgcagcgcgagcggcagggatgctgatcatctggtttcaaaatggctgggatgaacagtatgtcgaggctggcggacccggctcaccgaattttcataaatcgaacgccctgaaaaccatgcgtaagcagccgcagctgcaggggaaattgctggcgaaaggctcctgggattatcaactggtggatgaactggtgccgcagcctggcgatattgtgctgccgaagccgcgctacagcggtttcttcaatacgccgctggacagcattttgcgcagccgcggaatacgccatctggttttcaccggcatcgctaccaacgtctgcgtcgaatcgacgctacgcgacggcttttttctggagtatttcggcgtggtgcttgaagacgcaactcaccaggcggggccgaaatttgcgcagaaagccgcgttgttcaatatcgaaaccttttttggctgg

SEQ ID NO: 69561 - DNA, 525 bp, Heterodera glycines
atgataaagaatattgcgccaggaattttcgatttgcgtcatttgactgcgctctacttgggcaacaatttgttgcagcgaatacctcccgaaatagcaaaactttccaatttatcactactggacttatcgcacaacaaattgcgcagtttgccatccgaaattggtgacatggttagtgttcaataaattgttggcaatcttttacaatttcgatcccgaagagaaattctaaaatatttcgaaatttaatgttaagctcacaatcagaactgcgaatagcattttttaaatccagaaaaaaacatcattttattttccactggaaccataatttgtaaggattaccaattgcgggttatccattttcaaacacataaacatttttagatttcgttgtgccacctttacttgaactccaaccaacttcgagtgttgccctatgagcttggaaaattgttccgactgcaaacttttggtctgagagaatattctatggctttaattggtaatttgtttgtctga

SEQ ID NO: 69562 - DNA, 294 bp, Heterodera glycines
atggaaatctttgacgaatttattattattggcgaaaaagcaatcggtaaattcgcgattactggaaaatcttcacattgggaaatgatcgaatttgttgaactgtaatttcattttttaattttcatttataaacccatttttagtgagttcacgagtgtgacaaccgactttaaccaagcattggaaatcgcggacattggcaatgcttcttccaatccgtcggatttggagccattggcacaaattgtccgttggcattggaaccaaaatgggacgcaacaaatcagtgaa

SEQ ID NO: 69563 - DNA, 330 bp, Heterodera glycines
ccgggactcaaatgtcccgctcaggccaaaaaatttttctatttccgggaaaaaatcgaaatttttccgaaaaaaataccagtcgatagagctcgaaaaactatgttttggaagtggtctccgtttttctgggaaaattcgttaaaaaatcctaaaattcaaaaacccaaaaaccgttttttaggcctagctcgaaaaattttgaaaattttcgaaattttaaaatctgaaaaaatcgagcttattgaactctacaataagtctgctggccaccctgcgctcaggtcaaaccctaatgagttattcgcctggtactgaagtgggaaaaaa

SEQ ID NO: 69564 - DNA, 856 bp, Heterodera glycines
  unsure (1)..(856): unsure at all n locations
agcaagaatattgctatcttgcctaggcgggattctgacttagaggcgttcagtcataatccctcagatggtagcttcgcaccattggtctatcgaccaagcacatgaaccaaatgtctgaacctgcggttcctctcgtactaagcaggattactatcatagcaacaggtctttagtagggtaaaactaacctgtctcacgacggtctaaacccagctcacgttccctattggtgggtgaacaatccaacgcttggcgaattctgcttcgcaatgataggaagagccgacatcgaaggatcaaaaagcgacgtcgctatggacgcttggccgccacaagccagttatccctgtggtaacttttctgacacctcttgctggaaactttacacattcaaaaggatcgataagccacgctttcgcggtccgtattcgtactgaaaatcaggatcaagtaagcatttgcctttttgctctacgagaggtttccgtcctctctgagctcgccttaggacacctgcgttacgctttgacagatgtaccgccccagtcaaactccccgcctgacactgtcatcnggcgcgggtcgccgggccaccgggtggcccgacttaacaccaaaatggacaccctttcgggcgcactcccgttttaccgattaagtaaggaatcgatgaaagtagtggtatttcactggcgccttgcggctcccacttatgctacacctctcatgattcttcacaaagtcagactagagtcaagctcaacagggtcttctttccccgctanatttgccaagcccgntcccttggnctgtgggttcgctagatagtagatagggacagtgggaatctcgt

SEQ ID NO: 69565 - DNA, 2495 bp, Heterodera glycines
atggacaccgacatcgaaacgattgttcgcgggtgcagccaatgtcaacaagcagccaaacaatcacccaaacaagagccactccaaccttggccagcaacaacttcggttttcgaacgcattcacattgacctggctggtccatgcagtgatggcaacatttacctggtggtcatcgacacattttcgaaatggccagaagtttttcttctccgtcaatcatcgtcacaggccatcattgaccaacttcagtggttatttgatagggttggtattccaaaaacgattgtttcggacaatgggccccaattcctttcacaaaatttcaaaaatttttgtaccaggaattcaatcaagcacattttctcatctccgtaccacccgcaatcaaacggagcagctgaacggtatgtggatttcttcaaaagacaattgaagaaatgcaatggagataaggattggtttaaaaaaatcacttttgtcataccgttccaccccaattgcagtattgagtaacagatcaccgtcagaattgtttttgggtcgcaaattgcgcactcacatttcactcatgcgccctgatcaaagtcaaacacgcacaggaggaaacaatgccaacgcacacaaaatgaaaacacagtttgacagaaaattggagcaaaaaggattgagttcaaaataggcgatcaagtacagtttgttaattaccaaaacggtaaaacagtttggctttttggtaaaattgtggcaaagaatggattaattcttaaaattcaatccacataattagcacataagatcatcacacgtcacgcaaacgcagtgaggttatcggcagcaaatggcactgatcatgagtggtcaaccgacgaatgcaaccacaagaacggactgatcagatggatcaacaccaagaaacagaagaacaaacaccggaactgcgacgatcaaaaagaacaaccaagaaagttcgatttttgagtccaaggcccaccggccagcgacatgagatcagggatcgtgattaagatttttgtaagaggggaggtgttatattattgccatttcatattttcttggcattatgtttattgacacgtcaccactttcatcgcccataaataccgctctcttccctccttcctcgcttcggacttcattcattcattctcatctcatcatttgcatttcaccacacacacaatttgtctctcttttctcctctgacttatttattatttatttattattgattatatttgttgttattgataaacgacgcaacatattcagtgcgcaaaattttaggtatttacctaaaaaaggaagccctaataattatcaatttgcttcgaagcgcaatttgcattaagtatatttataatacaatccacggcttaagctgcaattctgctggcctttacatattgtttagttgatttttccttagaccctgacttttaacaatctttgattatacaataatttaataaaaattatttcactttttgtagtgtatttatggtaaattgggttattttaacaataataatttattaactttataaaacatatttttaaattttaattacttaaatttatatttttcgttttcgggtggttttttggtctgattttttggtcagttttttaatatttgagttttctctaaatacccaaaatttttaaaaaatgcttaaagacatgttgtcgtttgtaagtttaaatttacgacgaatcaatatcactggatagatacagttcaacggtgctagtgcgttttataaattccgccacccatgcacatatttttattttattaccatgcgcgttttataaatccgacagcatatatgattttaaaaaatcattataatattttatataagaaacattatgattatattaaaaatatttttttaattaataataaattgcataaagaggtaatggaaatacagaaatacaaggtttcagaacactaaatatgttttattttcctactaagatagtttaaataagaataaaataacaaattttatatgtataatggcatgctaatttatgttggcggatttataaaacgcgcaaacacattttggcggatttataaaacgcgcaaacacattttggcggatttataaaacgcgtcagcacgcactaatgaaaatatagttaatattctaattatatatttttcagctgtatttgtgtgatgatttattaagtgactaaatcttttatggatttaattagataaatcgaattaatagacctaatcaattattattggcagacttcttacaaagtttctaaagatttcgtaatttataataacatttgcttattgttttaattaaaattattttgcatttgaattggttgtattttttgtttaatataaaagtttaaatttttattatattgtttataaatatgaaaaatttgaaaattcaaaaaattatttattttgcatttttaactaaaaaaataaa

SEQ ID NO: 69566 - DNA, 887 bp, Heterodera glycines
  unsure (1)..(887): unsure at all n locations
atgattgaagcacttgaaaaagtgttcaaaaaagccggtatgatgcgtaacaaactgtaagtgaagcaggtttgagtttccaagcaaaacggatgattgaatgctggaagcaaaaggacataatcaaaaacataatgtacagtcctagcctgcattcgggtgtggttgaacgggcgaatcgaacactcaaggagcgcttatacaaatattntagcgaaaataacactctccagcttctataacctttaagaatgcttcggcgttaaaaaaactcctatataaagaacaagctgatgacaaggtaatcaaagtaaaggcaaaattcaaatttggcgatattgtaagaattagcaaagagaaaggacaaatttcaaaaggttactaacccaattttactgacgaacttttaaccaaaatcgtcaaatttcgtgtcttgggactcctaaaggttcttaacaattatttacggctgtttttacggttttcagtcactatttctcgattttaagcaactaataatctgttccttattcataaccggttagtttttgcctttcaataactgcaaaatagttcgttccattcgaatctacttgatgagtaaagcacaaaaaaacatattttctaagcatgttttcggtttgcgttgtgaagaaatttggaattttaaaagattatctgggatttttaggccgattcgcgtagtaatttcggaaagaaactaaaattttatgtagcataaaaatgaatcggaaaaatgtaccatcttatttaaacctactagtaaattctttaatgtataaatttattttttatagattttaaatagaaaaaaactattatttaaattattcggataaacatatatgtaaatataactgaaacca

SEQ ID NO: 69567 - DNA, 466 bp, Heterodera glycines
atgtttaattttttgaaattattattttatgagacagtatgtcattagaagccgaccggttactgtaatttgaaaaaaaatccaccggttcattcactgtcaataacttttagaataattttagaaatttcaacaaacattaatattgtaataatcaatcaggtgacagacggagtaaatcatgcgacaacaaatctgagtgttgaagttttggatgtgaatgacaatggaccacaatttgttcaaccttacatcgaaattgaacggtcaatggatgtgccaattgggcacattttaacaaaggttgaggccatcgacggggacatgtccaagcacaattcacaaattcgctacacattggaaagtgctgctgcttttcaaaatttgagcactgctgatttggattggctttcttgcggccaaaataatggtaattgaccgataatttaaaaaattttaaccgtca

SEQ ID NO: 69568 - DNA, 56 bp, Heterodera glycines; identical to SEQ ID NO: 52733

SEQ ID NO: 69569 - DNA, 659 bp, Heterodera glycines
aacaaaaaaatcgattttttcaagtgtccgtttggggtactcaaacaattatggggagcaaaaatccaacgcagaattaaagtacaggctatagggaagctattcccgaaggattcggtctccccataaatctgggcgcatcggttcggggggactgccccgaaaacaaaaaaatcgattttttcaagtgtccgtttggggtactcaaacaattatggggagcaaaaatccaacgcagaattaaagtacagactatagggaagctattcccgaaggattcggtctccccataaatctgggcgcatcggttcggggggactgccccgaaaacaaaaaaatcgattttttcaagtgtccgtttggggtactcaaacaattatggggagcaaaaatccaacgcagaattaaagtacagactatagggaagctattccggaaggattcggtctccccataaatctgggcgcatcggttcggggggactgccccgaaaacaaaaaaatcgattttttcaagtgtccgtttggggtactcaaacaattatggggagcaaaaatccaacgcagaattaaagtacagactatagggaagctattccggaaggattcggtctccccataaatctgggcgcatcggttcggggggactgccccgaaaac

SEQ ID NO: 69570 - DNA, 157 bp, Heterodera glycines
acattctgtccacgctgttcaccgcgtcaaaggcggtgacattggcagtcttttgggcgctttggccggcggcgcagatgtgaacgccaaggacacatcgagcggcaacactctgctgcaaatggccataatgacggggatcaccgaaattgtgaag

SEQ ID NO: 69571 - DNA, 326 bp, Heterodera glycines
atgcacaaatatcagcccgtcgtcagtcttttccgacttgtcgatcgtcaagcgatgcatttgtgctcatttgagccaccggaaacacaatttattgtaagtttctaatggctttatttgttgtgaaatggccaaattggcactaatgagcggggcgtggcgttgacttttaagagctaatagtgagaagtgttcattttaggctgtcaccgcctatcagtgcgaagcaatcactcgccttaaagtggagcacaatcctttcgccaaaggcttccgcgagggctcttcgcgcaagcggacgctttccccgtcgcccattttcgcag

SEQ ID NO: 69572 - DNA, 786 bp, Heterodera glycines
atgcacaaatacgtgtcgccgaccgtcctcttcgactggcgcagaaactttttccaaatcagcgccactggttttgcccgagagtccgaccacttacagcaattcgccggacttggtcgacacgtttactggtacaactgggctggcacacgcctcgccccgatgggtcgtccagtgggtattcaaattgagcaaatgggaaatcaggatggggaaaaatttcgtcaacgaattgatcacggtggtgtggggggggggggggtgttgtagatcaacggacgggattttacttttcctcgttgccttttaattgttctgatcacatttttccgttttttagtccttcactcgtgcggtcggcccggtcaagtacatggtgctcgcttcgttcgacgtcaactacacccggcgtgaacaaatggtgaacattcggacggaggaaaagctgacgctgtcgagcgatgtgcatcaaaggccggatggtggctttgtgtcatctgtgaagattctacgctgtccagcggtgttcacggaagcgaacgtgatgtcctggttgcgtctgccgcgtgtgtcgagcgaatggcatccgaatttggtgaccattggcttctcagatgacgaaattgggtatggacgagttgaacaaatttatgattcagtattcttatttccttcgttttcagaccgatgccttcgaacagaggaaccgatcgggctgagaactgagaaggataactgcggatcaacaacagctgagccctaagcacaatggccatgcggattaaa

SEQ ID NO: 69573 - DNA, 79 bp, Heterodera glycines
attcatttttagtgaaaaagtgcagttgttacccagcagtggaaaaaaagttattggttaaatagcaaaaaaaaaaaaa

SEQ ID NO: 69574 - DNA, 617 bp, Heterodera glycines
atggtttattttttgaatttaaaaaccaattaaaaagtatagtaggcacaatttcattttcttccattctttttgtctatttgaatattttaaactatagaatttttttatttttggtcaatattgtagccatacattttttactaaaaaatgaaccatttttgcgattttgagccaattttttaagaaaaattgggaatttgggggccggcggtgccgataagcgccctcgggaaattttttccaacttcattaattagtataacaaatagtgccaagatttgtatattttgaaattgcaggtcccttggcattacactgttccaattggccaccggccgattcccctacgaatgtgtgaacaacgcaatggagttgatgatcaccatccacaacaatgacccgccgcgtcttgagcctaaccaagtgggatgcatttattggagaaaaaactaacaaattttcccccccataattttaggatggtcggcaattcagtgccgagttctgtcagttcattgccgactgtttgcagaaggacatgaacaagaggccgaagtacagggaattgcttgtaagttttagaaaaaatcggttttacattgtcattaacaaaa

SEQ ID NO: 69575 - DNA, 509 bp, Heterodera glycines
atgggcataacaattataaaatgtaattattggattataaagtaaaaatatttttaatgaaacaaaataaaataatttttaaatttaatttaattaaattataattatcttcaatttattcaaatattttattattttatttaaaaaaaacatttctcaaaaaaataattttatattaataatttaatacataatatttgcgctttcaattaatgaacctgcattttaaaaacaaattaatattttatttaaaaaacattaaaaattctttctttttcagcgtactcagttgtcccgcgcttcatgaacacgagctgagttggcccatgaccgcctatgggcaaacggcacaggtggcatgcccgccgggcacatatggtcatgccgaatggcactgctcggccaagacgaagcggtggaacacggaggaggggccaaacatggccaaatgcacgtcggaatgggcacgagacttgcggcgtgaacataaggacgatgagacggggtga

SEQ ID NO: 69576 - DNA, 1378 bp, Heterodera glycines; identical to SEQ ID NO: 8900

SEQ ID NO: 69577 - DNA, 1198 bp, Heterodera glycines
tcccacattattggagatcgcgaatgtcaagtgaaagtcccattttcaaaggtttgctttttaccccctccccccccccctctccctaaattatctcaaaatttaagaatgcgctttcctcaaaaatatttgttggtcgactccaagaaggagtcacgcccattgaattgaaaaaacgctttatggaagaagcgcaaaggatcgaccccgactcatcggtcaccgacgtttacattccgcgtcctttccgttccttcgctttcgttactttttcgacgcctatcgttgccaaggaattgattaagttggtaaaaaatccagttttcaatttaaatgtttttttagaattggccaggtcgacttcaaagacacctccgtcagcatttcttccgcccacagcactcgtccccaggactcgaccgttcactctgtccaccatcactcttcctttattccgccccacccacacaatttcgtccctgaagatgtaagaaaaaaagacgataatgtgtggtaattaattctttgttttttaggatagttattctacaagtgaactgtatagtaattatggcacaaacacaaaatgggaattcgatgaaatggcgtcgatggcaatgccaaagcatcagctgatcacatcgactcccggcattcagcaaagccgaaccgcgggcccaatgttttccggtcggttgtcatttctctctaatagaattgattggtcgacccttggaagtgaaatcacgcattttattttacacttttatccactcatctcaggttcagtacagcaacatttaaatcagccattctctgctcacaatcaacagcacccgccgattgcggctggtagtcaaatgctcaaccaattggagacactgaatctgaacaacattggcatgccacaggaagtcgtcaatgccgcgatcaaagtaattggtttaaataaacagtaatgctccatttatctcatcctaggccattgtcgcggctgctgcttcctccgctgcccattcgcacggcgatccctcccacagtcagcgcgcctcttcctcccatctctcacagcaacaatttgtgcgttatcagtcgctttcgccaccccaacccgctgtgccggcatcgtcagcgccaatgtctcgtagtccgatgtattcccaacaaatgacataccgacaacaaaacggccgaggag

SEQ ID NO: 69578 - DNA, 533 bp, Heterodera glycines
atggacagacgaagcggagcgaaaaacgaggcgatgcgaagcggggtcacgaagcgacagcagggcgcgacaaagcaaaaacgaatgatgggcaaagaggcgccggtggggacgccctccgcggtagggacggctcaacgcgagcgagaggaggaagacacaaccggacgaattgtcgacctattggtcatgggattgccattcgagctgagcgaagaacagctccgtgcgcactttgagtcgtttggtaaagtggtccattgcgaggtctgttctttctctacgtaccatttagtgaacatgaaaatgcattgggtctcaattttttgcctctgcacaataaattgcatttgtttgtgaggctgattttgttattctatataaaggacataagagagttctgctcacaaacccttttacattaaaatttttttatttagatcaaaacccaaaagggccatctgtccaatcgaggcttcggtttcatccaaatggccgatttggaggcacagaagcgagtgctcaaacacaaa

SEQ ID NO: 69579 - DNA, 968 bp, Heterodera glycines
aaggtctttgcccgctcgttctgcccaccccgtcgtgctgttccgttgtgatcgtgcggaaccgatgttcaaccccgagttcccgctggacaagtacgagttggacagcacgtctccgcttgtccaaaacatgctcagccgacgggagcccaacctttgctggcaggtcatcacaattttggcccaaaaggggggggggggaagggcgggtgaatttcaacagcgataaacttaacatttttttggcatttttgtattgcgtctgtaaaataaaaataatacgaaggcaaaattcttgtgcgttttcatgtttataatgaaaagtttcaattttttgcatccgaatttgagtgcatttccttaccattttcaggtgttcgtcgaggggtccttcaaacagccgggaattgggcttccgtttggctatttgaaggtaaaaatacccatggaactgtgattaataattgcctagttaattcaaatccctaatccgaaggtttcggttttttaaattactatagcttacaattaggtattaggcgtttaatgaatagagatgccagatttatggttttatgatcagagtgatcccaaaaactctccgagaacaaattttgatgaccggacatcatcataaaacaattattgcaaaccaaaagagtggatttaatgattttcaaaaagcgcaaattttcaagtaatgccaacttttttaaaaatttattcccggctgtgttttgtcctattctgtcatttcttaccgtcctcccattttttaaaaattcatttcccccgttttcaaggtgtcctcctcctccaccgtcaatctgctggtgatgccttacaattaccccgaccttctcacgctgttggcccaggccaaagaagggcccgaaatgatcgccagcgtccccttccaacaacgctttgacaaatatttgaacaccgtcccgccctattattacacg

SEQ ID NO: 69580 - DNA, 330 bp, Heterodera glycines
agcgaaaattcacgctgatcagtgaccccgaaaagcttgtggtcatttttgtggacggaccagccgaaacgtcagatgatttgccggaagattggattcacctttggaatgaagcagctttaaaggtaagaaagaagcgttttaatccaattaaaagcttaatctaaatttaccaattcatgatttcgcatagctctctctctattcaagaatttgaggtcgagaaaattttcatttttatattagctttgtgattatattaatttttttgtaattatcagagcccggaattgggatttggtactgtaacggggtgttggatctgacgta

SEQ ID NO: 69581 - DNA, 535 bp, Heterodera glycines
  unsure (1)..(535): unsure at all n locations
atggagaaagagnctnaagtatttaatttttttaaacagaactggtggaaactgaaaaaggtcgaaccaaatgcaaatgccgccggtgtttccgattcgttttccaaagatgccgaagaagaggaggacaaagacaaggaagaggcggtgaaggaaatgccggggcagcccaaaaaggtgggaaagagaagcaaacggagaaagagcctcaagcatttaatttttttaaacagaactggtggaaactgaaaaaggccgaaccaaatgcaaatgccgccggtgtttccgattcgttttccaaagatgccaacgaagaggaggacaaagacaaggaagaggcggcccaggaaatgccggggcagcccaaaaaggtgggaaagggaagcaaacggagaaagagcctcaagcatttaatttttttaaacagaactggtggaaactgaaaaaggccgaaccaaatgcaaatgccgccggtgtttccgattcgttttccaaagatgccgaagaagaggaggacaaagacaaggaagaggcg

SEQ ID NO: 69582 - DNA, 522 bp, Heterodera glycines
atgtcgggacgcaaatgtccgaaaatggcccttaagaaatgggccgcaaatgtccgaggcgcaaatgtcgggccgcaaaagacggaccgcaattgtcgtttttggctggtggccgcaaatgtcgtgacacgaaatcaacaacagaaaaaggaaacagcgaagggggaggagaaggaagagaaaatggggggaaaagagagaaaaagggaggagaaaaaggagcagcaactgaagaagaggaaaaagaaaattgcagctgaacaccatcagaaacaacaacatcagcagaagcaagaacattggaaggaggagagacggaagagaaagagagtaaaatggaggagaaaaaggagcagcaactgaagaagaggaaaaagaaaattgcagctgaacaccagcagaaacaacaacatcagcagaagcaagaacattggaaggaggagagacggaagagaaagagagaaaaatggaggagaaaaaggagcagcaactgaagaagaggaaaaagaaaattgcagctga

SEQ ID NO: 69583 - DNA, 1029 bp, Heterodera glycines
ccattaccattccatgccatcaaacagtgaacgccaacggggagcaattcaccgcctattccattcacatggccggaaggcatctcggctcacgacggtacagcgaatttctgcagctgaacaaattgctcaaggaagaattccccgactttccgtttccgaaattgccacggaaatggccatttcgtcactcggagcagcagttggacagcagaagacgcatgttggagcagtacttggagaaagtgtgcgcagtgaaagtgattgccgagagtgacactgtgcaggtgccgtggcactgcttttccgacttctttcccaatgcctttcaggagtttctgatggaggattccggcggtgctttgtcagctccgttcgtcgacgtttcgttgcgcgtcattgtctgtggcaacactctttcgttgaacatcaaaaggcacagcgacacgcgcgaagtgttcggcagagtgtgcgaggagttgaagttggggacggaggcggcgcatttttgcgcattgtttgaagtgatcgaggtgaaaaatcatccaagaattgtcaaaagcatggctaaaacgagactttttaacacaaatacccaatttggggcgctaaaattctttgaaatcgcttaaactttttcttatatgcttgttcaaatggtatattaaactagaaaattccccagaacgccgaatgtgtctgattttaaggattcattcgcacgtaaattgcacgaccgcgagtgtccccacaacatttatatacaaaattactcttcggctgcttcttcttgcctggccatgcgcaaattttgtttcgacgttgagaaggaaaagcagttatgcgagaaggacaaattgtttcgtagcatttgtaagtttgggaatgagggacatattttcaatttcactgttttatgatcaatttaaaatctttaggcttctatcaagccgttgaggacgttaataatggcataataaagggcggcgagcgattgtaccaattaaagcactgcaaagggacgacgat

SEQ ID NO: 69584 - DNA, 154 bp, Heterodera glycines
atggaattggtattgaaaatcaccaaactggagcttaaaaatgtgagtgttatttaaagtgtcatttttttgaaaattaaatgggaattgctaattaattttgaaaaaaaataaattttttaatattaaatgattttagaagggactccaataa

SEQ ID NO: 69585 - DNA, 523 bp, Heterodera glycines
ttgaattcaatcgattcatatggtctgttgcccgaggcaattgcgattggtgacgatttggcacacaccgagaaaagatggccaacccaagcgattgtgttgcacacttttgaacgacaagtgtacttcgattgggtcaacaatttcaagaaggtatggtcccatatttttttgcatattactgattttgactacttctatttttattttccaaattgtttagcaatttctccgtgccaatgccatttcttccgtcagttaccaaattcattttactgttcatgcgccatcaattgtgacatttgaattggtgaacgaatggacaaaggaaaagctgacattggccaaagcaaaggaattggacaaccgatggataatgaaacgatgcaaaattggggaggccgtgacggttcagcagcagaagaacgatgaaaattgggataacaattggtgttctttttgctttttagtggcactaattgtgttgggatcttcggaaaatccttaacaaaaatgcaataaa

SEQ ID NO: 69586 - DNA, 789 bp, Heterodera glycines
ggcaggacaagaaaagaatgaagttgatacctcatgaaactcggaattggttatgtttagtcgaaaatatccttacataatactcataaaaaatacaaataattcaacccacctattctatgcccacattctgaaaaaaatcccagaaatacgaggaaagatatgcttggtcacaataaaataaaaaatggctagtatgtaaaaatttgcggtcacaaataaaataaaaaatggctaatatgtaaaattggcgtccagaaatttttagactaatccgaagcaaagcacgaatgaattaaagaggcgaaagaattcacagtatcgtttctaatagggaaatattgacaggatattcggctaaaaacgggtttgatcatttttagcgcatttttaggtatacatttgagacaattgggcaggacaagaaaagaatgaagttgatgcctcatgaaactcggaattggttatgttttgtcgaaaatatccttacataatactcataaaaaatacaaataattcaacccacctattctatgaccacattctgaaaaaaatcccagaaatacgaggaaagatatgcttggtcacaataaaataaaaaatggctagtatgtaaaaatttgcggtcacaaataaaaaaaaatggctaatatgtaaaattggcgtcttgaaatttttagactaatccgaagcaaagcacgaatgaattaaagaggcgaaagaattcacagtatcgtttctaatagggaaatattgacaggatattcggctaaaaacgggtttgatcag

SEQ ID NO: 69587 - DNA, 1375 bp, Heterodera glycines
atggcatttttgcattttctcacgccttgtggccattttggtaggtaaaatgggaatgaaagggcaataaaagtgagtgggcacatcgcagaacagaaaatttatgcgtggtttggtttaacatttaaatgcgttaatataattatcagggctcgcaagttgaaacaatattttattagcctaaaaaccagggctgctaattgaaacttttcaaaatagcatttggccaataggaaaatcatcatttggcgtcaaaatcagcattttgataatttaattcaaaatgaaaaaataattgaaaatttttttttacggcgcgctttttccaaaaaacttttggtgaatgggggggggggggtgtccggcggtgccgatagatgccgccgggaaaattttcgaaaacttgaatgcaatttgttaaaagattttcaccaaaaatgaccaatttttgagattttgagccaattttgaggaaagatagacattttgactattttttaacagattttctctgaaattttggttattttacactcaagaaaatgaaataatctcttaattcttttcaaaaacgaattaattcaaatattcgcttcaataaaaatagtcaaataggtcattcaaattttgcatttttttattttcaaatccaaaaataagcacaaaataagcacgtaacgctgaaataagcacaaatcttagaaataagcacacttgcaagccctgtattataatcaacccttaattgtttatttccgattatttttgtttaattgttaaccaattaacagaaagaattcccgtcaaaaatgaattttcatctaaaatataaattataatttttttaatacaatacaatttgtcagtgctcacttgccttttcgtcagtttgggcttagttttcgtgcccaaattgctgttcatttaccactggcccgaacttaccaaggaggagcaacagcaaagcacgcagcgccaattgttggaggtgtcagcgccgaaccgtagcgaacagctacggtatcagcaactgttaaaggaaaatgcggagataaaacgtcaaattgaattggtaaaaaataaaaaaataattctatatattagtacactttccaatatttgaaatttaaatcaaaaaattttcaattttcagaggaaccttcgaattcaagaatgtcgtcggattttggagggacatatcacattgataaatccgctgaacaaagcaaaaaattcgacggtacgcagaagacaaaagcagcaacagaacaacaacaacaacaatgccaacttaggcaacaataaaaatgccaataataataatgataattataaaaatggaagcgaaagaggcaaacgaagcgacaaaaagtga

SEQ ID NO: 69588 - DNA, 483 bp, Heterodera glycines
atggacccgaccacgaccattacgttgctggagcccacaacaaccgcgtcgggtggcgaggaattcgatgaagcaccacccaattacacaactgaagaatcggaaggtggaggaatagctggagaaaatgtggtggaattcgcatcgccgccacgcattgggaagggcaacgccgggggcgaacagagggcaatcgcacggcacgcggaccgacccccggtggaggcggaggaagagcgggagaggggtggaagagcggcgacgcgaggcggagaagacacaggcgggacaaaaattgggggcaaatggaatgggaaaatgggacaaaagtgcctttttgtaattccaggagtgtgcagcgattatgaagaggaagaagatgaagcggacggagaaggaagcggggagaaggtcgaactgatgtcgacagagtccgacgacgccaattggccaaatggcgatgaggaagaaatactgctttaa

SEQ ID NO: 69589 - DNA, 657 bp, Heterodera glycines
atgctttcgccaatgcttctcctcctcctcccgctgcttctcctctctctgatgcccaacattttgtccgaggcgcggccccaatggcttttcgggtccgggtcgtacgccgacgcgatgaccagcggcaccattttggacaatttgtggtggggccgcaaatgaaggaacggatggacggaagaagaggacaattaagggcgataagcactgaatgaatgacacgataatacattaatatataaacaattactgattatgtttatttaaaatatcgaattttaaaaaactccaaaaaactttagtaagttgttgagcttatttaaattaatatttgcaacaattacaatatattaaaagagtttatgaaacttttattgttgataatattggcaaaaaaacggcgtataaattgcatataaaatatatctattataaatctctattatttattaggttggcaaacaacattaaaataaaaattttatttaaaataaatagataaatatttttgcagcgttttggtagtttttaggaaactcttatttgatttgtgttatggacaactaagaaaagcgaaatgatgagatgttattttttgcttgcagaagaattctagtaatttctctttagaaaatttgaattttttaaattaaa

SEQ ID NO: 69590 - DNA, 1137 bp, Heterodera glycines
ggggatcagcagcagcaaaactgcgaacagttggtcacgcttttcgaggggatgaacaagttcttccgggaggaggcgatcatccagggctcggaacattcgtccgttttggtcagtcgtcccaaatggatttttgagttttccgagttcagtttggcattttgattctgtccgcctatattttggtcatcgcttttggcgccgttggcaatattttgactatttttgtggttcttcgcaacaaacagatggtctatttcatggcaattttcaattattccgtacaaatttgactttcagcgatcagtgcgcaactttttcattctcaatttggccatgtccgatttttttgtgtgcacagtgaccggtgggatttttttttagaaattttcgcttcccccgggcgattaaccattaaatgctgattggtatcggtcagctgctgctgatcagtccgtgatcaatcagaaactactctttcagcacccaccactttgtacaccgttctctacgtgttttggccctttgggacgacgttgtgcaaaattgcgggtagtctccagggattcaacatttttctctcaactttttcaatcactgcaattgctctcgacaggtgaaattttatcattgtctttctctaaataaatattccgatcaactctgatcactcttcaattttaaacaattgatttactttccatttgatcatatttttcaattttacacatactttggatcataaaagggaagaagctttggttggacggttaaaagccataaggcggggttgaaaagactcattaggagagatggctaatgcgtcttcagtcggcgggagagatcccacgacctccgccggtgcggcgattgctctcacccaaaagcaatgccatggccttccatctctcttaggtctctaatgagcattttaaaaccctaaaaaggtattttctcgtcattttcccgacacggcatcagtgtcagcaacgcctttcgctgctgttcttttcaatgatttggttggcctccgttctgttggccgcccctttgtttcttgcggccgacttgcgacccgttttccagcaaaaaagctgccaaatcgaattgaatctgtgcagtgagcagaacgaacgg

SEQ ID NO: 69591 - DNA, 58 bp, Heterodera glycines
aaacaaatttaaaaaccggtcgcgaagcgcccgcccaagcccaacaaaatttgaaaaa

SEQ ID NO: 69592 - DNA, 136 bp, Heterodera glycines
atgcacattgcgccattggagttacatccattggcacgcctggttcagggtcgttaccataaaatgcactgcttgtgcgttgcttcgtgggatcatgtacttgtacgtgttcttacgttacttgctcagctcggct

SEQ ID NO: 69593 - DNA, 68 bp, Heterodera glycines
tgttacgacttttgcccggttcaagccactgcgattaaatcggttccagtctgcataccgaccgaagc

SEQ ID NO: 69594 - DNA, 999 bp, Heterodera glycines
atggttcaagaggtttggaattctgatagaagaggacggaaaggatttgctgagccagcgaaagttaggcttttgcttggaaaactctctgacgaagagtataacaagtacagggacagcattagaccaacgcaaccggacacagtcaattggaaagagtccattgacaaattgaagggtttgttttccgaaacccggtcattatttgtccgccggtatgaatgtttccggattcgtcaacagccaaatctgatcaccatgacatgagacaaaaatgtttgaaaatgttggaggaggcagagaaaagtggcgcacggatttcgctcggacaaattgaagaagagttgaaaaccatgcagcttatcaaggacagtgcattggctctcctttcgcctccgatatcaacaaatgccatccaactttgcccacaacaatggatagagcccaaatcaaagaaaggaaattacaattctggcaaaacgacagcaaaccagcacacaacgggaggcaaagcaaatcaaagaaatccgacctatccatgcggtgcttgtggcaattccgatcattggcgatcagattgcaaacaaagtggcaggacattggttgaacgtcggactgaatcgcggtcaaattcttttagtttataaattaccgttcaataacacaaaatcaaattttataggcagctttcaataagtataatccaattgtgttttgtctatttttctctgtaattctaaaaattaagtttgttttttaaagcaaaaattctgattacatgttttcgttaggtatgttataacttacggccttttcttgtttgttctcacccttttttggttttttacttatggaccatgtgatggctggccccttgctttcgttgatccattttgtgctacaaacttttccacaaaaattacagtccgcttcatttggtttatttttttataaaattccaaacatatgaagtcatatcttaatagcaaagataataaa

SEQ ID NO: 69595 - DNA, 211 bp, Heterodera glycines
atgttgcccaattcgtcgtcaattctgctgttgcacaaccttcgaaaacagtcggtcaacgcgcttccgcttggtcgtcaagcagtgcacaacgatgtccaattccccaactttgacgcgtatcgcaacgaattgaccaaagacccagcgcaaccgtctcatgtgactgaggacaggcgcaaaggcgtgtcaagcttcatcttttatggag

SEQ ID NO: 69596 - DNA, 486 bp, Heterodera glycines
atgccaaagtcgtcgctgtcgttcagtcattgcagaatcacaatgccggccttggctttacttattccgctgtcactgatcgcagtgagtaatgcgaggtcagtcggtcattctcccctttcccctccattcatttttgattttggcagagtgttcacttccatggccgacttgctggacgagcagcaccaccagcagttgcacctgcccctgtggagatcggcctcggggctggcgccaagtttcagtccgttccgttcgcccccagcggccgctctttctgctgaaccaactgacgacgaagcggaagagacggaggaggacagcccaatttcagtgccggcgactgcatccggcgaagccaaacagaagcgaaggcttgtcgtccgagtgccatttgcgcagaacccggacaatcttcacctgagccgtaagtggtcgaaggaaaacccaattcaattagcaaaatggttgactggctattaa

SEQ ID NO: 69597 - DNA, 56 bp, Heterodera glycines; identical to SEQ ID NO: 52733

SEQ ID NO: 69598 - DNA, 1696 bp, Heterodera glycines
atgatgagggcaaagaaagttggtgcaagaatttcaataatgatcattaacaaccatgaaaatgatcaggaatcaaagggcatcgccaaagtgtccgaccttttgatcgagtcgactcggatcatcgccagagggtgggccaaaataaaaatgagaaaacatttaaatgattaagagacaaattaccgaatggagtgaaacttccaaatttggatagtggtaagtaagtgttcacaaaaatgatgaatttcatcatttcattggcatttaaattgaatattccatctttggcactgaaatttttttatgtgtcaaatttctcatctttcaaacattgaaaagaatcgttgcaacggcttttgcccgaaattgacgtgtcgtcctttgttgccaatttcaccgcttttctcagcgaagacggaagtgccacgacggaggagtaagtgaagaattaagaatcaaaaagcagcaaattttaatcattgtttatgttactattatttgtaaggttcagacagggcctgggatccggcaaaacgcattggttttataatggaaactctggccgagtttcatttatgggaaaaacataattcctttgcatttttatacattcaactaatcaaaccatttgtattttaattattattgtgttctaattcgtggtatatttgagagataacaataaattgaatcgtccgaaatttttttgaaatttgcccgggcctccctgagcatgggtttacccctttgtttccataatttaacctctaaaaatgattgttttttctttccatcgtcagatgtcttccgcgaatgctcccatgcgaccatttaagcaggtttttgaactcaaaataaaggaaaaacagaaaatgggggcaattgaaacattaagatttcgttcattctccggatggtgcaacaatctcaagtaataagcaaattattaccaaatttgctaattatacaaataatttagacacccattttatggcaattcgttcactcccttgcgccatttgttgccgccggtttatgacgacggtgagacatttaaaatcatattaaaagactaagtagggtaatttgtgacacaatttttaactccatggctaacgaataccgattgttttaattatactaattgaattaattacttttcaggttttgatgcaccgcggaatcgtgccaaaagtggtcagtctcaatttattgggatggagttacgccattcttttatcattggggaataaccaacaaatgtgatcattgatttgaacaaagcaaaaaattaataataatcagttggatgatcaatcatcgggagtctcgagatcaatcaattcttagtataaacaatgattttgattagttatcagtggggggggcatatttaaattttaaaaaacgacgaaaaatatgtaccattttagccaaaaagttgctacgtttttcaggcgttccgttgccctccccccggcgcatttccaacgcggtgcacgtcgaccgcgacttcagccatgccaagttcacacacatggtcatgcagttcggccaactgttggaccacgaactgacccactcgcccatccaccggggaccaaacgacgaaattctgaactgcacgcggtgcgactcgcacgagacaatttcagtgcattgcatgccgatcagagtggagcgcggcgatccg

SEQ ID NO: 69599 - DNA, 437 bp, Heterodera glycines
aaaatggtctaagtaaaaatcgtaattacgctcaaaaagcttctcaaacaattttagcgcttccaattccttctacaatcgcctttatacatcccattatgagcgctaaaattatcagagtgccgaaaatcgcatgtgatctaagcctagaaaaaatggtctaagtaaaaatcgtaattacgctcaaaaagcttctcaaacaattttaacgcttccaattccttctacaatcgcctttatacatcccattatgagcgctaaaattatcagagtgccgaaaatcgcatgtgatctaagcctagaaaaaatggtctaagtaaaaatcgtaattacgctcaaaaagcttctcaaacaattttagcgcttccaattccttctacaatcgcctttatacatcccattatgagcgctaaaattatcagagtgccgaaaatcgc

SEQ ID NO: 69600 - DNA, 1010 bp, Heterodera glycines
gcgtgcacggggctatgaagtttttgagcacaaaagttttgctgggcgattggtcccggggccgagcttatgcccgcgacattctcaacgatttgcgcaattgggtggtcggatggactgactggaatatgtgtaaaaccattttttaaaaatatataaaaataataattttaatttaattttttaaattaaattttcaaggtttggatttggagggcgggcccaatttggcacggaattttgttgactctccggtaagaaaaacattaagtcgaatttatgcgtgtataaaggagaaggattttttaattttcatacaaaaaatagattaaataattttaaataaaaatgaaaatatattatttatcaaaaattaaaatatttctatgagcgtaaaaaggaaaatattttccgtattattaaattataaaaaaaattgttttatttgtcgaaatttttcgaatttacgaagaggggtaagggttacggactgggcaacctatacggggtacggacttacgggtttgatagatccataggccatgtcgaacaaatagcagatacggacttacaggtgctaaaaaactcgagtctgtgccgaaaaaatacgggttgcgcgcccgtaaaaacccatatacggacggacggtccgacctgtattcgaactccaattattaggtggtgctcgagagtctcccgtttttttttttttttgtttttgcgtcttaactcgggaaagtctgtcgaaatttttggggccaccagtctcgagagtttgaatgtggggaattttggtctcgagcatcactatatatagtaattaaatcattaatgaatgtttgattcccccataccgtaatccaaaaagacacatcgggttactgtagcgccggtccatttttcaatttgtaattggcacactattgttttttttttttgcagatcattgtgaatgccagagctggcgagttctacaagcagccaatgttttatgcgatgggacattttag

SEQ ID NO: 69601 - DNA, 375 bp, Heterodera glycines
atggaaaaaaggaaatatccaaataatttaatgaattattgctgggggaggggaccaaaaaacaaaacgaaaattaacaacaaaaaggaggtggtcagttcaaaagtggagaaaaaggggaaggtgagttagattttaccagcaaatttataattaaatatgcaatacagcccaaacgcagcagtctgatcattctgaagagagagaaacattgggagaatggaaggagaaagacaatgatggatgtgttgcgacgaaattggcaaattatgatgcaccaaagtccaaaggatacgacttagtgaaaaacgtcaatttgcttgctaatgactttggtgcataatttgacaaagagagaatggcgaaagaggagga

SEQ ID NO: 69602 - DNA, 94 bp, Heterodera glycines
caaaacgacggacgaccaacagcagcagcagatggacacggcactgacaatgatgagagggaattgcggctcacaaacaatcggacggatgtga

SEQ ID NO: 69603 - DNA, 242 bp, Heterodera glycines
gaaagggtccgtgcgtttcgtgtcagcaaagcgaagaagtcaaccgccagttgatggccgcgcttctgaaggaccttggaacttcgctcgtcaatttcgccgcgaaattggagcagccgtcgaaatgattggacaaatcgaaggacgaaaaagtgacgaagcgaaagacggaccgactaaagacccatttattaactgtgttcagttcctatctaaagtccttatcaattttatcataatac

SEQ ID NO: 69604 - DNA, 444 bp, Heterodera glycines
atgcccaggtatcctcaaacttgaggtgtcaaaccgctttgttataaaaataattaaggaagcatttcatcttacattgcgaagaaaattccaaaatatgcatcctccattatcaaagtaactattgaattttaaaaaataagacacaaagtacacatttttagattaattttagttttgaaagaggaagaaagaattgctcaagacaaagttaggacttatgagttggacccaacaagcggtttgaatttgcaacctaggcgaaggacatactataataatgatgtggccatacgcactcttgtcactagatttgatgcacttgcaaaccccgaaccagaccaaattgtgcatcacttaagagcccttcaatatcgcttagcatccaatggatttgacaatttaatccatgaataatgattttatattttatcgattaataaa

SEQ ID NO: 69605 - DNA, 1180 bp, Heterodera glycines
atgattccaactcaagacgaatttcgcgttgaagatttgttcaaaaaaatcgcttcttatatggaccgtgagtcacttaaggaaatatgttttttcggtaataattgtataggaaatataaatatagaatagctattaagggaccgatggacaaataaaaagagcaaaatctgacaagcatggactgacaacattgtttttatatgccattcaaaatgacaaaaaacttgacctacttgagtgtctctgattatatttaaattgccagttgggcctttggcaagccattaataaatttaaaatattaattaatcaaaaaatttatttgcttttttttgtttgtttgtgtgcgctttttaagttagtgtgtctacggttgggccgaaacacacgtaattagttgctttttaaccggaagagaccgtactgacgaggcccactcttccaaaaaattttcttaaaaaataatttttttttattcagaaaccgtccgcaaatgtccctccgcaaatgtccgtccgcaaatgtccgtccgcaaatgtccgtccgcaaaagtccgtccgcaaatgtccgtccgcaaatgtccgtccgcaaatgtccgtccgcaaatgtccgtccgcaaaagtccgtccgcaaatgtccgtccgcaaatgtccgtccgcaaatgtctggtagccaaaaaaagagacgccgtttttcgatgagaaagatttgttggatgtgaggtgaggataggagagcgaacattgccaacaaccaacataaattttatttacatacattgatttattttttggtgctggttctatcacgaaaatgcaaaaatatttacaatacaccaggggtgtgatctgtcctgatttatcagatttgtcttgatttgaagggtccaaatctgataaaataataatgtcctgatttgtttgatttttccggcggcacctatcggcaccgccggaccccctcctctcacccatttgtctaaagttattttagaaaaatgcgccgcaaaaaattatttaaaatctgattttttgatcacgaatgcattaaaatttacgatttgctaatcccaaaattgttaattaatgggagatgaaaaaatattatttgataaattgtaaaaataattgatttgtaagcaatttcgcaaaatgtctgatttaaaattgttattaaa

SEQ ID NO: 69606 - DNA, 444 bp, Heterodera glycines
atgcccaggtatcctcaaacttgaggtgtcaaaccgctttgttataaaaataattaaggaagcatttcatcttacattgcgaagaaaattccaaaatatgcatcctccattatcaaagtaactattgaattttaaaaaataagacacaaagtacacatttttagattaattttagttttgaaagaggaagaaagaattgctcaagacaaagttaggacttatgagttggacccaacaagcggtttgaatttgcaacctaggcgaaggacatactataataatgatgtggccatacgcactcttgtcactagatttgatgcactcgcaaaccccgaaccagaccaaattgtgcatcacttaagagcccttcaatatcgcttagcatccaatggatttgacaatttaatccatgaataatgattttatattttatcgattaataaa

SEQ ID NO: 69607 - DNA, 310 bp, Heterodera glycines
ataactcgattaggctttgacctgagcgcggggtggccggcgagacctattgtgaggagctcgatggagctcgatttttgcgatttttaaaaatttcgaaaattttcaaaatttttcgagctaggcctaaaaaacggttttcgggtttttgaattttaggattttttaacgatttttcccagaaaaacgaagaccacttccaagcaacagtttttcgagctctatcgactggtatttttttcggaaaaatttcgattttttcccggaaatagaaaaaatttttggcctgagcgggacatttgagtcccgg

SEQ ID NO: 69608 - DNA, 661 bp, Heterodera glycines
atgggcaaggactactataaaatccttggcttatccaagggagcctcggaggacgacataaaaaaggcatatcggaaaatggcgctaaaataccatccggacaaaaacaaagaggcaggggccgagaataggtttaaggtactcttttgcttttcaccaaatgcagttttaaataaactaatccgttttttatgatgtggcggaagcatatgatgtgttgtcagaccctaagaagaaggaaatttacgacaaatttggcgaggaaggtctgaaggctgatggtgctgctgggcagggagcgcctggtcgtgcgggcggataccattacacattccagtgggtttaatcttctttattttgattttctattaaacattgtggtctaacagtcactaatcgttttttaataaaataaaaaaacatgttgaattctttgagattgcatgaaacgccttaaacagtctgtctttattaatctcctgcaatagttgccagttatatacatgaaaaatctctaaacaaagttcacttccaattttgttctaccattttcaggggtgatccgatgcaaatgttcgcgcaagcattcggtggaccaaacggaatgttcagcgagttcacttttggtggtggtggtggtggaccggaggtcgaaaaatga

SEQ ID NO: 69609 - DNA, 526 bp, Heterodera glycines
atggccatgacgtttgtcgtgcgttcttctgcgtagcgagtaattaaaaaaattattcaaaaagattagtgatgaacgatgctttagaaatttactggccaaattaaccctaaccatcaatcggaaactgcttcttacattgacattagcagttttagtttatattttgccgattttctgtcatacgtattgattgggctgatcatttggacacgatcaacacaaagtcttgccttttattaaaaccaaattttaacgagtttttggcattgacgcattaaataatgtaaatttaaataattagtttcggcacaaacgaaaaaattgaattttctgtcagttttctcatggcaagtgaactcatctgctttattttggtcagcatattaaatgtttaataattaaacttaaatattaatcatttcagaatacactctttgctcgtttcatatttccattgctcaattttgacgcatttgcaattggatttttcgttatccaattagtagaggtgcgccgtgactga

SEQ ID NO: 69610 - DNA, 583 bp, Heterodera glycines
atgttgacaaatatctacgggaccgattcgttcacccaggctgtccaggacggtccgcacgccggccaaacggtggaggtatgaagggcaagaatgataattccattccatggtctttaattttcagcacgtccatgtgcacgtggtgccgcgcaaggccagcgattttggcggagacatggaccgtttttacaccgaactgcaggggcacgagaatgagagaacggcacgcagtgccactgaaatggcgacggaggccaagacgtacagacaatggctagcggaaaacagtggaaaagaataagggacgaaccgatggaagcaattttttaaaatttttttggaacagttgtgccattttcatctatttgtaaatttgcccctccccattccaaaagatccttccaaattatgtgctaggtatcagattttcataaatttaaatatcataaagtgaaaaacaattttcccgaagttagaaatgtatcgaaatcagaaaaatggatgtggacgagataggaaagaaacaactgacaaatgaaactaaaagtaacaggatggtggtcttcacataatgaataaa

SEQ ID NO: 69611 - DNA, 212 bp, Heterodera glycines
atgcgggaatgtatggcgcaattcaaaaataactaaatttaattaattaattattaaatttaaaatttatttaagtccaaccaccggtgttgtggccgaaactttgctgggccccgttggttataaattcttcgccggcacattcattatttcattgggtagcacctgttgttatgtgtccatttttatgttcatccgatgcaaaaatggcg

SEQ ID NO: 69612 - DNA, 281 bp, Heterodera glycines
atgtgccaatttgtgtgcccacctgaacgccgcccggtacaacccttcgatggtcaaatcgtatggactctgttggctcaggtcgtacgccatttcttcctgaacgctcaaaacgtcccaggacttcagtgccggctgaacgaactcgccaagaacggagatcgcaacgggagacattgtacgaggcttaatttgaaaaatatacaaaattttcagggcgtaacagggggaaagtggcaaataaataatacacatcatgaaaccccaactttcttgaaaaa

SEQ ID NO: 69613 - DNA, 155 bp, Heterodera glycines
atgtctcccgttgcgatctccgttcttggcgagttcgttcagccggcactgaagtcctgggacgttttgagcgttcaggaagaaatggcgtacgacctgagccaacagagtccatacgatttgaccatcgaagggttgtaccgggcggcgttcag

SEQ ID NO: 69614 - DNA, 83 bp, Heterodera glycines
cctttttcacatcgtccgcagtcactgtcttcagaagggcaatgaaatcgtcgggtgtcagtgcggtgccctggccaacaatt

SEQ ID NO: 69615 - DNA, 646 bp, Heterodera glycines
atgccgactatttctgtgaaaaagcgtttgttggacaaacatttgcgcgtttcgctctcgcaacagcaagtcgatgatttgtgcttccaatacgggttggaagtcgatgacgtggtaattgttgggcttttaaattgttttgtcaaattaatttgctttggatgtatttttagttggttgaaaaagacgagaagacgggacaggaggaggaagtgtacaaaattgagatccccgccaatcgctacgatttgctttgtgtggagggattggcacgggcattgctcattttccaaaataagtacgaagtgccaagtcatcgaaatgccatcgttgatcatttgtttgcttttcctttttagaattacacctcccgtttattctctgacgaatccgccgaaaacccagaaaatagtggtagatcaatcggtaaaaaagcagaaataaatgtttccatttcccactaaaattatgcattttcaggtgagtgccgtgcgtccctttgttgtcggtgccattctccgcgacgttcactttgacgccgatgcctacgcttcgttcattgacttgcaggacaaattgcaccaaaacattggccgaaaacggacattggcctccatgggcacccacgacttggacaccatcaaag

SEQ ID NO: 69616 - DNA, 1843 bp, Heterodera glycines
tccctcgaaggacggacggcaacacggcgccggtggcgatgttcccacggtgtacaaagcggtcaatggcacaacctttgaccgggcggagctggagcgtgacccggccctgggacagatccaggaatggagtttccccatttttcggcttgccgagaaacacaagaggaccgtgttgagcagggtaagcgggaattacttagaacatctcgagaaaattgggaccaaaataaatacgcacattatctgtttgtcggccccgactccgggcccacggggacaaacggcacatgaacaaaatattttctcagttaaaaatattcccctccccccgaatgtagacttttcgaaaacacacaccttacacttcgaactgaaatcattctgtcgacaaacaaaaactgttgaactgttagaatatggggggatatttttcggctcccgaaagctagaaaatcttgattttgtggggtcaaagtcttaatatttgagtgttttatgcttaatttgaagaataaaataatttacaataccgaagctaattcaacaaccttttcctaatactcaaaagagttcgtttcgttcagttgacttacgccatcttcaaagaggccgacctgttccgcaccttcaaaatttcctacacaaaattcttcaacttttttcatgcgctcgaatcgggctattgggacattccatgtacgaatttcttttatttaaaagcacccagttgcaaaattaacatttttaagatcacaatcgaatccatgcggccgacgttttgcacggcacttactatttgacgtgtcatcccgtgcacgccttttgcaggcaaatgccatttgattttggcaattatattgagtccattttgaaaaattcatttgttccagttaccattcctctgaattggaggacgaagacgagttggaggaggacgaagaggcgaacaacgacacggcgacagacgccgcctactccacggaacagccgttgaccaaccacaacggccagccgaccacgtcgacgacgaatggcggtggtcgccatgtgctgcgacagcaacagtcgaacaccgccaccggcgctactcatcgcaattgtgaggctcacccacagcagcagacgttcgattcggcggctgttgcgcttgcgcaaagcatgagcccattggaggtgagacggtgggaacatattaggggacattggatggcatttgtggatttggtctaattacagtcactgcatttctaaattgtaactttttttttaaaatttagttgatggctctttacacggccgctgcaatgcacgattatgaccatcccgggcgaacaaacgcatttttggtggcatccgaagaccgaaaagtgagtgtgaatggctgccatttgtgagggggtggggaagagacaaaatgccctattccgttgaattttcgaccatttcgtctcccatttaaggccattctttacaacgaccgttccgtgttggagaatcatcacgcggcggagtcgtggcgactgctcaattcccatgctcaattccaattcatcgagaatctcgactcggcggaaacgaaacgatttcggtgcgtggaccaagcgaaaacactcatttttggacagtttttaattgacggcatttaaaaatgaatattttttgttattttccaccgttttgactttgcagctatttggtcctggagtacattttggccaccgacctcaagcagcacttcgacatcatcatgcagttcaacgagcgagtgcccgacatggacctgaacagcgaatccgatcgtgtgctgatttcgctgatgctgatcaatttgcggacataa

SEQ ID NO: 69617 - DNA, 1937 bp, Heterodera glycines
atgcttttcccggcattcgccgaagtggatgaatatgacagaaagggggaaaaggcggatgaaagtgaggggggaggggagaggtgggctttattttgacttaaaacattggtgttccctcccttccccaccttcctgtgccaatccatcataaaaaccgaaaaaggtcggccatcctctcaaaattgtgaacacttttggcaccaaaatgtgtttatgccgactgttgatgggttgtttctatgcgacccatactataaatgccaattagccccctcctccccctgtcgtttcggcgcgtgctaatttggcaccaccagcggcagattgttgatgttttgttgtattcctttctccgtttgtttgccaatgccatcctccgtcaccgtccgtccgttatgaaaactatgaagggcttcttccttgctcatgctgtatgtgtcagtatgtccaataatctccctatcccgttacaatttttttccatcctccgtttaactcttcgctccctcccccttgtctcacatctcattatataaatgtttggttgtaatgatcgcattgccatttttaaatacttataattttttggcatcatattttgagccatccatttatataactttttgtttttttaaatctcccacaattatttttacagactgcaaagcctcgtgtctccaatattactttttccacggtcacttcaggtgagtttttatttccccttaatttatgtccgacatttacaaatgattttattctttttagccacgggtttaccaaccattgctgtcgaaccgtctcgcccgcgatcaagcaggtggttactgtgcaaatgggctatcaattagcaaattgtaattggttttcaacgggaacccaattcaaatcccgagattcgtttgccacatttgttgtagttcgttctttctgcgcatacttttccttatggccaaattgacggacggcacccattcttttttcacttctctctcgctttatcctcatccttttctattttctccatctctcactcattttaacttcttttcaactttctctctctttcttctctctctcttctctctctcttttctctctctctctctctctctctctctctctctctctcttttcctcccttgtcaccactgaagtgtctgccctctgttgtcgagaatctcgaagacgaccaatgtgtggcatttcttccatcttgctctgatgtatgcctttggccaatccttcctccacctgtcattctcggctctttattaaatctggcacggcactttctctctctctcgctctctcatcatttactctcctctccttttcacccctctcttctccgacaaaatcctcatcctccttatccgttgcctcctttctccaacattattccctcttcctttttcccatattttcattctaatccaactgaggatggttggttggaatttgatgaaagttaatggcttacaaattaggatgaggcgggggcgaggcaattctttccttattaggagtaaatataatgagaaattaaccctgccctgaaatagaatttgattagataatcaaaatcataaaaccaactcttttttgtcagttgttggaagccctctcacgctcacaccattcaaaaccatggcggccatcacggcggtggcattgcgaccaatttcagcaacagtttgccacaacgcataaatttgtacgaatatgaggacgaacttcacggtgaacagcaacaacatgttgagcaaattgcgccgaatgacatggcatggaaggagcagcagcacaatgaagttggggaccaacacaaacagcaacagagacggcggtcacagcgactggtgaataataatgaggacggtggtgaaccaagtgggcaagcagtacagcaacaacagcagcagcaacggtaa

SEQ ID NO: 69618 - DNA, 2767 bp, Heterodera glycines
atgaaagcgatgggaatgacgacacgtggaaaaaatgggagttggcagatgaatttgggaatttatttgtcagagcatttattaagcccatatcgaaagaagaggacagtcaggtaattaggtatttttccctctaataagtgggtttgttcaaaagttattaattaattaaattattgccattgttcggttgctcaaaaatttttcgaataaaatgaattaaaagaactttcaagtttaataatatttacacatatttattaagcttataagatgataaagaatacatttttaaagaaaattattaaattaacagtgatttttaagtttagttcaattaaaaattgcttaacctaatacttatgaaaataatttaaatttcttttatttttagtcaattttcttagcaaattttgtaaaaattcaaaaaaaaaaattcacccattcctacctatcacactaccgatgactttttggactttgataaacacattttctcagtcaaaaattagggtttttgagtaattagttaattaatcaagaaaaagcttttgtctatgtattcattggattggatgtttttgtgggatttgatgaattttttattttttagattttttacggttgtgtgattgattttccaaagcacaatgaacatttcggttttccgaaaagtgttgcaatcaaacaagtgttcttcaggggtgacgaatattataaggcaaaagaaatgttgatccatgaagttgaaatattgaaaatggccgtacaaatggaggccatttacgtgatcaaattaattgattagtaattttttaacaaaaatatgctaaaatttttaataatattttagagaaaaattattataattatttttaaattaaatatatattttttaagcattaccgtaccaaattcactggtcatggtgctggaattgggcgaagaatcgctaaagcatcgcttaaatcggttgaaaattgagtggaaaaaacatgggaatttggatgtaataaattcggatatcaaatccattttcatccaaatggtcattgctttacgtgatttgcatcgatgtgagttggactcacaaaaaataaaattatattattgggataaaaaacttttcatttttaaagtaattattttaatattacatatacatttttaaatattaagtatttttttatattaattaattaccttagtaattctatattatacccaaaattttaaaacgaaaaaaaaacatgataaaaaaattattttctaaaaatgattaaagatttaaaaaataataatttaataatttcagttgcaatccatttggcactgaaatccgaaaattggctttatgtaaaccgaaatggagaaaaaatgttggcactgattgactttcaaacaagcgcactaattcaaacgaatggcacaattgataacagtagcaagatcaagcggaaagaattgaggtaatcatcagttttaaaagttgtaaatattaatttaatatttcgttatgaaactaaacattaattgttagaaatacttaaaaaccctaataaaagtgtttcttgattgcttaattaaaaaataattgtttctttcaactctgccagcctccaaagattttttttaattttgaagaatttcttctctgtaacatttgaagaattgagaaaattttcctgctttttatgttcccgttctcaactctctagtctttaaaatttcgaatcccgtctatctctgtaattataggcaaaaacattttagttacctttagtcaaaaacattggatttagcatttttttcttttgactataaatagcggtgtattattttttaggtcctttatctgtaaaacatttgtcggacgtacccatctgccgcgaacacgacgttttgccagtccggaacacaacaaattttgtgaatctcatggtaaaaataaggtaagtgggatagatgagtttgtataaaatatttaaaactgcaaatataattatttaataaaaaaaatttaaggtttcattttcaaataattaatattaaatttggttaaatttaataaaatttaaacaaaatcattttctgattaagctcgatgttcaaacggacatttggtcacttggcatttcgttgttagagattttggcatatacaccacaaattgatgccgttttcgattttgaattttctgttgaagaaaaaagaaaattcaaaattttgcgaaattcttttgtcgaagaaaatgaaaacaaaaacaaacaatttgccgaaaaagcgaaaatggcagtttcagaatatttccccaattttagtgtgctgattaaggtaaataaatattaattatcaattagcaaactacttaaaaaataaaaccgatttgggaataaaattagattttcattttaaaattaaataataaaagtagtaaaagtttatttttaaataaataagatatgtttaatatgtaattaaaggtattaattaatgagttatgttttctatttaatgccttttatatttttagcaaatgttaacaactgacccaaaaaatcgaccaacagttgatgaactgctaaatgaatttcttgattgaaatttcaaatttttccaacggttaatttttattcactgttaatttagaattttagaattttttttattggttagattatttcttgtataaatgctataaatatatttcaaatttatcagtagcttcttgatgtggtgtgtttgaatatggattcccaattttgaa

SEQ ID NO: 69619 - DNA, 583 bp, Heterodera glycines
atgggacataattcagaggtgtcacgaacaatgttcgaaatcggaacttcgggatcaaaaaatcagatttttgggtcaaaaactgtgttattttacaatttattcaatcaaaaaatcaaatattacgcttcgtgtaactcaaatcatgataggaataacaaaaaacaaaaaactgatcgaaacgcattcgcccaatttgtttacccaaattataaataaatatggtcaatatgcttgacgctcattcattttttaatgatttaaaaaacatattttattttaatgtaccaaaatttggctatgaatttgagtattaagtgatcgaaatcactttctataaccaatagttttccagccgatttaaattaatttattttttgcataaactgtgaaaaagtcgtgccattgaaaaataattcgacaaaattagaacttagggctcaaataacagttttttgagtcaaaaatcttaacaatttgtaaaactgggttattttacaatttatttaaaaacaaaaatgtgccaaatattatattttcagcccactcattaccaattttaacattattggagaagttataa

SEQ ID NO: 69620 - DNA, 665 bp, Heterodera glycines
atgcgcacccgtccgatctggcaagttaagcaacgattgctgactagccaaaaggttcggtgccgtgatgaaacgaaccagcactgcttaccccgcggcacccggcacggtcccccgaaggaatggatttaattaaattctctccttcggggatttttttccattaggtcgtccgttagcgttcgattgctctagtcaatttttcaaaatttttgttgaaatatttgtcgtgctctgaagggcgtgggagggggggggggggggcgaaggcccaccacgaggccgcgaagaggccgagtgagtaccttcggtgcaggaaaattattaaattttaaaattttttaattgctttttaaatatgccaaaaaatgtaggcttaacttttttagtgaaaattcgatcactcatattttttgctaattgagcagaagcgtaccaaactttgcagggatactccccggtaaaggactaacttacactgaaatgagcgccgagctagctggctcaaaaaaatttttcgaaaatctgagtctttcgtttttatttatttgcaaaattaattcataaatattttttcagaaagggttctgaaacgcaccaaattttatttacatgttagtttaggcactctgatgctttttctatcaataatggaggtgaataaa

SEQ ID NO: 69621 - DNA, 163 bp, Heterodera glycines
gttccttagacaatgtggacgatgcgcaattggacaccgtggagaaactgctgaaagaagcggaaaatcgtttcgattcgagcggcaacgaagtgaaaatgcgagaacggatcatacaagcggagaccaaagcggtgaagcagaagaggtgatcggaaactaa

SEQ ID NO: 69622 - DNA, 284 bp, Heterodera glycines
atggggagaacaaagggagcagagggagcagtgtctggtgaggaacagcaggtcggacaatggcagcaacaacagcaacaccatcggagagcgaggctttggcctaacggacggagggatttgggaattttgtcggttttaaatttgaaaaatcattttgttatttttttaaattatttttttatagtcggagaataataacaccgccgcccgtccatcaaaatcaaaatcattcccttttcttttctcttatcgatcaaatttgggagagcaaataaagaaaa

SEQ ID NO: 69623 - DNA, 858 bp, Heterodera glycines
tctttcaatgcttcttcattcctcagcagttcctcctcgaaactttcacctcgcgtggcttccgaatgcttttacagaggcgccttttaccatttctttgagggcggcccccgctcaccgcttttccccggcagaagcgacggaaaaactttcaaagacggggaccgatgtgttgaggcgggacgttactgcaaaagatcgccggaattggacttttggtgggccaatggcaaagaatgcgaaccaatcacagaaacggaaggtacccctgcaaagaaagagcggagagtgccaatgcgagtgcctttgagggctgttacttcgggcgaggacccctccaggcaaacgccaccaaataagccaatctacgacatcttttctttcgtttagctttcctggaattataattacgggcaggtcgaactgtcgaatcgtttacgatcagaaggatttttcagtttcggcattttcttcgaactgaaggcgttgaagtcgaccttctgcaacagcccaaccaattgctaacccgcctcgaccctccgctggcaatgctttcggcactttggtccgcccattccgttaatccttctcattcatttgccgtgcataattgtttcaattggaaggttttataatacgccacagcccccgaaaccatcgatgcatgaggtaaagattggctaatcgagaattattgaaagcaatgatggccatttggtcaatgatttttcgataatgaccgggcagtgggtccccagcaaaagaaatcgtcgaatagctacgaaggatcagtgtttgggtaaatggcagttaaaaggaagaaaataaatgagcttttcgcacagatttagaccaacc

SEQ ID NO: 69624 - DNA, 258 bp, Heterodera glycines
atgtcttcttcaataaatgatctggcaaatgaaacaatggtgcgttttccagggatttcttggattggttcatctcacttatactcattcgtttttcaatttcagtctcttattttccaatatcttcctccaaatgaaagagttcgtattgaaagagtgtgccgccgttggtgttttgtgtcgcgagaactcagttggtacaaccaaaagacacttctgctggatggtcaggaactcgcacaaaattttgatctgacg

SEQ ID NO: 69625 - DNA, 1324 bp, Heterodera glycines
atgggagacaaaccgatggtaaaaggcggaaatgagcagcagaccgagcacaatgccaagcgaaaggagggcaccgaccaaaggggcgacggtgccaagccaaaagtcgagcaaagactgcgcacggaaaagcgactcctaaagggggtaaaggaaaagcattgggggaaatgggggggggggggagcggaccggaagcaaagcgaaaacggacggagagcggacggaagcggaacggaactcgcaaagcaccgcctgttggcccaggggacggagctcgcgcgaagtgacgcgaacgccagcaacagaccaagcgcgagctgaaggggagacggtgagaaaagggagggcaaaaatgggatgccaatcaattggaacgatcgatcaattggtgggaaaaggaccgatcgatcattggggaaaatgatcaatcaatgaatcgatggaaaaagagtgaacgatcggtgattaattcatgccgtttttggtgcaagcactaatcaataaaaaggtaattaagcatcaaaaactaataaattaagaatgaacttagcacaaaaatcgggaaaatgttcacgacaacgcactttgctgatcaaagaatgcgcatgtcatattttctccgtccacttctccgttggcttccgctcgtctccccacgctttgccgttgcgtctgttgccgtgcgctccgtttgtccgtcctcaatcccaccacaattcgcaatggcaccgcctcccccgtgccatcgtccgcccttttgccttccatctgccgctgatcacttccgtttttgtttttcattgcctccatttctcccttttgtgtccatttgatttccatcattagcaacggactgtgcccatttaattgcggcaaaagcgtcgaattgcgcatgcaaattgccctcgcaacggcgtgcccttcgggatttggagtgccgaaaaagggacggacaaaacatgggccaaattgtaagccatcctgcagggaaacgaaactaaaattagggaggaactgggaatcaattagacattttgttgctgttcgattggtaaatcgtcgccgttttgtgccggggacggcaaaatgtcccacgttcgcatttgaaaccccccggcggcactttgcaaagagaaaggcacctaaatggcatatgatcaattaaaaaataattaatcatttatcattacaggtagtcgacgagcgaattcccgagaatagtctaacaaatgggcgcccatttgcgttgcatttcccccggcaaaagcggacaaattacgagagaccaaagagtcgagcacctaaagaaaagccacactaa

SEQ ID NO: 69626 - DNA, 294 bp, Heterodera glycines
  unsure (1)..(294): unsure at all n locations
atggaagagaagggaggggaagtgaagaaagaagaggagaagaatggaggaaggggaaggaaaagagagaagagaggaactgaagggaagagaagagaaaggaagagaagggagggaagagaggaagtgaaaataaaagaagagggggaaaagaagaaaagaaaagggataaaaagtgcagagaatggatggagaggggaagggaagaaaagagaagtgacgggaagagaggggatgggaggagaagagaggaagggaaagaaagaggagaaccaggaagagaggaagtgaana

SEQ ID NO: 69627 - DNA, 505 bp, Heterodera glycines
caaaagttttttacaacaatttattgccaatctaatttcttgcagattgaaagccatccattgcctgccgatactcggcacagcaaagcactaatagggtgtttgactcacttcaaaaaataattccttacccaaaagttttttacatcaatttattgccaatctaatttcttgcagattgaaagccatccattgcctgccggttctcggcacagcaaagcactaatagggtgtttgactcacttcaaaaaataattcaatacccaaaagttttttacaaccacttattgccaatctaatttcttgcagatttaaagccatccattgcctgccggttctcggcacagcaaagcactaatagggtgtttgactcacttcaaaaaataattccttacacaaaagttttttacaaccacttattgccaatctaatttcttgcagattgaaagccatccattgcctgccggttctcggcacagcaaagcactaatagggtgtttgactc

SEQ ID NO: 69628 - DNA, 811 bp, Heterodera glycines
atgggcaacgacgacgctgttgttcaggagtttttgacctcaatgaaacccgaagagtcggaaaagggcgagggattggagcgaaaattgtcacaacaaagcgcagcactttcgtctttctcagaaacgaaagaagccaaatcaaagggaacaacacaacccgaaaaagaagcggaagagaagcagcaaaatggggagacaaaaggcaaaggactgatcgagaaagaggcattgttcacggggaaggtgaagtacaggtgggagaagcggaggttggcaaaccaatgccctgaggcactcattcagcgtttatttggattatttgcgtgccattggcctctgcacctgttttctatgccttctcatcttcttctcctccagtattctcggcgtctcgtgtctcctttggcttgctaattggtcagaccatgcccaagaggtaagaaaagggcttttcagcggacgacaaaacctgcacttcggttcagttgcaaaacgaaaatgacaccatttctttggcgaccatcacacatctcggcatttacacggggcttggaatgggtcaaggtcattccatccattttttaccaattaataattccgtttaagcctgttttttggcgcttggctccgttgtaatgtctcttgggatgtctgttttccattcctcacttttatttggcatttcacaaattttagggtttttgccagttattcgctgcatgaaaaaatgcttcggagtattttgcggagtccgattgcatttttcgacatcactccgctcggccgtattttgaatcggttcagtaag

SEQ ID NO: 69629 - DNA, 314 bp, Heterodera glycines
atgagcgcaacagtggcaaaattgaccattcggagattaggccaattaattagaattaattaccggtttgcccggctcatcccacgggtttttgatttggtaatgtttgtccgtggccaatggctccgattcgccctctttgttcagcgctttgacccggaatttgtagttgcccttgtccttcagtcctttgagctgcagcgacgtttcgccaggcccgacttggccaaccggcacaaatttgccaccgccatcaacatcctgggaaaaaatattttcaaataattttaaattattttattggatgaattaaa

SEQ ID NO: 69630 - DNA, 216 bp, Heterodera glycines
gatgttgatggcggtggcaaatttgtgccggttggccaagtcgggcctggcgaaacgtcgctgcagctcaaaggactgaaggacaagggcaactacaaattccgggtcaaagcgctgaacaaagagggcgaatcggagccattggccacggacaaacattaccaaatcaaaaacccgtgggatgagccgggcaaaccggtaattaattctaattaa

SEQ ID NO: 69631 - DNA, 447 bp, Heterodera glycines
atggccaatttgagcaactccggcaatgatacggtaattatgtggtaaaaatttttatcacatccaaatttgcagttttatttggccttcaaagatgtccatcccagctggtctctgattggatgcgcactgacttatggaaccattgcattaattggcaccatcttcaatttttctgtgatttttgtcaccatcaaaacaaagtatgagatgattttatttgttcgaaattataattttttataatatttaaattttttggtcactcaatggcacagccaattacctcgtggcactttgctctttttatgaattgattcaacaatttggcatttttctgtttgtgtacaccatattttctggccaaaacttcattaaatgtcgcctggcagcaaaaatattattcattccattgattgcacttggtaattaaaattccctcataaa

SEQ ID NO: 69632 - DNA, 2839 bp, Heterodera glycines
atgcgttggcacacggacaacgacagaaatgtaagctcagccatcacacaaataatcagagcaatacagaccagtcagtcggggatatgtcggaatgccgattttccgctgatttcaaaaattttttgggcactcggattccgattgtcgagattgtttgagccgtcgaaattccgattgtcaattgccgaggttttttgagccgttggaattccgattttcaaaaaaaaattttcggcctcggatttcggtgccgatttttgagagcgtacgcacatatccctgctgctgcatatgcccggttctgatcagttttaggggttgcttaagaaaagaatgcagtctgtacactattttctaatgacgaaaaaaatacaaagttttttcttaggattttcaaaatttaaatttaaaaaataaatatattttcaacttttaaatattattattttttttaaaatttaaactaaatttgaatttttgtaattcttagggcttccatttttaggcaaatgcctaaaattttgcgcacttgatacgcaaagataagcacaaaaagcgcgttttccgcttggtttgaggtgtctaagatgactcttataatgcctatttttgcctatttcgtggtttttgtgcctaatgtgcctattttaggattttcgaaaaaatccttaacaaaaatgcaataaaaacgaaaaatacaccccctaagaaatgacccaaaaaatttttccagaaaatacaccccataagaattgaaaaaattttcaaaaattggtcccaaaacttaatatttttttcttaataaaaattttttgggtttaaaaatttgttcatattcgaaaaaaacattaaaatatttaataatttcaattgaaatatttaagatttaaagtgttttgttacctaaaaagcgttaataaaaaattttatatgcctattttagcgcctatttgaggatttttgtgcctatttaatgcctatttcgcgattttttgtgcctaaaaaaggaaaccctagttattatcaatataaaatatttgttattttaaataatgacttcaaaaaaaagatttgcaccaatttttgttaaaatttttattatcattatttcttcccttaggatttttttgaggtattttagtggcaaatgaggatttttatggctgaaatgaggattttcaaaattttgagatcgaaactctgctcttgcctaattaatggattgttaatgaatttaatattaaaaaaaaagattctttttttaattaccctgctggttgattttgggaattttgtgccaaagggttcacatttggcatttttgttatagaagaaattgacgaagcattggcatgaacgggttttgttgaattgcaaatacattcttaccggggcctttaaaattcaaaaatgaaaatttacaaaaaaaaaatctaaattttactcagaaggtatttgacgtttcgaaaatatattccaatttatgaaaaaataccatttttctgctgctttttttttgatgataaaaacccaaatttatttcacaattaattaattttaatttgttggtcatatagaatttgtatggtaaaaaagctaaagattaattgattttcaggttaatccggaataaatctaaattttccttaattacatactaattcccaatgcaaatgatttgaccaagaagttaatcaaaaatataatgaaggaatttttattcaattaattaattttcttggaactcacaaaaacaaaaacttaaattaaaaagtaaaaaccctaatcaatttgtcaaaagttattttaaagccctttacgtaagtgtatttttcgggacgaattcagacaattaaaatgcgggaatctttcgagcgcatattttaaattgttcaaacaattattgtaagcaataattcttagttcattaaggcaattatcgtgccacattttgtcaataataaaatgcctgcgataaattgttccgtccgtcagtaaatgcttggcaacactttttattttaacaacattttctttttcttagcaaggttttcattaaatgttaaatttatttatttaggatttaaaaaatttatcggtaattcctttattttcgaatttataaatttaccttttatctataaattaatgatggacaaagaaaaattatttaaaaatttttcagtgaaattttcataatttcaacaaaagagttatatgtaaattcattaattagttgtaattttaatacttattgacaacaattagacaaactgatgtcatttcaaacttttaaaaagtggctattaatatcagtaagatttaaatttcatttaatttttcaaagaaattctcatgattgtgtattctgcagtggaataacttgagttacatttgaaattcgtctgaaaacgaatggaaattccgcttggaatgcctgccgataatccgtactaaaattgcaaataaatgttaaatatttttaaaataaattttagaccttgtaaaatataaaattggtccgattgacgctgcgccaatgttcaaaggaattgagataattacatggcaaaaccaatgtgtgattggagaagaaattatgggaagtaaaagcaagaacacaatagtagtgaaccaataaccgccgacattcacagtgataatgaaaaaaagtgcgcgaaaagtgcgacgattgatcgaatcagcggacggcaaacctattaaaaagatagataattaagcaaattaactggcaatgcataccaacattttcaattgtgatttctaaaaaatatatatcccaatctccgggcgttgcctcccgttttttaataaa

SEQ ID NO: 69633 - DNA, 839 bp, Heterodera glycines
  unsure (1)..(839): unsure at all n locations
atggaggacaaggcttataaccaaaataccgattttctaagaccacctgcgcggggtgacaggacgccaaaagtggtcaaaaagccggtcagtgcaacgatgttgtcaaatgatgtgctgatttgtggatggattactggtgatcagagtgagtttaagggctgaatttgtgagaccagccgagggcatttttggtgccggacatttaaagtgccgtaattttgtttttatggtttgaccaagctttaggagctttttgtattactcaaaggcttttcacgcgcaaaaaaatgctaaaaaaaagaaaaaaaaaatcgaaaaaatcatgaaaaatagagaaatatttgaaaaataattttttcatttggtatgacaaccccatgagcttaanaatttttcgacatttattttggtcatgaattttgggtgcgcgaaaagccacctggtcaatataatgctgtccagccccgaatcggtgccccgttgttctttgcgaagacgaagaatgatcgggctgatcacggccagggacgaagcgcacaaagcaaacctttgggatcatagatcagtgttaattggtcataaatcttggcagattaagcactaagggctcagtttatggtagaaacttgaaagagtacagtagtaataataccgtaatggctaaaaacaaacccaaaaaggattgaagcaccaagtgggagatggaacaggaaatgcgaggccaacacaatgatcaaacactcaaacagagggcacacaaagccaatgccaaagcacagagtcttgggggggggggcaaaaaacaaattatttgcgcaattaaatcaatattttga

SEQ ID NO: 69634 - DNA, 545 bp, Heterodera glycines
atggctgatcacgaccatcgatcggtgcctgatcaggatcaccatctttcccgccctgttgtctcttcatccctcatttctctgttcatccttctgtctctctcactgctgcttggccgtcttctctcctatttcttcattcccttcatcacaggtgtggcatttcttccaattttggcacaatttcacaaaacccattttaggaccaatactgatcggcattctcttcacaaatttggtctcattccgttcactgttccactatttcccgcattatcaactgtcaacactgatctacgagatcgcttttctgttgatcatcatccgatcagcgtttggcattgatcagtccactgtccggcaattttatgttggattttgaattttaatatccaaatttaaatttcaccaagtttggaaatattcaattatcttaataggtcctttctctcaaaaaatggggcttaattccgatttttttttttgaaatttttaatattcaaaattttataaaattgctttattgattggataaaaagattaaa

SEQ ID NO: 69635 - DNA, 272 bp, Heterodera glycines
acttatatttttaaatattggtatctttaaagagtttaatcttttgaacaagtctagatcattgggaattaggccggataatattaacggaattcaaatcccggttttatcgggatcttaatcgcgtcaactgatggattcaaatcccgcttttgccggatagtgatcctgccatttttcaaaaggtcgggatgtggaccactagaaaatttggacgcgattccaatcccgtcagcctctatttttgatataatctgctggatatgaataaa

SEQ ID NO: 69636 - DNA, 304 bp, Heterodera glycines; identical to SEQ ID NO: 51570

SEQ ID NO: 69637 - DNA, 278 bp, Heterodera glycines
attgcgcaccgccctccctatcatgctcgatagtatttgtatgtgtataaaatttatcaaaaaaagagatagccatttttctgggataacctctaaatataaaaatcctctgtgaaataaaatggcgattgtgcacagccctccgtctcatacgcaagcgcttttgtgaggtataaaatttctcaaaaaaagagatagccatttttctgggatagagtataaatttaaaaattccctcaaaaataaaaggtctattgcgcaccgccctccctatcatg

SEQ ID NO: 69638 - DNA, 342 bp, Heterodera glycines
atgcctgctgagtatagaatttggcaagatgagaaaaggtaataaatttaaaactatttttaaatatatgaaatcgaataaaattcaaataaatgcttaataaaaaatcaatttagtttaacattttaatcatatattataatgaataaaataaactttattctaatttatattttaaattaacatggaaatattagaagataccgctcattgtgtcaactgctcaatgattttactacaagagctgcttttgaaagtaactcagacctaaaattcaaatgggcatgcttttcattattaaaataagaacgtttcaaaattaaaaaagaaattaaaaactta

SEQ ID NO: 69639 - DNA, 2269 bp, Heterodera glycines
atgttggatccggagtacgttaaatctcaaatcaaaaaattgggcggtgcttctccagtttttgaacagcaaacaaagaagcggaagcgttcagcaagctccgcttgtatgtaaatattcgtaaaatggaaaaaaccaaattttaaatggacatttaaacattttttttttgtgatttgggttcaaatgaaccacaattaacagtaagaagcaattttctttaaccaaaccttaaaaaattcacattaaattcctatttttgagattaacaaaaaaaatttgtcgaaaaaaagaaaaaaaaattcggcctcataaccttggcccatttttagcttccattgcaacaatctcccattctgtgagcagtgccaaccatcgcaattcgacgggtgccgccaaaaaacagtcgacgatggacaaatggctggtgccgaaaagcaaattggttgccgcggcggcggcgttcacaaaacggagcattggcggcgttggaggccaaggcattggcggtggctgcggtgcaaatgcaaagctaacaaaaagtgccatcgatgccagcggaattggcacggaaatcggcgccgttgatgaggcacaaatggtgaattttcaaggcatttttgtaaaaaaaaatttttctttttacacactatcccataattgtcattttttacattttcggtctttgggttaaccgctttttcgtacttatttataaaagcatccttaattaaaaaagttggtgttttcatcatgaaaaaattaaaaaaaaaatcaatgtttcccctaaaaattaagtggagtgggttatcaatacgaaaaaaccaaaaatttttaatgaaattctagttttcatttaaaacactggcccttccatttcgttaaatttttgagtcatgtaagtcgtgaaaacgaatttcaatggcatgtcatttgtcattgtatagaaagcagcacgaattgctttcccgggacggaacctttgcagaccgacaaaaacattaaaaatggtgaaaatttttcagaaaaaacgagtcagaaagtcgcccagaatttcaccggcgacaattgatcaaaaggtggagacaaaacggcgcaatgtgaagccaatcggaaaagtgacttggctggaccaggtcaaacaaaaaatttcaagatttttttttaaaatttcgttttacaaaaaaaaattgtagttttttttttttttaaatttttcagccttcaacaagtcatgaggacagcagccacagtttgatgccaagttcgagtgccaaatttccatcgaaatcggatgtccaatgggtgccaaattcgtccggtcaaaacatgccgaattcggatgtccaacttgtgcctgattcggatgtccaatttgtgccgaaatcggatggccagcaagtcgtgccgccaaccacgggtggagaacaaccaatgggcacggcgacttctgccgttgcattgctgttgaacgaggcgcccgagccgagcacgtcgaaagcgcgtcgcgaccgactcctccgcgaagtgtttggccaccggaagttccgcagcagtatgcaaatgcaggcaatcaacgcggtgatcggaagtgcgttatatacacaccccatcaagggcctgtgattagaaaaattagaggggaaacccgaaatcgaaaacttttttttttttgctttcccccaattttaggagtaattgcggaaaaatattaattcgcttttaatttttgtgcattttgggtcaaatagaaatatttaagcaatttagcggataatttagttggtaagttttctaagtttgtctgatttgtttaataaaaaagccgataaaaatttccaaaaaaaatttttatttagtttttttaaaactttctctcaaaaataaaaataaaattttttttcaattttcatgccttgcccataaccaacgaggtcgggtggggtgaagaaataatcgaatttgacccaaaaatcttcaaaaattggcacatttttaggcctaaatcttccaatacattgcctgataaaatgccatttccaatttaatccccgactttttgcaaaattccgtgccctctctctcatccatttccattttttctcctcccattcttcagagaccgtcgacgtgttcgtctccttccccaccggggcgggcaagtccctgtgctaccaattgcccgcctgcttccattccggcctcaccattgtgttctccccactgctcgcgctcatccaggaccagctgagcgcgctgcgcgcgcgcg

SEQ ID NO: 69640 - DNA, 321 bp, Heterodera glycines
tttttgggccccggggtcgtttgggccccaacccaaaaatagaaaaatgtgcttttttaaaaattaagattctaaaaactaagcctgagggatccctcgccacttggcataagttaggtttaattaacattcgctcattttttacaattttacttattccaaatcctattattttttaatagttaaccaatttgatgtacattctgatttggacatttttcagaaatggctaacccaattgcaaccaaaaaacaaaaagtaaaattgtcttacgaaggccacctttacaccttcgctaaaatgagttctgatgggatgaca

SEQ ID NO: 69641 - DNA, 1035 bp, Heterodera glycines
atgcaaatggtccgtcccgccgttgaacgcatggacgaacaggtgaagaacaccaggaagagtcagctgttcttggccaatcacatcgaccaaacatcagaaagtgggtgagcaattaaccatatcaagtcaaaagagagtcgtgtaaatgaacatttttaaaacgttatggtgtaattgttgaagcaaaaaatgctgaacatatttagagttaaagaatttggtggatgaacagcttttgccctatgatttggacgcgtacgtgcgaaaattggatgagagtcgaaagcgaatcaacggaatcggccaaaaacttcaggtagaattctaattctctaattgaggcgatatttatgtcccatttagatactccaaaatcgaatgggccaattacagcggggaattgcccgagagacattcagacagaaacaataattagcttttatgaataaaagactaaaagcatgtgttattcctgccagtttcgtttaccgttttcacagtctcgcatctttattttctttttccctattttatttgttttttatttaattaaaaatttttgcacattaagaaatgcacagaacttcaatttatgcgaaactgcaggtgaagtatagtcgtcgtgccaagtttaccccgagggttgctcgcccgtggcgtcagcgggtcatcgcctgggccggccccgacgccttctcacgcgaccggtcagtccaacgcctatctttggtgtttcttcgatttggcaatctgtttacagcttttatgaactagactcgtggtacaaagcacggattcagagacccgaactgctgcccaagttgcatatcattgacccggatttaatcgtggacaattacgaaagcaaaattcaacgtaagacgaggggacgagagggttacattcatttgtattttgaaggacgcaaggaacggacccttgacattgggtttagaaagaatgaggcggcgcctgccaaagtgacggaggaagcgatgcaaaagttggaagagttgtccgcaatgaaccaat

SEQ ID NO: 69642 - DNA, 651 bp, Heterodera glycines
atgatttttgctttgaattgtggcttaatggcaatgttttgtgctgcttttgaccgactttttgctgttgtgtcgccatttaagtatgaaattaattcaacaaacactaattaaccctaattaattctttgatagattatttattgtaatttttccttttttagacattcctcaattttcactaaatacaaattaccgtatttgcttagtcatctgttaatttgtgtaatttacggtgcatttacactgaattatgtgctcgcatttgcattcgaaaatgcgggaaagtatggcgcaattaaatcaaaaattaaaattaattaatattattttttcagtccaaccaccggtgttgtggccgaaacttttctgggccccgttgggcataaattcttcgccggcacattaattatttcattttgtagcacctactgttatgtggcaatttttgtgataatccgatgcaaaaaaggcggtaaattcttaggcattttgccaaaaaaaataaaccgaaatattttttacagtaacccaacagacgaacacacgagttttacggtcattggtcatcattttgtctattaatattggcggatatctgaccaatttggccatatatcagttgctgtatgcatttggttcaattttggg

SEQ ID NO: 69643 - DNA, 277 bp, Heterodera glycines
atggcatcaattaataccagctcaaatgacccggtaaaaacaaaggatttaactattttaagttatttttggaaaaattaaaccaagatttatttaaataaataaaaatgttttcatttatttctagctttatttggcctaccgtttcgccggtccgtccgccgatttgattgtgccggccgttgcgctgtatttggttgttttggttggcattgtgttgaacggcacagttttggtggtcactgtcaaatccaggcaaatgccatggcatttttaa

SEQ ID NO: 69644 - DNA, 101 bp, Heterodera glycines
cttgtggatccaaccaagacaaagccttgcttcgacaaattcagtgcttatgtcaaagattggctgtcatgtgttgatgcaaaactggtcaaggaatcgag

SEQ ID NO: 69645 - DNA, 513 bp, Heterodera glycines
atgaaaaggaccggcgggagacctgttcaaatcctggtccatctagaaaatcctgatcctaagccgggttttttaaattcaaaattccagctgtattttaagtcaacttaattttggcgtcttcatttttatgggatccgggcaatccgtcagtggacaatccgttaacggataatccgtcagtgaaggacaatccatcattaagggacaatccgtcaacggataatccgtcattaagggacaatccctcactggacaatccgtcaacagataatccgtcagtgaaggaaaagccatcattgagggacaatccgtcggtggacaatccgtcaacggataatccgtcagtgaaggacagacaatccataattaagggacaatccgtcagtagacaattcatcaaatagatttttttgtgcaatgttaaaaatttttcgaaaataggttgtatagttgttactagtttttgaaaacatttctcattataaaaatttatttatgatcatgaataaa

SEQ ID NO: 69646 - DNA, 118 bp, Heterodera glycines
atgaccaacggaaaaaaaggggcggaagtgattgtccgaccattggccaacagagcgacaaatgccatgggcacggaaaatgccaacggaacgatggcattgggcgacggcgcgacag

SEQ ID NO: 69647 - DNA, 235 bp, Heterodera glycines
atttatgtgacaaaaggcgttgaaaaatgttatgtgcccgaaaaaacggactcaaaataaatgcggcgacacaaagggaattgtgcggaaatcaaacgaacggtaaaaagcatttgaattgaggaaactgctgaaaatggggggaatcctgcagatttagcgaccgacgaaggctttcttccgaaatcgctgctcttcaaaggcccttgtcagcttcggctgcactctctccgac

SEQ ID NO: 69648 - DNA, 479 bp, Heterodera glycines
atggactcggccgcctattcctacctgctggagcagcaccttggcggcgtctgtccggaggacatccaggacatcaacacgtactcccaggttggttgtgctcccgccggacaatccgtcggcgataaaatcccatccattttttaaaattaaatcgaacaatcgcaatcgcaaattttgatcatttctcgaaaaaattttttgcaaaataatgtccactgacggattgtccattatgaccgattgtctgaactccgctggttggttggttggtgatggtgaagtctcaaaaatactatttttaaaatcaaattttaaatttcattcttcagcatgcactgatgaggccggtccaagtggacgaagaggaggaggaggaagaagaagaactggtcgaagaccacgacgtcgaacgacgacaacaccactaccagcagcagcagcagcggaaatactgggtgggacagcagcaacagaag

SEQ ID NO: 69649 - DNA, 451 bp, Heterodera glycines
atgttcgcttcggtgctgttatcggaaaagcgtataaggtaaaatgggagaaaatatttcaatggcacggaccctcggaaaagggtaaaaatgccgagagtttagagtcgagaaattccattttcaaaattaatttgcacaaatttaatattttttgttgtaatttccgaactttaagggcacaatgtgctcctttgagttcagcggaggtgtcatcgttgaccatgccgaactgccggcatttgttgggctgaccgtagcgcatgaaatgggccacaattttgggttggcacagccaattaacgctttttcaccactaaaacttattttcttttcagaatggaccacgatgccggctatcccgagccttgcaaatgcccggcgcagcaatgcatcatggcaccggccagcagcaagttgctactgttttttggataatttaatgatggca

SEQ ID NO: 69650 - DNA, 438 bp, Heterodera glycines
aaaatgtgtaagtaaaaatcgtaattacgctcaaaaagcttctcaaacaattttagcgcttccaattccttctacaatcgcctttatacatcccattatgagcgctaaaattatcagagtgccgaaaatcgcatgtgatctaagcctagcaaaaaatggtgtaagtaaaaatcgtaattacgctcaaaaagcttctcaaacaattttaacgcttccaattccttctacaatcgcctttatacatcccattatgaacgctaaaattatcagagtgccgaaaatcgcatgtgatctaagcctagcaaaaaatggtgtaagtaaaaatcgtaattacgctcaaaaagcttctcaaacaattttaacgcttccaattccttctacaatcgcctttatacatcccattatgagcgctaaaattatcagagtgccgaaaatcgc

SEQ ID NO: 69651 - DNA, 1168 bp, Heterodera glycines
atggccactgcttgcaagttggaaatgagcttgggtaatttttcttttaagtatcttacaaaatgtcacatttaagacgagatcatcaaagcaaataagagcaagaccaaccaggcttcaattaatgggcgaaagactcaaatgactggaaagcgattgattcgcggcaatattgcgaagggaaagccattcatccgaaagcaaatcaatgggcagaatcagaccaaggtttgtttttaaccctcctgtcattcattacttaaattttatttggaagaagtttggacttaaacgcgttggaattaatgttcgccgtggtcgccctttgagaaagtctaaccgtgttgttgtcatgagaaaaaatttcgctgcgaagaacagagccgtaatttccgctacaaagaatttagtgaataaactcgtcaaggtatggtatgggaagagagcaattttgtgttaaaaaaatcaacaacatccaatttctcagaaagctcttaacaaatcgaatgtttcgccccgtggcatggtttgttcgtttttcctattattttatcttattttcattccagcgttttatcgctaattctgcccgtcgtgtccgcacaattatgctcaacaaagtcagtccccgttctcgggtgatcactcgtcaacgccagcgaattgttgccgtacaaccgcaacagcagcccgtttttgttcaacgagttgtccgtgggcgtggtccaattcgttatgcgtccgatgctgcgttagttcctcagacgatgaaaatgtaagaaaaggggttcatgtgaaaaagtaatataaaactgagtaaatttaatcagtttgtttagggttccgaagcgacgtttccgcatcaatcctatgcaacaacagcagcctgtcctacttgtacagaatcaatcaccgaaacgccgttttccgtccttttcatcgatgagtgttcgtcaacacgtcaatgcattgcgtcgtgcgactactgtgcaacaactccagactcagtttgttaaccagcagctaccgattcgtcagcagtttcgagggcggcaggccatcactacccccgttatgccaaatcgcagtcgaggcaaacaacaattcattcttgaccaacccgtgcaagcaggacctcaatttatggtacgagtttgtagagatgtag

SEQ ID NO: 69652 - DNA, 467 bp, Heterodera glycines
atgaccacgattcgagcatgtgcgctagagccattatttgacgcgtattgcgtttccgctcgccagtaagtggcaagcatttggaatgtttctgctctgggtcttcgcagttttgaaagccattttgttgttgtcacattcaccaactggctttgcgacataattagccgcacgagatcagaacctcccgcccgagcgacttttaaacataaatcctgaaaatcgaccgcctccccattttggcaggattctgtcaaacattaaggttaaaagaaaactatgggtaaacattcaaacggatgaattgaagacaaatgaatgtgaaaccaaaacaccaaacaaaggattatctaacgacccaaacgcttactgaacaaaaaaaaattgatttttcaattagaaacttaaattagaaaacatcggtgacttaccctttttgtgtcaattttgtcgatgaagacaacaga

SEQ ID NO: 69653 - DNA, 382 bp, Heterodera glycines
atggatgttgagtgccatgctccgacaccctctacttcggcctcaaatttgaatgaacccgaaatactagccaatttggcagcttttgaatccaattttgtttccgtaagtttgtccaatttaaacatgcgttatttgtgatttccttgaatataattgctatgcttccgcagttcctaagttcaattttcaggtcatctctgaacaactcggcacggacattttgccatccagcagcagtgccgtcgctttgcatgtctcttcccttattcgtaacgtcctgcgattggctcggaagttccaacggagtgcccgacggaaatggctttcttcggaggacgtcgaggcggcgttggcttattacggacacaccgtaatttga

SEQ ID NO: 69654 - DNA, 507 bp, Heterodera glycines
atgcccaggcgtttctcccgtgccgcgccgggccctccgcccgacatgccgccaccaccaatgtcggcagctgttgcgcctgttcttcggccgccctcagctgcgtccatgtggggtgccattccggatcctccctccgctccgcttccgccgccacgcagcactttgctcagtgagttcgctgtggacgcgcgtgttggtgacccgccagtacctccgccgccaccaccgccacaaccggaaccaccaccaccgccagagccaccacagccggaaccgcctcaaccgccccctcctccgccgcctccccctccgacaccaccaccaccgccacacccggggatagaaactgcatgtgcaaacagtgattctcatccaaaacaatcttttatattcttcaagaaaaagtacggctacggctatcagaaattcggaggacctccgacatacgctcttccgccgcctcaaactgcggcgacacattttcttaatattttttcagaatga

SEQ ID NO: 69655 - DNA, 304 bp, Heterodera glycines; identical to SEQ ID NO: 51570

SEQ ID NO: 69656 - DNA, 304 bp, Heterodera glycines
aaaattccctcaaaaataaaaggtctattgcgcaccgccctccctatcatgctcgagagcatttgtatgtgtataaaatttatcaaaaaaagagatagccatttttctgggataacctctaaatataaaaatcctctgtgaaataaaatggcgattgtgcacagccctccgtctcatacgcaagcgcttttgtgaggtataaaatttctcaaaaaaagagatagccatttttctgggatagagtataaatttaaaaattccctcgagaataaaagggctattgcgcaccgccctccctatcatg

SEQ ID NO: 69657 - DNA, 473 bp, Heterodera glycines
ggtttgtccatctgcgcgttggcactttctctctttgcgttgctcctcgccgagacggactcggctctggtgaagcagttgatcaacaacaacgacgagacggagacggaacagcaccagtgggacaattacgcatatgaagaaaaaacagtggtgaagacgaaggacggctctgagcatgagcacgtgcgccaaaatacaattggtaattaattggtggatgaaatgccgggggaatgatcccaaaaaagcgaggatttgtggccaattagagggggagggccaggttggcttgttcgtaaaatcctcctgtcgtcaagcccagcttgaaagtctcgggcttatctcgggctggattcctcccacttttttctcacgttttctcacaatttttttgccaaatttccctcggcgtttagcgactgcgtggcgccactacgctcggcggttggagctgagcggttggctgcgcg

SEQ ID NO: 69658 - DNA, 823 bp, Heterodera glycines
atggcttttcactccccgtccggacaatgtgccgaaggtgttcaaatgctggttgtacatggatgcttggacttgcccgtcaaatattgaacaattcaaaacggtgcttttattatttcattttcgttaatcaattttcccgtattttaggcctttgcctcggcttcatctcctgtcaatttcatcgtttccatttgcattccgttgccttttgctgactccgttttgctcttcgatctgaccaatggatttacgcatgaacaattgacgttgacatggatgaacgatatcggccgttttctgctgatccgtcgtccaattgtgcgcgatgaaagcaaatgggcaaaatgggagaaggatgcgattggctggcaattttatgaccaatggaatcgaatcgacatttgggtttcgtgacgctatgatcgacccaagtaatcagcagaagaagtggatgaatgaactgttaagaagtgatcgaccaatttggattgcggatgaatttgagcccatttgacgtttataaaattgttattttgtggcggtgatcacaattgtattatgtatatatgtgtgtataatatgcctctatgataaattaagagatttcctgaaattgcaggctcattcttttgggtcgggggtcgttttcgtacgagcagcacaagtttttagctataacttttttctttgctaaccatttagttagaatgctcgagaattatggataccgaaccgagaaatatgccggttttttcagttatcggtgcgatggcataaattaccgtatttatcgattaacccttttgggaagggttgagca

SEQ ID NO: 69659 - DNA, 655 bp, Heterodera glycines
tcctctgccggaggctacgaatcggacgagcattcgttgggcagctgctcagccgaagttgcagcaatcaacgcggcggatcagcagcgccggcggcgccacaaccaacaacagcagcagcaggcgaagaaaaaggcaccggcggcgccggcacttcagcaaaaggtgggggaggaaatcagtgatcactgatcagtcgagaattgtgattaggcaaaaaatccggattaaaatagcaaaactgttatcccattgtcaggcggtcgcaactgttgccgccactgcgtcggccgtgtcctccaaagcggcaccgcaacatcagcagcagcaacaactgtacgccaagcaagcaaacgtcaacggcaccgctgctgatcgaccgatgctgccacaaattgttgccgctccgtcgtgcgcgacttcaagaccgcaaccatttcggccccaaccgcaacttggcgtgctgccgcccgcgttaattgctgctgccgcgtcgacaagcggttatggtgatcagcaacaaatgctgcaaaaagtgccgtccattgaacagttgcggttgatgcgtagcagtcaagagcgggctggatctcaggtgaagcagcaaatcagtgggggcgtgatcaatcttggacagatttatgttattgattga

SEQ ID NO: 69660 - DNA, 77 bp, Heterodera glycines
ctcgaaaagtagcttaacaacagcccaaaaaaacatgtttttcgtgcgtttcaggccacggggatctcaggaaaaaa

SEQ ID NO: 69661 - DNA, 1102 bp, Heterodera glycines
atggccagctcagtacactcccaggacggtttccggccggcggccagctgtctgtccacgctttcgctgcaacgcatcggactgatgggcggcagcagcggaagcggtgcctttcactcctacacgcccaccacagcgcagcaaaaacagtcctccgtgccatttcagccccaaccacaacagcaccaattgaagggctccattcagtcgttgcccgactctgcactttgcacagctgctgctgctgccggactgaaaggtgcgcctgcccggcatttttttgtctcgggacggcaccacaggcagcgcgggcatggcacaaaccatggctgattgcgagaccggtgcacccctcaaaacggcgacgcaaaaaaattaaaatttttaaaaatctcaaaaaaattcttaaaattttttgaagttttttggaaaacctaaatattactgaagataaaaatttatatttcccgagaaaaacgaacgaaaaaattccctgaaaattttttgttttgtttcttgaaaatttcgtaataagtttttttgaattaggttaggtaacgaaaaatccggttttttaataattttttccattccaattccatttttttgcggcaaccttttgccctgtccgggcgctgagacttttcttagcgctgaatgcctgaaaatcttaagaatttctcgcctttatgatgacaccgacaaagacgagacaatagattctcgaggaaatattatttttgttgctttaggctatggtgccgctgtttactcccggcagcagccgtcttcgtttggcaccggcaccaccgtcatggcacagcaacaacagcagaagcagccggtgaacggcattaccacaaaccatcgccaatttgccacacttgcgcgtatggactcgtccaacagccggcccaaacagggcgctggtggtggttcatctacagcaacaaaggctgcagcaacatcaaattgtctccgaccgacagcgcaacggcttctgccaacggcggtaacaacaacagcaacaaccgcgcctgctgaccacgcgtcggcaattgacgcgctggtggccgagctggagctgaacacggcggacaca

SEQ ID NO: 69662 - DNA, 1658 bp, Heterodera glycines
atgcagacggaagtggccacacggacgaaggcggccaaaattggcggcactaccgtagtcacacggcaacaactaccatcccacaacttcactaatcggtgtgcactgttttattacgataatccctgggtatagaggtgggattttctgatcaaaaaaaccatggattcgaagcacggagtcagcaatttctcaaacagctccactaagcattaggaaaatgccggtttggccactacggtattttgtaccaacgtcagtaggcgcccgacggggggagactgactgtaaacaaagtcattttcaggcctgcgcagcaagagaatggcagcagtaacagaagcaagccgttggaaaagctgaacgaactgatctccatggacgatgagtcatcgacgacgaggcggcacagaacggcacaacagcagcagcaacaatcggctgattcatcggcaccggcaccgtcggcgggtggaaatcggccatttgaaactatcaaccaggagaagctgaacccgtccaaagtggacgcaatggcacggatgttcaatggcaagcagcagcagcaatcggcaactaccgccgcaacatccacaaagccattcacaagcggtggatcagccggcaataatgccacatccgatcatcaggggtgggccacgcgtcgcgcggcaacaatcggaggccgtgctgcggcaccggcggtgccatcctggtccgtcggttcgacgacggcacgggcatggcggcaatgtgccgccattgcttacaaatggacaccacgcgccaccggtgacggccacgacggcacggcagcataaccaacaacagcactcggcgttgaagaagcagtacacgctgcccgcaatggcatccgtggcggccgctgctgccacaatggcaccgctgtcgtcacgaatttatcggggcaacggtgcggcagctggactgcttgaactcggcgggacggccggtcgatgccgaacaaatggcactgggaggacaacaactgcggcggcaaagcgtgatggcgccggcacaccaacggtggtggacgacgaccatggcggcggcacggcggctggcccaaatcggcaagaagggaatggcattggcatttgtgccggcagcaccggccgaagcaacttctacgacaatgtgcaggtggcgtttgccaaatgaatgggcatcgagtttcaaaatcattttgtcgggaccgggaaagtcccgactcgcgactttggcatttgtatgcctttctctgttttatcattttgtaaatcattttcatagagtgccgcgcggaacggacgctgcggcggcgggcgaacatcgccggctggctacagcttcagcaacgactccgtgtcgttgtgcagtcagtcggacgcggcactacctccggcgacgagcaaaggcggcacaaatgctgccagcaatggcacgggcggcggagcgggtggccgcatcggacagctgatcagaaagttgggcagcagcgttggcggaggcggcggaagcggtgccaaagtgccgtccagcgccacctcaaccctctcgttgaacagggtgagccccagccaagccaatcggccatgatttgatcaaaatgggttcagccaaatcaatcatcccacccggatcgccaaaagagataa

SEQ ID NO: 69663 - DNA, 372 bp, Heterodera glycines
atgccgattgaccggttcccgaaatccgagaaatttctcgacctaagaaccggagccaatagaaaatcatccgatcggttcttgccatcctttggctgtgtgccaacttgccctttcaaaatttgatcagattggcttttaggtttttcgcataaatgccggttgatcgataagtccctgaaaatcccgatcactctgatatacttcatcacaaaacaaatcatatgtaaatccagtgatcaaaaaaggcttataatttgcagccaagcaacttcaccaccacaacaacaaccgcaacaaaacggcggcatcggaaaccgtttgaagcagaccattttcgggagtgccatccgtcgtcgggtgccaacctaa

SEQ ID NO: 69664 - DNA, 533 bp, Heterodera glycines
atgtttttaaatcttttattattactgagcttatcatgcatttgtcaggccgaaggtaaaatattaaaatattaaccaataaataaataaatttgcagtattaaattcgatgaaaatgatggaattggcacgtttagctgtcccttttgctaacaatgctaatccaaacaaacatttatttatggaatggattgataaatatgcatttcgcttattatgccagaaaaactttttggaaataaatgcaaaaaattattttgtaagtgaattatcaggatggtatgaattaggaaaaattcaaagcaatttttgtgaagcatttgctaaaggggaaatttcaaaagtaacagaagaaaattgggaaaaaatgacaattaaatttgcaaattattttgacgagacgcaaaaaaatgaagaaaatattcgaaagaatattcaaaaaatcaatgataaatttgtgaaattctttggaaaggaaacagacaatattcttgataatgtttttgatgcactcaaagtgatagcagacatag

SEQ ID NO: 69665 - DNA, 1260 bp, Heterodera glycines
atgtcacgacatcgtgagcagcaaatggcgggggaagacgcggcagcgtttgcggcgatacattcaaagtaatattagcacaggacctatggcatgctgaggggcgtaatgaaacccgaaaaatgaaaggagcgagggggcaatgaaatctaaaaaaaaaattaaaatcttactaattatttttcttacgatattcaacttttctccagtgcgggcttttttcataccaattttttcggagcgctttccatttttcagaaatttcccccttcgctatgcaaaaaatttaaaaaaaaaatttgtgaggtgggacgattagctgttgccaattttcggcttttgtggctacggagccagaaacagtcagaaaattgagtaaagtcccgaaaaagcgataaattgaccagttttgtaagaaatttttcaaatctaactgggagctacagacttttttttaatactgagtttaattccttttattcagaaatgatgcacagcaacaacacattggcaaatggctgttctacgccctgttgatgctgttgttgctcttttccggctacacattgtacggcgatcgacgccttcgtttggccggcaacaaaacgcaacagcaacaatcggtggaggaaattgtgccacaaatccatggaaaaccggaccgggagcagttgttgaaactgaaacgtaaggcaaaaaattaagggtatagaaaatgtaactgctatccttaaaagttgcctatttccctaaaatttacctaatttatcccccccccccccctctctcctcacctcccggtttaatggcaaaccgtataaaaacgcatagcatgtttgtttaaccagttactaccaagccacaaaaatttgaaaatgaaatttctggactttcaccccctcctccctattccatccccggcaaaaaaacaatcaaaggggcaaacaagaaattttgtagaaaatcagcggttctttccatttatcccatatttgtcctttagcatccgatgaacttcatcagacgcatttggctcagcccggcacaccaaaaaaggacattgtgatggaccaaccggagcttcatttgacgcaatcgcttcatccttcaccgccgccgccgcgtggcgaagtgccaattgtcgacgaaatatcggcacaaccgcaattcatctaccacacgacaacaccgtacagcttctacgaacattttgacagagctggccaatccgtctgggaattgatccgtataacattttaa

SEQ ID NO: 69666 - DNA, 59 bp, Heterodera glycines; identical to SEQ ID NO: 52421

SEQ ID NO: 69667 - DNA, 59 bp, Heterodera glycines; identical to SEQ ID NO: 52421

SEQ ID NO: 69668 - DNA, 59 bp, Heterodera glycines; identical to SEQ ID NO: 52421

SEQ ID NO: 69669 - DNA, 59 bp, Heterodera glycines; identical to SEQ ID NO: 52422

SEQ ID NO: 69670 - DNA, 59 bp, Heterodera glycines; identical to SEQ ID NO: 52422

SEQ ID NO: 69671 - DNA, 59 bp, Heterodera glycines; identical to SEQ ID NO: 52421

SEQ ID NO: 69672 - DNA, 59 bp, Heterodera glycines; identical to SEQ ID NO: 52421

SEQ ID NO: 69673 - DNA, 59 bp, Heterodera glycines
aacatttcctttctctagtctggctctaccaaacactcacacgatatttgaaatgctaa

SEQ ID NO: 69674 - DNA, 913 bp, Heterodera glycines
atgccaaactttttaatgatgaaataccagtggtgtagcggtagtgcactagtcagtcgcgaccaatgattttgtgaaaaacaaaacagaattcagtgtaatcgtaataaggattgaaatcccggaataccgtcctaatccttttgcgaagcgtgattctttgcgatctcttctaattaattggaatttaaatatacaaaattatttaagagcacttgtggtctgagttattggattcaaacgcaattaagaagcttcgagtacttttgactgaggtgatcaaagatcataatacaatttaaaattaaaaaatttatttatttttaggaaattaattatttaactccgcccgaatttttgtcttcgtcctcatcagaaaaagagcttttttgggaaacacaaaacgaatttgaaggagaaagggaagaaagctgtgccaaaaatggacaaaccgtaaaaaatgaacaaagtgccgaaacgcaaaacggacaaatcgccaaaacagaaagcgaaatttggcaaatgataaaaagcactgaaaagaatttggcaaatgaaaagaaaaatgatcaacggaaaaggaaaaaagtttataaaaagtcgcaaaaaaatgagcaaaattcgatgaaaattgagaaggatggagaaaaagaatttaaacaaacgccgaaacagaaaaaggacaaagtgtcgacaggacaaaatgtaaccaatggaacagttaaaaatggaaaaataaaaggcgaagaagcggaaaatggacaaaaaaataaaacaaatttaatggaaataaaagaggaaaattcagaggaaatgagcaaagaagaaaagggcacaaaagaagcattggaaagaattggcatcgaaagaatatttggtaaataaaatataaaatggaaaaaataataataaa

SEQ ID NO: 69675 - DNA, 1836 bp, Heterodera glycines
atgtacacccactcagtctccgctgattctgaacccgtgcttaaaatggcaaatctggcgatactttacatacagtcagttttcgccgtttcaattgaagcacaattatttgcatttttagtgtttgtacatgtcgggtgagtttttttaacattttataggagacactttgtttaagtgttttctttcttacagttttgtacatttgctcaccaatctcgtcgtgcaaattctattaggggttccgttggaattggtccacaaatacggccgagttggctttttgtacctcgctggtgtgatgagcggcgctttgctcttttttgtcactgacagagaagtatatttggccggcgcgtccggaggagtgtaagaaaagagagttaaattgaatctttttaaaataatttgaaaaagcatgattcacattcattttcattgattctaagttcagttacactctactttctgcgcatattgccaatgtcatcattaattggagcgaaatgcaattcaattgggtccgtgcttccattctttctactttggttacggccgatgttgtgattgccgtttaccagcggtactttagcgacatgccaaatagggtgaggaaaaggcatgacaaatggggaaaagggggacgaaataaattggcacaaatgaattttatccaacaattcgcccgtgtttataaaactttccaaggtttcctatgtttctcacattggcggctttgtgactggtctgttgcttggcattgtgcttttacgcaactttcgcaaattggaatgggaaaagtacgcgtggtggtgtgccctcgtcatcttcgccctttttgtggctgtttgtttgttgataattgttttccgcgaaatctcttcaccggaccctcaaatttgtcgttttcacaaaagtctgtgagtgttcaaactttggaagttttttcgcacttaaatctctcctcacttttcccataatatttacctaatttattttattatttatttttcatttttttattaaacattcaaatatccacttaatatcacttcgtcttactttgctgatatttcaaaatctattttggtccctttttgtgccttgattttattgtatacacgccattattgtattaaaattaaataaattccactgacaaatgatttatcttaattatctttccgtaaaatttatttaaaacatttttgggacggaagtggtcttgtttttttggtcggcgggtggtaatttggcgaagttggttcccaaaaaagattgaaccaaccaatcataatttaaaaataattatatatggatgggaggccgggcatagaaaaataaaagctaaagcagagaaactttggccaaacaccaaattttgttttgaaatgacgtgatttataaaaattctaacctttaaaaaggaccaaccgggctaatctttaatcttttaatagtcaactcatcaatttgcagtggttatgaaatataaaaccaatccgattaaagccgattacaaaattggcaacaatgtgagtttattgtgtgtttgggtggcattttcaacaaattcacaaaaatggcatttagaaataattgacgaatccatcccaaaatctgattgttttgaggttaataaataatggcatccgtatttttaaggttcttggggtcggaatcaacggaaaagtggtggaatgcgaacatcggacggacgggaagaaattcgcattgaaaattctgcgggacattccgaaggcaaagcgcgaggccgaattgcactttgtggccagtgggcacgcgaacattgtgaatgtttacgacatttacgag

SEQ ID NO: 69676 - DNA, 787 bp, Heterodera glycines
atggcaactgttagttcatctagcaataatacatgtaaaccaagtgaaagttattccgcctcaaaaatacctcaatgtgcggaaacaatcaaaaaaatgttccacgaattgggaatcaaagagtacgaaccgcaattagtcttacaagttagttattaaagatctacccaatattatccacgttaaccactttcagttgtgtgatatttcttactcattgaccaaggagattctcgtcgatgctcgttctgtttccgagtttagtggcaagaaacaggtggacagaagcgacgttgaccttgcgatcaaaacatttggtaaatttttgtgcttttatcgatctcagctttttttctatcttttaagatgaaaagcacagtaatgatcgcccaccaaaagcttttgtgtcggaattagccgcagaaaaaaatgcactgcctttacatccgatacgtcaaaattatggactccgtttaccgaatgaccgtttctgtcaactgcagcccaattacatatacatcggagatgatccgaacaacgaagaccaagcagtccatgtgattttttttatttcctttttgcctttgtaaaatattttttaaagatggaagagcggcccagacaaaatggatcgtcgaaattcaatgcaataaacaattttgatcctgaatctgtgtccaatctcttgatgacggacaaaaatgctactcaaagaaagaggccatatacaaacggagaaatgcagaaacatacgcaagaagaagattacgacgatgaatatgattga

SEQ ID NO: 69677 - DNA, 324 bp, Heterodera glycines
atgacgaaaaacggcgcagaatttggcccagctcgatactgggatgccctgttggaacgcgaagcctttgagttgaaccgaccgccagccaacatttccgaggcagccgacgccaatgagcaggttctgcaatcgcacttggtcgctgatgatgatttcgaggagatggatgacgacgacgatggcgaggaggacgaacaagacgagaccgaagtcgagggaggcggggagttggccgattttgacgtctgttatttctgttgtgttcacttaagtgcaacattttgtttaggacactttgctcgactacgtgacagactttaa

SEQ ID NO: 69678 - DNA, 144 bp, Heterodera glycines
gcgatggccgaccaaatcattcaccgcattgacgagatgacccagcgggtggacagcctggagaagaacatcaccgaaatgatggcctccgactcggcgctcgtggcgagcaccagcggaacagtggacgaggacaaccaatga

SEQ ID NO: 69679 - DNA, 314 bp, Heterodera glycines
atgatgttcgcttctgctgtgtttgggtcgatgttccgttttgatgacaaaaactcaaagactaaaagtaaacaaaaaaaaataccgaaaatatttctaaaaataatttttcatcattttttagcctctgccgactgtcctcacgtaattgaggtgcctgatgttgaagcagaagcgttcaaagcgatgttgagcttcatttacgcggaggatttaagcgaattgaacggacaaaatgccatggcagtgctttacgccggtgaaaatgtttaaaaaatattaattttttaatttttatttattaagcaaataaa

SEQ ID NO: 69680 - DNA, 907 bp, Heterodera glycines
atgacaaaagcattgtacagaaaagcgaccagcacaaaggaaagccatccgacgtacaaagagccttcagaatgggaaaagcgatcagaaacagtgaccaaaggagcgaagaagcaccgaaagtgtcaatgtgagaaggcaaaaggcgcgacggagtggccacaatgtcctccaattggtcaccctttaaattttcaatagtttttaggccccaagtcattcagtgcccccgggggatcacccggtgcagtccgatcagtgacaccagcgatgcttttgcccccgcttccgagtccgccaccgtcgtcccctcctcctccgcgcgttcgtcgtccggcgtcggctcgcgcactaactgaacgtccagcaaaagtcaatgaatcggctttccctcccaaatgctcttctcattttacctcgtcacgaactgcagaagtgcgtcttctaaggtcgcgcgcaaattcgtgcagtttttccttgacaatgaaagaaagttgagaggcggtgtccgtgtgatggcgggaactgaaagaaatggacgaaaagccgagtaaaaaggccggggggggggggagtggcgccaaccttgcggaccaggccgttttcgcgccagcgcagtttttgaagtataactttttttcattgtcaaccaaatcaaaacagaaaacttcaaaaaactggttttctaaacatttttggccggaacttttttgaaacttaatgaaaatttcacaattttgcaggctaatagaggaaatatagggctatcgaatgatagcaagaaagttggatttggttgacaatgaaaaaagttatagttcaaaaactgcgctggcgcgaaaacggccggcgcgaaaacggcctggtccgaaaataggtttttcaaaaaaaattatatgcttaaaaa

SEQ ID NO: 69681 - DNA, 828 bp, Heterodera glycines
  unsure (1)..(828): unsure at all n locations
taccgtaccggggagacttttcgggggactgatggccgacatacggtgggattggggaaaaaacaaaaataaatattccaaaatataaatatataattatcccaaaatataattcccccnccttcttcatcaggcgcaaattgccttggtttccgtcggatttctcggatttcttccgcggccgtctcagccaatccctcgccgccaccatccttctgttcttcgccaatctgtccaacataatcactttcggcgccattatggagcgttctttccaccaccaaattgcttccattgaaaatacgtttgaaaattacagaattaattactcatagttgttctcctaaattaattaatccaactaattaattaactaattaccccaattaatttgttaattaattgtctctctcttttcaaatataatttgtggcgctctgtccggccttctctttggcctattcagtgggcaaccgctgagtttgtttccctaattctgtcaatgttctctcccatccttcagatgttctgtccgccaccggtcccactttgatctttgagaaaattctttttgatttttgcacgtaatttttcaattttttttaaaatttccgccatttccgcccttccctttcagtaccaatcattgggagtttctgccctttcgcttttacgtcggcctttggatgagcttttatctgatcattttggtggccaccgatgcgtccgcgttggtcgcactgatcactcgcttcactgaggaggcatttgccactctgatctcgatcgtgttcatcatccaagcattcgaaaagttgttcgagatca

SEQ ID NO: 69682 - DNA, 370 bp, Heterodera glycines
atgcttcttcttcttcggtcatcaaacccaattagcgaaattattcatttgtcagcaaaacatataaaaaaacgtaaagcaatgtgtccaattaactgtgatggtcaatcaaccattggtactgatgatgctgatggtgttgttgttggtacagctgcggtggctgctgctgatagtgctgctgtgccatcgaagcggcatccaacgccacgcgtctgtgctgctcgtcacgcgcccgggccgcctcagtcatcgcattgcgcagccagtcggaccagtaccaggagatctcgtacagcttcaagtccacctgtggtgatgggagaatggcaatgtgtgaaaaaagtaaggaaggatgaagttggagcag

SEQ ID NO: 69683 - DNA, 1222 bp, Heterodera glycines
atggcgcccgcaccaaatgcgggctccgccggcgtcggtaacattgaggcagctgaatagcaaaaacagtttaattggctccttctaacaaggaaaacacactcattttactaattgattattagctaaggaaatatgttcttattttaaccaaatggctgcttaaatttttagactctgtcaaaaatagggttggggtcagttccatactgccgtttccataccgccatttccataccggccgtttccataccaaggcatttaggccatttccataccaaaagtttaagacattgaaattaaaaatccaagaaaaataacattttatctgtttcaaatcacggtctcatttcataatttcgagaaattccgatcaaaaaagcaataataaaatgatgattaaaaggctgatgaattgggaaaatgttggttttactttattatgtcattttcttcccaaaaaaaaaataaatttcagattctaataggaaatgccaactgttcaaggaaatatttgagagttctgcaaatgaagacggcgtactgaatgttaagaggactgacgcagaacaacaggtgaaaggcacttcgaccagcaacaatttgaacgtcgcttcgagcgatgatgaataaaattgtgagtctgttcaattcaaaggtggcgaaacaaactgaggagcgctttgtcttttgctttttgtttcattattttcaggcttccgattaatcaaaaacagaaaatatggtagctgattcaggtgcgaacaacgcaattgaccagctacagccaaattgggcgacaacaatttgatgaccggcattttgggcctaaaagaacatcaccatggttaagcttcatcgctttatgatgctgagacgaaacgaaatcagatgaagcgcctgatcaaggagaagccaaaaaagaaaccatgtcaactccgcgcacaaaattcggactgacagtcttcgaattgctcagcaccatgaagcgctcgaccaaatggcgaacaggtcgacaaaattcagagaaaatgatgatattggggtggaaactaagttctgtcatagctgggagaaattctttattaaaatttataacaaatcaaaacgaaacccataaatcactcaaagtatctccactgattctccacaatcttctgccatttttgagaatttaaaaatgatctattgattaaattcaagatagtttgactcaaataaa

SEQ ID NO: 69684 - DNA, 133 bp, Heterodera glycines
gcgcaggatcctgcagattttaaatgcaggattgcaggatttgcaggattaatcctgccggatcctgtcctgtaaaaaattttgaattccaatcctgcaacaggatccgcaaatttgaaatttccggtctcta

SEQ ID NO: 69685 - DNA, 140 bp, Heterodera glycines
gagtgcctaaaataacttgcaaataaaatttggtgcgtttcagagcagtttctgaaaaaatatttatgaattcattttgctaaaaaaataaaatagtgaagctttaaaaattaataaaaaattttaaattcagaattact

SEQ ID NO: 69686 - DNA, 399 bp, Heterodera glycines
aaattggaaatcaaacatttcccatttttggcaggacgtcaaattagtcagccctaccggttggcatattaaaagggtggagtatttttatttcttttactaattcagggcacccacgagcgctcgctatggccaatggcacaaggatcagcgttactcgcagatgcgctcgggcccgcgactgatcattttcattgtcggtggcgtcactttttccgaattgcgatcggcttacgaagtgaccagaacgcaaaagacgtgggaagtcgtcattggttggtcatatacctgtttgtatcatatttaatgccaatattttgatttttaggttcagatcagatcatcactcctgaacgttttctggtcaatttgcgtgagttgagcaaaaaatctcacgat

SEQ ID NO: 69687 - DNA, 238 bp, Heterodera glycines
atgaatgacaaaaagagaattgactggaatgtgaattaaagcttcgaaatttgaatgtgacttgaattcgatcaaaagaatcaaaatttaatcaggtgcgacaggatcaaaaggagaataaataatgtgcaaatcatttatatataatgtacaatgatttatgttttagaaaagggtatttttccttgcgttttaatttaccttttttaaatttacataaatcaatttggggaataaa

SEQ ID NO: 69688 - DNA, 478 bp, Heterodera glycines
cttcttctcgtcagtgaagcggactgtgccgagccaactgaagtgccatcaaaatttgatggacgacttatggtgtggcacagaatgacttttagctttggcaatgccaaaaattgttccgaagccgtcgcacagttaaaacagcagcaaaatttatggtggcaaatttggaagggtaccaattttttaccacaccgtgacgtaccgtacatggcacaatttggtacggtatttgttttttttctttcaaaaataaattaatttttagattttttaattgccaatcgtaagctgatcaacgaattgaaatcattccaattcaatgtgggcattttggagacaggcatgggtgatttttcgatgagtattctccgcgcatttccaaccatcaaaaaatttgtcggctcacaaagcatttcgccaacaatttcacaatggaaatattttggctatgacaaaattgttggcgcaatgccag

SEQ ID NO: 69689 - DNA, 178 bp, Heterodera glycines
ccagggaagaattgaaaaattttttcatgaatatctcaaaaagtaaaatttaatttttgatgtgaaattaaatcaaatttttaatatcaactagcgcagatgcgctcgcttcgctcgcgcacctcgcattcctttttctttttctctctctctctcccgtctttttatctcttctctt

SEQ ID NO: 69690 - DNA, 731 bp, Heterodera glycines
atgacaccaaatcacagaacaaataatgccaaaggtaatcaatcgaaggcaaaaagcaaaggaaaaaaaactttcagaaattcgcgaggcaatctttgcaacgattgacccaaaacgaattgcggaaaatttgcggcaattcacaaaagagccgcacgtggcggggacagaagcgaataaaagggtaaatgaacaaaagaggtaaaagactaatgcacgctaattgactaaatggaggtggctgagaaaattgcaaagatttggaagcaaaacggaattgaaggtaattggggggggggggagaggacgatcagtggtagaatcactgatcggacgggctcttcccggactgaattggccaacccttcattgttctttcccagacgtgcattttgtcccctacgacgtgctcctctcctaccccaacttctcttctcccaatcatctctccgttctgtccgccgacggccaagtcaatttccgcatggacggagtcagtcccgaacttatggcgcccaattcggaggacctgcgctcgtccatccaatggttgacatattctgcccgaggaacgggggaaggcgaagcggggtactgtcactacgggagagaggaggactttgaacggctgagcaaagagtttaatatcaccagcttaaaaggtgattgaatggggaggaaaagccgaaaatgaaatgaaatgccaacagaaagaaaataatggtaataaa

SEQ ID NO: 69691 - DNA, 158 bp, Heterodera glycines
atggcaattccgcttaacattagtgcggcatcgaattttttatattttacgaggtaaattaaaattaaaatgattttaattatacaacatatttttattataattttagcacggaatatcgacaagcatttcgagataaatttccaacgaaattttaa

SEQ ID NO: 69692 - DNA, 1006 bp, Heterodera glycines
atgcttgtggcaaatgaagcagcaaaagaagttagtgaatttaatgaatttttaaaatagcaattaaaatatattttaatttagtttgaaaattatttgacgtcgaatgtcttcaaaaatatttatgttcaacaaaatttctatcgaataaaaatggaaggagctttacagcaaattgttaccgtagttgaaaaatgggtatgattaaactgtaaaaatatgaagatgtattttaaatgacaaaaaccccaattagaatttatttaaaaacagtattttaactaaaaaaattgttttaaaattattcctaaaggaaatccgaaaaagagattttttaattatcaaaaggattttggggaccgataacatcatgcaaaaattgaaaaatctattcatattttttctctacaccaaaagggaaaatatacaaaaaaaactcataaattctcgagaaaattattcaaaatttttaaatttaaaaatttattttaattttattttgcattttcagtcaaatggcctcgcccaactgctcatctcgggctcccttctgctccattcgcacacaattggctccgatgttaatttggtgtgcttaacgccgggtgaaaagctgaaagtcagcgattttatgggagatgacagaaaatcgaaatgtgaggaaaataaatgcacggatgaggcaaattcttcacttttttgccaaatttgcgcggtaaattaatcaattatttaattaattgagcaatttgtaattaaaataaaattaaaaccaaaattttagcacaaaagcacaacaaatcttatcaaaattgagtcggactcacttttgattgtccgctttcaatttgatggcatcgaatttgacatttcgctggtcgcaattccaaaaattgaacaattggaaaaaataaatgccgaaatgttgcaaaaattagcggaaaaatttaacgattcaatctttgagcagaaaaatatgggccgaacattagcaagtaaaatttag

SEQ ID NO: 69693 - DNA, 691 bp, Heterodera glycines
atgacggagaagtcggatgacagggcggtgagtccaactgaaactcggaagagggatgtggattgatggttgtgtgtgaactgctcaaaccccaaaaaattcagcgtccaagtgcatcagtcgttgtgcttcctggaaggagatgttctgcagttcgaccatctcttgtgcctgttgtgccgattgcatttgctccaattgcggcaggtcactatcatttggcacaattgaacggataatgttgggcggaaaccatcggagttccgacagaggccaacgctgaccaagatcttgcgagctgaactggaggtggtcggcgccgagcagtttgacagcgcgaaagacagccagcagaaagagacggtaatactccggcatggccatcaacggattgggcagcgttttgcccatcaacagttgggaaaagttgagcagatcttgtggccacgtgcattgcacaaagcgttggatggtctgttcaagaagggcacacagttgcaacgtattggaggagggacacggggcagtggagataggactccgtactaacgcctcaagcacctgtgggacatggaacaatgcagtggaaaagtgaccgtatatatgacttggtaaagaaaacgggaacgcatttcgatgctccacttccagccaaagacaatgttttggaggcgaaagttgtgcagctcca

SEQ ID NO: 69694 - DNA, 2937 bp, Heterodera glycines
  unsure (1)..(2937): unsure at all n locations
atgatcgcttcgtttcggcccctcgccgaaattggttccatgctcggccgttcctggatgtggcccgtgcccgcttcgccctccttctcttggagttctccgacgtgcagtgcgtggaaattagacgaaaagcaatgcaaactttacttcaagacgcacttgccgtacagcaggtgattcgattcactcaactaacaatccattgggtttttgaaacagaacttttcgaataaattgtattttcattccaattaaatcatattttcagtgaaaataccaccccacaaacctacttgcagtatattctcttcaaacagccccatggccaagacaatttgaacgtaatcgccagtttttagtgagttttgttcactctcctctccaattaagcacattctccgttcgtcaacttcacagactccgtgctcccgtatccaatgtgatgaggtcattcaactgctcattttggaggcgatgtgcgccatggaggactcggaacagcccgtgctggcgccggtcaaccagtacaattggctgcacctttcccacttggtcactcatgctctgtacatgcaaaactgcacattgaggtcaaatattttgtgtcaatttattacattttcttaatttattttcaacttcagtgagctgttgaaaatgttgctgccacagttgagaagttgtcaagtatcgtcgcccaattttccaatttgttcatttatttatttctccatttaatagtatttgcgagcgaaggacgagttgatgtggattctgctccaattggttgcctacgcccgttatcgcgagaagaatttggtccaacagcagcagcaacaaaatggccaatgcggggcacaaatactctccgtcgttgggttgggcgcacagaatcgggaattggttttggatatttttaacgtaatttggtcacaaattggcaataatttggttttcactctaattgctcttaaggttttgtacactgacaagaacatgaattgggctaccacctgttccacggaaaaccctctgaatatggtttttctcatattggccattgctttgactgactctttgtcaattttatgtccgattttttgctccggccgccatttggatcaatttggtgcacccagtcgcttttcccattgcgtccacttcggaagaaagtcagcctcagccaccggaaaaactgaagccactcatcgatttcatcggtttaaactcaacgaaaatatcgtcaaattatttattttatccagaaaaacagttggatgcaagcaaaccgctggacaaaacgttggcccttctggcggtcattgccaattcgtacagcaacaatcgcgaggtgttcgaggaacacgtcagctccgcggtgtttcggattcttggccagagcattgttcatcaacagcaagtgctatttatacaaaggctcttttagcttttcctctaactgtttttagcctcatccacccgaaaagtgttgggttttgccccggcggacggcgaactgaacagaatttgcgtgcattggactgacttttctggactcacttactttccatgcncaatttgcaaattaacagtcaacatttcgtctctacagccaattattccataaagatgcgacacctaattttgcattaataaggtggtccaccaatgttactccattttgttgtctttttacggaatttttcagattgccaaccccggcactcgtggaaagtttggcacgacttttgttgagcacggaattggtcagtttttcggttttttccactattaaccatgtcagatcgaccttaatggcgccgtcttttacacgcacattgtctccgctcttcattatgccaccaacgttccaacgaatgaaagtgaacagaaactttaccccgtccgaattgatttcttagcggtccgtgcaattatttcacaccaaattcacttggtttgttctcaaattcaaggttttattggagctgcacaactttcgcctccaaaacattgtctttggctggaagtggagcatcgaaatgcgttcccgttttctttaccaagtcatatatacggtcacttttccactgcattgttccatgtcccacaggtgcttgaggcgttagtacggagtcctatctccactgccccgtgtccctcctccaatacgttgcaactgtgtgcccttcttgaacagaccatccaacgctttgtgcaatgcacgtggccacaagatctgctcaacttttcccaactgttgatgggcaaaacgctgcccaatccgttgatggccatgccggagtattaccgtctctttctgctggctgtctttcgcgctgtcaaactgctcggcgccgaccacctccagttcagctcgcaagatcttggtcagcgttggcctctgtcggaactccgatggtttccgcccaacattatccgttcaattgtgccaaatgatagtgacctgccgcaattggagcaaatgcaatcggcacaacaggcacaagagatggtcgaactgcagaacatctccttccaggaagcacaacgactgatgcacttggacgctgaattttttggggtttgagcagttcacacacaaccatcaatccacatccctcttccgagtttcagttggactcaccgccctgtcatccgacttctccgtcattgctcgtctcaatctttcgctgcctccacgaattcaccaatttccatccccaattgccccccggcaagcagtcccaccaaagtgcgcccaatttcccggccctttgctacaaacttctttctctgcaaagcaaccgcgacgtgcaccggtcaacaaacgctttggtggactatttggtttggaagtgccaaggggacgcgtcacaagcgccgtcggggatgcttaccgacgaatcactttcactgcagcaaattgacttgagg

SEQ ID NO: 69695 - DNA, 49 bp, Heterodera glycines; identical to SEQ ID NO: 51181

SEQ ID NO: 69696 - DNA, 584 bp, Heterodera glycines
atgaatcgccaaattgatactaaaaggcaaaagtctaaaatcacgcatgaagggcacctttacactttcgataaagcaagtgcggacgggatgacaaaattttggagatgcgaattcaaggacatttgcaagggaagtatctggacgaatttggctgatcaattcatacgtttggcgactgctcataggtgccctgcgaacgcatcaagcgttgaggtgcagaaagtcaagacggcgataaaacggcgtgcgctcgccacatatgaaccgccagcagtgatccgttccgaggcacttcaaaatgtgccgtctccagcaggactttaggttacacagaatagttcaagacaggtactgttcaattaatgatatacaatacaacgaatgaattgttaagatcgtcaaaagggcacgacatgaagtaatgcaccacctgtggttcctaaaagtgttgaccaactgattgtaccgccggcataccgaacatataagcctattgacggtgatgaatagcagttcctattgggtgactctggtgtgtattacgaggccggaaacgaaaatccgcagaggtagttttttga

SEQ ID NO: 69697 - DNA, 518 bp, Heterodera glycines
atgaaggagtgtttcggagacggcacattctcattggcaccgccaatgttctatcaaatttacacaattttggccaggtaatgttttttctcttgtgatttaacaaggcaaattatttcaaggcgtggtgcgtgggttattgttgtgtgccattgcctcctgacgtccaagtcgcaggcatcctacgaaaggatgtatgaacttctgcggcaagcgtggccgacattctcgccaacttcgtttaccattgactttgagacagcagcgcgaaacgcaactgttaattcgttccctggatgtgcaatcaatttttgcttcttccacttcgtgaggaatttgcaaaagaaaatcaaggagcgaagtctctggcaggtacaataaacattttctattctattttttaatattttcgagtttccagcgctattgcactgatacagtgtttgcagaaacagatggaacttggtcacagccaacaatcccaccaaaacagtggaacgtctacactcgcacattga

SEQ ID NO: 69698 - DNA, 348 bp, Heterodera glycines
atgcgtgccgtcaccgtcggtggcattgtgctgatcggcgtattactctgctgcctgatcatctgcttagtgaccatggtcgcctcgctgacattcagttgctggtggacacttggtaagacgaactattcataaagtttatatctgcaaaattcaaaaaatcagaggtgtgcgaattcaaatttttaataccctaggaattttttagccctttttcaaattttgttcaaaaatgacaattttcacgattttttagtcaatttttttacaaattattgagttttggagtctgtatgatgcccatagacgctgttgtgagaactgtaactcgagattttttctttatta

SEQ ID NO: 69699 - DNA, 53 bp, Heterodera glycines
attgaaagccatccattgcctgccgatgctcggcacagcaaagcactaatagg

SEQ ID NO: 69700 - DNA, 561 bp, Heterodera glycines
atgaccgagtttattgagtgctgtatttataattggcattatttaaatccaaaacaggcaaaagaaattgactgggtgatcccggcccgattttgtacgggtcgttatgacagcaaaaagatccgtcatagaattgaagtccaactgggcgaggagagcaaagaggagcgtcttgaagctggcgaatcgcagaccaaatggccaaacgcatatgtgatcccgtcaaaaggtgggtcccaaaatggttatgaattctgaaatgggtcggtcgtcattcgcatttcagatggacacaaagtccgaataatcgacgcgccgggaattggtgacacaaaaggcgtcaacgaagacaaaatcaactttgacaagacgctcaacttcatcagcacattgcctgaacttcacgccgtttgcattctgttgcgtcccaacaccactcgcgcaacgcccgcaatcacatattgcattaagggactgctcacgtacttgcacaaaaatgcagccaaagtactgtactcatcttctataatggataacacggattataacacacctttttag

SEQ ID NO: 69701 - DNA, 1161 bp, Heterodera glycines
atgcactggtaagaattgattttttttggtaaaaataatgatttttcattgaaaatctgttaaatatatagccaaaatttcaaaaaaatttcccggcggcgcctatcggcaccgccggatccttaaaatccttaattttcttaaaaaacttgctcaatttgcaaaaattggtcatttttgaacagaatctaacaatgtattgtattaaaattttcaatttttttcccggcggcgcctaccggcaccgccggcctccctcctcctccttggtcaccaaaaagttttttcaagaaatacaccgcaaaaaattttgtaaaattaataaagggagtcaaaaatataaagttaataaatgttttgttcgaattaattataaaaaataatttatttaagcaatttgaaaaaattttctgatttttgactcaaaaataagatttttttatttcaaatttctcctttataaatttttctatatatttttaatttaataaattgattgtcctttaaatttgtgcattacaaatatttttgtgagtttttaattaaattttcgaattactcccgcccgggactcccgttaaaaatggacgggattttaacgggaatcccgttcgtgactcccgtcccggaaaattttgaactcccgatcccgctcccggaaatttttttttaccggactctattttggagcaattaaaatctatacagaaattagtgattcacagtgccgagttgtgtcgtgaggaacgaaaattgtttagaaaattttatggaaaggacaaaaaaaatttccaaattactaatgatatcatttatttataatttcattgactgaacatttttaaatttatgtgcatttgcaggtgcaactcgtttttgagaaggccattgaacagttacaagactccgaacgcaaattcaagttttaaaaatttttacaatttcaataaaaattattaattccaggcatatcaatttcgaagatatcttcaaaatttaccacaccagattccagttgacatacaagtaggaaataagcttttgtcattaatatcaaatcagatattacattgtgattgaatcagttcttttgtaaaatttatgtgggctaattagtcttccgccagattagggatcattttgatcaaaaagggttactca

SEQ ID NO: 69702 - DNA, 5926 bp, Heterodera glycines
atggtagtgactcttatgattggaatgaaaaatggcgttgaaaaactgttcaagcagcgtccactcacaattgaccagttggacgagcagtacattgacaaaggtggcacaaatttaaacaattttttttttcatttttcccaatggccaaattaaattttatggcaaaatttgctcatcttttcaatttgaatttttaattttcagaagttttggtacaaaattggaagcccaatgttgtgtatttggtgcaatttccgcacaccgattcggccccaagtttatccccggcggcgatccaattggagacatggctacggatcaaagaaatcccattttatgtgggttttaattggggaaattgaaaaacattttaaaataaacttaaaagtttaaacactcatatacttttaccactcatttttattcaacattttagaaaataaaaatccaaaaaacaattttctttaaaaatttttagcgattatctttggtagaaccaaacgaaattgcaaaaatgaagtctggttgatgcctaatgtattccctattttcttgttttttaattatttctcaaaagttgaaaaatttaacggtgctatgtcaaccgacaaaaagtgcaaatttgggcgacagacgaaagtgcaaaatttgctaaatttttgactaaatcgactcataacttttctaaaacgcaaccaaattgcacaatcttggtatcatacgatatcccttgaattgcattattagcatgctaaatttcaaaaaattttattaagtttttcaaaaattcaagccaaaaaattggaaaaattgtcataacttcaaaggctatcgtatgataccaagattgtgcaatttggttgcgtctgagaaaagtcatgagttgatttagtcaaaatttagcacttttcctcggtcgaccaaccacgaaatttaactatttattggggattggattttcgtttaatttttattattttttgctttagactgtcagtgatggtgttctgtttcgcgctctttttgccgatgacaaagtgccatttgttgaatacaatgggcagaaaatattcggcacatccgaagagataattgacactttgaagcaggaagctttatccaagggcacacttagcgaattattagggttgggacaaaaaagtgatgaaaatgagcaggaaatgcgcaatttaattgacaatgttctatacaggtgatattgagaaaaactttttatttaaaaatattaaataaaattattttgcttaatacagtatccattttcatacaacatccgttttatcagttgcacttaatatagtctccttgttcatacagtatcctacagcatccgtgttgtcggttcaccttaatacagtttccttataaagtatccctcttcatacaacatccttgttatttgtctttatacaacattcatcttatcagttcccattaatacagtttccttcttaatacagtatcttgctgcatgatcgttttcaaaatttggcaagttccgaggccgaaactcatttggccaaaaacattgattttcaacgcattgtgctgccatcagtgctcaaggaggcgaagcgcaattggttcaaaattcagccgttgccaaaaccattttgggatgaatattttgccaagggaaaaactgtagcatatggtagcaaatcatggaacggttacggtattagtgagaaagaatggaaaaaatttgtggacaaattgagcacggaacacattccgaaagcaatgaccaaatttgtgaagcatttgaaaaaacaggtgggcactggaattgggtgggacattttggcattttgtcactgtcattgtgcctagctgatttaaaaaagggatttcttcgagagaataatctttacatccgcctgatttatttttccatttaagcttcttcgccagctctcggaacgaccttctctcaaattttcggatgtgggttttttatacctacaattaatatgatttagataccgaaatttaaattttccattactgtacggtactgtaatcgataaaaactatgagaaaaagatagataaattcaacgataaattgaagaagctttttgacgaaacaatgcaacaaattgagcaacagttgaccaaaatgagtgcaaaaggaaaaaaaacgaaattttacctttttggcgaaacgccgtcagcggtaagaaaaagttgaaaaaatgttgcctattaatttgggtgataggtcgtttcgtaagattcgccattagccaagctttttctctttttctctattagcctgcaaaattttaaaatatggtcaactttagaaaaagttgaatgaaaataatactgtttctgccacaacttatattaaatttgataattttgtttgaaattttgcaggcttatagagaaaaagcctttgctatcgaatgatgccaagaatgtaaaatttggttgcctttaagcaaagttatgccatgttatgtcgaaaaattcgctaaaatggctgattttacgaaacgacccagcacgattaatttggaaaaatattaattttaatttaaactggaattttttaaaaatcattttcacgaaaaatttttttattcatatttatttgttttaaaattaagctaaagtcaggaacatttatttttgcaaattaagtataaaaaatattttttgaaaaaagtctcgactcaagaaaagcctcatttttgggtctcattctcgactctaaaggtcaagtctcggtctcaagaagttttgactctcgaacaaaactgaaaatcagcctttattaaaaatggagagatggaaattctatgccaataatatttttgttgctaaaaagttttattatttttatgtgcttgtttagttggactccgttctcttcggcattctttcccaatttaccaacaccaacacaatttacaatggacattatgccaattctatttcggcaaaactcaatagaaatccgaatgatccgttgaaaatttattttggccatatgaaagacatttttatgggccaaaataacaccgaacaaaatcagtggcaaattaatgcggattggaaatttgagaagaaagcgaataaatataacggtaaaatgggagagaaattataaaataaaataaaataaaatattcatttacaataaatagatgattttatatatatatttaattaacgttcgaattagaacttctttaaaatttcgaatttaaaattaaattaaattatatttactttaacccaacaattttttactttatttttaattttaggccctttcattttgcgttttgatgtgcttaagctcgattatgaacaaagaaagcggttcaccaatgatgaacgtaaaacattttcgccactgtttaacaatggaaatgccgaaaattctgatgaaatctccggcactttgttttcggaacgaaagtttttggcggtttacccaaaggtggggaaattgaagggcattttgaatttgggattaggttagatcagcagaaattgcatttgacattaatgatcgggttgatcagcagaacataacataggtaatacatattgaaatcgaaaaatgtatccaataaagaccaaattttcaaagtcacaaaaaaattttgccaaaatttacctttaaattaaatttattaaaatatttcttactataaatttgaatccattttgttaaatttaaaggtcgtcactttcattgtgcaccaattgctcagcttgttcaatttggaacgatttgccattgaaatggcggaggtttcttttttaggttttttaaatttggcattttgttttgttttttcagttacccactgttgttgaaattcgatcattggcggattacattgaatttattccatcagattcaaaacagaaattattgcaaaaattagaagaaaaaattggaaaaattgggactttatcagaaaaaaaagtaaaaatctaaaaataaaataaaataaaaaatatttttatttcattaattatttgatcaaaggcattaattattttcttttttaaaactatataaattgttttttacattaattttcatttgagcgtatgaaattgggccgtgctttgattcatttgatggcctcatatttatgcgaaggaaaaattgggcaaaatgattgtgaaactgaacatgatgaaaaagcgaaaaaataccttggaagaatttgcaaaatttcgtaaaattaaattaaaaaaattattaaaatatttatttttatttccagtgaaaaatactttgctgaattgtctgtgatcgtccgaagcttagtttaccaaatgatgtacacaataaatgtggaatatcagaccaaagaatccgtaaaaaaatatttttatttttagtcaaattaaatttgattttacctttaaaaataatacaaataattgattaagctcaaaatgtttggtgccgcattgcttgactttgatggtaagaaaagaaaattcgctattttacatttattcaaaatccaataaaatataattcaaaaaaattaattcaaattgaaaaaaacgaaaaatatttttaaaaacaatttctcttttattaattaattatatggaatttttagaggaacaaaccattaaatacgaggccaaacggttgcgcaacgccataaggcatttggagaaatttgagagtgaaaaaattgaatacttacgaacgaaggtccaacaacttggcattttgatgcagaaaagtcagcaaacagattcgaaagatcctcaaacaatcgcagatggacaaaagtcaaacgaagaaattaaggtaattaagaaattacgatagttatatcggaatttaaaagtgcaaatttgaattttgatcaatttgctttttgaaactcggttcagagctattagactgatggctttaagctttatccattttgtattcttttttgtgaattaaacttcgaatattgaatatttcttatagaaattgcaaaaagaattgagcgtttgggtgttgcgcagtttcattgtgtccgaaatgcgtgccttggtcgatgcgcttgacgacgatgataaatttagccgggaaaaagttacgttcaatgacattgagccgtcacggaaccattggctcaatttgaatgtactggtagaaaagtgcgagaaagaggacagaacgtgcaaaatgaacagggagcagatgaagcaaggctttcaaatgatcactgaacgcaaaaagaagcacatattcaaggtggacaaatggggcgaaagtgatcaaaactaaacaatagaggttgggaaatcggggtagagggattaaaagtgatcattggaggtggggaagtggaaagaaaagagattagtgtgaaatgaaattgaagtttcaactgggtataattaccacgttgggtcaccctggaaggccgaaccgatgccattcgtctaattggtatcatgtcactgatgagtgaaaaattgaccataaccaaatcaataatcaagccccgatcgggaattgactaagtgattctcggaataaaagtaacaattaattttttaggaactttgggccaaaacggtggaccaggcagagagcgtttttactgtacaaaaataccacgaagttctctcctatcggttgggccaactgcgcaagttgtacgagttgcgcaagtcgcagttgccacgtgacgaggcggtgaacatcaaaaaggtggaggcatatttggaaaatattcaataaataaatactatttatttatttttaaacttaaagattgacgagcagtacgtcaaagtgaaggcggagctgttccagcgactgggcgattccgaagtgaccacgacggaggacaacgacgagggggcggaagtggtcgaagtgctggcagaagtcacattcacatcaa

SEQ ID NO: 69703 - DNA, 959 bp, Heterodera glycines
tggcgaactgttcattttattgcgtgccaaagtggaggaggacggcacaaactttgatgaggaagaaatcgccaaagggttcaaatatgtgaagggccacaattcaatgcaccgtgcccacaaattgcgggcttttctgttcgattgggccggcaaagtggcgaaggagaagaaatttgtcaaagtgagtcagttttggcaatcagtgacataatgccaaattttctttttttcaatttttaaatgttaagaagctcgcctggcgcatgggccaactgtccaagctgtacatgttgcggaaagagaaaattgatgaaaaggacatcaagtcgtgggcaagcaaacaagaagagttgagtggggagatggagaaacgatggacggaattgaagaccataatggaaaaaatggtaaaaaaataaataaaattatttacaaaaatttaatacattttcctaaaatatttcaaataattggtgttttctcagtcggcgcatcgacctcccccctagcattctcataatttatttgtaaaaaagcctaacaaaaaccccaattaattctaataaattcgtctaatattttaatattaagtggtacccttcccatgaattgtttctttcaaatttattatttaaactggcaaatttttttttaaatattcaaaaaaattaaggccgataaaatcatcgaaaatgccactggaaaaacagacaaagccccgctcgcagccgccaatgtttatgccgaggatggaaagcccggaacaatgccattggaggagattcaaatcgaagacaaacgcgaactttgagaatgggggcacttgttaccatttgaaatggtagtttttattctttttgggattttttattttctgagcagatactgtgaaatatgtacaaaaaacaacaaattttggacttttttgcgttcgtttcgaatttagggatttgaaa

SEQ ID NO: 69704 - DNA, 651 bp, Heterodera glycines
atggatgtggatgtaattgtcaagaaattcaagttagtattttggcctgcacaagagtttcggaacgtaccggaagattttgatgaaaagactcgaaaatttgtcgaggtttaatctcaagtcatcaaatttatattacctaattcaatactttaggatgctttgtcctgtaaatatctcatcgagactctcaaacttcaaattggtgtcgaaacagcgcaacggatgggcgaggaggaatacgacgcgcgagtggaatactcattgaacttggagattagtgaagggaaaaacgcccatttaatgaccaaggcggacgaggagagcattcggcagaacaaccatttgctttacatgttaaacttcttcattgtgttcataaatgagcgtgttaaactgacggagcacgcattcacttgcgcattaatgctaaacacaaaggaattctttgatgttcaattttggtacagttgtacaaaatgttcgtctgttctcaaccaatttgctttagttcggctaacatggagattcccacgaaatgcttttcattcgtcagtttggttgaccgtgaccaaccacttgttcatcgaactgttcaacttgttgaggatcctaaccgaatcatggatcgtttctacaatcgcacaataa

SEQ ID NO: 69705 - DNA, 479 bp, Heterodera glycines
  unsure (1)..(479): unsure at all n locations
atgaaaaaaaaaatcaacaaaaaggaagaacaacggcgaaagcggtaccgaccaggggagaagtaatttgtttttcttttttatttaaggtaaattaaataatgtttgggtttcatgtaccttaacttttttgtttcctaaaccacaaatggagagctcttttcatttggattgacaaaaatcacaaatagccaaaataatcgaccctttagacatttttaaaaaataaaaaagaaataacaatcaaaatgacttgacttatttttaaatttaaatctttttaaaaaatgagtgaggacaaacacgacatcaatcaaacttaatcttttagggcacttaaagagattcggaggtaccaaaaatccacagacaatttgatgccccggcagccgttccgacgcttgatccgngaagtgataagcgaaataacatggaactctcacccggtggagacccaagcggccactgctcttcaggag

SEQ ID NO: 69706 - DNA, 1027 bp, Heterodera glycines
atgtgcgaagaggtgaacgagtcctcggtttttcgagtccaatttgacctcgaacgaagggtatgttcatttgtttaacacccctctgtacttatccttttgtttagtaactttatgcgctgaacatgaatctgacgttcatttttgcaagttaatagctaaaaacggacgtccgattcgttttaagtgcataaaattaccatagactcagtttaaaattttattttcccttttcttacggtcagtctgaggactattgccaactgatcaatcgtcttgcaatggctaccgaacgttccgtggaatttcgcacttttgcccccgaaaaaatcctacgcttccgcgcttatgttgagtcgcctttgatcaatgagcaatgtcgccaaatgtgtgaaaacaacttcaaattgatgtacatgattgctgcacttctgtcccgggggacggtggtcaaagactatttgctggccaccgaattggaccgtgacagatttgtgggacggtgcgcaaacgatttccaaagggacagagcggtgaatttaaataatttttggatttgtttaaatttttacaacattttacaggtcacattggatgtgttggagcaggtgctggctgagattgacaagcgcttggattgtttgcacccgtccctaatttacgattggatattcaaaagagtcaaccgaagtgccgacgcaatgcgacaaatccacgacgaaaacaccaaggagggttatgttcgcatcagaaaagtccgtctcatcagtttttgacttataatcatactttttgaggtgctcatcacaccgtcacggatgctttttgttgcgcctgaacttttgatgggcaacagagtgttgcgcatggaccctaagaaatatcccctggacaaattcttgcgtgtcgttttccgagacgacgacgggcgaccggtccatgcgacgaatgttggttcgatgctcatcgaccgattcattggctcgaaattgcgcaatagcataaccgttgccggtaactgtttaca

SEQ ID NO: 69707 - DNA, 857 bp, Heterodera glycines
atggaggcggtcgatttcccaaagactggtgtccctccgaaaccgctaaccaccaaatgggagactgttaacccagaaaacgaagatgcacccgccaagcctacagcaattcctcccgagcgagctgaacgttctccggactttatggagaagaacaatgaacccatgcatgtttctgtttatttgaccaataatctattggtgaaaattcaggtacatcagttctcgattgaatggtcaactttacaggtttcactcgacaaatatttcttacaatttcacccatttatatcattacttacagacgagccagagaaattgacgacattttgaccattgcatctttcgacgatgagttcaccgcggtggaagtggaccaattgttgcaatggccaggctgtgaagataaggaaatattggaagtggcagtgcagcaatacgaagcttactcggccaatattcaggtcggtttatttggaaacatttcgttgaattttttatttatatattcagaatattttggactgttacgggataaaaactgagggcgaactgttctctggtcatttcaccgctttgcgaaatcgaatcagcgagaaggacagtgacgacatggtgggtatttttggggggtttatcgttgtattccctttgttttttagtctttttacaacacgactaatgcgattgaacagcaactgttcagtgtgtttggcaaattcagacgtcagtttttcgaacttctattggaaggccaacagaaccgttacgaggaagtgacggtgccggtgtatcgttacgtgcgcaccaatggggcaaaggtgttgggtgtttggttattcggttattatgattag

SEQ ID NO: 69708 - DNA, 76 bp, Heterodera glycines; identical to SEQ ID NO: 53797

SEQ ID NO: 69709 - DNA, 428 bp, Heterodera glycines
atgacattctatgcttctcttgttggatacacgggaagaaataatagttagtccttttgttgaatttttagaaattctatccgtccaatcggcttttggaattttaatgagtaaatcaggaaccgtaaatgaaattctctgcttctcttgttggatacacgggaagaaataattgttagtccttttgttgaatttttagaaattctatccgtcatatcggcttttggaattttaatgagtaaatcagtaaccgtaaatgacattctatgcttctcttgttggatacacgggaagaaataatagttagtccttttgttgaatttttagaaattctatccgtcaaatcggcttttggaattttaatgagtaaatcagtaaccgtaaatgacattctatgcttctcttgttggatacacgggaagaaataa

SEQ ID NO: 69710 - DNA, 300 bp, Heterodera glycines
  unsure (1)..(300): unsure at all n locations
atgacattctatgcttctcttgttggatacacgggaagaaataatagttagtccttttgttgaatttttagaaattttatccgtcaaatcggcttttggaattttaatgagtaaatcagtaaccgtaaatgacattctatgcttctcttgttggatacacgggaagaaataattgttagtccttttgttgaatttttagaaattctatccgtccaatcggcttttggaattntaatgagtaaatcaggaaccgtaaatgacattctatgcttctcttgttggatacacgggaagagataa

SEQ ID NO: 69711 - DNA, 931 bp, Heterodera glycines
atggggtgtgccttcaaaacaggaaaataccaagataaggaagagcataatgataaagataatggtaataattaggaagaggataatgataaggataataagagataaaatgataataaaaaattaatgataagggtaaggaaaaggatgaggacaatgataaaggataaggaagagaattaggattagataggatgataagcactcaaaacattaattaaataaaccaaaaatgattaattatttgattcagaaaaaatgataaaaattatacggaataacttttaaaaaagaaatccaaaattaatttataaatcgtagaagaaaatataaaatgagcaaaggaagctaaaattttattcaaaaataccaaaaataaataaacatatccataacgaatgaacccacacgagaagtgaatgagaccgagagagttcattcggcgcaggaaaaatactatacaataaaaataatggaattgcttttaatatataactaaaaaatgtagtcttaatattgtagtgaaaattcgatcaatcatatttcaagcagattgagcagaagcgttctaacatttgcagggatactcatgggtaaaggtctatcctacaaagaaaggagcgtcgagtctagctggcgcaagaaaatgtttgatagtccgagtaattagtgagtattgaatgacagcaaaactaattccaaaatattttgtaagaaagggttctgacacgcaacagaagttagttgcaggttagtttagacagtatgattctgatgatatcaaaaagcgagatgaatataatgataaagaagtgtcaaacaattgaaaacagaacaatatgtattagaattataattaaaatttcagtatttttatacagaagggctgccatcgttagagcgattcagaaaggcagagaaatatcatgta

SEQ ID NO: 69712 - DNA, 818 bp, Heterodera glycines
atgggccgaatggcaccggaaaagggcgtggacattgccattgaatttgcgctttggtccggcattaaattgaaaattgcggcacaattggtggacgagcacaagcattcatattggcacaagcaaattgagccgttgatcaatgctaatcaacatttggttgaatatgttggcgaaattggcggtgacgaaagagagtgcgtttgccattattttcaatacattttaatttatgatttttaattaaaaaagaaataataattacataaacaaatatatttttagcagttttttgggcaatgctttggcatttttgttcacgccaaaatgggacgagccgttcggattgtccatgattgaggccatggccaccggaacgccggcgattgcaaatcggcgcggtgccgtgccggaagtcggtttttatattattcataaaataatttattctttgaaattaccgtaagattaagcaaaacccaagagatatactaatatttaaaaagttccattattaggtaattaataatgcacttgtcactgtaattactggtatttagcgaccgttaaatttatcacaatcacagattgtgcaaattggccgcaacggttatacttttgactacaaagatcggcttggtgttgaacaggtggccaactttgtgcatttgatcaaccaagcggccaaattggaccgtgccacggtccgacaaactgtcgaagaaaaatggtcattggacaaaatggcagaaaattatgagaaagtctatcgccgcatgttgaacaaaaatttcatagcaaactgttatgatcattag

SEQ ID NO: 69713 - DNA, 378 bp, Heterodera glycines
atgccatacaacaaaaagcgcatggacaaaaaacgacggattaaaacggaaccagcagaggcttatgatcagaattatggtgccaatcgtcaacaatcgaatggcaaatgggcaaaattagccgccgttaaggaagaagcaatcacattaattaatgatgatgtgggtcacttggagcagcaaaaaaagttgaatatggcgaaaattgtaccgtgaagggcgaaaagggtcagttttagatacataagaaaatattaaaaaaaaagactaagtaaagtagggaaatttttcgaatagaaaatattttaaatgaatatattaactcatctgaaaatatacagaatttatcggcataaaaattataaaatatgcaataaa

SEQ ID NO: 69714 - DNA, 838 bp, Heterodera glycines
tatgttaacccattcaacacagtatgctatccatcatatggtacacctccggcactttttcggcattcattgcaattacggtccaaacttccaccgcgattagcccactttcttcccgaacctgaaccgcatatttgtgcgcacaactcacaaatcatccgggttgtcgagccgtacattccgccgggtgccatccaaaatgtcaatgacgcattaatgagcaaacaaatctcatcggctggcacatggccaaaacagctggcagcaaaactatgcgccatctacgattttcctgtaagtaaaactacaaagaatgaaggttctttggttttatgataattggtttgggccgtcccaattttgagggcccgaattttggcacttttccaaaatttttcaggttgccgttccgtgctgcaacggcttcacctcgttggtgttagcattacgctcagctaacattggagcgggtgccgatgttttgatgccgtccataacatttgttgctgtctcaaatgccgtcctcaatgttggtgccaatcccgtgtttgttgactctgctgatgaatgggactacaatccaagttggtctctgctgttacgagcggcaactcagaaaaccaggcacgaaaaaatcttggaaaagttttgactggggcgtaaaattataatgaaattccattttttttcatggactgtcttaaacggacaaaaatatattttatcttggcttgaagcttctatgtaaattatctatgtccatattaagggggaaaatgttatgaaagtcttttttttttaaaaaaaggaagtttacgaatttatttaattaaataaa

SEQ ID NO: 69715 - DNA, 665 bp, Heterodera glycines
atgccgcactgtactgacgatccgatttggccagcgtgggccttccacacctctgttgtgttgaattttgtccttgtccttgtgctttttgttttgtccgtcttgcttgttggtcgctgtaaccgtcctgtgccggttaaaactgttggtcactgtgaccagtgtcaccgccgtctcactgaccgtaagcgcatttctgtgtttgatgaggccactattgttagtggtctttagtaagcatttgccgattatttgttaatttttttattaaattacacatttgttaaataaataatttgttgaattgatttgttaatttttagttaatgaattagtactttgctaattgaaaatttgctggttatagtttgagtattttcgaattaaatatggcgaagagaggaaaaattcgttggaaattggaagaattggtgtattagaaaactgtggaaaatggatttttacggtagtcaataattaaatttggaaatgcagtatatatggtaattagaacaaatgatgtgaaatgtattttatatttattattatttttattttattttattttatttttttatttgcattgtggacaaaaagggattaaaatgagaaaaaaaattaaattaattggaatttgataaatgtgaaaatgagcgaaaaataaa

SEQ ID NO: 69716 - DNA, 383 bp, Heterodera glycines
  unsure (1)..(383): unsure at all n locations
taattaaatccattccttcgggggaccgtgccgggtgccgcggggtaagcagtgctggttcgtttcatcacggcaccgaaccttttggctagtcagcaatcgttgcttaacttgccagatcggacgggtgcgcatgattccactgttccaagcaccccatcaaaagcaaaacgatataaccaaaatataaggaaaaatttttgaaaaaatttttctccatcttcctttttgatactaaagcatcagagtgctaaaattaacttgtaaataaaatttggtgcgctttagagcactttctanaaaaatatttatganataaaaaaatcgatttttttcagtgtccgtttggngtactcaaacaattatggnngagcaaaatccaa

SEQ ID NO: 69717 - DNA, 1832 bp, Heterodera glycines
atgccgggtccagaaaagccgggtctggtccgtgttctcatttttaaaccggctcaaggtgtccggtaaaaccgggtatttaaaatttaaaaaaaaatacatttttttttttaaattcatgaaaaatgaaagcttatattttaaaaaacatgaaaaaataataatttaaaataaacacttttttatttgtcgaattttttgttgctatcgaaagtgtacagttatttattaaaaatttgttcaactttttatctctaaaaaattgttatttattggtgaaattcatcaaaataaaaattactattaaaccacaaattggctttttaatagaaataaatattcatgaacaaacagtatagcatgttaatactaatacttttttcaaaatttattatagcatttttgtttttaaccttgattttttatttaccttttgtggtattggatttatttggacccttctttttatttttatatttgattggcgttttgtttatttgaaatgacctcaattcttttgatttgatgattcgcttgctggtgtttattcggtaattgtggatattaatttggccgtggattttaattattggattttctttcgtttgtgctttgtcttttatttggaattgtttttcattattcttgttcacataaattatttatttgtcgtgtttattcaaaagcaggtattctccgattctcagacattttccaatttggtcttctcgcattgtgttaaagttaattccaaaagaagaagaattggtttgactttccaacatggcgctcctggacgacaaaggtctggcttagtggcattttcaattgaagggaaacatcggtcgtaaaatttgttgtgaaaaatccaaacaaaaatttttgataaccctcgtgtcgggttgactccattcggatttttgtccgagcttacaactttcttctcgccaaaagcactcgtgttgtgcttcgccaaattgaatttttttttgtaaaaagctcgtgctgctttaaatttggaaattctcaatttatctcgtgttgataaacgttacaatgtttcctaattctccaccactgacgagacaaagacttcggaggcaacaagaagcattgaatcaacaggcgctgattgacgaggaagagcgagaaaattttgaaaaccgaccgattaacaccgctaacaatggggtttttgagaattctttgattgagggagaaatttcagcatcacaccgaaacttggactcggaacaaattccgatgcacttttaaatgtggaaccagcgggtgtacgaaatgagcagcagaggcagaatgaggcagtggtcgatgaaaatttggaaccacaacgcggaggtttgagattgtgttttcaaaatttgggattcaacgttggtagagaggaatggttggtgagaaacgaaaattttgatggccatcgcataactcacactctttcaccacgtattgtaccaagaacctcaacccccattgaaaaccgcatcactcctgaattactcgtccaacatgtacctgcgcaaaatgcccaaaaaactcaaaatgtcatgcaaaataatgcgcgaactggagtaaatggtggtggtgctgccatacagcaacaagcaatgcattcacttgcccgccctcagccacttccagctcaacagccaatcatagtacaacaagcaattccacaacctgctgtaactcagccaacaatccagcagggatttccgggaccaatttggggttttcctggccaaattccttactatcaataccaacctccaggctcaaaaatggggcggctgtcacttcaaatgggatag

SEQ ID NO: 69718 - DNA, 261 bp, Heterodera glycines
agtcaattttactttttgttttttggttgcaattgggttagccatttctgaaaaatgtccaaatcagaatgtacatcaaattggttaactattaaaaaataataggatttggaataagtaaaaaatgagcgaatgtaattaaacctaacttatgccaagtggcgagggatccctcaggcttagtttttagaatcttaatttttaaaaaagcacatttttctatttttgggttggggcccaaacgaccccggggcccaaaaa

SEQ ID NO: 69719 - DNA, 324 bp, Heterodera glycines
atgacaaatgaatataagcaaaagagaaaatattcaaaaaaagaatgggagaaaaattatgccgaaatttgtaagaaaattggagtcagccgagacataattaacaaatggaagaaacaatttggaattcgctgtaaaataacggagaacgaaaaaatggaaaaaatgaaaatttattggcaaataaaaagtgaaaatccaaaaatgactgacaaagaaattgcaaaaattgtgaacacttctcaacagaatattttcaattggaagaaacaatttggagaagaaatttaaagtattaaaaacagaaaatgagaaaagggatca

SEQ ID NO: 69720 - DNA, 90 bp, Heterodera glycines
taattttatgaatgaatgggcatttatttattcgtgaaatgattttcatattaataaattggatttttttaaattaaaacaaactacaaa

SEQ ID NO: 69721 - DNA, 815 bp, Heterodera glycines
tcctcgctaaatatccgattttgctgaacaaaaattcgtctgacattttttatttcgaaattttggtcacaaaaatcaaaaacgaacgcaagtaagaggagaattttgaattttaactatttaattaaaagtgaaaaatttttaaagattttatgttatttaattcttcgctttcagtttggtcagcttcggattcgccgtcaaacagcaggcaagattggatgatggaattctgcttgaaaagggcacttatgcatatggaagtgctggttggatttggattaacggaggagtaaaagaagccgaatattcctacggtgttggcgatactgtaggaattggcgttaattcggccactcgacagatcattttcacgaagaatggacttcgtttggataggaaaataaataaaatgtaaataattttttaatataattttttatattttaacttaacaattgtgtgttccttttacagattccttcgattttttcgttgctccaacttatgaaaatgtttatttttatccgttcgtttctttgtggaattctgatgacaaaattgaggcgaactttgggcccgacaatttcaaattctatttggcaactctctgaggaataagaatattcgttaaactgatcaatgatcatttgtttcgattttatcttttctattaggcttttcttctacaattataaatttctttttcattttattcaattaatgggaaaattgattgtttttcaggtgtaaaattatgtcaacatgatcaatttttctctataacattttgtgtttttcttaaatcaaaagaa

SEQ ID NO: 69722 - DNA, 1019 bp, Heterodera glycines
  unsure (1)..(1019): unsure at all n locations
gcatggatccaatgcgagtcggaggagaccgctgccgatgtgaagaacaaattggcggacatcatcaggcgcgagacggagaagaagcagtgcgcactgctgtaagccgtgccaaaactttaaaaaaattaacaaatattntggaaaggttgaaattttttcgcaacatggcgttcggaaaagcaaatacttttcaaggacattcataggaattcgtacatttgatttatttttcatggattatagtgccagtggggacattcgttttccaaagaaacttttttaaattgcattcttatagtttttaaattttcaaattttcttacgaaattctcagaatttttaaatccaaagcttttaaaaatcattagggttttcctcgtgggatggaaattttagaagttcttacgaaattccctgatttttttttcaacaaatggttttaaaaacccattacccgaaaattttgtggaatttttccaaattttagtgccctcggcaacattgccaaggggggcggttcctccccttcattctccaatggcaccgcttcccaacaacggcaccaccaacaccatcaccatgctttgcccggcacttccacaacctatgcggcgccattgaccacaactgctgccgctgttgctggcgctggtgttcccgccagcggcacggcatgttctggcggccaaatggcggcggcttcggttgctaatgggcaacccgcgcaacattccgtggcggctaatggtggcggcttctcacaccaaaatcgtccaccgcccgagttggagacgatcagtgaggacgaaaagcagcaacttgaacagcaacagcaacaacaatttgcgggcgcggaacagcggtcgcccgccacgtccgtgtcctcctcgtcaaatggtgccggcggtgccggaagcggtccgcaacaacaaaaacggcacaaccaccatggtcatcatcatttgagccaaagcgcgcgcgagaagcggttggagttgcgcgagtgcaaggccaag

SEQ ID NO: 69723 - DNA, 749 bp, Heterodera glycines
atgtcaattattcgattgtacatttcgttcaactggatggatttatcgcaatttattgtgtgtattaacaagaggagttacttattacgaagtggatttaaatatcgttatgaggttggtttatacatatatgtaaatttttattaaaaatgtttatattaatgttttttttgtttctcagttaagtaattaaaaaaagtaaaaattaataatgctgatttattactatgtgaaaagtatttgtattgaaatgaatttttctacattaattgtgtttaataatatgtaaaagaagttttacaatgaaaaggtcggttgaattttcatttcatcaattaatttcatttaataaatttttatctttattttttttctcatttgttcaatttgcaaatttacctatatgttttaatattgtgttgttaattaactttgttttttaatacagattttaaaaacgccatattatccgagcaatgaatttggaccatgtttttcagaaaaatcttagtattagagatggaaatgaacagtttttggagaatggaaatgttttagttattgaagatgaaaccgagatttttgaacatgatatagatgatgttttgtctgaacataattatgctaaacgagcaagatgtttgactgatgtgaatgttgctagccaggcatcactgaattcagatattggcgttgcaggaccgtcacgtatgagtgatagtcaatttggaagaaaggagaagaaatga

SEQ ID NO: 69724 - DNA, 234 bp, Heterodera glycines
ctgagtttttccggaacaacgatgaacaattggaagactattttgttggggactttgggcgaagtcggtttttggcatgaaaaggattaattgtttttttttgtagtcaacacgaacaattatcagcagccatttcgacggcgcagaagagaggcgacttcggcaattcgcaacaaatacaaataaagaacagaagattaattggataattatttaaatcaactttttgtgttt

SEQ ID NO: 69725 - DNA, 2714 bp, Heterodera glycines
gataatacggagtctgaattggtgtccattttgccatcacttggaccgttcgactcgtcttttggcattttgtctgattgttgttatggtcaactgatcttgcttgggttcgtttaaatggtctatgtaacgaatgcatttaaaaatttatttaattatctttacgcgtattttatttgtcctttttgggtcaatagtagttcgtataatggcagttcgtacaataggatggatgtccgtacaatgtattgttattttgatgaaaagtatgtgtcactatcggaacccgtcagtttgaccttcacggttcggccccagcacttcttcccactatagctttttattttttttattgagaaaaattgaaaatttcgactttttttcttgtgtaacttttttggtaattgtctaatctcggagcaatagcttagaaaaagcttctaaacatgttaagctttcaaataataccaacaatgttggatttgcttgataacgaaaaaagttatagccaaaaacttgggctcgtacgaaaccgaccccgacctggggccgaaccgtgggggctaaactgacgtagactggtcactatatcacatatcttttaaaatttgattattgtacgaaacgccaaattgaaacattgtacgaactggcttttgtacgaaactccattgtacgaactgcctttgtacgaactgccatgaccccgtcctttttggttaaaggtacggcggtgtctccgaaacatacagtaaccatcggagcactatgaacggtaatttatcaccaaaaaagcgaaaaatattattggcagccacagactcttcaggtcgaaaacattttgtcaaaatgtttttcaaacgacggaaggaaccaaatggaattcgaaaggggtcggcgatgacattgagcagaggagcgaacgaagcgccggcagtaaaggacgccacacggcacaccgtttcatattcatacggaaaatcgggcacagtactggtggaatatttgcctgactcgagtcgcgacatgtttcaagtgggcccatggggggagaacggagagagtaaaccaaagaatggacaatcatttcgccaatgtcctctttgaggagggatatttactaaataaaacgctttcgcattttatttttcggatttgccattcattctctgggtacgtctccgtgtgctttttcctctctcaaaaccaccaaattcgcttttcaggtcggacgctcttctgaggaccaaattgactttacgattgtggacacttggctggccatcggttcctcaaatgtttcctccccggccgggaacagtgcgcgtcatcttcgcgacgatgtcaacggacaaaagtccatctcttccacaatttcgcgctacgcctgcagaattttggcagatcgtgaccgtccaaataaggccttcatttttgcggctggtttcaattcatccaaaaatgtcctagtgaaataagccactcaaattttgcgaatttttcagatatttttgggagaaaaagcgacaaaatggcaaaaagcgaacggtgaattcgatggtttgacaacaaatggcgtattaattttgcatccaaatctgtgcaataaaagtgccgaccatgatcagatagtaataaacaggctaatttccaccagtcttgcttttgaattcagaaagttttcaacgaacgtttattgtggcgcgaaggtatcttaattcgattgtttattggaacgggaatcatgctaattagtctcccctatcgaatcggtcccctttctcgcccatctatgtggggggggattgggatactgaaagcacttgatgctatttgttaagtttctgttgatggtgacatttataatcttcgcgagactcggtcatccatgcaaaagggcactttggccatgaatgaaactaacgagcttcaggttcggatgtctcattgtcaacatatcaattcgaaatgggcattttttcaggatgggactctcatcgatttgtgcggcgccacccttttgtggaggtcggccgaagggctgaggcgctgtccgtcccgggaagcgttggagcgtcgtctggacgaactgaatgccgggaagccgcaatgtccggtcaatctgaacacgctggtggtccccagaagaaagcatccgaagaacagctcttcaagcaaacagccatacgtactctgctggggttgcggttgttcgtttgaattgttgtgcctttttaggtgtatttcgggtgtggacacgttcaaggcaaacacacttggggaggtgagtcggcattatgccagtttgtctaattgtttttaacaatatctaataatagtcaacaaatgcgggtcaataacgacattccgttgtcccatttgtatggtcgactcaaaaggggtcgccaaactcgtcatgggaatggagtcggtcttccatttggactccgactgcctcaaatacgccttcaacccatgcgggcatgttgcctctttccgcaccgtcaggtgacattctctccctctccttggtacactgtaacactcgtttttcagtttctggtcaagaattccgcttccccacgggacgagtagcttcttccccgtctgtcctttctgcacttctctgctttctgccgaaaaaccattcgttcgtttaatctttcaggacaattgtggtgagtgattgtatggtcccctccccctcctttccc

SEQ ID NO: 69726 - DNA, 846 bp, Heterodera glycines
ttgcttctgctccgtggctatgccttcaatcactcggctgactttgaaacagtgcggcagctgaaggagaagcattgttacgtggcgtcagtgaacggcggatgactttcccttcgcgtatttcccggtattttcagctacgacgtggagcaggagcagcggttggccctggaaacgaccgtcctcaccgaatcttacaccgttcgcacacttttcttcatttttctcttcctaaatttatctcccctaaatccagctcccagatggacgcatgataaaactcggcagtgaacgttttgaggcgcccgaagtgcttttccagccacaccttgtcaatgtggagaaactcggactgtccgaacttcttttcaatgtcatacaatcagcggacatcggtcaaaacaaacggctttgaatgacactggcaaatatttcagacactcggctggagttctacaaacacattgtcctttccggcgggaccacaatgtatcccggatttccatcgcgacttgaacgagaacttaagcagctttaccttgaacgtgtgctgaaagggaacactgattcatttcaggtaagttgataggaagaggactgagggggagaaaactgccaattcttagaaattcaaatcaaaaatcgaggcgattccacggaggaaacacatggtgtttttgggtggcgctgttttggcccatttgatgcgcgaccgggacgaggccagtgcttataagtaccgaagttttttttaacaaactaaattttcaggaattttgggtaaccaggcgcgaatgggaagaaaatgggctgtcgtactgtatgaaaaaactcagcttcaagtga

SEQ ID NO: 69727 - DNA, 199 bp, Heterodera glycines
aacaaaaacgacattaatcgccgaacttgggcaattgaaactgaacactttggacgagccgtccacaaaagcatacgaacatgtcagggaattgtttggggcatcattcaatttaagaaaatgataatatttgcagataaccgatcagagattgcgttcattggtggccaaggcatacgacaatttccaactttgcctc

SEQ ID NO: 69728 - DNA, 876 bp, Heterodera glycines
  unsure (1)..(876): unsure at all n locations
atggcattttttgaaaacgggaatttttggacaaattgnaacaaaaatntaaagaaaatgataatggcaaaccttttgaaagaagataatgaagaaaaaattattttatcaattgaaaaattggaaaaatatttaattttattcaaaaaattaaatgaacaaatacaaataggtaattttttggttatttgaagcaattaaaataaccatttagatgagcatttgtttaataaatacagaaatgaactaaacaaatatgtggatgaaaaagtgaggaaaagtttcgtggattctgaaaaatggacattgccggacgaagttgcaaaaaattggcaagaaataaattttgaggaaaatttgaaagaaaaatcggaacaaataatcgaggtgaataattacaattatatgtattgtattatcaatgatagtaaataatcgcataattcttagggaaattattctcacaaaaaccgaaatgtgaaaaattgagaatttataaaccatttttattagcagatttagccattttttaaaacttttgccgaattttaataatttttgcagattaaaaattgtttgactacgaatggatatttatctgaagaagaaatgcgcaaaaaaggacaaataattggcgaattgacaaaaattattaaagaatgggtaagaggaaaattgggaatagagatagaaaattcaaatttacgaatcccgcgcgggattgtaaatcaaaactttttgcagtacgagatcccactggataatcccgcaagtcccgaagttaaatttgcgggaatcagcgcgggattgtgagcttatttaaatttgaaaaaatatcgatttcaactaaaaattcttcaaaataataataataaa

SEQ ID NO: 69729 - DNA, 556 bp, Heterodera glycines
atgtgtaattttgaactggtttttactcaaatacaaaattttatagaaaaattattttattgcttttcgtggtttcaagtatgacagagtctttggcttgcattttattatgagaattttataatctttttttgtatatatctttttttgataatattttaaagttttttcattaaaatatttagttcattattaatatattttaaattaattaaaaaatattttattcgagaaatgtataaaatttcccacaatttgttctatgttttttatacagaacaattgcttcaaacatgcatttaaaatgtttagcttatcaaattacgtttcataataaaatcttataaatttcacacttttatttatttattaattttcttttttactttatataatttttattaaaaactgttttatttgaatttttatttggaatatttgaaatatcaattaagtttttatccttttcattaaagatattaatgtaatctttagaattttattctgttattttgttttatttctataaaagatgttgcgatgtaagattaataaa

SEQ ID NO: 69730 - DNA, 150 bp, Heterodera glycines
atgcgaaaaaatattccgacggaattactttttgaaattatcggtgcaattccattcgacagaaaatgggctcaaatccatgtgtcccaagtgtttaaccattttctgttcaatcgtatgggctcgtggcttagtcaaatcaaaaatttg

SEQ ID NO: 69731 - DNA, 711 bp, Heterodera glycines
tagtacaaattattggaacaagtttattacgatcttaggtcaccggcaagttacgctggtattcaaaaagtgctggcggaagcccagaggcgaaatccgagcattactcttcgtgatgttgacaaatttttgcataaacagcgcacctacacgctatttaaacctcgcaaaaaccgcttccgcaggctaaaaactgtgcccagtggactacacacggactggcaatgcgatttgtgcattatggacgcactgaaagagcataatgatggatttcgttacatccttgtgtgcatagatgtgctaagccggaagattttcactgcagaggctgagtccaaaaaaagtgagcacatgattgcggcatttgagaagattttcaaaaaggcaggtgtgttgcccaataagctgtacagcgacgctgggcttgagtttcaggcaaagaaaatgatggactactggaaacaaaaagagatcatcaagcacgtgatgtacagcccacatttgcatgctggagttgtggaacgcgcaaaccgtacgctgaaggagcgactttacaaatattttagtgaaaaaaacacaaagcgatgggttgatgtgctggacagcattgtgcgtaacctgaacagctccgcgaaccgaacaaccggactaaggccaacggacgttaacattaaaaatgcctctgctctacggaatcgcctatataagcaa

SEQ ID NO: 69732 - DNA, 523 bp, Heterodera glycines
atggaacgaactgtggtgatcaaacggctcggattgcctgatcaaaaggtcaaagttcgaatttggaacgatacggtaagggcagcagagaaagggtgttacggtatctgtttgtcaattgccaattgttaaggtgtccaacctcacactgatggcacttggtaagcgaccgattggccaaaaaatgatttgccaaattttaaggctcttccgcccccgaaattcttttgtccataatcgaagtggtcggaaaggtaattttgaattagtgatcgtcacttttgttgatccgtgctcacttttagggcttcgaagccggcgacttgggggtattttctttctttttgcccccccccccctcaaaatgccattgcccccccccccaactcagccgaatacaatcgtcggctccgccgccttcaatctgttcatgatcatcgccatttgcgtttctgctgtgccgcccaccgaaattcgccgtcaaaagcatttggacgtgtttttcgtgactgccacatggtaa

SEQ ID NO: 69733 - DNA, 358 bp, Heterodera glycines
atgacatcacagaaagacacaagtttgtaataaatttaaacattcagaattttttggaataaaatggctttaaataggcaaataatttttatttcacgggtatttttcggaattaaataatgacatcacagaaagacacaagtttgtaataaatttaaacatacagaattttttggaataaaatggctttaaataggcaaataatttttatttcacgggtatttttcagaattaaataatgacatcacagaaagacacaagtttgtaataaatttaaacattcagaattttttggaataaaatggctttaaataggcaaataatttttatttcacgggtatttttcagaaaataccaa

SEQ ID NO: 69734 - DNA, 49 bp, Heterodera glycines; identical to SEQ ID NO: 51181

SEQ ID NO: 69735 - DNA, 184 bp, Heterodera glycines
atggccaatttggacaacttcgacaatgatacggtaattaattggtaaaatattatttaattttacaatatattttcagttttatttggccttcaaagatgccaatcccagctggtctctgattggatgcgcactgatttatggaatcattacaacatttggaatcatcttcatttttctgtga

SEQ ID NO: 69736 - DNA, 2849 bp, Heterodera glycines
atgaccaaaaagtcaaacattgcaaaacttgtttctgaaaagccaaaacatcaaagaaatttccaaaaagtcaaacattgcaattcaagtttcttaaaagctaaaacatcaaagaatgtttccaataaaaacaccaaataatacaatatcgtttccgaaaagaacattaaatgatgtttccaaaaaacaaaacattatgtttctgaaaaagcaaacatcaatgaccaaaaagtcaaacattgcaaaacttgtttctgaaaagctaaaacatcaaaggtgtttccatacaaatcagaacaagaattacacttttataaaagccaaacatcacaaataaatgtttttgaaaatcacaaaatgcatcttcccaaaactaaaatacagtatttatcagaagaaaaatacaaatcacaacactaaatacaaacaaaattattgccaacccatggaaaacacttaaaacaaataatttttatggattaatggataaatcatttttacacctgcacaggttgtgctcacactgcttcaaaaggcgcatgttcggttgaacccaaaatatttgtaccaagcggatgggcatgcaattcgcgagctgctgcccgtgttgagaatgctttatgaaagtgtgaaggaacagaaacggagcaacggaaccgaggggagcggaggaaaggcagcggaggacgggggaggcacattacaggtggctaattgagctgggttcaatagcattcctctttcaccaaattttttctttaattttcaaaaaatcttaacaattcaaaaaattattgtaaaactttcagcgattttttagaaaaaatcttgatcacaatgctcaagctgacaagggaccatcccgaactgccagtgtccaaatcactctaaaacaattttattttgtagcggcgcataatcaatttgctattggaaaattttagtacaaacaaaaaatgattgaaaaatctacaagcaaaaagacttatctttattcccttcccggtacagatcaatgtgcttcgctcgcaagtgaatgccaaggtcgcgtttttataattttaaatttcgcttggtttttaaacaatgaaatgaatgatggatgcttaagcgtcaagagctccatcaaatcatcaaattggccacagaattgccaaagacggcagcttctctgtatgaactgcttcgggaggaaatatttgcaaaagtgagaaaccaaggcattctcagtgtataaatgtaccaaatgttcaggaagtgcgcactaaagcactgggcagaccgctgaacgcagcgcaggtgcaattgaacactttcaccatctttttcccatttagagcctatttaaacacgtatttcccgttaatttagggggaaaaaagaaagaaattggggaatgtttaaaattggaatttttataatatcagacaatggccccggccggacccaaaaaatatcagacaaatgtccagccggacccaaaaccaagttcgctcaattcggataactgtgaaatgaattataaccaaaaaaaccgtaccgtggcccgttgaccctcaccgagaaatactgtgcccgcctcctcccctccccagtaaaccgacctcgtagaacagtgggtacattctgttgcataggtggaaacggaacttcgggaacgcattcaaacaaccgaacaacgcattgaagaagtgaaggaacggctccaaaacatcgagtcggacgaacaggagttgggccgaaagattgaacggcgtcggcgcgaaatggatcaactgcagaagcggttggccaaactgcaggcattccgtcctccctatttggacgagtacgaacgttacgaggcacagctgcgcgttcgctacgctgtggtacagttggccaattaccgtactttggccaaatgccaaattttgaactgatttttagtatgtgatactgttccgcaatttgcatgcgttgcaaagtcgtctagtacaatctgagcacgcggagcgcgagcaggcactggaggctgaacgttcaatgcgcgaaatggtgggaaaaatgcgcatggaaagcgaacaggcggctccattgtaggcgcttaatgaaatttctggccccaataatttggccaatcattcaattggtttgtctagccactttttaagaattgctggcattccgctgcacattgatgagctgaaccaagctgcagacgacggattggaggagtatggacaaaatgggcgacaacgacgaccaggaggtgggtggaaaaattggacacaaattttttattccagtacaatatttaaaatgtgttgaaataaagtaattagagcctggatgggaaggccgggactttcccgggatcccgatcccggctttgctaggacacggtttcccgttaatgcgtaaagacaatgtccctatggcggttgttcttttttctgtaaaatctcaatttccgcaaacagaagtgcgcgttttcggcaacatgactgggttgggactgtccgacgacgatgaggaggatgaggaagaggacgaggatgggctaggaggtggacgaatcattgaaatggaggatgatgaagaattggatgacgatgatgatgatgacaatgacgattatatgaacaattttatccgtggcggcggtaacggttcaacagcagctgcagcagaagagcccaccacaaaacgacgatgggcgttaattgagagcaaaaaagtaattaagttaatgacaaaaaaggcattaattaaatcaatccaatgatcggcagatgcgacaagaaaacgtcgatgaagaggaaacggacgaggaagctgctgatgaagacaattcgggagacaatttt

SEQ ID NO: 69737 - DNA, 599 bp, Heterodera glycines
gttcggaccagcagagttgttgcgaattgaaaaataaaatgcaaaaaatgaaatacgaaaaaaattaaaataaaatacgaaacacaaacgaaaaacgaaacgcgaaaggcaaaacacaaaatttgtttttgaaaaattctaaaattttagaataattctaaaatataatcaataaagaaatattcgagatcaattattttcatattttttaatcaaattccataaaatttagaagttgatattattgttattattgttttttacttttaaagttctcctaacatttccttaatcaaggtgtgatctgctaacaaattttatatttttttgccgcataatttttcctaaatttttgtggagtaggaccgaaaggtcatacttttttgaaactagccaaattttttgcaattaaaaaacgaaatgcgaaactcaatatctctcctgaccccactcaagcccagcagaaggacaatattttcagtattgtcggccgccaagcacttaacaggccggcgttccccgacacacctttttggcgatttgttctgcccaaaaatatcggcccattttatggtcttccaattaactttttttcactg

SEQ ID NO: 69738 - DNA, 98 bp, Heterodera glycines
ttaaccctaaactttttggcctgtttaaaaaggaattaaaaatttttaaaaattttattcatctccctttttgatagaaaaggcatcagagtgcctaa

SEQ ID NO: 69739 - DNA, 674 bp, Heterodera glycines
atgaattatcatatttgtactgattttatcaattccttagcatacggtaaaaattttagatcggtcggttcacgggaattgtgacaaaagtcacacgaaaatgggtccaccacatatccgatcactactgtgcaatattcaaaattcattcaccagcaaaacagtaggcaaccaaacaatatcgccgatcaaatttgcattgttcggttgtggcatttatgtatggcgaatagcccgtcacgtccatagcagcgccggatttgcacttcaatcctttcaatttaaatacttttatacttgcttatgaaataataaaaaaatttggtcaattacctgagcaatgtccgaacagggtaataaccccgtaggcaaaaagaatcatgtccagtgctccaataagtgtcattataatgtctttgaaaaaaattttcagcaaatcctgaaatttctttcgctattggtacgttgaggataagcatggaagaagcctatccatttggcttctacgatgactaagtttatattttcgaaaaattgaaattttgtttgtctttgcaaagtggagacctactggttatattcgttgtttgatttcgttaaaattttttttaatggaaaatgaatgtaataataacgaacatttgtcaaccaactcatatgatttttaaaataaa

SEQ ID NO: 69740 - DNA, 737 bp, Heterodera glycines
atgtccaacttggagagcccattaagaactattgtataatataaatatgtgggttatgacgccagcagtgaaaaaaaagttcatagcgttctttttcagcctttttaatccagaaaaactcctatggactgaaccaatatctaccacctaacaaattaaaaatatttttaatataaaaattaaaaattaaattctggtcgcgccgaaacattctgcgtagaaagagcctgcgcgaacctccttgcgaaacccgtgccgaaaaagaaaaccactttcttaagaacgcatgggtgctcgattccgtggtgcgacttttggggagtgaaagggacaaattcaaaaagaagacaaaaggaagtaatcaaacggaccagaagaaggaggacaaagataggaagaaaacatccaatataaaaatgaacattgacaagaagaaaaaggaatgatttgaaaaggtcgacaaaaagactagaactggatttttatgaaagtcgactcaaaatgcaaaaaaaagccagagaaaacaattaatctgctttagaaaatcaaaaaggatactaattgacaataagtaggggggcttcgccttagctttgcctatttcgggggagtgagagaggggcgttaattaaggacaatccaccagaagaggatagtccgttaattaaggacaatctgagagtgaatgaaaatccttcagtgaactgacactatgtctatatgaaattattattaaa

SEQ ID NO: 69741 - DNA, 887 bp, Heterodera glycines
atgcggagaaaaagacggatttggccatggaaacgccgtcgaagtgttgcaagaaacgggaaggtaaaaacggacggaaaggcgcacagggggaagacgacgaggagaagaggaggacgagcgggacgaagatactggtgatgaccaacaaaaggcccttctggaacgaacagtctcaagtctaccaggtaaatgcagaaaccatgttaatggtgggcgtgtagtgtgattcattctctacgatatttaattgtttaagttggactttaatggaagagtcactcaagaatctgccaagaacttccaaattgaacaccagtctcggcaagtgcttcaatttggacgcatcgagaatggtgcgtacacattggactttcgcgagcccttttctgccattcaggttggttctcttagtaattgtctatttcgacatttgatgttttcaggcttttgccgttgctttggcatcaataactcaaagattgaagtgatttgattggctgctctaaggtttattctggtctacgaattcactcgagtaaatgcacgacgcatgtgaaaaatgtgatcatcatcaacctatatctctttctgttattttgtacaatttttcatgtttttggttgcgcgtctattcacaattatttgacattgtctaactccatcctccgactttgggcatccaattgactttttactatgtctatttgtgtattattttatcagtactataaaacaatttatatgcataccggcaaatttaaagttcatttacagaattccctaattttccgccagttcctttccctacattcaatttttgtatggataaaaaataacatcaaaaatcctatttatagtaataatatggtatttgagacaataaa

SEQ ID NO: 69742 - DNA, 565 bp, Heterodera glycines
atgaatttatggctattaatagttattattatattttgcttattttatggaattaaatctggcaaaatccaaccaaattttgacgaaatatttggcgacaaatgggataaaaatgaaagtgaagaaaaaattattaaaatggaacaaaatgaaaactctgaatttaatattaatcaaaacagtggaaaaaatggaaaccgccctaatgatcaacaaaaaatagaaacaatcgaaaaatttgatgcaattaaagaaaagttgagagaaaaaggaaaatatgaaaatgaaaaaagaaataaaattgagtggaaaattgcaaaattattaggcgcaaatcgtaaaaaaatatacaaatggaaaaatgaattaaatttaaataaaattaaattcaataaaatgaaaaagagtttttatgaagagaaaaagagcgaattcattgaacgaattgatgaatttaaaagtttatatggccaaggaaaacataaagaatttgtgaaggaattaggcatttcaaaaaagacatttcggaaatggaaaaaagaattactgccaaattgctataaaa

SEQ ID NO: 69743 - DNA, 390 bp, Heterodera glycines
atgaacccactcgtaagtattttagacttttcagttaaaatcattttggcttgaaccctgttcaaataattatataattaaattttaaacaaaacaaaatttaccagatttccggtggatcgaaacttgccataaaccgtatgtcgtggactgtttattttctggctactgtagaaaatgagttccaaaccatgggatacggctgcacagcttcgctgatttcaccgcaattcgttctgttggcagcacattgttttgacaatctgaaggaaaatggacaattttcacttggtaattttttttattaaattaatacataaatttgtaaaatgtcatgatgaaaaaatgaataatagatgtatatacgttataataattaataatatttaa

SEQ ID NO: 69744 - DNA, 115 bp, Heterodera glycines
atggacaaaaaagttaaactttctccaaaaatgtatccagtctgcgttcattgtgggcccaccgaaaaattcaaaaatggaaaagcattcattgccggatggggaaatttaaaga

SEQ ID NO: 69745 - DNA, 565 bp, Heterodera glycines
atggcattggcacgccgagaaaacaatggcaccaccaccaccgctactgctcgacgatatggcgtggagacgaaacaggcggcggcaaaaacaacggccaaacattccgcggaggatgatgatgatgatgatcaacagcagcagttgttgatgaacagcacctacattccggaagtagcaaaggtgtgaaatccacaggccccaaatttttttgaaattcaaaccggaattccgatgagcaaaaaaatttcgaacttggaaaatttcaaggaatcaattgaccaaaatggcagttggaatcaaaataatccaagattgaatttttcattcacactgaaaccttttgactatttcaagaatggcaatttggtgccaatgtttcccgagtatggcattttagtgattggaatggcatttctctgccgatgatatttgagaacgcatttcagcgccatgtagttcaaaaatgactttttctggaattcgattcgaatcgaatgatatattacaagaatggcactttgtgcccatgatttttcagaatggcatttcagtgccaaataaa

SEQ ID NO: 69746 - DNA, 375 bp, Heterodera glycines
atggctcgccagctcacagatggcactggtggtgccaccaccaagcgtggttccgcctcctcactgctcaacctggtcagcgctcatcaccgtggtggcgaaaagcgctcattccggcacccctctgtcgtgcagagcaccagcgccaattccaccgccgccgcgctgttggacgcgcagccggcggtgaccgccgccggctcgtcagccaagaagcggagcggtggtagcggcactggcgctggcggcagtgttaataatgcgttggagcggctggcacgtgccggcggtggcggcagtgttaacaatgcgttgattgagcggatggcacgtgccggcggtggcggaacggctggcaacagcaaaaaggcatga

SEQ ID NO: 69747 - DNA, 258 bp, Heterodera glycines
aatgaaagtttaccacctgatttgggctgcgaatccccaaaacaacccgactccaagacacgtaaagaatggaataggcaccgccagttggacaggtcttgccaccttctctggagccccggtcgaagggaaaacttgaacaagcgggccaacccaagctcacggtctatacgctacacctcgcaacccagaggagctgcgattcgagcgctggactcttcccagttcactcgccgttactacgggaatcctcgttag

SEQ ID NO: 69748 - DNA, 141 bp, Heterodera glycines
atggcccccaaatgccttccgctcgaactgttgttcgaaattgtgcctttcatccctgccgaaaatgccacaccgaatgcgctctcgtcctctcggctgctgtacaactttttgctgccacgtgtcatcaaatggaaagag

SEQ ID NO: 69749 - DNA, 358 bp, Heterodera glycines
atgggcccagcgctcgacggacaaagaaaacttttctcattgttttgtggtaggcgcttttcctctgccgatggaacaattgaaggcaaaaagtgtggcattggcacactctgtgccaacaaatttgtcttaatattttttttttgaacataaacaatgaagttgaagcttaatataagggatacatatgttcttgacagatattttattaattagttttttttaaataaagtgaaaattgctgaaattgttattttatatatatatattttttggttttttacacttaatttctaattttttagcttttttggtcaaaaatattaacgtagaataattaagtattttttggaaaata

SEQ ID NO: 69750 - DNA, 636 bp, Heterodera glycines
aatcgaacgctaacggacgacctaatggaaaaaaatccccgaaggagagaatttaattaaatccattccttcgggggaccgtgccgggtgccgcggggtaagcagtgctggttcgtttcatcacggcaccgaaccttttggctagtcagcaatcgttgcttaacttgccagatcggacgggtgcgcatgattccactgttccaagcaccccaccaaaagcaaaacgatataaccaaaatataaggaaaaattttttaaaaaattttttctccatcttcctttttgatactaaagcatcagagtgctaaaattaagttgtaaataaaatttggtgcgctttagagtactttctgaaaaaaatatttatgaaacaaaaaaatcgattttttcaagtgtccgtttggggtactcaaacatttatggggagcaaaaatccaacgcagaattaaagtacaggctatagggaagctattccggaaggattcggtctccccataaatctgggcgcatcggttcggggggactgccccgaaaacaaaataatcgattttttcaagtgtccgtttggggtactcaaacaattatggggagcaaaaatccaacgcagaattaaagtacaggctatagggaagctat

SEQ ID NO: 69751 - DNA, 1267 bp, Heterodera glycines; identical to SEQ ID NO: 41680
  unsure (1)..(1267): unsure at all n locations

SEQ ID NO: 69752 - DNA, 60 bp, Heterodera glycines; identical to SEQ ID NO: 52045

SEQ ID NO: 69753 - DNA, 1401 bp, Heterodera glycines
atgccaaattttttaataaaaaagtgccgaaaatcggtgccattggccaaccttatgtttgatgagcagaaatgggatcagcatcagcaggcccccgtcgtggaccacctaaattatgaaaatgcgttggttttttcttcctaaaatggctttttttttcttttcaccacccaataaatgtcgatggtccccgtgagtcggtccccgtggctgggaaaggcactggcatattttggcaccaaaacggcacagcccgcggccgcgatggtccgcaccaattcggcaaatcggttggcctccaacattgggtttttgccctgaaaagtgtacagaaaacgtattttaaaattgagaatttaatatttcacgcaataaaagaattaaaaaataaaacggacggaaccaatttaaaattttaaaatgagaaattttaggcaccccaatcaagcaaaatttcctataaaatctggtttttttggcacctaaaattggaaaattggcacaaattttaatttattttgtaaaaggaattaataattttaaaaaatagcagtcaaaaaatgttaccggaccagaggccgaccaattttgaggccatgcacaaacgacgctgaaaaaccaattagtgttttttttttaattttcaaaattatttggccaatttctggccattggccacctgttgtgccgaagtccgcccagccccgaggtttggatcagatgggagacgccctggatgtactggtcggccaccaacacgtcgcagaagccgcggatgcgactcgccttcacttcgtcgtgcaaattctgtggcaaaaataataatgggtaattaattaataattaatttgctcattagattagtgctcccaaaaactcgatgaaaatttggaacaaaaaatatttttcggcaaattaattctttttttgtctaaagataccaaaaatggcacacaccagggatggcattccgaggccccaaaattttttgaaaatcagaaaacgtaattccgaggtccaaaaattttttggaaatcggaattccttgcaaaaaatgccagaaatcagaattccgtgccatccctggcatacactgtgcattcgagaccgagctctgcaatgccaaaaattgcattgacagtgttgtttgtcgacctgtcggattgtgtccaattcgccgcccgccatttgggcgaatttcccctccacacattcggccacaagcgtcagccctttgcccgccttcagttggcccacaaatgcgagcagtccacgccgggtggattccaagtcggtgaacaagcccgacatggaggcggacgggtggaggacaagctgagaaaaggaacagcgaaatgggatggagagaagacatggatcatcatggatcatggacactga

SEQ ID NO: 69754 - DNA, 4457 bp, Heterodera glycines
tacgacggcactagagggtcaattcatcgttttttggctgctttgatttggtcagccgattcttttcccgatcagtgtccatgatccatgatgatccatgtcttctctccatcccatttcgctgttccttttctcagcttgtcctccacccgtccgcctccatgtcgggcttgttcaccgacttggaatccacccggcgtggactgctcgcatttgtgggccaactgaaggcgggcaaagggctgacgcttgtggccgaatgtgtggaggggaaattcgcccaaatggcgggcggcgaattggacacaatccgacaggtcgacaaacaacactgtcaatgcaatttttggcattgcagagctcggtctcgaatgcacagtgtatgccagggatggcacggaattctgatttctggcattttttgcaaggaattccgatttccaaaaaatttttggacctcggaattacgttttctgattttcaaaaaattttggggcctcggaatgccatccctggtgtgtgccatttttggtatctttagacaaaaaaagaattaatttgccgaaaaatattttttgttccaaattttcatcgagtttttgggagcactaatctaatgagcaaattaattattaattaattacccattattatttttgccacagaatttgcacgacgaagtgaaggcgagtcgcatccgcggcttctgcgacgtgttggtggccgaccagtacatccagggcgtctcccatctgatccaaacctcggggctgggcggacttcggcacaacaggtggccaatggccagaaattggccaaataattttgaaaattaaaaaaaaaacactaattggtttttcagcgtcgtttgtgcatggcctcaaaattggtcggcctctggtccggtaacattttttgactgctattttttaaaattattaattccttttacaaaataaattaaaatttgtgccaattttccaattttaggtgccaaaaaaaccagattttataggaaattttgcttgattggggtgcctaaaatttctcattttaaaattttaaattggttccgtccgttttattttttaattcttttattgcgtgaaatattaaattctcaattttaaaatacgttttctgtacacttttcagggcaaaaacccaatgttggaggccaaccgatttgccgaattggtgcggaccatcgcggccgcgggctgtgccgttttggtgccaaaatatgccagtgcctttcccagccacggggaccgactcacggggaccatcgacatttattgggtggtgaaaagaaaaaaaaagccattttaggaagaaaaaaccaacgcattttcataatttaggtggtccacgacgggggcctgctgatgctgatcccatttctgctcatcaaacataaggttggccaatggcaccgattttcggcacttttttattaaaaaatttggcattttgggaatgtttttcgagttaaaacgaattttacggagacaaatcttatttgtaatcagtcattttaataatttctatttgaaatattttaattgctttttaatggctttccgaacggatttttaaaaaaacacaaaaaaattcggatgaccacggtgggactcgaacccacaatctcctgattagaagtcaggcgccttgtccattaggccacgcggccccacgctgacgggcgttcccattaagcaaaagacagtggaataaatgtgagaaagtgtgtgcattaaaaattggaaaatgtgcgcagcggcggaaaaggaaaagcggcggcgcaaaatgtgaacaaacaaattcagacatggaaaaacacgacggtgcgactgttcacttttgcacagccggaggacaacactttgcaaatgaaaagagtgggcaaatttaagaaaagcattgaaatttaattaattttttgggccgggggaatttgcgccaaaaatttaacgaaatgccatccttttaaattgaaacttttgaagcgggaacgaataaaagccatggcatatttttggaatgtttttgtgccccgttttcatttggaaaattcgcaaatttcggttcaaaatcgatggcaccaattttatcgtttaattcgctaattgatcaccaggctcgtaatcagaatttgaaggcctttttttgccgatgtccaaattatttttacatttggaatttctttggtcaaactttcaaaaaattgagcaatattcgttctggaaaatcccaccccttggcatatatttttggcactgtttccatgtcaattccctccccttttggcatttctttttgacttttggcactgttccctccccccgtgccaattcctaaaacttcacaaatttgggcaggacttggaacgctttctgtaccatttgcgcattgaggcgcaagtgttcgttttggaaattgactccaccgaaattgagccgtacgtttaccaacggacgctgaaaattgaggagagagtgaaactgttgagagaaatgggcaccaaaagcaatgagagagtggcggacattcaggtgaaaacagagagtgggagagaaaaagaggagaaattggaatttaaaatttaataattaaacttaaatggaaataatctaaaataatcaaaatttaattctattttctaagcaaaatgtttaaggaaaaaaactatgatagaaaaaatatttaattgaatttgaatttttaaatatattttatagactaaaattaaaatttattaaaaatatatttaaaatattataagcaatagattcaatgaagtccctcatttgtcaggtgacgatggacgaggcggtgttggagcggaagtactcgcggcccgactcggcccggcgacgctcctcaaccgttgatccggacgcgccatcgcaagactcggccaaggtgggcgagaattggccaaatctcggcctctaagacttgggaatgaccactcggaaatcttggtcccgagtctcggcacaacgctcccgtgccaatcccggcatcccttgtctcggtgaagttctctattatcgacttcaatttggatgccggtgcgattctcgaccaaaaccttgcgcactaatcccgacgcaatctcggtgccgggtctcgaccaaagactgcactcttattccgacataattacccggtgccgagtctagaccaaaaatttacccctaatcccggcacaattatccggtgccgagtctcaacctttgcgcccttaatcccgacacataggccggtacggagtctcgaccaaaacttttcgccccctaatcccgacacaattggccggtgccaaagtctcgaatttggtgcaaatttaaggcgaacactctgtgggcggtgcacgaagaatctgaggaggagggaaagcaacagcaaaggcagcagccgaggagcatagagcaaagccaagcggcgagaacggcaccagcgaatgacgacgacgacaatggcacaaatgggagcaaagtgcgcttcatcgacaattcagtggaggtgaaaaagcgcataaggatactgcagaacacagaccaaaaaagagggtggggggatactgtaaaaacttaggcttttggcttgtgcctttagttttaagacttttttttttaattggtgcatctcaaatgagcaatatatttcaattagggcacggcgggaatggcatttccgtcgggaattgcagcaattttgttgtgccaacaattattcctgatcaactcaaaatcacacacagatccatcggccctcgttggactctgccgacagtttgttgccgtcgcctgttaaagtgccacctcgggcgacgacaacaaataacacactgacagtgaacaatgatgctaatggggtgcaaaaagcatttaaatttatttatttaaattgacgcgccgccatttcagtcccaacccgtcccttcgacggtggcacgaatgcacacggctatgaagctgaaccagcacatgcgggagctgagcgcggacgcgcagctgctcattgtcaatttgccgggcccgccggaagttggccaacacgacgcttactgtaagaagacagtgcctattgtaaaactgtgtttgccaaatctcatctccccccccccatctcgcgtagtctcgagagtgccattctcgtgttaatctcgagagaaccattctcgcattagcctcgcgaattccattctcgcattagcctcgcgaatgccattctcgcgttagtctcgcgaatgccattttcgcgttaatctcgcgaattacattctggcgttaatctcgagtgccattctagcgttctcggcctgtgctgtgcctcaatcatcatccatccgtttttcagacatggaattcatcgaagccttgacggaaggcattcgtcgtgtgctgttggtgcgcgggacgggctccgaagtggtcaccatttactca

SEQ ID NO: 69755 - DNA, 640 bp, Heterodera glycines
atgacaccacgatttgcacttgacgctattgataaaaaattacgtgaattaactaaatgtaacctattatttggtggaaaaactattattcttgctggtgattttagacagaccttaccaataaaaaaatttgcagtaagaagtgaaattgttgatctaacaatcaaaaaatctgttttatggaacaattttgagcaattgaaattaactataaatatccgagccaaggacataatatttgcaaaacaaattcttgatataggcgatggagttagtccaaacagcttcattcaattacctccggagtgtattttatcaaatgaatctgatttaatcgatgaagtttacggtgacatttttttaaagcataattttaatgaattaaaaaatcatataattctaaccccatacaacgatttgaccgataattataatgaaatagctttggataagttcccaggaaaatgcgttacttatcttagtattgatgaagttgaaacaagcaataattttccaattacaccagaaataatgaactctttcaattctcccggttttccattgcatgaattaaaattaaaacaaaattgtaaagtaatgcttatgcgaaacataagtattgaaaatggtctttgtaatg

SEQ ID NO: 69756 - DNA, 610 bp, Heterodera glycines
atggaggagcaacaatatgctgttgttgttgatgagccggaccattaccgtattgagcaacattttgacgagcccatgccagaggaatacggtgatggtggtactattgtacatcatgagcatgtcgttgaatgggaacagcaccgatccgacgaatcaccaccttctgatgcagtatctgcaccggctgcagaagaggccatgcaaaagagtggcaccacaacagtgactactgtaaccaccgtaaccgactcgtggagcagcagcaacggtagaggcgctgaagcagagacggagggggaggaggagaagcggctggcacatgcacagctggcagaacaacaacatgaggaagaagaagccgaacacaaagggggagcgggaggtactgcttcaacaaatggtggccatggtcgtgccgacgaagttggcacaccggtgccaacggaggaggaccaccatggtcatgatgatggacattggcacgagcaagccgaagaccgccgggactagtctcgaaacggctggcactttgtgtgccgtcgtcggacatccatgccaccaaaaaaaaaaacgccgtgccgacgtcgtcgctttagcttatgtttaa

SEQ ID NO: 69757 - DNA, 590 bp, Heterodera glycines
atggcaccgccgcaaaaacaacggcactttgccctgagggcaccgaatgccaaaatttggacggcgcttttgtgtgtgcgtccactgccaggtccaaaaaattaaatctttatatgtatattaattctttttgaatgtcttaattttgttctgaatattcacggcgctcaattggcactgtggcgctgaaatttctctctgcatacatttcagcgccgatttacgattttttgaccccctcccaccttaaataaattaaaaaatatgacaattttttaaattatatatcacatggagctcagatggcttaatggtgctgaaatgggcctaagaaaaatttcagcgccgacttccccccccccccatcaaaaaattaataattttaagcgattcgttaataaattttagatttttaaattttatttaaatcatttttattgtagtttgtttgcaagcagttcgcttcgatacacaatccatcaattcaagcagaatgtcaaaattgccaatttcactgttgaaattcgaaccaggactttaaatggacacttgattaaattggtgattttttaaatatatttattaataaa

SEQ ID NO: 69758 - DNA, 604 bp, Heterodera glycines
atgtccgaaaatcctgagaacattcgaattggtaaggacgaataaattttgagacattagtaatttaatcaatgtttggctccactacagtttacttgtcaaattagcttttacacttccatttacttcagattttgacaacgatcgtacgaagtcaatcggcacgccgtttaaggtcaaaccaaagctttcctacactccttacagaggctccttcaaatacgtggacacaacgaaggcactgactttgtttgattcatttatttgttcatttcattttgcaatttcagatgtcaaaccgcgaatttgcgatttatcagcaaaagaaggaggaggaaaagaagcaagtgctgaacgaacagagcgaacgatgtgcgagtgtcaacagaagcttcttctaaatttgtagcaaacgtttggactgtccgattgatgcgtttcgtttggttcggatgtttatttgtatttgactgtagcatcttctgacctatttatgtatcctggtaatttttttttccattgctatcaccgatcatcaaaatcttctatcgacctgattgaattgaattgtcattggcagttcgttcaatacaaattttacaaa

SEQ ID NO: 69759 - DNA, 569 bp, Heterodera glycines
gaaaactgggagcgactcagctcattcgtgcgcaacacgaacactttggtgcgcgattttcaaattgtttcaatttgggccctcagttcaaaaacgatttgtgaatgtatggcaaagtggtttttgtaagatagcaagggacaaacggcggatgttcgagtccgcttcacgacaaactttggagttttttttttgttgaataatttgtgaaaaagtgtatcaacgtaaaatgcctgtatttcacaatgtagaaaaatttttgtctatcgttttttttaataattttgtataaaacaggtatccggcttggtggagaatgaacgctataaattccgagtcttggccgagaatcagtacgggctgtccgacccgctggaactgcccgagccgattgtggccaagtaccaattctcggtaccaagccagcctgacaagcccgtggtgcgcgactttgaccgaacatgggccgaattggagtgggagccgccggcatccaacggcgggtccaaaattcttggctacaacctccagtacagggaccaacattcgcacaaatgggtgagtatatg

SEQ ID NO: 69760 - DNA, 526 bp, Heterodera glycines
atgatcaagctggagatacagtatatgcagttgaaacggatgtgtgaccgtcacatgaacaattgtccttgtcccgaaacgacaaccaccacgacaacaccaatgacgacaaccacaatgtccaccaccacaactgagcaatgtgaaccagcacagccgtgccaagatgacagcccgatgatttgtgcacattatgccaaactgaatcagtgcaacaaacctggcgtatgtgtgctcataaaaagggtgttcctccccgatccgattcggggaaaaattgcgaatttcgtaacggttgacactccaaatcggatgttttgattttaaattaatgaccgagccgggcccggtaccgggtttttaccaggctccgaaaaacaggcccgccgatttttggaaaaacacggtttgaccggtgttggaggcacgacccaagaaacccgagttgtttttgaagatgtcagcccagcctgggcatttttaatttatcggttaaaccccatttagtatacaatgaaattttgta

SEQ ID NO: 69761 - DNA, 657 bp, Heterodera glycines
aaaaaatcgattttttcaagtgtccgtttggggtactcaaacaattatgggagccaaaaatccaacgcagaattaaagtacaggctatagggaagctactcccgaaggattcggtctccccataaatctgggcgcatcggttcggggggactgccccgaaaacaaaaaaatcgattttttcaagtgtccgtttggggtactcaaacaattatggggagcaaaaatccaacgcagaattaaagtacaggctatagggaagctactcccgaaggattcggtctccccataaatctgggcgcatcggttcggggggactgccccgaaaacaaaaaaaatcgattttttcaagtgtccgtttggggtactcaaacaattatggggagcaaaaatccaacgcagaattaaagtacaggctatagggaagctattcccgaaggattcggtctccccataaatctgggcgcatcggttcggggggactgccccgaaaacaaaaaaaatcgattttttcaagtgtccgtttggggtactcaaacaattatggggagcaaaactccaacgcagaattaaagtacagactatagggaagctattcccgaaggattcggtctccccataaatctgggcgcatcggttcagggggactgccccgaaaac

SEQ ID NO: 69762 - DNA, 967 bp, Heterodera glycines
  unsure (1)..(967): unsure at all n locations
atgtcaactttcgtgagtntaattatcataaatatattatagcaaaaccataatgccgaagttgtccaacaacaacagcaacagtcacaaatggcacatctgcttgcaacaacaccgcagcagctgcagctgaacaccttccagttggtgttcaagtcgttgaagcagcgcgacgaatggagggatgtgttgtggaaggccatgtacgtccgtgttatatatagactgtgtcctctaagcctatttctaattaaatttcaaactcagactatgacaatttttgaaacattttcacatttttttgaaaaaaaaatggaaaattcataaaattattgcttgcaataaaataaaaatttaatttacaaaattatttccgatcgctcttggctcatttttcgagttcaatcatttttcagcgaaacttgtaatccacgagcggcacatacaaaagggcattcactgttcttcaagacgtacaacggcgtgacaatttgtgccatttgcaaaatgttattgcgcggccaattcttccagggctatcattgctcgggtaaaaataaaacaaatttggaatgctaaaaaatgattaaaaaaattaaaaacacttagacaaatatggattggaaaactggaaaattaaaaaaaaatagccttggaaaatttaaatttaatattaaactcaatcccctgaaaacactaaaaaatcaaatttgacaatcatcatttcatattcaattacaagctttcgaaattacattatttatttgaatttaatttttgcattttttaatatatttatcaattttaaaatatttttcttttagcagtttgaagaaattagcctaatttttataatttttatgcgccgtaatttgtagtaatcaaatccagggctcccccatttgtccctaatttcaaaataccctacattttcggctttcatccattgatcaactactaattcgca

SEQ ID NO: 69763 - DNA, 187 bp, Heterodera glycines
atgtgcactccttcaagcaggcgcactcgcgatgcatgtcacgattacagcctgtaagcgtaatgaggcaatttatcattttttcgagaggagagcggcgtgccgaaaagtgccgcctgggaaaatttgcacaaaaaatagaattttaaagaaatgccaacaaattttcaggatgtttttggattaa

SEQ ID NO: 69764 - DNA, 395 bp, Heterodera glycines
atgtgctttaccgaaccatcgacactgattgaaagagcatatttttgcacttcggcactccaccggacaagaaatgtgccgtccgccgtgccgtacagtaaccgtcgcgactcggcacggtccatgacgccaaaataccatggttgttccacaacattcggattgtttttgtggaaatcgacgattgcgctgggaaaaatgcccgaaaattaaagatttatttatcaaacccgaaaatatataatggaatttgagacatataaatgcaaaattttttaaaaatttcccctaaaactaaaaaattctcaaaaaaattcattggattcaaaaaaaaatttttttttatcacaattatttaaattttctgaatgtcttaaaatgatttttctaataaa

SEQ ID NO: 69765 - DNA, 931 bp, Heterodera glycines
cgcaatcgtcgatttccacaaaaacaatccgaatgttgtggaacaaccatggtattttggcgtcatggaccgtgccgagtcgcgacggttactgtacggcacggcggacggcacatttcttgtccggtggagtgccgaagtgcaaaaatatgctctttcaatcagtgtcgatggttcggtaaagcacatgcggctggagtataatgcggaaatgaaaaagttattaattatattaaatttaaaaaattgtaaaatgccaatcatatttggcttgccaaaaattgaacggcaaaattttaaacggcacatttttttttttgttaacttagccaaagtatgaaaatacggttttttggacatttgggcctagacttttcgtattttagggtcaattttgggtttcgcgtctagaaaaaaaaaataataattctggacagcccatattctacgtactttttcccgccataagggccagaaaaacccaaagttttaggctttttcataattttttttatcctcaattcagataccatttgaacgatatgcgctttttcaacacaatgcttgtaagtttggttggaaaaggtttttcgtgaatttaaaattaaaatttttttgtttttgtcaggacctgatcaactattttcgtgtaaataatctcagcgaggccattcatggcttggatgttgttctccggggcaccccgctcaagggcaccctttaccgcgcggtggcgccatttgaacggtttttggcaaaaaaatgaaaatcaaaaataccccctaaattatcctcccgatttttcagtaccaatggcagggcaggttacatcacactgaggcctggtgatctggtcacactgttggacaccgccgatgatgacaagggctggtggaggggttctgtcagcaatgcaaacggtggcacacgg

SEQ ID NO: 69766 - DNA, 545 bp, Heterodera glycines
atgatcatacgattcaaattaactgttctttctttgttggttcggcagaatgcacattcacattcacagaaaacaagaaataaatgtggatcaatatttttaatttgttcaacaaattataaaaataaaaaataaatttttattgctttcatttaattgattaaaaatttggtataaaaaatcatttaaggcaaatgcgtaatgggacaaaatgcgtaattacaactttttaattgttcatgaaattttcacaaattttcgagcaattattattatatctttaatgtataaaagtttatttggagatcggacttaatttttttttttttttaattttggacaattaaaaatgtgtgaaaaaatcaaaaaaataactttttttgagataaaaaattaattaatatcagattaagtccgatctcaagacataaatttgtagtcgttttgtgaaggcatggaaataatttgttaaatcacaaaaattattattatagaaaaattataatgctccggcagaaggtcaaattcgaatcacacaaaataaa

SEQ ID NO: 69767 - DNA, 882 bp, Heterodera glycines
ttttattttttattttttttaatttttagaaggccccaaattgttggcaccaattcacattgtcggcacagatttcgaccagcgcttatagaaataatgccaaaatttttgagagtgctgcggatgccgttcgggacatacccagcggcgccacacttttggttgggggttagtcagtatttgaattggaattcaagaaatagcgaccggaccaggcatgcacactaactatgcttgtgggtttaagttggcctggtccggcctgggcctgaaaatttcggcacgatgaaaattttaaaaaatcgaaattttcaattaaacgaaaattctgacgcatttccattaaaagtattctttccttttttggctttgggctctgtggcattcccgagcatctgattgatgcggttgctggcagtggcgtgcgcgaattgacttgtgtcagtaacaacgccggcattgatggtgttgggcttggcattttgttgcgcaacggccaggtctctcggaattaaattttcaaaaataaaattcgagtatttcaaattggattaagaaaattttgtgaattttctctccgataacatttcccaatttgttcgatccctaagccatatttaatcaggggtcgaaaatcgggaccccgttcggtgaatggccaaaactttattcgaacaaaaaatcaaattttttacaaatacatttacttaatagccctcaaagttaattaaaaattttacttaaaaattcaaatttgctttcttcctgacaaggtgcgcaagatgatctcctcttatgtgggcgaaaatgccgaatttgcgcgccaatatttgggcggtgaattggaattggaattcacaccgcaaggtgctctcaatttgt

SEQ ID NO: 69768 - DNA, 473 bp, Heterodera glycines
atgccaagcccaacaccatcaatgccggcgttgttactgacacaagtcaattcgcgcacgccactgccagcaaccgcatcaatcagatgctcgggaatgccacagagcccaaagccaaaaaaggaaagaatacttttaatggaaatgcgtcagaattttcgtttaattgaaaatttcgattttttaaaattttcatcgtgccgaaattttcaggcccaggccggaccaggccaacttaaacccacaagcatagttagtgtgcatgcctggtccggtcgctatttcttgaattccaattcaaatactgactaacccccaaccaaaagtgtggcgccgctgggtatgtcccgaacggcatccgcagcactctcaaaaattttggcattatttctataagcgctggtcgaaatctgtgccgacaatgtgaattggtgccaacaatttggggccttctaaaaattaaaaaaaataaa

SEQ ID NO: 69769 - DNA, 422 bp, Heterodera glycines
atgaagtgagttatggctgatcaaatgtgaccaaaactaaataacgaaaataaggcactgaaactttcgtaaatgttgtaaatttaatctactatttctattatcctaaaaaacatctaattaatttatttgaagtgaattggaagctttgagctctgattatgaatttgatcagattaaatatactttgtatttcatttgagtgtattggcgttttgttttttacgccaatttaataactagggccggatttatatggatttccatattttatacttatttcggccgaaaaatcacgtaaatagtattttagcttgatttgttgcttctagggtgtctttttattccctatttttcatattttttgtttttgtctatacatagttccattattttacattcatatttttggcattaataaa

SEQ ID NO: 69770 - DNA, 454 bp, Heterodera glycines; identical to SEQ ID NO: 62857

SEQ ID NO: 69771 - DNA, 658 bp, Heterodera glycines
atgcgcacccgtccgatctggcaagttaagcaacgattgctgactagccaaaaggttcgggtgccgtgatgaaacgaaccagcactgcttaccccgcggcacccggcacggtcccccgaaggaatggatttaattaaattctctccttcggggatttttttccattaggtcgtccgttagcgttcgattgctctagtcaatttttcaaaatttttgttgaaatatttgtcgtgctctgaagggcgtgggaggggggggggcgaaggcccaccacgaggccgcgaagaggccgagtgagtaccttcggtgcaggaaaattattaaattttaaaattttttaattgctttttaaatatgccaaaaaatgtaggcttaacttttttagtgaaaattcgatcactcatattttttgctaattgagcagaagcgtaccaaactatgcagggatactccccggtaaaggactaacttacactgaaatgagcgccgagctagctggctcaaaaaaaattttcgaaaatctgagtctttcgtttttatttattttttgcaaaattaattcataaatattttttcagaaagggttctgaaacgcaccaaattttatttacaagttaataaggctctctgatgctttttctatcaataatggaggtga

SEQ ID NO: 69772 - DNA, 677 bp, Heterodera glycines
aaaaaatatttatgaaacaaaaaaatcgattttttcaagtgtccgtttgggtactcaaacatttatggggagcaaaaatccaacgcagaattaaagtacaggctatagggaagctactcccgaaggattcggtctccccataaatctgggcgcatcggttcggggggactgccccgaaaacaaaaaaatcgattttttcaagtgtccgtttggggtactcaaacaattatggggagcaaaaatccaacgcagaattaaagtacaggctatagggaagctattcccgaaggattcggtctccccataaatctgggcgcatcggttcggggggactgccccgaaaacaaaaaaatcgattttttcaagtgagtgtccgtttggggtactcaaacaattatggggagcaaaaatccaacgcagaattaaagtacaggctatagggaagctattccggaaggattcggtctccccataaatctgggcgcatcggttcggggagactgccccgaaaacaaaaaaatcgattttttcaagtgtccgtttggggtactcaaacaattatggggagcaaaaatccaacgcagaattaaagtacaggctatagggaagctattcccgaaggattcggtctccccataaatctgggcgcatcggttcggggggactgccccgaaaac

SEQ ID NO: 69773 - DNA, 568 bp, Heterodera glycines
atggaaaaaatgaaaatttattggcaaacgaaaaaagaaaatccaaaagtgagtgacaaaaaaattgcgaaaattatgaaaattagtcgaaatagcattttcaattggaagaaacaatttggagaagaagtgcttcagagaacagcagaagaagaagaatgaattgtttaaaatgttatttttggtgttttttttctttattaattatgctaaattataaatttcattatttttttcaatttcttcaaatgccgaaattgtaagaaaattggagttagtcgcttagttaatgaaaaatggatgaactaatttggcattcacatacacggatttttcaaaatttatagtcattcagtgaattggttatctattttttgaaacttttgaatttaattgctttatttgactcggctaattgatttatacaattgaaaaatggggtacaaatgtttagaaaaatattaaaaaatagctgacatttttaaattagtataacgaccattttcataggaaaaaacatttgaaaaagaaataataacggaggggtgaaatcggaacagcttctaaa

SEQ ID NO: 69774 - DNA, 133 bp, Heterodera glycines
atggtccactacaaattgtattattttgatctcactgctcgtggtgagccaatccgatatttgctgcactacgctggccaaccctttgaggacattcgcattaaagccgaagattggcaaacagaaaagccaa

SEQ ID NO: 69775 - DNA, 1104 bp, Heterodera glycines
acgatgacagagaagaaattgagaagcaaatggaagaggaggacaaaatcctgcaaagtgtgactcagacgagtgcactcgcaacggtaaaccatcactttaaagccgaaagtttcactgcttttcccctgtcaggtggcggaaatagcgaagggtgtcaaatacacagagtccattaaaacgtcgtggaaaccgccgcgtcacattcggcaccaaactctccaggaccacgagaagttcagacgcttgaaaggcattcaaattgagggagaagactgccctcaggcaattggcagttttttggtccgtgctcaaaaatatatatttgtaagtactaaatttttctaggaaatgaaacttccccgtcccatcattgccataatgaaagaaaagaaaattgtgtgtccgactgtgattcaaatgcagggcattccggtggctctttcgggtcgcgatatgatcggaatcgctagcaccggcagtggcaaaacactgacttttgtgctgcctgtgattatgttcgtaatggagcaggaaattgcgctgcgtttcaaacgcggagaagggccatacggacttatcatcgtgccgtctcgtgaattggcgaagcaaatttacgacgtgatcatgtggatcagtggggctcttccaagtcccgattatcccgagcttcgagtgggcctttgcattggcggctttccgataaaggaccaagcgcgggagtttgaacggtgccgttgtcccaatgagaaaaaaaatatttctcatgagaaattcaaaattaaggggtgttcacattgcggtggcgacgccaggccgtctttcggacatgctcaacaagaaaatattcaatttgcaagtttgtcgttatttggtcctcgacgaagccgaccgaatgttggacatggggtttgaagaggaattgcgctcaattttctcctattttaaggtttgacttctttccttttggttcaattttacaattttttaagggacaacgacaaactttgcttttttcggcgacgatgcccaaaaaaatacaaaactttgcaaagtcgacgcttgtcaaggcggtcgttgtcaatgtcggaagggcgggggcgg

SEQ ID NO: 69776 - DNA, 77 bp, Heterodera glycines
acaagggaacattccgagctgtgagtgggaaaatgcatataagctatataccattggatagagcggggtcgacttgt

SEQ ID NO: 69777 - DNA, 3510 bp, Heterodera glycines
gtttataatgctcaaaagcatcataaaatacccatttacaacagtaagtgttgtcatactcgtaaaaattggagggggggggttgagaagagaatatttaacaactaaattatgcgcaaagattgcatttaaattaccaaaaccaaatcgtttacgaaaagctcaatttcctcaaatttggccaatgatagacaattcgttggcatttcaggtgcaaattggctcaagagtgtacgatgcgcaggagttgcagaagcttatcccccaggtattttccaaaactgtttttattctatttttgcatttctccattcttaaagatggaagaccaactggagaaaaaggaccgacagttgcggcagaaccaaaaagagatggacgcgcagcagaaacggattggcgaacttgaagtggaggtgaaaggtctgtcatcagagtgcgacaaactgcgatcggtgcttaatcagaaggtgggagagaatgatccatttactcgttcaagagttgttttttacggggaggggtgaaacataatgcaccaaccagggaaaattcacaatacaagtcgaccccgctctatccaatggtatatagcttatatgcattttcccactcacagctcggaatgttcccttgttaaccctcttcccttgtcactacccctgggcagaatttttacaattttagctacatggcaaataaattaaataacaaaatgtaattttcaaggcagaaagtgccgccacttcagccagtcaaaagcggtcaggcgaactgcacacagagatgaagcaggttgtgagtgttaagcatttggtagaatttgtatttcgtatctacagaaagccgcgttgctgccggagtttggccaaggtggcactgaagtgcgtgccaaaaaaatcgccgtatccgctgaaccgacaaatttggaccagcacaaagcgacgttacagcaccacaccaaatcagcagggtggggaagggcacactcatcacaaactgatggcaaacgtcacgacatccctttccagatccaagcaactcattcgtgacgctgtccaaaagaatgattttctgcgccaattagccaaggaacaaatcattgaggtacgggcaaggcaatgccaaacgatcggcttaaatttactgatttgtgccagcttgtcgaatgtatgttcgaaatgcgtgcacgggctggtcaatgggtgatccaagagggtgaaccgggcgatcggctgttcgtgatcgccgagggtcaactgcaagtgtcacgagagggccaatcattaggggtacaagagataatcggacggtgagacggagcagtgccccgcaatttttaggtgctaaatccaggggttgcgatgggagagcttgctattctgtacaactgtgctaggtaatcaaacgcattttgtggcaatgccgacggcggcatttctcacattcccactcattgtcaggacggcatcaatccaagcgatcaccgactgtgtgctattctgtctcgaccgttcagtttttcaaatggtctctcatagcaactgatttcgtcattatcctattttttttctcagatcactatgcgattgggaatggagcggcacgcccaattgatgaatttcttgcacaaagtggagatctttgccgcactgccggaggaccgactgtccaaaatggccgatgtgatggaccaggactactacgccgctgaacattacatcatccgagagggcgagaagggcgacactttctttgtgataaatagcggccaagtgcgtatcactcagtccattgaaggcgagttggagccacgtgaggtgcgcattttgaaacaaggcgaattcttcggcgaaaaggctttgcttggtgagttgaatcaattaaaatggctttatctaccagattaaatgttatgacgattgcttttctcaggtgaggaagtacgcactgcaaatgtaattgccatggcccccggcgtcgaggttctgacgctggacagggaaagctttctgaagttgatcggcgaccttgaaccgctgctgaaacaacagcgcacgtaccgcgaggaggacataaaacggcgcagcgcacgcactgagaaggactcttcccgcgtttccccgacaaaaacagagattcccgcgttggaagacgaattctcacagattctactgcggcatctgaagcgcatcgccactttgggcgtcggaggatttgggagggtcgaattggtgagaaggaacaaaattaaatggttgaggaccatttctcaaaaaggtatgtatcatcggcgacaagggtcggactttcgccattgaaagcattgaagaagaagcacattatcgacacaaggcaacaggtggttccattcatttgcaaagttattgtaacgttcatttaaactacgcttttttttacagcgtcgaagttttttaggcattttaatgacagttctctcgtttaaggagcacattttcgcagagcgtaacatcatgatggagacccggacagattggattgtgcgtctctacaaaacttttagggactctaaatatggtaatttgagtgaattcaatttaaaaattgaatcatcttttacagtttacatgctactggaagcgtgtctgggcggtgagctgtggacaacgctgcgcgatcggggtcactttgacgactacacggcccgtttctacgtcgcttgcgttttggagggattagagcatttgcacaggcggaacattgtttaccgggacttgaagccggaaaactgtttgctaaccacaagcggctacttgaagctggtcgactttggctttgctaaaaagctagcctcgggtcgcaagacatggactttctgcgggacgccggagtacgtgtcgccagagatcatcctcaacaagggccacgaccaagcagcggactactgggcactcggcatttacatctgcgagttgatgctgggcagaccgccgttccaagcatcggacccaatgaaaacatacactttgattctgaaggtaagtcacattcgaaattttttgactaaattggctattctgagcagggcattgatgctttggagatacccaatcgacgcattggtaaaacagcaacggcattggtgaagaagctgtgccgtgacaaccccggagaacgactcggctcgggttcgggaggtgttaatgacattaggaaacacaggtgaacggtgtagtcacgttgttctgaacaacaatgataaatgatcgttcagatggttcatgggtttcgattgggatggacttcggtcgagaacattaaaacctcccattatcccagtgagtctatcacatttatcacttattaatagagagccgttctttctttcagaaagtaagcaatcctgctgacgtgtccaactttgacaattacccacccgatcaagacattccgcctgacgaatttaggtgaaatttttttttaagtaattttctaaattaaaattttagcggctgggatgacggtttt

SEQ ID NO: 69778 - DNA, 348 bp, Heterodera glycines
attatgagccacccaatttggcaaatcggtctttttaaacgcattaaagaagattcagtcgattgcttggagtgtaagcaaaaaaacgttattaatttttcatcttcatcattttttggtttcaaaatatatttgaatacttttttatactttgaaagacttttttattaatacagaattttttgaaatttcctaaaatccgcaatcctgcgcaggatcctgcagattttacatgcaggattgcaggatttgcaggattaatcctgccggatcctgtcctgtaaaaaattttgaattccaatcctgcaacaggatccgcaaatttgaaatttccggtctctaattcta

SEQ ID NO: 69779 - DNA, 238 bp, Heterodera glycines
cgctgacccacaaaatgtccagcccacgaaatgtccaagtctcgaatttgagttttttattattcagatgggcctaaggttaggcaaggggtaatataaagggtatattcgtattcagcgaccccgaaaaccctaaaaatcctaaattagactcattttgtttttataaattttggacatttcgtgggtttttactcttttggacatttcgtggcttggacactttgtgggggtgcca

SEQ ID NO: 69780 - DNA, 429 bp, Heterodera glycines
atgagttgtgccaatgtgatcaatcccgtgccgaccgttgtccgcccggaaagcccgggaaaagggggaaacggggcaaagacggaaagccgggtgagtgggcgaactgtgatgagattgtctatgctttttcccaggctctcccggacttagcggtgcccccggactccccggcaatcacccgcccgtccctttggacttcgaactccaatgccgcatttgtccgctgggcgaacccggtgaataatgtttctgaggtccaaccaatttggtgaacactttcaggcgagcggggaagagccggcgaaccgggcgaagatggaaggccgggtaaaagcaaaactacggaaaacagcggaaaaaaacacttttttaggggaaaatggcacaacgggcaaaacaggaaaagtaatggaggaaaaaggataa

SEQ ID NO: 69781 - DNA, 810 bp, Heterodera glycines
aaaaaatcgatttttcaagtgtcgttggggtactcaacattatggggagcaaaatccaccgcagaataaagtacaggctatagggaagctattcccgaaggattcggtctccccataaatctgggcgcatcggttcggggggactgccccgaaaacaaaaaaatcgattttttcaagtgtccgtttggggtactcaaacaattatggggagcaaaaatccaacgcagaattaaagtacaggctatagggaagctattcccgaaggattcggtctccccataaatctgggcgcatcggttcggggggactgccccgaaaacaaaaataaatcgattttttcaagtgtccgtttggggtactcaaacaattatggggagcaaaaatccaacgcagaattaaagtacaggctatagtgaagctattccggaaggattcggtctccccataaatctgggcgcatcggttcagggggactgccccgaaaacccaaaaaaaaattttttggataaaaattatttaaatgaactgactagataatatttaaaataggttatttctcttcctttcagtatccctgcaaagtttggtgcgcttctgatcagtttctgaaaaaaaagttaagcctaaactttttggcctgtttaaaaaggaattaaaaatttttaaaaattttattcatctccctttttgatagaaaaagcatcagagtgcctaaactaacatgtaaataaaatttggtgcgtttcagaaccctttctgaaaaaatatttaagaattaattttgcaaaaaataaataaaaacgaaagact

SEQ ID NO: 69782 - DNA, 2145 bp, Heterodera glycines
attcacaagcaacagaaatggctgatcagcccatcagcggcaacagcagatggtgtccgaccattgggcactgctgaaccaagtgccaatcttcaacaatgcctgcaacagtgttgtgccaggccgggtagcactttttaaaatttcaaaaatcaaaattaaaccccattaaagatgacaggaaacggattttctaggaaattttctccgcctaattttcaattttagaacgagttataatcacctaaaaaaacctattttatgaagaactgtaaacacaaatttagggtcaaattcgaattgaaaattgataaatcatttcaaaaaacaatgcaaaatttttcgcaaattaatactaattaacgctaattatacttattcgtgtatatatttttttgattacccaatttacacaaaatccccgatattttttttcaaatttctccaaccatccccgacaaattttggtgggaatttcctccccgatccccgacttttttctccccgagaatcggagcttaaccttcaaattaaaacaatcagaaaattaattttcacaaggggtggtggtggtcgactgtccatccacaaattttcccaaaaatgcccatttattaaggtcattagggggtgctcatcctctctctaatcccatttcgcgaccaccgatggcgcaaaactaacaaatccaattttgagagtgccccgcggggggtaaattttcaactttttgcctccccccccccacgaaatttggcgttttgacgcaccggaaaacgattcgccacgccttttaaaaagtttttccgccaaatttgtccctcgtcggcgcgcactcttttcgcgcacatcaatggatgggatgggatgacctttgtttcttcattttccattgtgttgttgtttgggcaaccacaaattgcggcggggcgcttaatgtaacaaaaatgggttgggaaaaggacaaaaatggacaaaatggagaaaaggaaattgggggggggggggaaagattgcgtaaattaaattaaattaaatttaaattatgcaaataaattaattaatttaaattataaaaaataaattttaatttaaaacttatgatgcaaattgaaaagattatggaaaaattcgcaattgcaaaggttctttcaaaatccgtaagtcgcctttaatccgcgcaattttgggcataaaatgccgtatttccgtccctttttagaatttacgtaaaagtactgatcactgatcattctcagatgtttacaatttgtctttaactgatctgatcctatcattatttttgaactggaatctgatcatttctttgccattagattgttctgcaattagcttttccggctttttaccattgtcctctgactctggcaacagcagcaccaatggcgatgatgacacttcatcctcggcaagcagttcagcagcaaattgtgccctttttgagtgccctgccggtgccaacagtgaatgtgctctgacggatgccactgatgcggctgatcaggagggattgctcagtgtacggcttagacggaaggacacgcaaccaccggtaagaacagcaaatgatcaaagagctgaattggattgaccaaaaaactgatcagatcgatctaggaatttgtcgtactgatcagggtacactactgtactctgatcagtctgtgatcagttgagatcagccatgctaagctctttcagtcagtgaccaattatgttaagtcaaataagccaagataaacactgatcagttgggatttgcttgtgatactcctgatcagctgctttgagcattttaactcagcactaattaggtatgataagctcggattagctatgatcaagctttgattacttgagatgggctctaatcaacattaacatttctgatcagttgatataggctctgatcaccctgaactgttacctttttagccaacatcatcaccaacaagcaacaacaacacttcatctgctgaacagcaggatgacgaagaagatgatggacaaagtgccgaaaatggtggtgatcaacggcacatcctttcgttaggcaatgatggcacgtcgacggaagacggcaccggcggcgggacaaccgcggaacagcaacatcagcagcag

SEQ ID NO: 69783 - DNA, 377 bp, Heterodera glycines
atggaaatggaggggcaatggcaaagggaggagaaacgaaaaaggggcagagaatgggacggagagcgacagacagacgacggattgggaagagacggagagacggcgagtgcgcattcagttggacggcacgacgcacagcacagtcggcatttaggaccataaaagctaattgaggcaattctacccaaaacttccattttcagattcttgacgaagaattgggactgaaactgtccatgttgggactgaacggggcaaagtcggccggcgctcagttggacccgggggtttattttgtggagaatcattcggacggatcgctgggcgaaattacgggacaaattgcagtcaaccgaatcacagaacacgagtaa

SEQ ID NO: 69784 - DNA, 49 bp, Heterodera glycines; identical to SEQ ID NO: 51181

SEQ ID NO: 69785 - DNA, 525 bp, Heterodera glycines
atgctgctatcaacagacgtgctgtgttagcacggtgacaacgtgtagaacatgtgcagtttcgtacggcggtggaggctacggtggcggaggatacggtggcggaggctacggaggtggaggatacggtggcggcggatacggcggtggaggatacggtggcgggtgtggtggatacggaaaaaagtgacttcatttatcagctgatggattgtcttctcatcacattcaaattgcttttaaaaaagatttatttaagaagagatatttttactgaattcttcggaattggaagcaaaaaaaagaaaaatggtaaacgttttaagggtacaccccaaaaaagagtggaaattttggaattttgggcaaaagaaatcaaaggggaaagacgaaataggaaaatttaaaacaatttcaaaaatttagcttctttggctcatctctttgccttttttggcatttggctgagatgaaaatgaataattttattctacgggtccggcggtgcgaaaatatagaaataaa

SEQ ID NO: 69786 - DNA, 374 bp, Heterodera glycines
atggatccgcaattgctcatccgagaggccaccttcaacaaaatcgcacagaaacaagcggcggccaaatatttggcgaccaaaaagcgtcgggagaaggacgagcagagaatgcgcgagttcgtccgccgggcggtgacgccgcccgactttggccaaatggacgccgacgcaatggtcaaactgtcggattttatgcctgtactgaatttggaattctttttgagtgccatttccgaatgcttttttcatttgtttaggccgtgccggcccaatttgaccgctcttttcgctacgaaacgctcactgttccggtcaaaattgcctcggacggagtgtattcatcggacgacattctcatcatcggtgctcag

SEQ ID NO: 69787 - DNA, 1798 bp, Heterodera glycines
atggcccacaaaaactgtgtccaatccgccttctcccaccgctgctggcctccgccgctcggcgagaaaatggtgccggcaccggcggctgcggtcagcgtgacggcatcggccgagtcgacgatgaccagcagaaaggcaccacgcccaccgttgacggacagtcggtagatggacagttggatgtcgctgaaacaattggaggcgttgctgcaaatgaaaaaatcttagaatatttcaaaatttcttcttgcgtttttctcatggattttgttgtttgtttttttttgcaaatgattcaacgcttaaaaactgtggtgttctgctttgatagcgtttattcaaatttatttcagccaattttttcatttttgccttgttatttttcttactatcatttgcaacaaaattcagacagaacattttttgtttctaattctatttaattttgatgccaatctacatatttcattattttagacgctttttattgctattatttgttccaattttaatatgaatttcccatcaagaactcgaactcagttggtaagctcttataacgcactctgttattcttaatccaacgttgtcgttaatttgttttaaataaaaatgggaagtaaaataggttaaaatttttatgcagttagcgatggcattcccatcttaactcggcgaaccgccccatctctccagtgaatttgccgttgtccaccctttctcatgggcgttggaattggcatttgtttctgttcccctttttccaacatttccattttccaatgaatccaaaaagaattcccattgaattggtagctgaaactgttgggtttttgaggttgaatcggagatggggtcagtgccgagtttcagcttcatttgatcatttccttctcaaaaaaattggcaaatggttgaagaaatcaaaatctttggttaaaaaattacaatttcttatttaaatgatctgatttcaaggtcacggactgcatcgattactcgaacgaaatcgaaggaattattcgtgctgttcccctaatatggcaacgatttgaagaagcatccaaattctttagaggtctgttttacaaagctcttgcctcatttcgatttgttcacatttcccaattttttcattttagtgatcaacaaatttgtcggctatttcccaccacttcgcgattcatttcctacgccaggcaacgaaacagtaaacattagaaaacactaaattaattaattaaaaattgcttttctttttagttggacgaaattctgcgctgtgctggtgtcggagtcagattgttagttgaggcagagagtgtttcggactattccctctcaaacttacgtggcggtgagtttgacgagattgattctactttatttaaaatacatttaactcgggttgtttggccggattgcagatggtcacgggatttcagcatttactaacgccaatttttgagtttttttgggaacagggaacaaaacgggaaggggtcgacagatccaccgggaaaacaaatttgaaattttttactatttttaacagatttcgccagaaattgtaaatttagaaaaattttggaaaatttcagtaagtgagatattggagggggtggggtaccaatggggaaaaaccatattgctaaattttcggtacaccttaaacttttagcttaatgttaacactttttgttattccagccctgttcgccatttattattcggccgtgtactacatgccaacgactgatgactgattttgctgatggacttattcgtgacgaaa

SEQ ID NO: 69788 - DNA, 112 bp, Heterodera glycines
ataaaagtcaacgtagaagcctcaaaccaagtggaaaatgcgttatttatgcttaatatatcgaaagtagtgcgcagaaaaaaaaggcatttgcctcaaaatgcggtctcta

SEQ ID NO: 69789 - DNA, 1472 bp, Heterodera glycines
atgctgaagcagcatgttgaggacgtcgtgaaggcggagcagtacgcggcttggcacgtcaacaagtaaatgaagcgttgagaaattggcacaatatgaaacactttcagggtaaagttcgagctgaagcgcaaaatggcactgaaggaggaaatccataagatggttggcatgcttcatcaggtgaagcacagcgtaagaatggggagaattggcaccgtttgcttcagaattcactcgaccgcgacattgagaaggccgaaaagtcattcggcaacttttactccgacttggccaatgcgccgtggctgccggagaagcgagagattcagagggagttcaagaagtacgacgacgagttggcgaagttccgtgaacagatcgccgagtacatcaacgccatttctaagatcaaatcggaaggtacgcaatggcattttattgtttaacggacaccaaaattcagcggaattgcatgccaagttgccgttcaaaacattcgtttatacgctcgccaattattcaaagcaatcgggaaaagtttgtcagctgttgaaaaaggaacagaagaaggcaaaacaggtgaaagtcatggattcaaagatgtaatttggaatttttacaatatttagcttcgggaaaagctgtcgtagatgagcgacgaggaaattcgcaattcggggttaacttttgatttgggatcggttcaaattattacgtctttaggaacaggacacggccatagtggaggccgcaattgaatctcatggacaacgcatggagcaagaaagtcggaacgaaaccatcggagagcagcgccgcgaggatgacaagcgaaacgaagcgaacgcaattcagcagccgcaacagttcgacatggacactcaaaatgacattgtcgtggtgggacagcaaaagctgcagcgtattgtggaggtggaggagaacagcccaagtgacgccgaacagatgccgcagcaactgctcatggacagagagagtcagcaacacgtttttgccacgccgctccctcccgtttctgcgccgcgcggctgcgacgacggcgaccagcaggcgctgttcgacttcttcgggggcgaaggcggcgccgatcagagcgccacggaaggctctttcaacttcggctcgttcatgaccactctggcagggcccggcgcgaagaaggggcctcagaagccgcaggcggacggcccgggggacagtcagagcgatttcaatttcaatgctttcttgggcaagccggacgagttcagcaaggaagtgactgaaggaggcgctcttttcgatttcaacttttgagtttttcctttcatttggttttggttgtgctgtagctgttatttttattttaatctgcttatcattatattttggccatttttgctttgtttagcattgttttgttctggtcagttcatttgtgtaagtaactgtgtttctgtttatttcca

SEQ ID NO: 69790 - DNA, 504 bp, Heterodera glycines
ggcatttgcggacaacacggatgagattgtgttcgagaattactgcttcaacgctttcctccgaacgtccggtgaggaaaatttgtgctttttcattgcctataaaaaaatacaaaaataatttttcagcaaaaaatcttaaaattttacataagatctttttaaaaaaatattatttttaaaaagaaaaaaaaatcttttgaaaaaattgatataatttcaaaaaaatgtgtgagaatttcttcatttttgaaattttttttgtagttttttggtccatttaactctaaaaaatgcaatttttagcgtccgcctgcaccgcccaggcgcactgctcggcccacaatccgtgctgtgttgtcgtcgactcggggtcggtttctcattggtctcatccgttggaaatttacaaaattttatttatttttaccctttttacaggcactcgttcactcacattgtgccatttgttgggggacaaattgtgcgcgagggcattgtccg

SEQ ID NO: 69791 - DNA, 556 bp, Heterodera glycines
atggatttaccggacaatgccctcgcgcacaatttgtcccccaacaaatggcacaatgtgagtgaacgagtgcctgtaaaaagggtaaaaataaataaaattttgtaaatttccaacggatgagaccaatgagaaaccgaccccgagtcgacgacaacacagcacggattgtgggccgagcagtgcgcctgggcggtgcaggcggacgctaaaaattgcattttttagagttaaatggaccaaaaaactacaaaaaaaatttcaaaaatgaagaaattctcacacatttttttgaaattatatcaattttttcaaaagatttttttttctttttaaaaataatatttttttaaaaagatcttatgtaaaattttaagattttttgctgaaaaattatttttgtatttttttataggcaatgaaaaagcacaaattttcctcaccggacgttcggaggaaagcgttgaagcagtaattctcgaacacaatctcatccgtgttgtccgcaaatgccctaaaaattggacatcaatttttaattattattcccatcaca

SEQ ID NO: 69792 - DNA, 93 bp, Heterodera glycines
atgtttgcagttgtactcggggtcaatcaagccacgcgggtacatttccgaacacgtccggcacagggaaaacagcgtgcggttgttgagccg

SEQ ID NO: 69793 - DNA, 471 bp, Heterodera glycines
atggtgaacatcggcggaattggcatggacaaattggacaaaaatgccaaattggaggtattctgacaaatgagcagcccaccgaaagagtgcttttgtgataaagcaacattttgagttgttttccagcggtgtttttcggcacattctgggatgtcttcgctaggatttttcaacattaattctaaaaccctaaaaagtgacgatttttgcataaattatccaattttctgtggcaccgctcctccattctttcttaagaatgtacagttttacaaatgagctctaattaatttttaggagccatttaaaagtgaaatgagcaaaggaaaggaaggcgttgttttcgtttcaatgggcaccatcattcgctcatcggaccttccggccaaatttcggcagaaccttctcgaaacttttgcaaaattctccgattatcacttcataatgaggatagaaaagggggacaat

SEQ ID NO: 69794 - DNA, 1072 bp, Heterodera glycines
atggtccaaaccattcaggcgatgaattcgttcgcgttcagtgtcgacccgttggacgacgacgagcaggcggccatggcacaagcgttccaaacggacattcaggacgtaagttttcagcagcattaatgattggcaacaaaatgtgccaaaacagactcagggcattgaaaacccgttgaaaatggcattttccgacctctcattgtccattattgccaattatttccagaaaagtttaaggaatgccaatttttaaggtcaagagcaggctcttgacagtgatcagaccaaactgatcatggaccaatcggcaaaaatgcccctttctttctgtttgaagttccgattgaattcctaaacaatcctatacttatattccgagaaactaaagtattttgcggcacctattggtcagttatgctcaagattgagaatgccgagagaccaagagtttccatagaaatttaattttcttaacaaactccaaaaatccgagaccgttcccaatttgaattctcgactatcatttgatgatcctgttaacaattttcttattggcacaccttctctgatgccttccaacatgttcaggcggtcgaacggatgaactcggatgccggcatggcagccatggcggtggccatgttcgaagcccagcaacggggtcaacatgacgagctatttttgggcgccagtgccagtggcggaggccaaccgcaacaacagcaagcagttcatggcactgctgctggtggtgctgatcgacacgacataaccaccaccagcacaactgcacagcgccaacagcaacaaaattcagagcaagaggaggaggaaatacgccgtcggcgtcagcaaatggtgtccatcggaaaaccgggcgccgccgcgaggcgcaaaaaggacatggtgatacagacagacagacaatagggcaatgccggacaattgggcaacagacaatttgacacaaaattttcttccgtccgaactatgatcaattcagggaccagcaaaacttttgtgccaaaaaactatgagtcatccggccaaaatccaatctaataaa

SEQ ID NO: 69795 - DNA, 285 bp, Heterodera glycines
atgcttctttccgaccgctttttgggctactttatggttccgtcggcgggtgtttggaattacaatttcatgggtatgtgtcacttttattccaatgatttggtcaaatggttaattgtttttccaggtgttcgacatgatgcaaatatgcagtatgatgtttgtttatcggctccaaaggagttttaccatgaggatcatcgcccacttcatttccacaatttcaatgtgttcgaagatccactcggtgtatccacagccgacagagaggatatatttgagtga

SEQ ID NO: 69796 - DNA, 315 bp, Heterodera glycines
atgcagccgcagtcaaagcgaaagattcaggtgttttctcctctattttgctttagtatgtgcattttttgcgtttcgtttgtttttaggtttcttttctgatcagaaatgggtcggtcgagtcgaagcatcgcggcttcgtcaacgccctccaatttgacccgacgacgcgcagtctcttttcggccggttcagattcggtcattcgccagtgggacacttcggcgccgtcgggcagcgccgcctttctccgctcattggagcaccactgtgactgggtgaacgacatcgttttgtgcagtgatggcactcgac

SEQ ID NO: 69797 - DNA, 106 bp, Heterodera glycines
gtgatctccgcctcttccgacaccatcgtcaaagtgtggcacacgcgcagaaatggcgcgtgtttgtccaccctcaaaacacacaaagtatgccttgccaaccaat

SEQ ID NO: 69798 - DNA, 1929 bp, Heterodera glycines
  unsure (1)..(1929): unsure at all n locations
aaacattagggcaatttcggtgaacagagacggcactntggtaagtgccgtcgaatggctgtttccatcccttttgtttgtggtcagtgtctgtccggcagcagcgatggcactgtcaaattgtggagcatcggccagcagcggtgcattggcaccattcgttgccattcggacagcgtttgggcactgcaaacggactctgtttttgccaccgttttttcgggcggacgcgaccatcgcgtgtttcgaactccgctgcgcaacctcaacgactcggaattgctgttcaccgaagggaaacccgtgcagaaattactgatggtcgacactgaccaacccaaacatttgtggacagcgacttgggactcgtccatcagacggtggccaatcgacggcaaagagacggaacggacggaggaggggccgcgggtcagagaggcggacatgacactgcaaggcgagaaaggggcggccgggaactgtcccatgggggggggggacaataaaaggaagaattttgaaaaaaaggactttttgctaccgtaatgcgcttcattggacgaacaaagtttagtaattaaagcaaatgattagtgatttgcaaagcacaaaagattcaattatttcaaatcttgcatttggtcaagttttattctttaggtgctccaagcatccgaaaatacgctgtactgaacgacaaacggcaaattgtgacgcgggacagtgatgggaacgtcgaactgtgggatgtaatgcaatgcggcagggtgaacaccttcccgatgggcaccaacatggaggaagtgatcaaggacaatgtgcggaaggtgtggatcccgagttggttcggcgtggatgccaagtgcggggtatttgtttttacggcgtattatgcctccatgcccattattcctcttctgcttgtgtgatgttcccttctgtgttcaaggtgttggaaatcactttggacgagagcgacgcgttctccgcttgggtctccgcccgtgacgcgggtttcaccgacaaagccaacgatgccaaaggtcctctttctgtggtccctttgcctttgaaccctttgcattcttcggcagttaattacggcggtctccttttgcgcagtcttttcgagcattggccccacgcgtacgttggcgacgacgaggactcgcccctgcagggcttttactcgttgccgctgcacacgcccattctcatccggtgagagtgtaacgattggcacagttatttgcataattacaccaacacaacgtttcatcagtcaatgcaacgacgacattgcgaggccgctgttccgcaccaccgtccatgacacggcctcccaagcggactcagccatgctgcgcgatgtgctgccttcgtgggtgttgcaggtccaaaataccaacaaaaagtgaaccgaaaagacagttgattaaggtcgtggagctcaaccattttccaaagttcaacaaaattcctttttacctgcagccgcactgttctttcattccaaagttccccgttaaaaagtccgtttatttcgtttccatcttttttggcgttaacataacatgacaattccacgtttccacagagaccgactgagtgccaccgaaatgttgcagttgcgaaaagtgatggagcacgtgtgggagaaaatcctttacccggcggagacggcgaccgacgactgcggtggaggcgcaagcgcagcgcattcgctggcaacacaattgcaggaaaacattgaagaacgtattgagttgttctgcaacgaacaggtggacttcccatgtacaaattgatgggattgtaaatgctttcgtcgcttttcagaagttggactcggagatggacctcaggacggtcaaacatttgatttagaagcagggcggcgatttgcttattttttaccgtcccgagaag

SEQ ID NO: 69799 - DNA, 621 bp, Heterodera glycines
ggggaatggcaggagaacaggaggaggggttaaatggagtccaagggaaatggcacgggagcggaggagggttaaatggaggacaaccaatggggaatggcacgggagcagaggagggttaaatggtggacaaccaatggggaatggcacgggaacagaggagggttaaatgggggacaaccaatggggaatggcacgggagcagaggagggttaaatgggggacaaccaatggggaatggcacgggaacagaggagggttaaatgggggacaaggggaatggcacgggagcagaggagggttaaatgggggacaaccaatggggaatggcacgggagcagaggagggttaaatgggggacaaccaatggggaatggcacgggagcagaggagggttaaatgggggacaaccaatggggaatggcacgggaacagaggagggttaaatgggggacaaccaatggggaatggcacgggagcagaggagggttaaatgggggacaaccaatggggaatggcacgggaacagaggagggttaaaaaggggacaaggggaatggcacgggagcagaggagggttaaatgggggacaaccaatggggaatggcacgggaacagagg

SEQ ID NO: 69800 - DNA, 602 bp, Heterodera glycines
atgggactcaacccaacagcatttcaatcactgggactcaacccaccaacatttcaatcactggtactcaacccaccaacatttcaatcactgggactcaactcaccaacatttcaatcactgggactcaacccaacagcatttcaatcactgggactcaacccaacagcatttcaatcactggtactcaacccaccaacatttcaatcactgggactcaacccaccagcatttcaatcactgggactcaacccaccaacatttcaatcactgggactcaacccaccagcatttcaatcactgggactcaacccaccaacatttcaatcactgggactcaacccaccagcatttcaatcactggaactcaacccaccaacatttcaatcactgggactcaacccaccaacatttcaatcactggtactcaacccaccagcattccaatcactggcactcaattctccagcatttcaatcactgggactcaacccaccagcatttcaatcactgggactcaacccaacagcatttccaatcactgggactcaacccaccagcattccaaatcactgggactcaacccaacatcatttcaatca

SEQ ID NO: 69801 - DNA, 1285 bp, Heterodera glycines
ggcggtaatgactacgaaattttcgagcactccgatacggtgggccatactgtaacaagcccggacaattgtcgtacggtagtggagaaaacgttggccgagttgggcctgtgagaatcagtgatgttttatggaatcgtgatattattttgtgtttattattttgaaatttattctcctattttttttcttcggttttattaatttatttttgtaattcaatttcctttatcaaagtgttaattacatattaaaatttcaaaaccaaattcatttgaaagtatcagcattgacagaatgcaaaaaaagagataatattgggcagtagtaaataaaaaacattgcagaggcagtgcccgccgaaaaaatagacaaaattttttgaaaaaagccaaaaaaaattgaaaatttaaataaatttataagtgaaaaaagtaaaaaagcttccaacaccttcgattcccaggacgtctccgttccaagtacaaagaaggcccaacgttgcttaacttgccagatcggacgggatggcgtactttcaacgtggtatggtcgtaagcgaaaggacagcaattaaagtcatttaaataggcatttttaaaagagcctattttttgccttttctcaagagaatttattaaaaacggcaaaattcgccttaaattaataaggtgaaagtttgaaaatatttattaaaaaatttcaggatgaaatacaattaaaataatcaaaaagaaaaaaaataaatttatttttctaaataaataaaaaacattgtcagaggcagtgcctgccgaaaaattagacaaaattttttgaaaaaagccaaaaaaattgaaaatttaaataaatttaaaagtgaaaaaaattaaagtaatttaaataggcatattttaaaaaagcctatttttttgccttttcacaagagaatttattaaaaacggcaaaattcgccttaaattaataaggtgaaagtttgaaaatatttattaaaaaatttcaggatgaaatacaattaaaataatcaaaaagaaaaaaaataaatttttttttctaaataaataaaaaacattgtcagaggcagtgcctgccgaaaaaatagacaaaattttttgaaaaaagccaaaaaaaattgaaaatttaaataaatttataagtgaaaaaagtaaaaaagcttacaacaccttcgattcccaggacgtctccgttccaagtactaagaaggcccaacgttgcttaacttgccagatcggacgggatggcgtgctttcaacgtggtatggtc

SEQ ID NO: 69802 - DNA, 107 bp, Heterodera glycines
tataaaatttctcaaaaaaagagatagccatttttctgggataaagtctaaatataaaaattccctcaaaaataaaaggtctattgcgcaccgccctccctatcatg

SEQ ID NO: 69803 - DNA, 304 bp, Heterodera glycines
aaaattccctcaaaaataaaaggtaaattgcgcaccgccctccctatcatgctcgagagcatttgtatgtgtataaaatttatcaaaaaaagagatagccatttttctgggataacctctaaatataaaaatcctctgtgaaataaaatggcgattgtgcacagccctccgtctcatacgcaagcgcttttgtgaggtataaaatttctcaaaaaaagagatagccatttttctgggatagagtataaatttaaaaattccctcaaaaataaaaggtctattgcgcaccgccctccctatcatg

SEQ ID NO: 69804 - DNA, 255 bp, Heterodera glycines
aaaattccctcaaaaataaaaggtctattgcgcaccgccctccctatcatgctcgagagcatttgtatgtgtataaaatttatcaaaaaaagagatagccatttttctgggataacctcttaatataaaaatcctctgtgaaataaaatgccgattgtgcacagcccctccgtctcatacgcaagcgcttttgtgagggataaaatttctcaaaaaaaaaatagccatttttctgggataaaagataaatttaaa

SEQ ID NO: 69805 - DNA, 434 bp, Heterodera glycines
atgtccaatgaggcggaaaaggagttcacatcagcgggtaatccgaaggcacctgctcttcatgtaacacttgattggattcaccgatcgtggcaggaaatctccaaagaagtgatcatcaaagcatttaagggtcagttaaaaaattaatacaggaaaaatgcctaaacttttaagtctgtgggctgactacgccattggacggaactgaagacgaaaaaattgcttgcttcaaaccggaaggagcaattggaccgatagagattttgcgcgagtttagaggaaatgaaacaatgaaagatggacggaatgatcaggaggaaggccggcctatctgatgatgatgtagagctggatggagtgggagatgaggatgaattgctcatttgttagcatttttactgttttttgaaaaaaaaattcgaaaaattaaa

SEQ ID NO: 69806 - DNA, 225 bp, Heterodera glycines
atgcgaaatgcgaaacgccaaaaaatgcaaataatgcgaaaggcgaaatgcgaaaagcgaaacctcggcccatccctggtgagcataaatcaggtcaagaagactgctcattaccatcaagaaaaagaaaatatattaataaatatttttgttcataaattttttatctattatcataacaatagtaatatccaaataaaaattatagtaatcaatctgaataaa

SEQ ID NO: 69807 - DNA, 574 bp, Heterodera glycines
atgacaaattctacccattttgtggttaaaatttcaaaaattaaggtaaaatgaaggtccggcggtgccgataagcgccgccggaaatttttttggaaattgtaataaaatatggtaggaaaagttgcaaaattttcaaaaattttctgttttttcaaaaaaataaatcgcaaaaaaggcaaaaaaatgcaccaaaaagttcaagataaaagcttcaaaccaagttaaaaactcgttttcgtgcatattaggctatagcaagttagcaaaaaaggtaattattagagttgcacgggaccgggaattttgacaaaaaccgggaccgggacttaccggtccagaaaagtcaggaccgggacctcgattttcgtccgggactgggaccaaccgggaattttcacaagtgaaattttttgaaaaaaaatttgaaaatttgagtgcactttgttacgaaaaattgcctatattcaaaaatgtacccataaatttttttaattctcgtttgtggggagaaattcgaagaatttttccattatgcaattttgagtgtaatatgttaacagaaaataataaa

SEQ ID NO: 69808 - DNA, 662 bp, Heterodera glycines
atgggggtctgggtgagaaaagagtagggaatggtgaagaaggagaaatttttgaaaaaaaaattaaattatttattttcatttaaagcatttgttcatatgcataagtggtcaagttgctaaaccttctgattttattatttctcgcttgggttcaattccccacttggatagaatattcttcatattttctttaccattattttaattgaaattttaattaaaaaaaatattccaactttttttctttcattttaagcatcctaaaaacccaaaaattaatcaattgttctttttttacaaattctcttaacaaatcgcattaaaaaatacaaaatttttcccggcggcgcctatcggcaccgccggcccctccttgttccccaaaagtcttgagaaaaacgtgccgcgaaaaaagcggtgttgaaagcaaaaaaggtcattgatttacattaatttacatggccggagaccccttcgcaaaattggaaaattggctgctgaccccttgttttgcaataatctgaattttgaggtctacatctgaattttagtgttctttatcctgaatttgaaaaaaaaacttggtcaccctcaatatacatatacttctgaacaattctaatgctaaaaaacaggcactcgcgcgaaaactgaataaa

SEQ ID NO: 69809 - DNA, 355 bp, Heterodera glycines
atgcagcagcagaaacaggacgcacagatggcacggcgggagttggaggtgtacaagcaaatggcacgtcgagagttggaagattcggaacgggtaaaaggagggggaagtaattagtaagtaattaataattaattaatgagcctttgtgaaggaccgcgacgcactgggcaaacagttgcgaactttgaataccgaaatggagtcgttgaaaaatgagctgaaaaaggagcaggaacaaagtcagaggatggaattcgaaatgagaaaagttcgcggagagaacagcacattgagacaacgggtggaggacgaaagagaggaaaaagaagcagagatagcgatggaaaagtaa

SEQ ID NO: 69810 - DNA, 574 bp, Heterodera glycines
atgaggaggagcattaaaatctgtaaaagtgataacacatacagagaaagaaagagatggacaccactaaagagagagacggagagaaagagagagagagagacagatagacatactgacagagatagaaaaagagcgaacaagagaaagaaaaagagacagacagacaaagagggagaaagaaaaagagagacatacagaaagacagagatggcgaaaattggtagaagggatgagagacgaacagagaggcaccagtgaaaaaagataccatagattttttatttttgtagttattttttctcaaaaatttttggagagagagagagagggtggcggtgctgatagccgacgcaatataaaaagttgacccagaaattggcaattccttataattccttaaaattggctcaaatcgcaaattctggtaatttctttgaataaaacctattaataattcaatttcagcttcaccgagctttcttccacaaaattcttcttgaaaaagagttccgcaaaaaagagatgtgaaaataaaaaagtgaattcttatgtgataccgagtttttattaa

SEQ ID NO: 69811 - DNA, 80 bp, Heterodera glycines; identical to SEQ ID NO: 51817

SEQ ID NO: 69812 - DNA, 812 bp, Heterodera glycines
atgcgagcagtgcacacggaatgggtacaggtgagaaaagaacattggggagggggcggggaattggccggcattttaatctagggggcaaaaaaaacacgaaaagccaatccaataattaggggtattgaactgggggttgcggcgtatctcgtactcaccggcggggcggggggtcataggccgtcgtttcgtttcgtttcttttttttgaacggggaatgtaacacctttttattcaaaaaagtcatttaacatctgctagcctcagttaattgctttgtttcggttcattaagttgctaatttagcgtttgtctgctgccgtccctttgaatttgccttccgtcgccgtttctctccctttttgtcgcgttgcgaatgcgcccattcggggcccaatgttcgaattgtcaacgaaaaagtgcccagcaaagcattggacaaaacttcgtccctttttgagtgttgtttccccacatcaaaaaggcgccctttgaaaagtgcgctgaggccaaattaggacgaaggcatttacaaattatgcttctcctccggtgaccaactaattacagaacattgataaaccattgttgatttattcattacaacaattagcaaattgttaaaacccaaggttaaatacaatctcactttataaaaacgaatatttaaaaaaaccatagttaattactttttcatctgatttttttaatccatttgtgtatgtatgttgctctggtcctcattctttgttcaatcttaaaaattatgatcaatcacattttttcaaatttaaaacaactttaataaa

SEQ ID NO: 69813 - DNA, 898 bp, Heterodera glycines
atgttctcctcattaacaaagcttactacttcggatgaggcaattattaacgaatttcttgcgttcgacaatataagtactaattaattttagaaattatttcttatacaaataatatttaaaaaattttttttaattttatcaatttttttgtcaaaaaaatgcaattttactttcttaaccaattttttatcgttgcttttcccgccatttttcatgcttattaggtgtatatttgaaacattttgtttcaaaaaatcctaagcctttgataaaaaattaatttgtttcttaaaaatataaaaattatacaagtgaaaaaattatttaaaaagttattttttattctgaagataatttttaaatgtgcaaatttagggtccacaggtgacaattcttcaggctatgtcaatgacccgcagctgagcacctcaacagttgaaaatatttttgaagtatttttatcaaaattaatataaattaaaatcaatctttttattaaaataattaaaaattaaaaattcactatgcccaaattggtctgataaattttaaaaattttatttaaataacttcttaattaattttttgttatttatattttaaaacaaaaaaaatcagattttttcccatttttagaatgctaatacctcggctgcttctccgatcgtttttgctgaactgcaaaacatatcttttcaatcaaatttaaatttatttcaatcagaacaaattcaggttcatccacaacatttcgagaattgtacccagacggaaacgaatgaagcttcagacatttttgaagtggagatgattctgaagatgagaacaaacaatggattaaaggaatttttagtaaaaaaaattaaaaataatatatatttataaatgtaattaa

SEQ ID NO: 69814 - DNA, 861 bp, Heterodera glycines
atggacgaggaggcgcgtgagcagaagataaaggaactgatagcgatgacggaggaaacgcatcggaaaagggcggaacggaagcgacaaaggaatgaggaggaagcggaagaacgacggaggctgaacagagtgagggcgaggtgagtgggggaggggcgatggacccggggggggggggggaattggacagccatgccattttttatttttaaacacattaattaaaatccattcgtattcttaataggcgtatccatggcaaactggcatctttcattaccacctaacattgtccaaatgacttgtcagttatttgattacatttttccatcggggagagacggacgaactgaaaaaacaaacaaacgaatcgttaatttcagaatgggactcgaacccattccaagcagtgaggacgaagaagaagaacaaaaaggtgcagcagaagcaacggaggtgtgcctttttttgcacttaatttttcgtggtggggttaatattactataattagtccgctccataaattttaaaatgaacattttttgcccgtcattttcatttttttgttttaattttccttttagttggatgtttccgccattccgttgcctccctcttcgcccgaagcaaaaacgactaaagagcctgagcagaaaaagcaaaggtttggagtgcgggagtgggaccgtggcaaaatcggatgcatgcgatgggcggaggaacagcgggacgaacgcgaggacgaatttgcacctccttcattttattacggcgaagaaaacgacgcaaggggggaagaagaaacgcaaaaactgaagctaaagagaatgaatggaccattcggaaaaataatataa

SEQ ID NO: 69815 - DNA, 915 bp, Heterodera glycines
atgccatttacgtctttttatattttttgttgtcggtcgtttacttattgtttaggaaagaatttttcaaaagaattatttattctgattgtgtcaccaattaattgtcaaaacggcaaagtgtgttaattgcagcaaaaaatggatcgacggtaaggaagtttttattaagtccagccgatttgggatgttgttatcagtgaaatttggcccatttttgcgacaagcatttgccagttgcgctttgccggaggcgattatttggacaaattgcgtcgccacatttcaccgacactgctcactgatcttgatcaattgaattcaatcgattcatgtggtctgtgccctgatgaaattgctgacgatggaccaaatgcaacttctggccaagcgttgtccaaatggcttcacattccgacaaaaaatggccaaccgaagcgatttcgttgccttgattattattctcaacctggaatgaactggatcaacaatttcatgataataatgtattttatgaagaaaaatcgcaattatatgtgggtatatttaaataaatttggtgtaaccctccaagaattttgatggacactcttccatcttttgatcaaaatgtttattctataaattattaaaaattggattttttaactttcgcctaatttttcaggactttttttgcatttttacgtgctttttgggtttttgcgacttttttcaatttttcgtgacttttttgccttttttatgactttttttgtgactttttggcgattttttatgatttttttagtcgactttttgaagatttttagtgactttaattcccagccctacttattgaatacactaaacttgtttgattaaaaaatttaaatgagtaaagaaaattgtcaaatattctcacgaaaaaatata

SEQ ID NO: 69816 - DNA, 71 bp, Heterodera glycines
ggttacaccaaatttatttaaatatacccacatataattgcgatttttcttcataaaatacattattatca

SEQ ID NO: 69817 - DNA, 952 bp, Heterodera glycines
atgactgatttctaccgtatttcaagggaaaatggtaggaagctgatcattttttatggtagtcaattttgacaccctaaggtacagtaaaggcaaatttttggcaacctgcatttttcctgtacttttgtacagaaaatataggtgcaggccatttgggaaatactggtacaggcttttttcaaaatgtcaatctataaaaaatataaaattagagacattttggtcgaataaattgtaaaaaattacagattttaaaaaatgtcgcaaaattgttaacagatttttcttaaaaaaccaatttttgcgattttgggacaatttttaggaaaaaattaagagttttgagggttggcagtgccgataggtgccgccggaaagttttttcgaattttttattcaattttattaagaaaactgttcaaatctcaaaaatttcaatatttctcttcttcgtggattaattagcttttaaactttttaaattctcggagtcctcaatcccccgaattagtgtcgtggggtcgggtgcaaaaaatcgggggccggggacctcggggggcgacatgtcgggggtcgggtcggggaataggtcccaaaaacgcctcgggtcggggggctcggggtcggggcttaaccctaatttggatggattaaaaagaaatgatttatttattgccaaatttgcgtaaaacgtagaaatatttcatcattaattaattaaacccatgtaattaaaattgcacatgcagaattgaatttcattcagcaaatagaactgcttcactcatatgagttctattccaaaagaaaagagagcgtcgccaacggccaagcgtacgttttcagcctggccgaccaacaacccaaacagaaaaggacgagcgaaataacggtaattgagttgtgctaattagaattaattattaactaattaattaatgaaaataaa

SEQ ID NO: 69818 - DNA, 387 bp, Heterodera glycines
atgggcacccgaggggccgtcagtgcagagttcgttattttttaaatgatttctacaaaatgccaatttccagatattttctgcgtcaaggatacaacgtcattttgtgagcagcaatttatgatttttgaatggattttcttcttttttttggacggtttgggaggggccaactccgtctcgcccagggctgagttcgcgccattgtgatttatcttttttacgcatcaaattgctcgattttgggtctgggctttttggggtctcgactctcgtgggtcaattctcgactctaggaaaatttcggtttattcaatgctatgcatgatgaagccgtaaggagtctacgttttcgataaaagggcaaaaaaaggaaaatttattaaa

SEQ ID NO: 69819 - DNA, 215 bp, Heterodera glycines
atgtcagcgagacgaggtaaatgaaaaatcaatttaaaaatttcatatacggagcttgattagaataattaaatatttcagggacaatgattcattttccgaagataaataataaaaatacaaaaacttaaaattttcatggtaaaatttttttttaatttacccttaatcgaaatttgtcggaaatttagaaatttgaaagccaagggaataaa

SEQ ID NO: 69820 - DNA, 442 bp, Heterodera glycines
atggcaacggcaaaacagatggctgcggcggctaatgcgcgacgcgttaagaacgcaaagttggcggcaaagaaaagcagagccgccgtcggacgtgctggcaacgtaaacaaaaatggaagcgcatcccaatagcctaatttgttgttctattttaaggttgttaaggcacaggcccgtccgaagtgcgcaaagtgtgagaagggcggacgaaaaagactgagaaaaaaatctcgtgcggacatgtgctccaccgccggtgcttcttccgtcacattgccacaacagttcgctgcccaacatgcaacaaaaggattgtggaggaatagctcaaaagggaagaatgagtcagatgatcaaaaaatgtaattaaaatgatctgtatttcatgtatattgttttaaagtgaccgtaaataattttggttgaatagattaataaa

SEQ ID NO: 69821 - DNA, 300 bp, Heterodera glycines
atgcgcgacttagaagaccaggaggagcaggcgaaggtccgtcttggtgatcgcgtcgtacgccgctccgttcacttccaaatcgacttccatccaatcaagtgagccaatgcaattgcaccatctatccaattttacagttttgctatggttcagtttgcagcatcatcatagcaggtgacgcgtgctacgcatctgtcgacctacactatatcaatatgattacaaaaatatttggacagaatgaatcgtccttgtgtggtgtggcagtacatgtcatatcgattgccgctggaaaga

SEQ ID NO: 69822 - DNA, 165 bp, Heterodera glycines
gttctccacgactatgaagtgacaaagaatcggcttagttccctttcgtggagcacaaatcgatttgtaatataaaaaaattattttaacttttttaaatcgatttttttttgccaatttgtcccatctttttaggaccctcctcatattgttgtcgcgtccgat

SEQ ID NO: 69823 - DNA, 463 bp, Heterodera glycines
gccatttttataacctttggtctctccgggtttcctattggctgtacccctggaaaatatttgttggggcttcgtgtgatttcatgtcttgatgttcaaccaatagttggctcttcggatcgtgtgatggtcacctgcatgccgagtgttggtttcagaaggtgggcttttgtttggtctgttcctacaaaaatccctccactttttctttggctctccgattctcattttgtttaacctgccgttcgtgtccaaagactcaccaaaattttaaacaattggatcgcaaaacgtttttttctgttttttaatttttttttattttagctcactaactcgcgctgtgatcaaaaacatgctgaccacctttttgttccctctcagtaccgccttttatctgttcaatcataatcgtgctatttatgatttggctgcaaaaacaatggttatttctctggtctaa

SEQ ID NO: 69824 - DNA, 755 bp, Heterodera glycines
atggctttgttagagatgggttgtggccagcagctgcagccgccgcttggccccgccgacggggagggcgccgccgaagaagaagccgccgccggcacaggcggcgtggccacgacaagcgcaacaatggcactgttcggcttctaccatcccccagcgacagcaccgcaacaattaacgactaccgtaccaccaccaacagcactacaacacaatgccaaccagcaccagcatcactacggtaggggaggggagagggggtacggtaaggggaactcttgtaatatgaaaaagcttggcatggctcaactcttttgtccgaatattccaacggggttaacgccagggctgttgctaatcggaaaataaaacgcgaaaaaaaactaaaataaatacgaaatgctataattaaacgcccaaaaaaaacacgaaaatattaaacgcgaaacaagcaattttttactgaaaaattctaaaatttataaatcatctcgaaaaaaatttgaaaattttgatgcaatttgttaacagattttgtccataaaatgagcaaattttgcaattttaagccaatttttaaataatttaggaatttttgggtccgatagtgccgcgatttttggcttaattgttaaacgattttcacctatgcaaattttattgtttttaaatggtaataaaattacaaataaataatttttacatttaaaaaatatttacaaaattaaaagagattaaattaattattttttaaa

SEQ ID NO: 69825 - DNA, 363 bp, Heterodera glycines
atggactcaaatctccggcattctaaacactgggactcactcaacccaccaactttcaatgacattccaatctctgggactcaacccaccacatttcaatctctgagactcaattatctgactttccaatcgctgggactcaacccaccagcatttcactggactcaatccaccaacattccaatcactgggactcaatccaccaacatttcaatcactgggactcaatccaccaacattccattcaacgggactcaacccaccaacattccaatcaccgggactcaacccaccagcatttcaatctctgggactcaaatctccggcattccaaacaatggactcaaatctccggcattctaa

SEQ ID NO: 69826 - DNA, 531 bp, Heterodera glycines
gaccgcgttgtgcctcttcacacattgaagtacgttgctcagctgtaccatttgctgcgcacggaggcaagcgaatggcaacggaggccggtgctggcgcgcattgagacaaaggcggggcacggagccggcaagccaaccaccaaaacggtaacgcaaaattctcttggggaaacaggcaactgatactctctgtgctgctttttgttcagatcgccgaacttgtcgatttgtactgttttttgcagcgggtgctcgaacttgaatggaaagaggagtgatttgattttgcgatgttgtgcaaaacgtaattctatttatatgaaaatgtgtgtctttttctttgtttcatgtctataaatatgaaaaaacacgatttcgtttcactccctccctccccctcgcccatgtcagattctatcaacgaccacgaaaactcataaatgttttcaggctacaatgggtactattaccaaggcattgatcgaattgtacaataatacgaagaaaaacacaagggattcagattga

SEQ ID NO: 69827 - DNA, 308 bp, Heterodera glycines
gttttttcatatttatagacatgaaacaaagaaaaagacacacattttcatataaatagaattacgttttgcacaacatcgcaaaatcaaatcactcctctttccattcaagttcgagcacccgctgcaaaaaacagtacaaatcgacaagttcggcgatctgaacaaaaagcagcacagagagtatcagttgcctgtttccccaagagaattttgcgttaccgttttggtggttggcttgccggctccgtgccccgcctttgtctcaatgcgcgccagcaccggcctccgttgccattcgcttgcct

SEQ ID NO: 69828 - DNA, 1001 bp, Heterodera glycines
atggcccagcgggcacagctgcacccgttggcactaatgctgcccaccacgttggcatgctcatttgcctttgtgctgcccgtcggcacgccgccaaatgcgttggccatcggcagcggactgttgcgcgtctccgatttggtcagtcgatcaaccaatttgtgctgctgttcgagagttaaaatccgtaccgagaatagagactgaaaagtccaaaattccaagagaattttctcgaatcgcgtgactaaacactcttgaaaacaaattaacaaagtgccaacatactgtttaaatttggattttgttggacaaagaccgacaattttttttttttggttaattgtacggcttacgacaattttcaggataaaacacaaagtcgtaaaccatgacaagttgtactgctccgtttcgtactgtcttcaacaaaaaaaatgtcattatttttgtcaaagtccaccaaattaaacatttttacaattagtatcattcaacagcttcttcatctcgctatttaacatgcaaaattcaagaaaatttaccatgattcaaaaaaaaaagttatgacgattttttgtcaaaacaaacagtacgagtcggggcagtataagttgggtttcgtccaattttcagccaagcagtgccagtcgtagatggctatttgtttgggatctttctgaaatatggatttcgcctaattgtcgtaaatttcaaaattcccagattctatcgcttttccgtcggtacgctttgaaattcttaattttttgcagatgctctccggacttgccgtgtcggccgcttccgcgctgctcaccatcgcttatctgtccacttttgcgcctctcattttacccattgactgcttcccggaatgggccgcggttacgacggcgacggcatttgacgccaacggcacaacgctaattgccgagggggcggcggaggaaatgggcggaattgccgcgcttggccggctaataatggcggaggaagcg

SEQ ID NO: 69829 - DNA, 138 bp, Heterodera glycines; identical to SEQ ID NO: 50950

SEQ ID NO: 69830 - DNA, 230 bp, Heterodera glycines
atggccgcgccaaaatggccgcgccaaaatggccgcgccaaaatggacgcgccaaaatggacgcgccaaaatggacgcgccaaaatggccgcgccaaaaaagctcgcgccaaaaaagctcgcgccaaagtgggcggattgcgaaataagtaccaaaaagtcacgtgacgattgcgaaatcaatagggatattacgaaaaagagaaccaatagaacggttttgattgacag

SEQ ID NO: 69831 - DNA, 1934 bp, Heterodera glycines
atggacaacaacagtaacaatggtggtggtggcaacaacggcgggcgaaaaccgcccccctcccggggtcggaagaggctgcacgagagcagcagcaacaatagcggcagcagcagcagcaacagcgccaacaattttgtggacggcgacagctcttcaaccgtgcgcgcatcaaaccgtcctcagcaaccgcagcagcagcagcaacacaactataacgacttggagctgctgctgatccccggcattgacgacgtgaacagttcggcactgcaaccgcagcagactcagatggttcaacgaccaattgcgacgggcaatggacgtcaaatggtggtgagttcaaattggggggactcgttaaaataaaagccattttggcacgctgttaaatatattttttgtattttctaaaatttttggcaaaaaatttaaataattttcggaaaacaaattaatttgtttttttaaaacatttggtttaaggcggtcaattcggcgtcccatggcacgcctgtggaaggaactttgcaaaatgtggacggcggcggtggcggtggtggtgtcttgtctcagcgtaatgtaagccgggagtgggggcgggtgtgtgtgagggataagtaatgggatctctctagccaaaaaaaaattgataaacgggtgaccacaaatattttttttatagagaattgaagcaccaaatgtcccctccctatttgagtgcaaaaaaatggtgtgcccatgtggagtttgaacaatgtacgtttttttggggggatgtcaaagggtagcagggcttttactagcatttcgggtgggccttcatttttgtcattgtaaaccgggcccaaattcgaacaatatatgttatttgatggattttatttatttttttgtagtctgctgtcaattttgccgctctgatgacggccggcgggggtgacggttcatgtgcagcccgtcccggtggtggaacgctttcggtggtgcgcggtactgttggaggcggacttgaggtggtgtttttaaatttttttgtgtcaatgtggagggggggggcaataccaaattttaaaattaaacatttttcttttaaagtcgctcccgcccagtgtgcgtgaggcggttgcaaataataatttttcccattttttttttgaaaaaaacatttttgatttaaaaaaataataatttttccccatttttaagtgttcaatccgccgtcagcaaaaacagcacagcctggtcatgcaaatcgacgacgatgatgagggcgaggagcagcaggacgaacaaagccgcgggagtggcggtagcgacgatggaccggcagcgaattttgcattgtcatctgcgggcactgatgcgccgcgaaccgagaccggcgcttcgtcaacggtgagccgcaagtgaacaaaaagaaagaaaagaaagacaaaaagaaaaagcaaagaaagaaaaaacgcgctcgcataccatcattatacgcacacacacactcacacaaacacatacaatttgttctttgtttttaaaaatacaattgttgtttattcttctgttgtgttgttgtttttgggttgtttaatagtgggggacgggggaattgagtatctgcgggcgtgttttttgcggaaagtcatgcattttcggtacaaaaatttaaaaaaatgattccaaattttttagccatggctttccgcaacgcgcccgcccactccacctccgccacgaatggatcatcggcggcggccaacgggtggtgcgcccgtcatgtggacatttcctccacgcctgctgttttgagcgtgaggcgaaattggggcgagtgtgccccatttgttcagcccattttataagtgggaagaatgactcgctagggtcaaattttcggtggaggacgccattgaccgctcaaaataattaattaaaaa

SEQ ID NO: 69832 - DNA, 686 bp, Heterodera glycines
atgatcaggtaaaagttaaaaatatttttaataattattattattattattattattattatttattttaaaggcaggccgcccatcaaattcaaaaacagaacagacgaaatacggttatatctagggaaccaatttttaagctgaataaatgtttattaatttacctaattaataaataaattaaacaaaaaagtcagaatattaattaatttacctaattactaattagaatattgaacccaagatttcataataagcaaaattaaaatcgaataatgcaaaaaaaaaaatagcaaaataaacattaaaaatcaaatataaaaaacaagtactcactttacaaatgttgaaaaaaatttttttttacaaatttaactggaaaaatttataaatttaagatcggcaaattgctcttagcctatcgcattatgataattcaacggcaaatgacgcacaaattgcggaagcaatggataaagcgtggcaggagcaagcggatgccgaattagctagacgattggctgatcaactatagtgtaataataatttgggcagacaatttttaatgactaacaataacaagttatccaaattaataattaattaagaattaagaaaaaaaagccaaaataataattaaatgctcggtcaataagcagtcaaaaagatagatcagaacgaaa

SEQ ID NO: 69833 - DNA, 306 bp, Heterodera glycines
atgggcatggaattggagcaggagcagcaacaacaggaggagcaggaagaggaggaggaaggggatcaaatgatggcactgacaattgaccacagtgatgacgagggggaggaggaggagaagccggaaaaggagcgggatagtaatgtggaagaggcagacaccaatagtgccaaatttgacgacaacaacggcacaattgccgccgacaacggcaccaatggcaacaacaatccgttgcggttgctaatttcggcggttgaagagcagcaacgccaacaacagagggacaacaacgacttgtga

SEQ ID NO: 69834 - DNA, 612 bp, Heterodera glycines
attttatggaaaattttatgaactttttatcatccaacaaaattaaatcagtatttgtagtccaacattgggatggccttgttcaaaaatatcaacatttctgcggttttcggctttaatctcgaacgtcgataatcataaacatccctcgccactttgaaagtctgttcgctcggcacgcttgttgcaggggctgacaaatacttcatcgccaattttgataacattggaagttttggtccatgcttcttccaccattcaaacgggtcagaaaatggcaaaattttgttaaaattttcgtcaacttcagtgaatgccttaatttctgattgggttggaattaactttttcttacctttcgcatgtttgctgcagaatcggttacaaaagcaaacactcgtccgtcgtttattttccaactgtccaataatttacggacattgcacgcaatcgcattgccagaatgttggccggaaaaatggtgaacagcgagtacaaaattcttttgcacccaattttttgtgacgccgtgaccagtcaagcttaattattttttgaaataccgcttcttgaagcctaaaattaccttaaaaaattgtttgatggacctgc

SEQ ID NO: 69835 - DNA, 749 bp, Heterodera glycines
atggcaccaattagtgataaggtggggctgtgccgctttcggaaacggaggatttctgtttttttttctaatttctaaatatttaaatatacatatatgtatttatgaaaaaattgaaaaattttacaaaaatactaatctattcattaaaaatgaaaaactaatgtaaagactaacataaattagcaaaattgctaaaatggtggcttttgtgaaacgtcctagcactctttatatattggaatttaaaaaaatcaaaaaataggatcccatttttttatccaaaaaatcggagcaattttataatttaatttaaattttattaaactaacaataagtaaaacattctctcttagtcaaaatgccaaaggagaagctgatgtcatcgcattgtccgtagatggcaccatgttgtaccttagcaaagtgatcagtttttcgtttgcacattttggcatggacaaattggcacggatcagtgttggccgtgtgccggaacaggacgggtttaaggtggattaatcagtctttcaattgtttctcacatttacatatttttgaatttttaaattttccagggctgcttgcgcaatgttcgtgccgggcccttgccaccgctcattttccattcgctgcaaaaagtgccgagaatggccgatgcaatggcacaggcacacctcacccattttgagcttcaacaccatgaaaatgttgtgccaagcgggtgccaatcgtcaaatgtttggtga

SEQ ID NO: 69836 - DNA, 864 bp, Heterodera glycines
atgccgattgaggagaaggagaaaaaagatgtctatagaattgtcgtttgggtaagttttacaacaaaacaacaaaataggtcttgttttacaggattcggaaacgtcgcaggatactatttacaagggggaccagaaggagcatgttattaattatatttcggtgagagttacgtgtacggaatgctgtgatgacaaaaacaggacgaattgcaaaatttgtggggaggagaggatcaaggattggagcgaggcggagggacatgagccgaccaaggattttgtggagtggattttaactgcgtttacgaattacgatacgtacatatttgcacataacgccggacgttttgacggtaatgaaaaaaaaaattaatctaaatttttaaatcctaaatttttaggtcattttgtttttaattacctctgccgtaccgggaagaacccgttaccgctcatcaatggattgaaaatttatgaatttaaagtgcaaaactcgaagaaacattcaaagctgatttggagagactcatgtttattgatgccggtgaagcttgagtcgctgaaggcgacatttaatttggactgtgaggacaagccctttttcccctattattacaacaagaaagaaaattatggaatacgattggaacatctgccaccgatggaggactattcgccgggatctatgaacaaggataaatttataaaattcgaaaaatggtaggaaaatagaaaaatttttgaataaaattcttttttttcaggtacaatgagaacaaggagacgcccttttatttggatgaagaattgagaaattattgcagaaacgacacggagattttattgttgtcgcttcttgag

SEQ ID NO: 69837 - DNA, 640 bp, Heterodera glycines
atgtcaaatgtggcacttttctccgttttaggcgaactcgcactgcccggtggaatgttgaacaaaggcgaaccgccgactgaagccgccgtccgggagtttagtgaagaagcaatgggagggcatcgacgggaggacaaattggaacatttttggaaaaaggggaaaactgtgtaccagggatacgtggatggtgaggaaatacgaaaaaagcgaacacaataataatttaattctaattgtaagaccaccgaaacacggacaacgcgtggggagaaacgacggcggtgaacttccacgacacggacggactcttggaagacatcgaattggaggtagagcaaacccattttagggataaagacacagactaaaacattttagggtggcgacgacgcagaaacggcacgttgggtcgacgtcaaccaagaactgaagctgtacgcctcacatgattatttggtgcacttatttcataaaatgcatgcaaatctcgcataaacgtctttttatactttgaccaaaataacaaattcttaaaatttattctatcatttgtataaaagttatggacggagaatatatttcatcgagatttcgcacaaaaattaagtaaaaaacaaacatttggtaaagagca

SEQ ID NO: 69838 - DNA, 230 bp, Heterodera glycines
atgccgccaatttcactcttcgagtggacctttgatgcggacgggaaacaaacatatgatgtcagttatgtggacggtgccaatgtgccgatcagtgtacgtgtgctgaattgtcctggtgtcaatttcaacaaaaaattgggcaacagtttggacactttggtcgaccagttgcccgatgcaatgaaaatggatgtatttggtgtacgttttattggcacaattagggg

SEQ ID NO: 69839 - DNA, 682 bp, Heterodera glycines
atgtctgtgttggccaatcggtccgcggttttttgggctcagccaacactcacaacggttaacaattccacccattccgtttcgcaatacgccaaatttatacaaatcttttagattaattctgtcgatcggtctgtcggaagtgaatttgcggatgattttgaccagtcaaatccgtccttcgtccatttgtcgatcactgtcgtgctgacccatcccgtcgctttgactttttttgtggactttttgaacgaagttggcggtcaaaattacatcgatttctacttggccattgaggtgtggttgttttttaagcagtgcgtctcatttggttgtatcaacagggtttcaacgtgtccatggagcatcagttgagggggttggcctcgggcgacactttggacagcgacgcgcgggagacaattcgagaagcggctctcttcatgtaccatcagtatctgtcacaggaagtgaacctctaaacaaatttggtcttcaaaagacgaagatgactcaggcaatcactcgagttccgttgagcgaagcaattgtcaacaagtttttggcccgactgcgcaacgacgaaccatcggatggatggtttgagcaaattcaggaacaggcaaataaaccaagcccaaagcgcaatccgatgcccattttgataatgaacaccccctga

SEQ ID NO: 69840 - DNA, 502 bp, Heterodera glycines
tttaattggtctgactcattgggcagcacctgattcggccgactcggcagcgacttcgctccctccagtggtaattccgagttggtcgagcatccgaccgtacagcgcgtgtcttttgaaggcggggaaaaagcgctcttcactcttcagaatttcgacaatcttcagggggtgttcattatcaaaatgggcatcggattgcgctttgggcttggtttatttgcctgttcctgaatttgctcaaaccatccatccgatggttcgtcgttgcgcagtcgggccaaaaacttgttgacaattgcttcgctcaacggaactcgagtgattgcctgagtcatcttcgtcttttgaagaccaaatttgtttagaggttcacttcctgtgacagatactgatggtacatgaagagagccgcttctcgaattgtctcccgcgcgtcgctgtccaaagtgtcgcccgaggccaaccccctcaactgatgctccatggacacgttgaaacc

SEQ ID NO: 69841 - DNA, 793 bp, Heterodera glycines
ggcaggacaagaaaagaatgaagttgatgcctcatgaaactcggaattggttatgtttagtcgaaaatatgcttacataatactcataaaaaatacaaataattcaacccacctattctatgaccacattctgaaaaaaatcccagaaatacgaggaaagatatgcttggtcacaataaaataaaaaatggctagtatgtaaaaatttgcggtcactaataaaataaaaaatggctaatatgtaaaattggcgtccagaaatttttagactaatccgaagcaaagcacgaatgaattaaagaggcgaaagaattcacagtatcgtttctaatagggaaatattgacagtatattcggctaaaaacgggtttgatcatttttagcgcatttttaggtatacatttgagacaattgggcaggacaagaaaagaatgaagttgatgcctcatgaaactcggaattggttatgttttgtcgaaaatatccttacataatactcataaaaaatacaaataattcaacccacctattctatgaccacattctgaaaaaaatcccagaaatacgaggaaagatatgcttggtcacaataaaataaaaaatggctagtatgtaaaaatttgcggtcactaataaaataaaaaatggctaatatgtaaaattggcgtccagaaatttttagactaatccgaagcaaagcacgaatgaatattaaagaggcgaaagaattcacagtatcgtttctaatagggaaatattgacaggatattcggctaaaaacgggttgatcatt

SEQ ID NO: 69842 - DNA, 245 bp, Heterodera glycines
atgaccccgacccgttcctattgcctcccatttttacataaattgctcacaataaaaagcataaataaagtaacacatgtgccagtggaacgcgctgaattaggctttggactcccaagcctcagaattccaatcattgttatgagggggtcctggggtgatcagtcccatttccctcccaaatccaactccatgttaggaatggctttatttcaggaaaagcatggaaaataaatataaataaa

SEQ ID NO: 69843 - DNA, 1060 bp, Heterodera glycines
gcaacggcaatcggactgggcaacaaagttttgtcttaaatattttaatttcagacgtttttgggattggtataaacctgatgaaaggtccttgcgttaaatgtagtacctgacggaatcaagaccccgagaggatttgaatcttggggtcgaaatcccggtaaaattttttaaaaatcggcgccatgagaaaaaaaaactagccattttcgccaaattatggccatttgagacaaaattttaaaacaaggaaattagaatctggcggtgccgttaggcgccgccgggaaaatttagaaaatttagggtatttcattaagaaaaatagtaaattaaaaaaaaaatcatttcaggataggaggcggcattccacccctggaatacggcctatttgccgacctatgtgcctaaggctcgttactcggttttgccatttttagaaaattgcttaattttaatctcgactaaaataacacccttatcttggatcccgacaaaatcgagattgaatctcggtaaccctacccctggacgatgccaatcccgaattccgatccagactcaaaattccaggttatagttaaatgattcatattttttgcagtatgctattccgtatgcccagctattgctggaaccagtatttgtctgtttttctgatactgattcgcgtgttcggtacttcgcttgtgaggtctgttttttggaaaaagaattgctatgctcacattagagtttctcttaaggcactttacaacattgtaaaaattattaaaatggctgccttggatcactttgaccaactgttcgatattctatggaaattgtcatcggaccctgatcaaaatgttcgaaatggctccgagcttttggatcgacttgtaaaagtaaacagaaaacattaacataaagtaaataaaataagtttcaggaaattgtcgtttccaagaatgacttcgaacttgaaactttgattttgctaattcgagaacgaatttactctgttaactcatcgaatagacgctttatcatctcatgggtaatcacaaacacttcttca

SEQ ID NO: 69844 - DNA, 899 bp, Heterodera glycines
atggaagaactgctcgccgtcttccaattccattgccacccgaatctccgcggtgcgcccggacagtacccaatggcatttccgtgccatggacgcatttctgatcagaaagaaggcacactttcgatgcaaattgagaaattgtcggaatttgcgcgagaggaagtgaacagcaggcgattaagcaaacacttttacacaaagggattgccatggaaaatattagccaaaataaaaaccaaagaaaatagtactgagaaatggctgggcttttaccttttgtgcaccgctccaaaacaaggtggagagataaataaatttaacaatttcttattcaattaagatggaaattggagctgcaaatggagctgcaaatgttcggcaacccttcgaattgcctctcaagacagcgtaacggaggatttgataagaaaatatgaccatgtatttaacaacgaagtggacaagtggggtttctcaaatttcattgcttttacggtgagtggcagcaaaacttcatttagtggcttaataaataggatgaggattctaagaattttacttattttttctgcggctttaactcaacaagaatacacgaaaaacattttatttcgacaattttgcgttttagcgcccttatttgaccttagaaatccttattttgggtgttagccattaaaataagttctgcccttaaaaatcctcgccctattaataaacagtaaaaattaagcaattgatggatccgagcaaaggattttacgacaaaaatgaggacaaagtgacgctggcgattgatttaactgttgaagaagaaaaaggcgaattggctgatgaataagcgctcaccaatcactcattttcaattgataatgatcgtttggaaatattatgca

SEQ ID NO: 69845 - DNA, 709 bp, Heterodera glycines
atgtttctggatccaggcctaagaacaacgggaaaatggtcacataaatcaataataaaaaaaatcaatcagattctactaattatattaattagttttcaattaaccttgctcattgccataattatttctcaattagcctctgctaattgccccgtggaggtcactgatgttgaagtggcagcgttcaaagtgatgttgagcttcatttatacaggcgatttggccaaattgaacggatacaatgcaatggcagtgctttacgccggtggattatttttttatttgatttattaattatttttttaattagccaaaaagtacaacatccctggcttggtcgacgcatctttgcaagttccaatttcatcattgcgaaatgttttcttggcttatgcccaggccggtcttttcgaattggaggtgggaagaacaaattgaaaaaggccgaaagaatcaaaaatttattggtgtttaaccggctgggccagttactttatataactattttttattttcacatttcgaatttagaattttgccaatgattgtttggcttacattgacagaaatgcggatgatttgttcaaatctgatgcatttttgcaaattgaccaaaaattgttgtgtgaaattttgggacatgacgaattgcaatcgatggagaaattttcatttggaaagcagtaattttagaaaacagaaatta

SEQ ID NO: 69846 - DNA, 718 bp, Heterodera glycines
atggaaattgaaaaagtgtcggaattttctcgagaaatctttttgagtgaacgtaaaagcaaaactgtgcacatcaacggattgccatggaaaatatggacaaaaatagaaaagaaaaatgaaagcactggcaatgagaaatgctttggcttttacctttggtgtgatgctccaaaagaaggtgcaattaaatataaattaacataaatgattaatttgaattgagcagaaaattggagttgcaaatgttcggcaatttttcgaattgtctctcaaaagagcgatgtggcggatttcagaagagtattcgatgcccatgtttttgacagtaaaaagaacagctggggatattgtttcatttcgtttgcggtgagttcaattagctattttcttaatcgatccaattatggacaattaaggaattgatggatccgagcaaagtattgtacaacaaagaagaggacaaagtgacattggccattgatgttacagtgaaagaagcaaaaacggaggacaaataaatgataatcaatttgcaattttttgatttaaacatccttaattgacttattatttttcgtgttaacttttccaactgttgtattcctttactgttccaaaaatgtaaaactattaattaattttcggtttgagtgtgtgtccaaattgaaatttgtttaacttaacggaaacttttgaaaatttgcaggctaataga

SEQ ID NO: 69847 - DNA, 49 bp, Heterodera glycines; identical to SEQ ID NO: 51181

SEQ ID NO: 69848 - DNA, 213 bp, Heterodera glycines
atgaatggtgaagggaccgacggcggagaaacggcggaacgggtgaaaacgaagaaaaaagttcgacgggtgaaaatggattttgctgagcaaattaacaaattggtacaaaatgaaggcgaacaacagttgaagaaaaagaagaagcgaaaaatagtggaggaaaacggcgaggaaaagaagtcgaaaaagatgaagaagaagaagagcaaa

SEQ ID NO: 69849 - DNA, 662 bp, Heterodera glycines
atggtcacctccggtggtcaacgcgtacttgatgtggttggaggtggtgtacagaaaggcctcattgcccgcgtcccaagcgccgcttttcacccgagtcgactcctgcacagtgccgagcacctggagaaaaaagattgtaagacgagaccaaagagtacaacgccacctccaatctcttggtgacgagggtaacggtgtgtttgctgagcaaagcggcgcattccatgttcttggaccagatgacgtactttacctgaaagcaaaaacattgcggaaacagagtgacgatttaggtttatcgttggataaaacttcaatttcaaacactttttttcaaattttcagtaattttgaacacccagttttgtgttcaacacctttgttgccttgacactggccagcacacgcttctgctgcaagtcgtacatttgcacagagtccgcgttcttcaacagcaacagccccgtgccagcatagaaaatgtcgtcgacggcacccgtgtattcaaccttgaccaattggtgataaatataagatttaagtgaaaaaatagcatagcattaaagtatttttcttaaaaacaatttcgaaaatttctaggtaattttaggaagacaaacattttttaaattcaaattggcagaaatgtctgaaataaa

SEQ ID NO: 69850 - DNA, 1143 bp, Heterodera glycines
atggctagcgccctcattttggctgggcttggaattgcagccgctggatttacgggccgatatatgatcaggtaatctgccaccattcactgcatcagttcctcatttttggtgtttattataaattaaggaataagcatctggtgaaacaggcgatgactttgcttcccacttattccatttacgagcgtggcggatttgctgttcgtttgccagaaaagaatatgcaaaaaaccgaaagttttaggcaaaaatgacacggcatgaagcggccaaaattttaggcgtttcgatgaacgcgcggactgaacggatacgcgaagcacacaaaagagtgatggtcgccaaccatccaggcactcaaattggcacagaataatcattctgattaacaaaaacaccattttagatcgcggtggttctccttatatggcagcaaaaatcaatgaagccaaagatttattggagcgataaaataattcgaaatgcagaaatttctttttgataaaaatttgtttaataattagtctctgttattcttatttgttagttttgggtagagttgagcgggaccgggacctggtagcggacaactgagtaccaaggtcccggttttgaccgggaccgggactagtcccggttttcccagccaaaaagtcccggtttttcaacccgattaggtcccggtcccggttttgctcaaaattcccggtcccgctcaactctagttttgggcaataaattatttaataaaatgcgtattttctgtttgttcgtggctcagtggttaatgcgtctgtttttgactttcgtttggattctctccatttgtttgttctgcctatgatgatagtaacacgacggtcttcttagactttgtttcgtgctgaaaatgttgttactgaggcatttcatccaatgtttgggcgaagaaataattttctctgactttgaatttaatttttttttttaatttaagcaacaatttattattccgaattacaaaaatggtattaaacattgatttattccgcgaagaaaagggaggcgatcctgaacaaattcgcaaatctcaagtgggccgtttcgcagatgtttcattagtggacaaagtgatttcggcggactccgaatggcgaaaag

SEQ ID NO: 69851 - DNA, 1052 bp, Heterodera glycines
atgcatcgcgaaatccgcgaaacaatgcatatgcaactgcacagatgcagtgacagttggtgtggtcctagcgacccaatttacgggcggtgcaagaaggggttcccagccccttactcaaaatgtactgttttacgcccggataggcccgcgatgtatttccggccttcaccatctgatggtggtgcccaattagaggtaaacggcctaatatacgacaactcacatgtcgtgccgtataatccttatgttctgctgcgttaccgagtacaccataatgtactgtttgcatatggtaacaaagcgaatattaagtacgcactcaagtacccgtttaaagggccaggacattgttatgtcgagtgcaaagaagagtccggcaataaaatcggaattgatgagccggctcaatatgccaagatgaacttccgtggtgcaacggaagcatatgccattgttcattcaatgccatttgcccgtctttcacatcatgttgtcaaattggcaattcatttgccaaaccaacagcccattgtatatagggcattccagctggtgagcaaagctcaacaaatccagcaaggcgaactgccagaaacgcattgttcagcatattggaaacaatggcaaaatgagtggaagaatgacccaaagtttaaggacattctttttgaaaaagtcccagagcagttccgatgggcaaaggacaaatgggtcctgtacaaaaggcagcaaataaaaaggccacctatcggccgaattgttcctgtacccccatcggacccggaaaggttcgcgctctattcacttatgcgtcactttcctggagatccagatcatcttaagatggttaatgggttgctttgtacctcattcactgaggctgcaataatgcatggtcttcttgaagacggcaaaatttgggacaaaactctggcggaggcagctctgtcgcgctggccagatcagatgagatggctttttgtgagcatcatggtctatggccagccgagtaatgccatagaattgtggaacaagtacaaagaccaaat

SEQ ID NO: 69852 - DNA, 351 bp, Heterodera glycines; identical to SEQ ID NO: 53910

SEQ ID NO: 69853 - DNA, 160 bp, Heterodera glycines
  unsure (1)..(160): unsure at all n locations
ctccagagaaggtgcaagacctgtccaactggcggtgcctacccatctttacgtgtctggagtcgggtgtttgggatcgcagcncaaatcaggtggtaaacttcatctaagactaaatacggccacgagtccgatagcgaacaagtaccgtgagggaaag

SEQ ID NO: 69854 - DNA, 740 bp, Heterodera glycines
aggaacagaagcggttacagaaagtggaagaggaacagaaagtggaagagaaagtggaagaggaacagaaagtggaagaggaacagttagagaaagcggaagaggaacagaaagaggaagaggaatagaaagtggaagagaaacagaaagtggaagagaaagtggaacagaaaatggaagagaaagtggaacagaaaatggaagaggaacagaaagtggaagaagaagtggaagagcaacagacgtggaagagaaagtggaagaagaacagaaagtggaagagaaagtggaagaggaacagaaagtggaagaggaagtggaagacgaacagaaagtggaagaggaagtggaagaggaacagaaagtagaagaggaacagaaagtggaagagaaagtggaagagaaacagaaagtggaagagaaagtggaagaagaacagaaagtggaagaggaacagaaaaagcaacaaagggaaagaggaaggaacaaaaaaagaagagagcaagagaaagcgagagtgatgaagtgaaatgggaaggtagaaaggagggagaaaggggatgagaaagaggaaaagtaagagattttaagcgatcatattaaaatttgagttttaagaaaacgttaattgaattcccggccattaaaaaaatcagttgccttcttacatataaaagttttttggcgcgtagcgccctctagagactgttaaatagcgaagctatttcaattttaaaaaa

SEQ ID NO: 69855 - DNA, 767 bp, Heterodera glycines
caaaagttttttacaaccacttattgccaatctaatttcttgcagatttaaagctatccattgcctgccggttctcggcacagcaaagcactaatacggtgtttgactcacttcaaaaaataattcattacccaaaagttttttacaaccacttattgccaatctaatttcttgcagatttaaagccatctattgcctgccggttctcgggacagcaaagcactaatagggtgtatgactcacttcaaaaaataattccttacacaaaagttttttaaaccacttattgccaatctaatttcttgcagatttaaagccatccattgcctgccggtctcggcacagcaaagcactaatacggtgtttgattcacttcaaaaaataattcattacccaaaagttttttacaaccacttattgccaatctaatttcttgcagatttaaagctatccattgcctgccggttctcggcacagcaaagcactaatagggtgtttgactcacttcaaaaaataattccatacccaaaagttttttacaaccacatattgccaatctaatttcttgcagatttaaagctatccattgcctgccggttctcggcacagcaaagcactaatagggtgtttgattcacttcaaaaaataattccatacccaaaagttttttacaaccacatattgccaatctaatttcttgcagatttaaagctatccattgcctgccggttctcggcacagcaaagcactaatagggtgtttgactc

SEQ ID NO: 69856 - DNA, 2693 bp, Heterodera glycines
atggccgcaccaattcaacagaaactcggcgctgcactcaaagttctctcccgcagccgaactgcggcggagctgaacatccaagccgaccaagcggcatcaaatctcgaaaatgccctcaacttcgaaattcaattggagaaagttcaaaaagatgccaaaacgatggacatcttcctcgacgatgtgcgcgaagcactcactgcatgggcagatttactgcgcaaactgcctgcactggaacgcgatccggcagaagcagacttcaacaaattcgagaaaaaagagcgaatcaacgacaaagtcgacgaagcagcactgaagctgcgcgacttgcgcgacttaatcggcacactcacgtttcaagcccgactcttccgcagcaaggcggacaaagaagaaagggacgctcaagcagcctatgcacaagcaacacaacataccgcacagcaacaaacaacaaagacgccgtccttcactcctccgttctaccaatttcaacccattcagctggacaagttcttcggcaacaaacgcaaatggccggagttctacgaatcgttcaaatcggcaatcggcacacatgcgctcagcaaagcggagaagttcaatctcctgcgcaacctgctcggaggagaggcccgtgaactcgtggccggatttcggctggaggacaacaattacgacacggccctccaattactgaaggacacatacggcgcaccggacgaacacatcagggcacttcatttcgaattggcaaacctcaagccctgcaaaaacctgcgcgacacaaaagaattcctcctgcaactcgaaaggctcacacgcgaactcaacaactcaggagaagacattgaaggcccaccaaccttccttatgcttgaaaagaagctcactcccggatttctacgcacaatcctcaccaaaaagggagaaaatccggcacactggaacaccacgaagttccgagacgtactcaacgaagcggtccgcaaagaaacacaaattcaagaagtcatgggcgagtacggacactcgcagcaacaacggccgccaccgcaaaagccaaatttctcggcatcgaaattccgagaccgcgcaccaatcccgcagcaaagggaacgtacattcatcacatcagcagtggatgacaatcacaaaaggctgtatggcagacagcctcaatataggccgcagcaacaaaggcctcgcgcaccacaaacgcaacaaagaaactcgcgcactttcaacaatcgaacgcaaattccagctcaacaggcaaatgcgacattcaatcaacgcaagcctccaagtccgtgtattttctgtggtaacgaccactggaacgaagaatgccggaaattcagcacaattcaacaacgaagagaagtgctgcgcacaaaggcattatgcttcaaatgcctcaaaaacaatcaccaagcaggaaattgcccgcaaccaaaaagatgcttcaaatgcaaacaaccacatccaacggcattgtgccacggcgacagcaagccaccaaaccaaatcacagcagcaatgtttggacaaccacaacaaaacgtgccaagtacaagccaagcggaaagcaacgaacccgcagcatcaacatcacaaatgtgcaatgccgtaaacggaagcgacactcgcgcactgctgatgaccgcaacgtcaacggtcttcaatccagcacaaccgcatctcagcatgactgcggcaattttcatcgatccaggcagccacagatcattcatttcggcaaaggcagcacagctactggacctcccggtggtccacaccgaagaatgccatttgaccagcttcggagaacgcgaaccgaagagatacatcagcgatctagtcaagctcggatttctctgcacaagcggggaaaagctcatcttcaatctcaacgccatgaaattcttggtcaacgacatgccaatgattcaactgtcagagttggacaagacagaattgagacaacaaaagctcaatcctccacatgagcaacgacaaccagacatcatgctcggaattgatgtctggcacgaactgcaggttcaaccaatcgaaaaactgccaagcggcttcacactgtgccgttccaaaatcggcaaaatcttaagcggatcaggacgcatcgaaatgcaccaaacgccgaacgtgacattcgtcatgtcagtccatggcactgaccaagaaggagccaatcaatctgttacgttcgaatcaaccaaagaagataaggaagtcttcacatccgaagatgatgtcaaaaaggacgagcagctcaacaacttcttcggattaaacctgatcggcatggacgacacatcaacaccaactgatcaagatcaagtgatggtctacttcaaaaagaacctcacattcgtcaacaaccgataccaagtcgccttgccttggaacgacagagtcgatgctcttccaagcaacatacatcaagccaaggccagactcgtttcattgatcaaaaagctgcgcagcctcaacctgattgacgaatatcagacaattttggacgaacaaagtcgacagtcggtcatcgaatacatcggcccacctgagtcaccatcaagtgcatggcgcactgcatttttgccacacagagcagtcatcagagcggataaagcaacaaccaagatccgaatcgtcatggatgc

SEQ ID NO: 69857 - DNA, 3618 bp, Heterodera glycines
atgtggacagacagtcaatgctcagtcgaacgacttcgagaaaacaagcgccaagatcgatttgtggtaaatcgattacaaaaaatccgagaagcgaacttccaagtccgacacgtcagaaccgactcaaatccagcggacatggcatcaagaggagcggatcctcaatgccttcgatcatcactgctttggcactttggccccgtttggctttcgaaagcagacaaatggccaaaatcaaacgtcatctaccggcccggagatgaattcaaagaagtggaagagccaccaatcatcgaactgacaacacctgttcatgtcgaagaacagttcaaaccatcaatccacttcgaacgattttcgaattggaacaggctgaaagccaccgcagcacacgctatgcgcttcatcaaaaagcttcgcacaatcgaaaacggcacaattagtgaaccgcatcaaaacaacaaaccactgaccatggcacaactgcaacaagccgaaaattggatcttgaaagaagcacagcggcttcatccaccatccaacgaccaaatccgagaattgcaactcttccgacaagaaggaatttggagatgcggtggacgactcgaggaagcaccggatctgccatacgacagtaaacacccaatctttctgccgccacacgcatggataaccaagctcatcatccggcattatgacaaacagctcaaacattgcggtccgagaatactcctgtcaacattaagagagaagttctggataccacgcggacgcaaaacagttcagcaactgctcaactccccgcaacacggatgtcttgaatgtcgtcgagaacgagtcaagccgtacatatatcctgaggcatcggatttgccaaggggaagagtcagcgaagcacgaccattcgacaaaacgggagtggactacttcggtccactcaaagtcaaacaaagcaatgacgtggtaaaaatctacgtcgcactcttcacctgcttggccatccgcgcccttcatttggaagtagccgaagactactcggctgaagcattcctccgagcctttcggagattcacggccagaagaggcataccatcacttatcatgtccgaccaaggcacaaacttcgtggcaggagcaaaagtcatcaaagaaaactggaccgacacgttaatgccggaggacatgcaacaacaaatggctcaaagcggaatccgttggattttcaacacagcccacgccccttggaaaggcggcatttgggaaagacttgtcggcatcaccaaaaacgcactacgaaggacagtcggcagaaaccttctcacattggacgagttcggcacaatgctctgtgaaattgaagcgatcatcaacaatcgaccactcacgttcgaatcggatcaggaaccgatcaaagtgttgcgaccaatcaacttcctgataccatacagcaaagcaaacaacaacttcccaatcatcaatgacgacacagacgatccaacatacgagccaaacccaacaaatcgcgacaaaatggtgacaacactgagccacgttaatgctcggctgaacaaattctgggaaatttggaaaagtgactaccttctttccctgcgcgaacacgaccgaccaaatgcaacgacaggactacaaaccccaaataacggcgacatcgtgatcgttgaagacgaccaaatgccgagatccttgtggaacttggcgagggttgagaaagtcctaataggaaaagatgggagagcgcgcagtgctttgataaaaatcaatggaaaattaagggatagggcaataaaccaattgtacaatttggaattgagccctaaggttccagagcaaccaattcaacaagtccactgcctcatcgcatcaatcatggaagactcagtctccttagccggcagtgacgacgaagaacaacgaccacgcaacaccgaagacttcaaaatcccaaaacgccgctcagcattattacgacccatcggagaacaacaaagtccactgcaaggacaacacaaacgccgcaagcaacttcacgactccggattgctaaaattgttccatgcaatcgcggaccaacaaggaagcagcaaggccacgattcaggccatcgcagaaaacagagaagtgcgaaaagcgccacaacatgagcaaatcgaacacgaacaacaaatggtgcagaaagcgcaaaaagaagctaaacgacaccttcgcactgagcaacacgaacgagaaatgccgcagccacaaaaagaagaacaacaacgagaagccgaacgtcaacaaatcgaaaggcaacaaaacgacgaacaacgtgccaccaatcaacaagcacacagcaaggcatggcaagaattagcacaacaatttgactatgatctgatggatcagccggatccaacagagaagcacgcggaagaaacggatcagtcaacgaaatcaaagcagcaatcagcaaaggacaaagagcttgaacgacatcgaatcggcagaaaaaagactatcgacatgcaagagaagcgacaacggtcaagagacgaatggccagaggaaaacgaaacgctactcagctacgttcaacgcatttacggaccggagaattggacgtcagcatggcaaagaggacgtgttctccgagaactccatgaactggaggaccaagggcgatggatgattcatcataaaaccgatcgacttcaactcagcgtctcacgactgtatggaggaaaacgaccattcgccgagttccgttttgtggacggcggatactactcacacatggtgccagaagatgtgatcttcctccaggccgtgccaaccgaagaaccggaaatcataacgctcgatgacacgccaacaacagaaaaaacggccaccgacaacgcaaagcagccaaaccaaccaaaaacatcggcacccacaatcgaagagtaccgaatggccgaccccaagccgaacaacttcaatgaattcaacctgtttgagccgtgtgacgactctcacacaacctgcgcaaaaacggcaacttacggatcaatcgccagcaaccgatttcaattggaagagttcaacaactgccgcgcgaccaacttcttccaagccctaatcttcaattggctcacccggaacatgaacctgccagctgatgaaatttgggcagctcacgacaactacacacaactcaacgtcgtaacggaagaaatcgccaaaaagtttcaccaacaacaagtcgtcagcaaaagacgacaaatcggacgcgaccagcacttcacagaggtcatcaatgtctggcgcaactcatgcgatcgcttcggcgagctctacaatcaaccggcacacaaacaagtcaagtttcgaccaatcataccagaaaaggagcaaccaagtgactacgaggaatggatcgagcgactcaacaaccgaacggcggaaatcctcacaaaagctcgagcaaaagtgcagcacccgaccttcttgaactacaattgcacaaccattctcatcggagacaacgtggcagaagtgtttaagccactcttctatgacgccaagtggttcacccacttcccagcagacgaattccgacttatcccgggaccaaag

SEQ ID NO: 69858 - DNA, 3702 bp, Heterodera glycines
atgattcatcataaaaccgatcgccttcaactcagcgtctcacgactgtatggaggaaaacgaccattcgacgagttccgttttgtggacggcggatactactcacacatggtgccagaagatgtgatcttcctccaggccgtgccaaccgaagaaccgaaaatcataacgctcgatgacacgccaacaacagaaaaaacggccaccgacaacgcaaagcagccaaaccaaccaaaaacatcggcacccacaatcgaagagtaccgaatggccgaccccaagccgaacaacttcaatgaattcaacctgtttgagccgtgtgacgactctcacacaacctgcgcaaaaacggcaacttacggatcaatcgccagcaaccgatttcaaatggaagagttcaacaactgccgcgcgaccaacttcttccaagccctaatcttcaattggctcacccggaacatgaacctgccagctgatgaaatttgggcagctcacgacaactacacacaactcaacgtcgtaacggaagaaatcgccaaaaagttccaccagcaacaagtcgtcagtaaaagacgacaaatcggacgcgaccagcacttgacagaggtcatcaatgtctggcgtaactcatgcgatcgcttcggtgagctctacaatcaaccggcacacaaacaagtcaagtttcgaccaatcataccagaaaaggagcaaccaagtgactacgaggaatggatcgagcgactcaacaaccgaacggcggaaatcctcacaaaagctcgagcaaaagtgcagcacccgaccttcttgaactacaattgcacaaccattctcatcggagacaacgtggcagaagtgtttaaaccactcttctatgacgccaagtggttcacccatttcccagcagacgaattccgacttatcccgggaccaaaggtcaaacacatgatctttgcctaccaagcaactgccgacaacatggcggctcaaatcgcaccgatgctccaccgatttctgcgatcagacatcgaaatcacactgatcgtagccaaggacgacaatgcgcaatggatcaacaacaagaagtacctgatcgatatcacccgcgaattgaaagcgggcttcttcgttttcaatcgagaaatgggagaagcaagacaaatcgccaaccggatccgacaagccattccggaaccaatggatttggaacaagagctgggaccatcgtcgtcaacaaacacgtcccgacaaggtccatcaacaagccgacaagtgatcagctcgctaatgctgatcagcatgttttgcctactcttcaccggcacggcacaaggactaccaagtcgacaaaagcgaattacgcaagtcaaagcatggcatggcggccatgtttcaaatttcctcaacatcttcacggagcgcgaccgacgggcatcaacaaaatacagtccttacgtccagcgatacatagacaaggttctagcactgaaccgaagtctgagccaatcaacaaatccgccgacatcgacaactccgccatggacaacgacccaacccacaacaaccacaagtcgtccacgcacaacgacaacaaccgcgactacaacgaccacacgcacaacaaattggccaaccagatcaaccacacggccaaccgcacgcacaaccacgacatcgccaatgccatggtcaatggaccaccgaacgacaacagtatcgagggtacggcaacaacaacggccccgtccaggaatcaaattgattcgctggcccaagagcacaatcacaaccgaaaaaggacgcgacgtcttctggtgctcgaatcacggcagcactctctgggaacttaaaggtccggaaaactcgccattctgccgtccaccaccggcacttactgcgcaatggacaccactgaccatcacactgtacaccaagatccaccggccggaaccaatcgcaacggcatggcactgctccatcaaaacgacgacggaaaattattacacaaacatcgtcggcgataagttcgtcgaaatcaacaaagaatttccgttggtctccaaacgactctgccaacgaatggcacatcagcaagaatgcccactcgccaaaacggaaatgcaccacgatgataacaatcgtatttgggcaacaaacgaccaactccaagtggatttccctggaccaatcaccggactcttcaaagggaaacaaaccagctcggcaacaaattgctttgcgcaaccagcaacactgttcgtcaaatggcacagtctccaactcctgtcgccaatccatcgcgcagaccactgcaattacgcctccgagtattgccaactgcaagacaacaactcactcatctggacttcagcatgtccaaacgacaactgcttcatgtgcgacttccaagaagccgaagaaatccacggagaattcaccaagctcaacggtcaaacaacagcattttggatctcggaagaccgacaaaaggcactgaccttcaccgagacacatgcagttcaagcatgcgacgggagacaaatcgtcctatcggagcagaacttcggcattccaaaagagcaatatgacatcatcatgagcaaccacacaagagagagacgcaacgtgcaacccgagcaactcgcttcgcagctttcagctgctcaacttgccacaacaatggcactctcgcagctctatttgaaggaatgccagcgtaatgtgcgtgtcagcaacccaacgcttcagacacggaaactcctcaagcgcgataatctgcaagctcgatggatcagcgaaacaacaatcgaagtgtttccctgcgttccaatctccctctcgaacatcagctaccgaacaacaaaggactgctacaagttcattccggtcacaatacatttgccaaacgcaacaagagatgcattcctcgacccggagatgcgcatcctctcactcatctcaaagatcgcaagttgctcaccatttcgctaccatcaccttcaagtgcaacaaaacccaaccttgtgggttcgaatcgactcacgaaatggaaacgtccaacgactgtcacaaacagtcatccatgagctctacgagacgatcctcaacaaaacggacaacgatttggatctccacccactgatcttccatcagtggcagctcgacaacgacaccgatttcgccagccttccgcacatcgacgaattcgaagattcggaagagttcaaaaacaagctggaacagcaaacaacgcaacgagcgcaagcactcggcgccttacccggcggaatcgaaggatggaccatcaaatggttccaagaacggctacaggaaaccattcaatggtggatacgtctcgcctcagcatactccacattcctccttttccgagacgtcatcctaccatgcttaatcgcctacttcctcaacccaatccgcatcacactcatgactctgattggatttcgaccaaaaaatcagccaacgcctcaaatccaaccacaatacgaggacatgccattgcgggagatgccaagcactccgatccggcggaaacgacgacaattgccagagcaatcgactccgccaatccgactggacacgacgacgggaacggcatcattccgaacacgagcgagagcgcacagcgcaacagaggacacgcccttcggacgcttgcgaccgatgaaactggcggacgactga

SEQ ID NO: 69859 - DNA, 594 bp, Heterodera glycines
atgagtggcaccgataggttgccaagtatttctgcaaatgaatcattttcgattgattctgatgttgccagacgtttttgtcaggaaaacagagaaattgttcaggtgattattttaacactagtctttgaggattttcttcatccggttgttcctttagatttgtgcgttgttggcgtacaacaaaacatatatcgaattgttggatgaattaattgccaaagctgacgaggccgtaagacataacagagatgcgcaaaaggtggtcaaggataagctgcttcgtcctgataacaagccgggaaaacgtcgacggagaaaggatttcggactgcactaccgatacccatacttcagagatgccagtggaatggtaccagcacaaaacatggagtctttggagttgtctcgcgtctgttctttcaacccactgacggaagaagaaaaaaagtgtcagttcattaagaagcttattattgtttttgccgggctcaacttattgttacacttaaattaattaattttaaagggacagaaaaagagttgagggggttgcgagaagccgtggcgcagtcgctcaatgaacaacaaata

SEQ ID NO: 69860 - DNA, 757 bp, Heterodera glycines
atgagtggcaccgataggttgccaagtatttctgcaaatgaatcattttcgattgattctgatgttgccagacgtttttgtcaggaaaacagagaaattgttcaggtgattattttaacactagtctttgaggatttttttcatccggttgttcctttagatttgtgcgttgttggcgtacaacaaaacatatatcgaattgttggatgaattaattgccaaagctgacgaggccgtaagacataacagagatgcgcaaaaggtggtcaaggataagctgcttcgtcctgataacaagccgggaaaacgtcgacggagaaaggatttcggactgcactaccgatacccatacttcagagatgccagtggaatggtaccagcacaaaacatggagtctttggagttgtctcgcgtctgttctttcaacccactgacggaagaagaaaaaaagtgtcagttcattaagaagcttattattgtttttgccgggcccgtccgggctcaacttattgttacacttaaattaattaattttaaagggacagaaaaagagttgagggggttgcgagaagccgtggcgcagtcgctcaatgaacaacaaataataaaattggatgccaagtgatttaatttttatcaaagtctttttcaaatgtttttgtttgatagaaaggaggttctctatcggaaattgcgaaccgctggagttgagacgacagacgaacaaatggagaattggcgtggggaagtggagaga

SEQ ID NO: 69861 - DNA, 1526 bp, Heterodera glycines
atgaaccccaaaaaggacgtcgtctttcgtcattttgccaaaaattacttgtgttgtaaatcacgtcgaacatccgtcgttgacaaattccaacgctatctcgagactgaacagcaaagccaaaaaaatcagctgctctctcgactgggacttggtacttatatggtggattttgcagattatagtaagttgataagacttacaagcagaagcattatacttattttccggatagtttaactatgagttataaccacggtttattttatggaaatttgtattttcttctttaatcgtgtttaagcaaattaaaatttggttaaagaaaatgacaaaattcaatctattttaaaaaaataatacatttgacttaaatataaaaaggattctttcagttagcgccttaaaaatgccttttccccgaaataacagattttgacgctgatgcattaagcatacaataccgatatttagttcagtttggaaaacgagaataccaaaaattgcgatttctcaattttagccacggttaagaattaaccgcaagttagggaatgaggcctcagctgttttatttatgcacccaatttagcggacgtgaaaaaggaacgtgctgagaaatttggtcaatggactgtgaaggggtcaggaagatgggttcgagcgttgatgaaaaatccaaacgaatataacagtgaagatctgatggaagagttggacaaactgcccgaagaaaaacgggaagaggtaaaatgagggacaaacaaccattcccgtattacataatggcattatcaggctatcgaatggcttcacaaatcggatgaacgattagagcaagaaagacaaatggaagagacaataccggaagacccagtggaagcgaaagatttttacgagcgaatgtatcccaaagaacgactcaaagaactttcggaatttgttggaaaattactgaaaccgacacaaaagtatggttgtaaatgaacaaaaaatttaaaatatacgtgaactttgttaagtgatattgcctactttgagcggcacagagttcgaccaggacacatgaaattgaggaaggtaaaaggcacacaaaagaggaagggccagaagcggagaagcggagaaagaacgagaggttggcgaggaagctcaatggagaagacatcgaggaaagcgacgtcatcggaatgcgatggtccgatcggatgatcgctgaaatcaacaaaagtctcgaggaccttccgcaggtgttggtttatccaataattccaatacaaactcacaatcagctgatttccatttaggaaaaacgtcgtgaatttgtggtccgcagtctttgcaacgcggtccgacagcgcgtccatcaaacgaatgtcactctgctgaagtccaagcctgactacagagacaaagtaaagacactggtacacgattacattgaacaggtggtcaatttaagtcgtttttctgtgattttacaagatttaattcaggtggttaacgatccaatagtgccaaagcca

SEQ ID NO: 69862 - DNA, 260 bp, Heterodera glycines
atgagttcaattctcttcttccgaatgcgtgaccaatacttaaacttaaacccaaacttcgcgcaacttttagtgagcgtagaaagaatgttggtgaggagaattcgatcactgcacaacaatgaaatggttttgccttgggcgttttctttttttcgccgggattttaataaatggtttgtttttaattaaaaaaaactgaaactatataaaccaattttcagtacttcctgcttctaattccctatttcgtctattaa

SEQ ID NO: 69863 - DNA, 112 bp, Heterodera glycines
gctggttctccattgccttttaagcgccccctcgggatgggaggagccctatcggagagataaaatgtggggggggggaagggtaaaggccatttccggtcccggccttaca

SEQ ID NO: 69864 - DNA, 1504 bp, Heterodera glycines
  unsure (1)..(1504): unsure at all n locations
tttttgtcacttgtttggtgtgcttgataacaattgcaaatgttctcatgggatgtgaagtatgtcccatattgtaaaatcacatttatcaattaatataaaaatcaagtcgcaattcgtttagcttgacctcaatgttgttttaacatcggtaaaaagaccggtggctccagcaattggcttcttcactcagtttatcattatgccattggttagcctttcgaatttgtcaagaatttgttcctattttaatttgagtgtcttgtaactttagttgggctacaccatcgccctgtttctgttctccgatgataaccgtagaacccatttgctggcactcggtctgtttgtcactggctgttcccccgggggaggtgccagtaattattggactgtcctactcaatggaaacgccaacctgtccgtgacaatgacatttctaagcacaattggagcgttaggttcgtcatttggttcccctttcgaattgccctttttatcgtcttatctctcccatttagttgccatgcccttttggataaatgtgctcggaagtcgaattctcaagtcaatttacctgtctaccgactttgcgactccctccgaaagacgttccgtgtttattccatatgccaaaatagtggcctctttgctcatgttggtcattcctcttctcattggtctgacaatcgccaaatacaaaccaggaatggccacaaaagctaaaaaagtaagaaggaccatctatcaaaacattaaattttttgtaattaagctgatgagacctttcatcattttcgttcttgtgttcatcattatctttggcatctccattaatttatggctttttgctcaaattacttggaccgttcttttagcgttagttttttaatttaatttaattgcacttaaatataaaaatttgtcagtggcctgcttttgccatggtgcggcttcatgttcggctgtttctcttcaataattttggcacaggcgcctgctgatgtcactgctattgtaaaaacattcaagcgcatgctttaaccattttaaaacgatttatttaggctattgaaactggcgttcaaaatactgggatcgcaattatgctgctaaaagtaaacgattgtctcatttataatttttattcaaaattaagttgtcttttcctggcgccgactcggaccttgcttcggtaaaatggttccatttaattacattgtttggttcactttttgctactctcttaagcttttgccaatttctgtcgcctgttttacgcccggccctcttctgcttggctatgccatcccttcggcaattaaacgaattcgcgcaccgcggcacgacgattcggtaacaattcgcgtgtcgcccgactgtgacaaggtgctcatcaacactttgtcagcagccacaaaaaatagtgtcattgttcggtaggaataccaaagaagaacctcatgagcttttgacttcacacagatctgttgactntttgcgt

SEQ ID NO: 69865 - DNA, 2817 bp, Heterodera glycines
aaaatgcgagaagaaattgagaagaatgaccagcagaagccggaaaaggcaattgaaacgacaattagcgcaaagaaaattttgatggccatcgattgcgaatatgttggagttggactgaatggagcggagaatatgttggccaggggtaagaaaatggagagaaattacttaattgcaaagcccatgcaaattcagtatcaattgtcgacgccgaaggaatcgctgtctatgacaaatacgtcaaaccggtgggtggccaacaaatttgaacttgacaattcgaaatggaaccgaataattctttcattttggttatttattggaagacaatgttttaagaccgaagaagtggtcgattaccggaccaaagtgagtggcattaggcccggccatttgctccgtggcgttccctttgtccaagtccaaagcgaagtgaggaagctgctctcagacaacattctgatcggacactcacttcgaaacgatttgactgtacgcatcattttctttatttggttgaattttcttttttctaaggttcttggcctcactcatccccccaaacttatcagagacactgccaagtttaaattgctcagagaaacgctcgacgactccacaaaaacgccttcacttaaactgctcgcgcacaatttgctcggtgttcaaattcaacagggcgaacacgactcaattgtggacgcaaaaattgccctgagaatttatttaaaatatcgagagaagtgggagagaacgctaaagaaaggaggcaaaaaatgaacggagagaaagagagagaaagaaagtcagtgaccgattattttgtttttgttgtttgttttgtcaaaattgcgattgcctttcattttcaaagtcagaaaaacactgtaaattataaaattcctaaaaaaaattcaatacaacgagaattataatcggtgaaatatttagagattttaatattttttacttatttcatgtttattttaaattgtaaggctatggaacaaaacataattttgaatttggaaaattcccgtcattttcaaaatccattcctgacaaatatagccgacagctcccgatacgttagtcgtgattggattttgcaaaagttaaatgaattggcgcaacgaattgtaaagcgaagaattccgacgagtgaatacgaagagggtaagacattcgaaatgcgcgcgattctttcccaattcattcccttcgttttcatcagatggtccttacgttggcccctcgggcattgcctatgctttggtcagagtgatgcgacgaattgggcaaaatcagtcaaattttggcgatggcattcggacaattttggcaacccaaaaagactttctaaatcatcaagcgaaggtgaagcggctgtccaaatttagttgaaacagtgaacaatcagatgaaatccgactccggcccgcacaaatgccgttatttgaccggcactttgggctttttaacggtccgaacggtcgtcgattttcacctgtccaacggggcggacatcgcctcgctctcggcacactttcgcaatttgctaccaattgttctccgtccgggttatcagcaaatcggggacgacgaaatgctcaatggccgtgccggctttctcgcctctttgcttgaacttcggtgggtgcggtagggtttcgtcaattcttacatttatggggctttttcagtttactttttggtcaacaattactttccgacgatgaaattcgttctgttttggatgctatggtttcttccggcagaaaatggtttcttccggcagaaaatactccaaaaagcacaaatctccggccaaactgatgttcgaatggtacaacactgaataccttggcgcggcgcacggcgtcagcggaatttaccaaatgatgttaaggtgagtgattggacagacgaagtgtgatcaatcaatcatccgtcatttggggctttattgtatgcattttgcagcttttgggacttgttggatgcttctgcaaagtcggatttgaagcaaagcgtcgattggctgttgagcacccaattttcggatggcaattttccctcgtcgtccgatcgaatcggtgcttttccatttgtgaaatttgacacattcttccattcatattttatacttcaatttcctccgcaattccaaaggattgtctgaggaactcgtccattggtgccacggcgcctccggcgttttgcatttgctcatcgtcgcctctttggtgtttaaggaggacaaatatttggaggtcatcgccatttattgcccttgggaatgccaattttatcaaaattcagtcggctgaacgatgtgtcaatctcatctgggcccgaggaattctgcgaaaaggacccggcatttgtcacggagtggccggtgaattgtgagagaatttagagagagagagaaagagagagaaatcgggcgggtgaataatagcactgaataattattaatttaattaaaaagcaaaggcatttccaatgtttgtgttgtcttttcaggcaatggctacgcttttcttctcctcttccgactcaccaaaaatgacaaattcctgcaaatggcccattggttcgccttcgtaatgatggccccctcttttgaggtgtgtctcttcctttgctgtgcctttctgttcgaatcgctccgtccctttcccttaggcgtccgcccgtgtccccgactgtccgtcgagtcttttcgaaggatgggccggcgccctctgttttctcgccgaccttttggagccaacgacggcgcaatttccgctgcttccgattcccttc

SEQ ID NO: 69866 - DNA, 481 bp, Heterodera glycines
tctcaattcagtaacatcggctaataattttgaaatgtccgcttgcatctgtccgctgtgtgatacgtcgcttgcggcgggcttggccaagttggcaaagtgccaacacattggccatggcccgtgtctttctgcccatgtcagcaagcatggcttttgcccatttttcaattgcgcaatgccgacgacggaggacgaagtgttgctcattacgcacaccgagggaaaacaatccaacaattttgctggcctggtttggcattcttttgagaaacggggaaatccattaatttattaattaaattgatttaattaccaaatttaattggccatttctaatttataccccctccccaccctaaggctatttaaaacattttttaaaagtaattgtcggcacagaaaaacgcaaatggcaaaagccgaattttctaacgaatttataaatttgtgcacagaaagatgccaaaaatgtacgcga

SEQ ID NO: 69867 - DNA, 513 bp, Heterodera glycines
atgagattattaaaatttaattttgtccattattcgacaattcgtcagagtaagttgtccccacagagatgttgatcgtttcgtgtttcgtattttcgtgttttagggcattttgtgttcgtgtttcgtattctgacacgaaacacgaatatttttatttactggcatgattggggggggggaaagacagaatgttgtgaattgcacgaacgcttggccaagctaaaagtgtatgaacgcttggacaagacaaaggtggccaagaagaagaagaagccgaagccgaacaatttcaagcagcttgacgccgacttcggcaaggccatgatgacgaaaggcccggtgtttgtggaggatttcatcaaagctatcctcctctgaaatctgatcacttgctaatgacgtgctaattaatgggggagaaggcggtaaaacatacaaacataaaatgaaaattgaaattttcaaaaaatgaaaacccgtggaaaaaaattgaaaaatattttcattaaa

SEQ ID NO: 69868 - DNA, 220 bp, Heterodera glycines
atgccgtcgtgtttggcaccgttcgttggcaaatgcgaaccctgcgtccccgagcagtgcaacatgaagagcatcgaactgcactatgcaaacaaatcgttgccccgacagccgggtgataacggaggaggcaataagaagaaggacaacagtgggggccacgctgagggcgtggctgtcacggcaattattggcatcgctttgctgacgctttttggcg

SEQ ID NO: 69869 - DNA, 1133 bp, Heterodera glycines
atgccgaggtgcgcgagcgaaggtcggagcgaagcgtagcgacttgccaaaaggttagagacagccgatagcaatgcttgaacgaaaccgcctattttctattattttaaaaacataattttggattaaagttttctcatgccatttttctgtgtttcaaattttcaattatttctggtttttgagcctcaaaacaccattagaattcattttcgagttctaattcgaaattcatccgtgtctgaattgccgaaattgtaaaaatgtcagaatttttgcaaatttagcgattttaatttgctgctgactccccttgccacctgtcttctccttctccttatgcttacgtcaggcttctttcgtttcaaaatgccaataatattaattatcaattttccatttcgcattctctcggcgattctttccatccaaaaataatatttattcattcatttacaatttcctatcataatgaatctatttctgcgcctattaatttttagtcaaattttgaaatttaatttttcgaaaggggcaaaggtggagaaactccgaattcgcgttgaatgcaaaagtgagaactcaaatcgggaagtcagaattgatttgcgcgtgatttacgggatcaatggcaaagtgtctggaaaaacacaaatgaacataaattgtgccgaggaatttggcatttatttgaacaaaaaagttgacaaagacagattcaagttcaattttgacatttttacgaaaccatttgacaacgaaattgtgccgtcgaatgaaagcagcgaaaatccccaaacagagggagaagaacagcaaattgtggacgacatcctccgctaagcgatacacagagtcgtcaaagtcgagctgttcaggccgaacttctcgcggctgtacgtggtcaatttgggcagtgccgaccccccggggcggctcaattggaaccgaagggtttttgtagaagcggaaaacgatacgggcaattaccacgcttttgtgtatgctgctgtggacaaaaatgagcgaattctcctgggatttgcgccatttgtgaaaattgagaatggcaatgagtcaaacgcaccgcaggcaaaaaaaacaaaaaaaaacggatgaaaaaaaattataaa

SEQ ID NO: 69870 - DNA, 885 bp, Heterodera glycines
  unsure (1)..(885): unsure at all n locations
atgttttattacaaggcacatttaggtttaaacaggtccaatttccgatatgtccgttgtgcaaacaaacggccaaatatgaaacggtaaagaaaacaagccaaaccattcataatagcacattttaaaatgtaaaatttcagagttattaaatggcaatttatttctaaatttaagtccggcacattcccaccgatttttgagagttctgccgaaacattttcaaattttcatatgaattcaattggagaattatttcgaattgggagagaagatgaaaatgagtttttaaggacacaagcaaaacatcagattcaagcaatcgttgaccagttaaataattcggcaaaaaattacaaaaattttctgagcaacacaaatttgaaacatttggtgccctttttggaacaaaagttttttgaaattggaaccgatggatttgtggagacagaaattgtcagacaaattcgaaatttgttggaaaattttattaatgaacagcagcagaagggtggaaaggaggacattgcaattgcacgatatttgttaaaattggcttcagcctcaaaaattgccccaaaattcgcnaggcgaataacgcaattgaaaagctgaaaattataagggaagagcaatgaaaacgaaagaaagaacaaatgagcattttttgttgttaatttttaagtttctgttgagaaagaaaattttcaacaatttcattttccatattttatgataaattaaattcattcaagcgaatgattaatttaaaaatggaaaaatatttaaaaatttatttaattaaaaatggtagataaatttagggttgggcccgggcagacgacacctttgtcgggggcaaaattttcataaagtcggaaaaaa

SEQ ID NO: 69871 - DNA, 775 bp, Heterodera glycines
atgacaaaacctagaagtaccaaaaattcttttaaatttagttttcccaaaaaatatttaggaataatttcatgttaaactaaatttgtttactgggaggaggcgaattgcctgctccttcattaactacaccaccttcttttcctccaggaaccgttttgccgacaaatccgcgtcaacgccgtacgatgggtggcactgctgcagccactggaaagcagaaaattcaaatagataaacagctgattcaaggggcccgttaattggagagtccaggtaaacaaattagtgaaatataaggggtaaaaattaaagctgggcgaaaaacccgggctttcaataaatgccctccgccacctccatgccgtcgatgggcgaaatggtaaaggaacaatgccgacggcgacagtctaaacagaagcagcaccgtcgcccattgttgtggcggtcgcatgcttcggtgccgttttcgtcattgatttggtgccaaagtttttgtgggccatcgaccggcgccgccgactttgccgattgttgagacaaaagctccatcaaatttgtactgttgtgcctttgcataaaaaatgttcaaaaagaatcgagtaaaatggaaaaataaatatttgaaagcaattaactgtccataaaaataacataattaaattaattattttaggaggaatgaaatcgaaaggaaaaatgaagtgaacaaaatggacaggaaagaattacaagaaaaacaaatattttggctcatctgagactgatcgacaga

SEQ ID NO: 69872 - DNA, 319 bp, Heterodera glycines
atgcgaccgccacaacaatgggcgacggtgctgcttctgtttagactgtcgccgtcggcattgttcctttaccatttcgcccatcgacggcatggaggtggcggagggcatttattgaaagcccgggtttttcgcccagctttaatttttaccccttatatttcactaatttgtttacctggactctccaattaacgggccccttgaatcagctgtttatctatttgaattttctgctttccagtggctgcagcagtgccacccatcgtacggcgttgacgcggatttgtcggcaaaacggttcctggaggaaaagaag

SEQ ID NO: 69873 - DNA, 442 bp, Heterodera glycines
gaggagacaacgcaaggattgtttgaagacaacggacttggctgatgatcgaccacactctaatcagatcagcagaaaaagcagtagcatcaatcattttccaacttttttcttccctaattaacccatttttcgtttcaatgtccaacaaaagttgtattttgtgccaaaacaccttaaattttcgtttatggcacaaaatgacaaaagcattttgttcaccgtcccttaattacctgaaaatgtttttagttcacaccaagcctaatgatcactaattctaattacctatcatttcttttccgtgatataattgcactgtcttttttattttattctgtcgatcagtctcagatgagccaaaatatttgtttttcttgtaattctttcctgtccattttgttcacttcatttttcctttcgatttcattcctcctaaaat

SEQ ID NO: 69874 - DNA, 338 bp, Heterodera glycines
atggaaatggcacaagatggattgaaaaaggcaaaggctgttaatgatgggcataagaaagaggtgccggcggctgacgctcaagagtcttgagtgccaaaaatggattttttcaattaattattatttcaggcagataaatctcatgccagtccaaaattagatgcaattggagtttaatgaaattattaacaaacgaggagtcacgggggttaattagtgagcgcggtctcgaagcgatcggaattttagagaaatgccaaatatggtaacgatgagagtaatgatgctcgagagtctcgtagaagggccacatttcgaaatatgtgcccattaaa

SEQ ID NO: 69875 - DNA, 288 bp, Heterodera glycines
atgccaacagccggagaaattgtgcacgaagaaaggcagcaggagaagatgaagaagacgaactttgaagaagcaaaggaagaaaaagggagaaaaggaacgattaaagggggaggaagaagaagcaaacgaaagcgatgccagcgcaaccgaactgcttcatgttcatcggaaaaggaaaagcaaacgcagcaattcgatggcattggcggtgccacaccgccgcgacagaaacggcactttcctcaagcggcggtggtggacaatggcgccagaagagtgacaaaa

SEQ ID NO: 69876 - DNA, 627 bp, Heterodera glycines
atgatcattgtgaatattgtagagtaagtgacaaaaaaaatgggtgaccacaaaataaaacaacaaaaatatgaattgattttaatctcttacgaataataataataataattttcacataatgcgaaagtttttacggtattaaaaaagtattaatgacacctcgtacaattgctaaggctaggcctaggcatagacttaagcttaggctttattttgtaaaatctgtgttgacttttatacgagttgccattggccccttaaaaaagttaatttccatggcccaaataatgacctaataattgcaaaaagggaacaatgcgtgtttagttaacaaaaggtcaatttagcaataaaaagttggaatactctccgaaaagtttggaattcgtctttaaaaagcaaaaatttcattttcattcaccaattttacgatttatttatttaaaaaatcattcattttaaaattatttatttttttttacaataaccagtaataaactacaaattattatgaattaatgaaattttagatcacaacgatcacataaaaagaatattttttttctaaaaatattccctttttttataaactacaaattataaaacgtaaaatgtgttaataaa

SEQ ID NO: 69877 - DNA, 512 bp, Heterodera glycines
atggattttgcaggctgcaaaacggatcagattttggacatggacatgttcctctacgacacacaaccagctgtaagcaattaagcgaagaaaaagcatcggtttgaccaccccaattattttttaaatttagactctgtccggactgaatgaagaattcatttccggcgctcggctggacaatttggtctccacgtacaccgccatcaaaggacttgtcgaaagtttggaggacaccgacgctcttgacgcggacccaaatgtgcgaaatcagtaattgtctcaaaaatactgaatccggtcgtcccctcccctccccccccccctcgataatttctccctcccggatcatttcctccctgaaaacttacatttaaacagaatttttttttcactaaaaatttttgtttaaaatttaattttaaaaaaaaccgggtgaaacaatgtgagcgaaatgaaatgcacccgtattcggggacatgttcagaagggatttgggcttggacaataaa

SEQ ID NO: 69878 - DNA, 401 bp, Heterodera glycines
atgtcaaaagaaagggccactgctattgttgtgttttgttggtcagtgttttgtgcttttctttctttcccattgtttttctcttacttccatttttcttcagtcttcttctcatcgctgctgctattggacttgttttgcttacgctgtatcttttacagaggcgccaaagaaaggctttagctgcgaaactgaacgctctacagcaacatgcatttgacccagtaaacgcagagtcgtcaatgtcgcttaatgctgaacacggagtggaagtgccggattccttacgctcgggagattccgatgaagacgacgacgaggactacgacgctccacctgtaatttcgtctcgtgcaaaggcagcgccgccacccgttaatgaaaaggcaaagaaaggatag

SEQ ID NO: 69879 - DNA, 673 bp, Heterodera glycines
atgaatttgtggcatttattatttattatatttttctttatttttgtaattaaatccggcaaaatccaaccaaattttgaagaaatatttggccaaagatgggacaaaaatgaaagtgaagaaattgtgataataaaaattgaacaaaacgaccaaaaggagcaaaatgaaactacgggcattgatcaaattggtggagaaaatggaacggacccaaatgatcaacaaaaaagacaaataattttgaaatttgaagcaattaaagaaaagctgaagcaaaaaggaaaatacaaaaggaaagaccaaggcaaaattgagagaaaaattgcaaaattattaggagcaaatctgcaattaatacaaaaatggaaaaatgaattaaatttaaataaaaacaaaataaaaaaacaattatatgatgagaaaaagagagaattcattgaaagatttgatgaatttaaagaattatatggccaaggcaaacagaaagaatttgcgaaggaattgggcatttctgaagacacatttcgaaagtggaaaaaagaattggcaccaaaataccataaaagtcaaagtagaatataattttagtaaagttaaatctaatttttatttaagagcaatataccaatgcggacaaactgaaaaagatgaagcaatattttaaaataaa

SEQ ID NO: 69880 - DNA, 513 bp, Heterodera glycines
atgggacaaaaaagaagagaagaaaaagtgataaaaattgaactaaatgaacgaaatgagaactcacaatcagcagttgatcaaatgggtgaagaaatgggaaatgacccaaatgatcaaacgagaaattacacggacagaacctttttaaaagtgatcagaatataaatgatcagcaaaagagagaaattgtcaaaaaatttgatgcaattaaagaaaaattacgtgaaaaaggtaaatacaaaagaaaagatcaaagcaaaattgagaggaaaattgcaaaattattaggaacaaatcggcaattaatacaaaaatggaaaaatgaattgaatttaaataaaaataaaataaaaaaggaattttatgagatgaaaaagagtgaattcattgaacgatttgatgaatttaaagaattctatggaaaaggcaaacagaaagaatttgtgaaggaattgggcatttctgacattgataaaatggaaaaaagaattgttgcctaaatacaataaa

SEQ ID NO: 69881 - DNA, 164 bp, Heterodera glycines
atgtgtcaagaattagcagaagaggccaaacaatcaatcgaaatagccaacaattatcggcaagaaattgggcatatttatcggaccgcttactcgcagccagatttaggtattggagatttggcaaataaactaaaagaaacaatgcgcgaaaaccaaatacg

SEQ ID NO: 69882 - DNA, 458 bp, Heterodera glycines
atgcaaagaatcgctgaaattaaaaatttcgagattattgaaggcggaagagtttttattgtgagagtgagaattgagaacgtagtacatgtagagtacagggtttgtattaaaaatgaaaaaaatatatcagttttttaaggcttgcgttttatgccgtaagggggtgtgttcatgtggcgttgagaaggcactgacaccttatttgaaggtgtctgtggcagatgatactgggattttggaaaatgtggcattttttgatgtacgtgggaagaaaaacggaatggtaatgttttaaagaaaaaataccattctaatttaaattcaggaggagttgagaggattgtctggggccgtgtgcaccatgaaaatcggcgcgagggtgaaagaattcggagggaagaaggggatctattactctttgattgatattgtcagcctttaaatctataaataaa

SEQ ID NO: 69883 - DNA, 59 bp, Heterodera glycines; identical to SEQ ID NO: 52421

SEQ ID NO: 69884 - DNA, 59 bp, Heterodera glycines; identical to SEQ ID NO: 52422

SEQ ID NO: 69885 - DNA, 59 bp, Heterodera glycines; identical to SEQ ID NO: 52421

SEQ ID NO: 69886 - DNA, 59 bp, Heterodera glycines; identical to SEQ ID NO: 52422

SEQ ID NO: 69887 - DNA, 59 bp, Heterodera glycines; identical to SEQ ID NO: 52422

SEQ ID NO: 69888 - DNA, 59 bp, Heterodera glycines; identical to SEQ ID NO: 52421

SEQ ID NO: 69889 - DNA, 59 bp, Heterodera glycines; identical to SEQ ID NO: 65013
  unsure (1)..(59): unsure at all n locations

SEQ ID NO: 69890 - DNA, 628 bp, Heterodera glycines
atgttagatttaaggaaatttgtctcttttgcgtacgacaaatccccctcagggttagtcgaacgtaatgcacggccctttccttaatctctacgttccctcttctcgctttttaataaaattctcccatttatttgtaagtgatgaaaagccaccgccaaagaagtatctgaagactgagaaggcacccgtggccaaaaaggagagaaatgcaaagaccgcaaaaccagcgaagaacagaatcgaatcagactctgaagaggaggaagtgtcgttgagttcggaaagtgatgcctccgtttctattgatgatggcgacgacgatgattatgattgataacaactgtttaactcttccctcccccatattgcttgtgtattttcgattaaatcttcgatctcttttggccagctgacttatttcgattaaatttcttttttttcacgtcgaacctggttctatacttccttagtttatcgataattggtctatatgttttggtgtggcacacttaattttatgggcccatctctgctggttacgtcttcgagtgatcgattcatatttccttccccccatttattcgtcactcaaaacgactaaaaatgtaaaaatggggagaggaga

SEQ ID NO: 69891 - DNA, 569 bp, Heterodera glycines
atgcgccgcataaaagtaagtgaaaagcaacaaaaaacgcccctgcctcgttccatggatggtaaaaaagaaaaaaaaattggcaaaaaatattttttatggataattatagaaaaaaattggccttctgtcatatttactttttatctttatttctctcaattttatgtactatctcttcgtttttaataatgtaatgaacaacatttaggtacttcatcttgtttaactttttttctgcttgttaaatccacaccaaattttacatatcgatagagaaaaggaaaatgtgcaaactttcagtgttttgagtaaaaattttggcctagaaagttattcaattcgcatttatctgaaattttttaaattttttattatggctaaaaaaataattgcttaagcttcaaggcagaagaggtgctgaacaactgaaaaggcgagaggaaagaaaagctcagacggagaaggcgagacaagcctatctggctaagaaaagtatgtttttcaacggatttttaggtcctaaaatatttcaaactaatttcagcagtccaatagcaacaaattga

SEQ ID NO: 69892 - DNA, 139 bp, Heterodera glycines
attattattttcggaatggcacccgtcaaaaaaaggaaaaaactttcctccaccgaccaccgccgccccatttctgcaactgttacaaatcaacagaaaccgttgggttcttttgtgacatttggaaaaccggcgaagt

SEQ ID NO: 69893 - DNA, 138 bp, Heterodera glycines; identical to SEQ ID NO: 50950

SEQ ID NO: 69894 - DNA, 640 bp, Heterodera glycines
atgcttgcaccttccgttttaatcattcttttatttggacttagtttttccatcaaagtagaaaagaagaaagagggcataattgtgactggccagtaagttaatgttatttttttacataataaatttagtccaaaaaattatgaaacactaaaacacgggctgacaaatctagaaattatatcaataaaaggcttaagcataggaccttctctcgctttaaacgtgctataacattttcgaaatagatgctaattatcagtctcggatgccattcgaactttattgtcattaatcaattcacagcccgtcacaatcgccaaaaatgagccctacaaatgttttggtggcaccggcttcaacacagccattgactccatcattggtaacaatcgcttcgccaacaacagtctcttccgggttcgatgttggcatcattatcttgctcttttgcattttgataatcgttgtcattgtgatgtgcctactgtgccgtctcttctaccgtactcgacaacaacagttcgtgccatcaaacattgtgccatcgccaactgtttcttcgccgcggatgccttctgctagtgtgctattgccaataacaagttccgtgccaatgccaatcctcatcggctgctga

SEQ ID NO: 69895 - DNA, 1322 bp, Heterodera glycines
cttctaaaaatttatattgcaatatttttgcaaattgtctttaacaatttgtttttgtcatgccatccaaactcagattattcagaatgtggcatttcggactttgagcctctgttggccaatgtgccaaaaatggaaatcggaacttataatgtaaagacaaagaatttaattagtttaattgaaataatttattctatttctttttgaatgaattaattaacaggtatacttgggacaagcggttgagaatgacaattctttgccgtggatggcctcgcttataaaaggaggaagtattaattttattataattaatatatctccattatgaaaaaataatagctaaaaattgaccgtttttaaaatttaatcaaatttttaagaatttaaatgctccgcaacaattatcgggccaaatcacattttgacggcgatgcattgtgttaagggcagagattttgatattggtgagaatttcagaaacattattattaaatggaaagtattttataaatttttaaaaatttattcaattttagggttttaaaatagtttaaaaaatgccgaattaaatttttaacagaaaaactccgaatttcatacgggaatgaatatgtttcaagccaaccgtataaatctgcagttgtttccatacaattgtatccaaatgcgaaatattatcgaatttatgataattttggcgatgaaacatcaagggcagatttaattttgcatgacattgcaataattaaagtaattgattaattaaatatttatgaataaattaatcattcaaatttatttagattaaaaacccaattaaatttacatcaaatgttcgaccaatttgtttatttggtattggtggtaatttttaataagtttaattcaattaaattaatattttttacccaataagtcttaacacaataaactcccaaaataattttatatttaaaaaaaaattattttgttagttttttgtaaaaaaaaatgtttaattgatgttaatatattttttgtaatatttttacaaaatgatttttaataatatttggttttcaatgaaaaaacaaaactttaagattcaacgcgcgcaaaatttctggtgagaaattcaaaatcagaaactaccaaatttattattgccggttggggaatgactcggccacagtgcgcgaaggaccaaaataagactcgaaatgatcaattgaattatggcaaaatgcgaatgatttcgacacaaaaatgccgagaaatggccaatgaacaaaaaaataggagttgttagatttacttcatttttaattttaaattat

SEQ ID NO: 69896 - DNA, 650 bp, Heterodera glycines
atggcacggcacggccaattggcgatggtgcccggtggtcacggaaaggcgaagcggaacaacttggagcaatcatttgcggacgatggtggtcaaaagcatatggcattgaaggtggtggcaaaaactgttgttcgttatgccgagatggggcaaaaatttgagttggaattgggcacggtgagtagtccgatgatgaagagcagcattttggcatgggaatggccacacactgaatgaaagttttaatcgcaaaatttactaaaaaattttctctggcgggctgtaaaataacaaaatttattcaaaaaagtaacaaaattaggctagatcaatattagataaaaagttttaaaatccaaaattcttgtcaaaaaatagaaaaatatatttaaaaggatttttgatgaaattttcattaaaaaacctaaaaattggagccctattgctaacctgatgctgaagagaggctgttaaagtttgaattggaatttgagactgtgctgaatggtcagcagccgatgaggattggcattggcacggaacttgttattggcaatagcacactagcagaaggcatccgcggcgaagaaacagttggcgatggcacaatgtttgatggcacgaactgttgttgtcgagtacggtag

SEQ ID NO: 69897 - DNA, 952 bp, Heterodera glycines
atgccaaaggcaactttgcttttgcatgacattgcaataattaaagtaattaatttaaagtataattatcattataatttctgttaatttaagcttaaaaagacgattgaatttgcaccaaatgtccgaccaatttgtttgtttggttttggtggtgattttgaaagtatgtataataaataaaaaatcttattttattaaatatatttaatttaatataaatacttttaataagatttggattaaaacccaattttatttatttaaaaaaatcaaaatctaaaacacaaattttttttttatataaaataatttgaaaaatatgtggacctttgcatctatgtaaattttaaggttcatccgacgaaaaatttctcgaggataattcaaaaataaaaaattcacaatttattattgccggttggggactgacttggccacagtgcgcgaaggaccaaaataagactcgaaatgatcaattgaattatggcaaaacgcgaatgatttcgactcaaaaatgccgagaaatggccaatgaacaaaaaaattgtaaattattttagttttattttaaatttttaataatttaatttagcatttgaatggtctgctggcgatgacgatgcaattgaatcgattgaatcgctgttaaatgaatttgaaacatatgggttggacgacaaaatttgtgtggtgcccgagccgagcattggcgaaccggtacggtagaattaatactgtacaaacttactgtatacaattagtaggggaaatgtatagaatgtgtaaatctttaattgcgattaattgtttactctagggtgacagcggtagtccattgatgctgaaaattggcacaaacaattggatccaattgggcgtcgcaaccaaaacgagctgcaattccaaagacccaacaagtaccgaaggactctttggtaaatgcatttaa

SEQ ID NO: 69898 - DNA, 986 bp, Heterodera glycines
atgaagcgaaccaacgcatcaaacatcactccgcctcgcgcaaaacgttcaatggcacctgcacaggacctggacccaaacgctgtcgcactcgcggagcaagaacgacaacgcaccctggtcttcattggcctcccggaaagcaatgccattcgcccatcggaacgtgttcaggaagacagggaagccgccacaaaaatcctggaccatcttgaagttgaggcccaaccaaccgccgtctttcgactcggacgttacgacccgcagcgaacaacaccacgcccgctcaaggtggtcatgccaacaaccacacaccaacacatggcactcggaggatggaagcgcgagcgtgctcgactccgttctctacaaaacctgaaccgcctgttcgtccgcccagcgctgaccaaagaacaactcaaggaagaatatgaagcgcgcttccgaaaacgtcaacaaaaccctgctcccgtggcaccagcaatgcaacctcgccagacaaatgttccgactcccgtcaaagaaaatgcaccaaaccagaaggaggccagcgacgacatttacaaaccgctggaagtttttgaccaaacaatcctcgtatgttatgaagcattaaaatcattaccaccaaacgacaaaattgttcaccaaattcaatcactcgaaaaacaataccctcgtcttttcaataaataattctgtcagacctccaaacatttcctcaaaaaaaatacatttattccagtacttcacttttctcaccaaaatttttcctcaaaaaaaaaaaattttttttattttttttttctcctacaaccctaaaaaaaaacaaccacttttccctttgttggaagtctgacttttctaatttctgcttctccattcaaaatttcaattcttttatcacggctttccatttcacctcatttccgccaaaagtgtaagtggcacattgtcttctttttgtatttttatttttgaataaa

SEQ ID NO: 69899 - DNA, 467 bp, Heterodera glycines
atggattcattcggaactgtcgcctggattctgcgaccaacggctcagacgacaggcactgctgtgggctcaatggagtacgaagaggaggaaaacgggacaggaaagttggtccacagtgtcacagctactgtcaccacacctaccaccgccgagtttagactggaaaaagaagccccctcctccgagaaggacggtgatgaagagggcagcggcggccacggcacactgctgttcatcgaatccgatgatggggaggaggaggaggaggaggatgaggacattgaagacacccccgtcgccacagactccccctcggctacgacggcaaccgttgtggatgactcctccgacactgttaaaggggtggagcagcgctccagtgagcacagcgacgtgacagacggagcggaaggtggcggtggaagcgaaggcgcaaaactgctcggcgttagaaggaagaggag

SEQ ID NO: 69900 - DNA, 493 bp, Heterodera glycines
  unsure (1)..(493): unsure at all n locations
atgtcacggagttccgaacattttggtgcctcggaatgccatccctggtgtgtaacattagaataagaacggcccattcttcgtgagttttcccatttcctgtcaatgtcaacctattgagctgaaattttaatcatacgtagcaattctgaaaatattagaaaagtgagccaaatctcaacaactatcaaaaagaaactgatgaaacaagctaaataacaaaaacaaaaatttgtcatatttctctctgtctcttaggcagagctttgttgagttttccaagttctccggagaaattaagggccatgaggcttanatcaactcaaatttgtgaccaattgaatcaagctggtcagcagcaacaaactctagatcacgtacagatagataccctacataagctcaaaaagttagagcgtactgaaaaattgtccccattttaaaaattttataatattttttcagtcaccatttaccnttcttgctttgctga

SEQ ID NO: 69901 - DNA, 519 bp, Heterodera glycines
atggccacttacctattcatcgctgctgctggtggtgctctgcttggtggagccgccacggtaagctgcgcttttttaaagatcctttattttcctaaatttgatttttggtcaaaacttttttgtaaacagaaaatatattgaaattttgcaccatatttgaaccaaaagtcgagaattcatttttcacaaaaatttacatttattgaaaaaaatcgttttaatgtttaatttagttgataatgagaaaagttttagcagatcaatattttcagctggccggccaacggctgctggcggctgcagcagcaccaccaccaccacaagtagctgcagcagcagcactagcagcagcagcagcagcaccaggcagcagcggcgggcaaaaaggagcgcaagaggacggggaggagcggcggcggcggcagcaagaaggacaagcactggaagaaggacgggcgcagcacgcgcaggaagaaggacaagaagggcaagacgaaggacaagaaggagtcgccc

SEQ ID NO: 69902 - DNA, 70 bp, Heterodera glycines
cagcagcagcgatgaataggtaagtggccatagcgttgcgttgcacactgaagcggttcgttggttggag

SEQ ID NO: 69903 - DNA, 192 bp, Heterodera glycines
atgtgcagcagctgcaggaccaggtggaccagctgaacaccgaacgggccaccttccagcggcgccttcgtgcattggctaaccaatttgggcgcgattgatttggtcgcagaatgtgcgcgagtttttcatgtttttgcgcgtttgactgaacacaccacaaaaaatgctaacgaattaatttaagatcag

SEQ ID NO: 69904 - DNA, 85 bp, Heterodera glycines; identical to SEQ ID NO: 65905

SEQ ID NO: 69905 - DNA, 56 bp, Heterodera glycines
gctatagggaagctattcccgaaggattcggtctccccataaatatgagcgcatcg

SEQ ID NO: 69906 - DNA, 377 bp, Heterodera glycines
aaaatctataaaaaatttaaaaatgagaattcatgcgagattttctggaaataagcttatttgggcctagttaagctgtaaaaaaaatttggggcgatttgaatgagaatagaaagagccaggttcgatgatgttttggtaagccaaaaaaaaaatccaaacatttaaaaatctataaaaaatttaaaaatgagaattcatgcgagattttctggaaataagcttaatagggcctagttaagctgtaaaaaaaatttggagcgatttgaatgagaatagaaagagccaggttcgatgaagttttggtaagccaaaaaaaaatccaaacatttaaaaatctatataaaatttaaaaatgagaattcatgcgagatttt

SEQ ID NO: 69907 - DNA, 888 bp, Heterodera glycines
aaattcaaaaaaatttttaaattttttctaggcccttagccgtcccccggggcgttggctaccgcttctgctactgctcgacatcagcgcattgctggcccagttcaccgttttattggctcaaccggcagcaaagcaacatgaacaggcatatataaataatacagtattctttggttactgtattttccgagagtgtaaagtataagaaaatacactaggtgttgtattaaagtatattagattactattttctgtgagaattattgtgcttttgagagtacagcatcaaaatctacggtatatgtttttctgattaggcaaaaattcggaaatacaacatgtcaatgagtagctctaatttgctgtgtttatacagtacgccaggcacagtgccgtctacagtatgccgggccttgcgtttgtctgtgcggtgtgcgtttcatcagcgtggtggcaaaactttgtgcatcctcgctcatttttggcaccaattcggctgctatcagttgtcggtgcacgactgcgcgagtgtcattcaaaaacctatgtggtaagaaactttaaatcgaagaacggcacaaaaggaaagtgccttgtttcagcttgtctcgccctggaaatgcgtgctgttcattttgtgcatgctgcactttgtgccaccgcacgtgccgttgcatgcactgctccagcgtgacccgttcgcggaacagctgataacgatcagcgctgatcatctgaatgacagtcaaatccgtgcattccaagaacgcatgcaagactatgaacgtggagcgggtgcgtggcgaaaaatgaataatacatatttatacgtaaaatacaattacggtatttattgaattatagtcccccccccccgaattagag

SEQ ID NO: 69908 - DNA, 272 bp, Heterodera glycines
atgggagatggattcgatggaataaggcttttgtttaacacatggcaaacagatttggccgaccgtgttcgaaaactcggactcgagccccgacaaaatgtcaaccccttttttgtctttgaattatttaatgcattttgttttcagaagaatcgcctctctgaaatgcaacagcactttgagcagtacgtcgatgtgaagattgttgcagcacatttgggcgtatcggcacaaattgttggacaaatatacaattattgggtgtcaaaaag

SEQ ID NO: 69909 - DNA, 1984 bp, Heterodera glycines
atgtttaagcccagccagatagtcggtctggtgtggacgggggcccttcactcgctggccttgagggtgaaggtgtgcctgttcctagcagcgggggtggcggttcctagccctaatgtgccctgcctacgggctgcattggtacagcgagagaataaccgggactggctggcccggaggaccgtgagtcactgagcagtgtcgaacgcgcagctgctcaaactcaacaccccggattaaaatccgcgttgccggaactcatatgtgctgtgggcgttggcgcaagtgccttatggagggagtaattaaccaacatagggaggcctacaccaaaccttgcactttgggatggtagtgccacacactttgagttccatgagcggttccataatcgcttgctatgatagtcatagttggtgggcatgccctccaatgtgatggcttgggccggaaggttaacaacacgtgtagggggtgacctatgcgcgtttttagccctccaaaaatggcctaaatcatcgctcaggagaggggtcatgcccgatttttttttggcagccattttctttgtcattttagctaaataacgggtttaattttccttttaatttaagaaagaaaataaaatgagccaattatctgacgattccctcccccctacccttgatggaccgtactcccctgttcgggacggtgcggatttgtttgatgatgcaccgccgctcgaatccgtcctcagccaactgccggcttcagttagttataaaaaaagggttataaattcttctttgctaattttgtgagaatatttcaggcaccatcgccgccaccggaacgaggaaatcgcactgctcgcaaagagcccagcatcagcaaggagctcgatcccgagcaatttgagggcgaaggctttagctgtttggcagcagcccaagcggaagctggccgttttaaaggtgttttaaactgcttcaaaatattttatagccttacaacattttaattgttcttttaattttatttaattataattattatttttcgttttctctaatcgttttgagtgttttctttagcatttcgttttatcggacaatttttgctgagcctctcactcactggtgtttttccggaggaaattttgcgcaacatttttaccatgtgccttgcctatgctgccgaaggggcggaatcaatgaaacttgcggcggatcacttcattttcctcctcacttcaaagcacatggactacgaaatcgccattcacttaaaaaagctggaccacactgcaaccgacaagattctgtcgcgctttgagatggtggatcaaagcaacaaatccaaggaacgaccgtcgatccgcgatgaaccattcgtcatcgacataacagccatcgaaagcaaaggagcaaaaccgaagaaggccggcaaaggccggcgggacctcaatgtgatttaccgtatcgctgacggagcgacgtatgggttgcacaacgcggacaacctctgcctcttccgagcctttgaatttttgcggatgaaattcgtattgcctcgacagcgtttcgcggaatacaagaaggacgaaagaagacaactcgaaaatgtgcaagccctctgccgagcatgcaatattgacatgaacttgcctttttattgcgtcgtggaatacggcgataggatccaggcaaaattaaaaaaataataataataatttaaaaaattaacaaaaaaattaaggcttattatcagcgtcttcatcccgggttgttttggctttactgcttcgaaacgtccggtcggatgaagccatcatggaagtcatgtgccggcgaccgcgagcatgaactttgtgttctttttactgaggatgtgaatggtgaaaatgggcattatgacgctgtgaaatcggttggaaagctgttcggcacacaaaattattgctttggggtaacaaacaaacaaaaaatttttttaaatatta

SEQ ID NO: 69910 - DNA, 403 bp, Heterodera glycines
atggaaaagctgaagcaacaaacagttgttccatctgccaatttcgatgacggtattttaaatacattataaattaatataattaaaatagaaaatgacaatcaaattaattaccaaaaaaaaatttgaaaagaacagtaaattaaatacatattaaatttaagccgaaatctgctggatctcttggcttggctatgagccacccagcaatttggaagggggtaagtcatttaagggcatttctgagatatttttatacaaatttaaagctgacaaatgggacaattggcatgccttaaacaacggatggccaacggaggagacggacgaacaaaaggaaagggtgaaaatttgggtttttggaatttttatccttttttgtatttttaattggtttaattaa

SEQ ID NO: 69911 - DNA, 54 bp, Heterodera glycines
atgtcaatgagatgtaagatgatggaacttacccggagatatgcgatgacaaaa

SEQ ID NO: 69912 - DNA, 707 bp, Heterodera glycines
tttgggtgcgctttagagcactttctgaaaaaaaatatttatgaaacaaaaaaatcgattttttcaagtgtccgtttggggtactcaaacaattatggggagcaaaaatccaacgcagaattaaagtacaggctatagggaagctattcccgaaggattcggtctccccataaatctgggtgcgcatcggttcggggggactgccccgaaaacaaaaaaatcgattttttcaagtgtccgtttggggtactcaaacaattatggggagcaaaaatccaacgcagaattaaagtacaggctatagggaagctattcccgaaggatttggtctccccataaatctgggcgcatcggttcggggagactgccccgaaaacaaaaaaaatcgattttttcaagtgtccgtttggggtactcaaacaattatggggagcaaaaatccaacgcagaattaaagtacaggctatagggaagctattcccgaaggattcggtctccccataaatctgggcgcatcggttcggggggactgccccgaaaacaaaaaaaatcaattttttcaagtgtccgtttggggtactcaaacaattatggggagcaaaaatccaacgcagaattaaagtacaggctataggaaagctattcccgaaggattcggtctccccataaatctgggcgcatcggttcggggggactgccccgaaaac

SEQ ID NO: 69913 - DNA, 60 bp, Heterodera glycines
atgtgtgttatatatccaacggattcgctcagttgggcccgtcaggtttgggccggcacg

SEQ ID NO: 69914 - DNA, 2114 bp, Heterodera glycines
atgggctcggacaacgcactcagctgcatgatgagacgacagaagaggaaaattttggggaacgtcgactgcacagaccctttggcattcgtgatccccgacaaattgcggctgaaaaacggagaggacattgtgctctacgacagtcgcactgtcagaattggagaaaaggacgtggtgcttgtgtttgggagcgaacgggtaatcatcaggggcgaaaacagaatttaaatttaaattttttagactttggacattttgagcaaaaacagtgcaacttggcatttggacgggacattcaaggcagcaccaaacatgtgggagcagtgctttgttgtgggcgcgtctgtcaaccaccgaatgtgcattggagtctggggtcttctgcccgggaaacatcgacgctactacgaggaagtgctgaactttctatgtaaccgaatttcaccggtcgcaccgagaaaaggtgaaaactaacacataaatttatgtgaaaatctagttttcttttagtcatttgcgattttgagaaagccgaaatgaacgccgtatctgctgttttccctgcaacaaacatcctctgttgcatgttccactacgggcaaaacctcttccgaaaaatgaaggggcttaaactggtgcaaatgtatggggaacagtctgtgcgtggtgaagcggtccgacactctttcaggtaaaacaattcaaaaattgacctgacttcataatttttttagaaatgtcctatctttgccattgttgccaccaacttacgtcagacgagcattcagcgtcattgtcggcaccgcccctatggagatggagcagtttctcctctactttgcgaggacgtacatcggaatgacgcagcaacagctgcttgacggtgacaatgcgtttggagttcgtcctggtggcatttctccacttttttcgtgtttgtttttacatttactctttttattttcttttatttgcatttaagcattcacggggacatcattttcttctgttgaatccgaccacacatactcacggcagcccttacaatttggcatcgactcgcccgccccctcaacactatcatggccgtcaacagtggagcaaaactcgccgttggtgcagtactcattgagttcatcgtcaacgacgacattgcagccaggcacagcaaaattcacaaaattgttgatttaaacaattttaagtccgtccttgggaagaacccgtcgtccgtcgcgcactatttccaattccatattggaacgtgcactcgcatgcggcttctgccctcgcgcggaccaacaatggcctcgaagcaacccatcttcatttctctgtatttattacttataaaaccccaaataaaataattttagaagggtctttgtcatcacccagccctttccgatttcatttctgaagtcagcggaagcatcgacagacaagttgacgcagcgaggtcagcaaggaacttcatacacaaacgacacaaacgctacgtgctgcaggacgcagtcatcatgagaattttggcggatgcaacatacaacgacgatgccgaaattcacgatgttatgacggctcttggtctgcaggtcgaaggatatgcaggaaaattgaaggactacgaaaacacggaagattcaatcatgaatttcgcttagacttgttcgatcccaatttttacccttttttattcattcattttttgaactattcctttttcctgcaaaatttattatttttgttatttgtttatgctattctgataaatcgttaatgaattatgtgttatgaagccttaaaatgtaattttccgactttttcactaattttttagcttggcgacattttgactctttttagcttgggcgacatttcgacgcggcgacattatgacgcggcgacatttcgacgcggcgacattatgacgcggcgacatttcgacgcagcgacattatgacagaacgacattttttgacagcgcgccggcaaaatctcccactcattttgctgtattcattagcaaataacaagcatttggatttgtatttgtgtaactaattttacaccaaaatgctgatgttggagccttgcaagcttagaataaa

SEQ ID NO: 69915 - DNA, 440 bp, Heterodera glycines
atggaccgtaacaaaattgaaattctccaaaaaagtcgtaagcgtaagtttttggacaccaacgacaatgagaacgaaacgacttctgagcatcatgaaccaaacgacgaaaacaatgaccgcgacgacgattttgaagaagaacacgccatcgtgaacttcgaactcgggaaaactcaaaagggaggcgtttgtctttggtctgaaggtgggaaatttgctagaaaaggatgaaaatttgtcaaaggctttcggtacacacacgaaaaaaacgaccgatggaggtgcagtgtgcgtgactgccctgcacgcgtgacaatcaccgacaaaagcgacaatggaatggccggatatttcggacaaaaagtccataatcacctcccagagccacaaaaacaacgggtttcggacaatcattgctaattaagtaaactaataaa

SEQ ID NO: 69916 - DNA, 878 bp, Heterodera glycines
atggctggggaaggccaatgcaatgaggcggaagaagtgattctgcgcagctccgactatgccttcatgaagaaaacggaaacggcattcgaatttgtggtcggaatgaatggccaaacggaggacaaaacggcgcccggggccaatgccaatggggcatttttgtgctgtaaggcaacccaaggtgaataaaagcacggagacatttatttatatgagtaattgaattttatattgatttaaataaacaaaaataatttaaattccttcacaaaggaaccgcaacacttttcatcgtcggcgtggccaacaaacggctgatgttggccaaggacgtggtcaattacaaatttcatcaaaacatctcaatcgatgattttgaacgggaaaagcaagtgttggaaagtgtttcggcgcagggacaaaaagccggcattggggacaattatggagaaaaattcttccaggaccaaatggacgccaacaaaatgattcaggtgaaagttggaaatcgtttaaacgtcattaatgaatatagttgtttaaacattttgtagaaaggctatgtgaagctgtggaccgccaacaaatcgttgcctcctcaaaatgtgccggatttacagaaagatacccggcccaaagtgacggcggcgacagaagaaatgattttggcactgaaagtgtttcaacagtttcgaaacaacaaaaattgttgggcatctgtggaaaaggaactcttaaagtcgcaaagctttttgagtttggccgaacccaacggaaaggacgcaatgcgaaaagcggcggtgcgattgtgcgcagaaatggaagcgaaaattgaggcacaaattgacgaaacggcaaagaaattgttggcctga

SEQ ID NO: 69917 - DNA, 614 bp, Heterodera glycines
atgtttaagattgactttgaaaacaaatctgtcaaaataaatggtcaagaaacagaaaatgtaacggaacagaaaatcatgaacaacaccacgcctattattgatatgcttaacagtaataaataattaattcaatttttgtaaaattaaaaataatcaaattaaaaaacataatttaataatatatttatttgtagatgatgaagtggataatagtgcttctgaatatgatacatcatcaacaagttttagatcaaaagaattgacgaaaaattcttccagtaagttgaaataattgaatataaaaaaatatttcggactgaacataaactatgattttgcagtttaaaaaaaacggtgtaaaatttgaggaacgaattttttggcaccaaaaactgccaaatgggtgggatacaagaactaaaaaacctaaatatctttaaaaattttaatgggtttagaacttaaaaaagtaagatcctataaaaaagaaggaaaatcaagagttttgatcaatttcttattattcatgttcttattaggcttgtaaaatgggaaaaacctagctccctaattatatttaaaaaaaaaaaaactaattaaagtagaataaa

SEQ ID NO: 69918 - DNA, 473 bp, Heterodera glycines
atgcgtttgacaccaaaatggctgtgccaaaattacccgtctcggttggtcccaaaaaaataatgagaaaacttaaatatataataaattacattgcagcgaattgagtcacttcattgaactttgagccaatgttaattgaaagtgatttttcatcaacaataatatattcatcaaaaatttccatcgcttttctaaacatttaaatttagttaaattatttataagcgcaagtaaattcaaaatttagagtcagaagagtgttaggggtcatgagatattaaattcaattaatataatgggaatttcaactttttataaattaaaattaaaaaaattaatagttttaaaaaagctataacaaaaaaaagattaaaaatattttttatttgtgtttttttttttgtaaacaaaacgattttttagaattttgaatgctcagaacatttgaactcttcgaatatacaaataaa

SEQ ID NO: 69919 - DNA, 1620 bp, Heterodera glycines
atggcacagtcaagtgccaacaacactgtgggcggaacgccaaagcttcaagcccaaccgaatgccaacactatgggcggaacgccaacacttcaagcccaaccgaataccaacactatgggcggaattccaacacttcaagcccaaccgaatgccatgggcggaatgccaacgtattatgccgtacagcaacagcagccatatgcccaactgcagtttgtttcccagcaggcatgttagagggatggggagtactttggtggtatgactgttagtgctgttcgagagtctcgacttgagaaaagtctcgggttttcggtctctgtgtcaggtctcggtcttgaatcggaaaattttcgttctcgaacagcactaatgactgtggctcggttttttagttttttttttttttttgacaattttttatgcgagagatctcccagggcccatccaactacggggcccaaaatttccagcagccggcgacggtaagacttggcactccatcggcgtcagtaaagcctggcactaatcaacccatgatgcccatctcacccacacaatcagtgctggtacggattctcaaaaaacgcgaaaacatggacgaaaagtgaaaatttccattaaaaatatattattatttcttttttaatttttctccagtccatgccctccgctgagttcgccggccgacgatttgaccgtgcatattggtaacagaaaggtgaagcgacaattagcattaatcaatcactaatagggattcgtttttaggcaaatgcctaaaatttttcgcatttaatacatgtagctaaccacgaaaaacgcgttttccgctcttgtttggggtgtctacgatgaattttataatgcccaattttgcctattttgggctttttgtgcttaatgcctaaacgcctatttttgtgcctatttcgccacttttggtgcctttctcagaattttctgaaaatcctataataaaaacgaaaatacacacctatgaatcggcccaaaaattttctgaaaatacgcccctaagaattggaaaaaattttcccaaaaattaattacaaaaataaaaatttattttggtaatctttttaatttaaaattttgttcttattccaaaaaaaaactttaagatatttaattattcatttacaatttaaatttaaccagatttactttatttttatcaagttttacgttttgctaccttaaaagcgttaaagaaatttctatttgcttattttagtgaatatttgaggatttctgtgcctatttagtgcctattttgcaattttgcgtttttaggtgcctatttcgcgatttttagtgcccaaaaaacgaagccataataattcaaaaaaattgcttaatggatactgtatcaattttcaggttactgtgtctgctgcttggcttatgtgccaatcgccgatggtccgtcaaatgctcagcgtggaaatgaaggaaaagcagcagcgatcgctcacattgaacgaattgggcatcgacatggagcagttcatggattttttggaggcaatttcgaccaatgctcttctgttcccgattttgccaaatcgtaaaatgagattaacaattaattaataa

SEQ ID NO: 69920 - DNA, 288 bp, Heterodera glycines
atgaaaatgccaaatgtctcacaattattttgtattttaattgttttttcaacatttattgaaaagacaattggtgtcaccaaaaaaggaactgcttctccactagaaaaagcagagcaaaaagacgacgaaccaaaattgggaaaagaagacaaaaaattggtgaacaacaaaaaagaattgctaaaaaaagaggtgaattttaaaaatatattttaattgaaattgaaatttaattttaatatttttgagggaaaaattgcaaatgcaaatggaccaaccagttga

SEQ ID NO: 69921 - DNA, 498 bp, Heterodera glycines; identical to SEQ ID NO: 61407

SEQ ID NO: 69922 - DNA, 501 bp, Heterodera glycines
atggagaaggcctgcaaaatttggagagattatatcgattttagtgcgctaggttcgatgaaactttttaaaatataagcctaaactttttggcctgtttaaaaaggaattaaaaatttttaaaaattttattcatccttttgatagaaaaagcatcagagagccttatttaacttttaattaacatttggtgcgtttcagagcagtttctgaaaaaatatttatgaattgattttgctaaaaaaataaaatagtgaagctttaaaaattaataaaaaattttaaattcagaattactggagttagcatcatagcagtgcttttccttgtctttttgatgctctcgcaaaatctggttcgcttctgaccagtttataaaaaaaaagttaaacctaaaatttttcgcatatttaaaaagcaattaaaaatttttagattttttattcatctccctttttgatagtgaaagcatctgagtgcctaaaataacttgcaaataaa

SEQ ID NO: 69923 - DNA, 782 bp, Heterodera glycines
atgcctgtgggtgaaaacaatatttcacattcactccataactttgtgagttcggcacggatcgagaccgggataagaccactggaaagagcagctcgagctctacaagaaggtatggaaagaaaaaatagttatttctgggactttttcagaaatcagaattaattctccaatgtggcccaaattttaggcccccagccacagccccttgcttctctcccagttttaagtcttggatttgtcaaataaattcaagacttcaaattaataatcaaaaattctcttaaaatttttttgaacccaattcaaaaaaggaaaaaaatttgcagtcaaaaaattattcgaatttctccaattttgtttccataatttccgaaagttattcggtatcataatgccaaaacaaaacgaaatcgttttaaaatattcctttctggacttgacttggtttcttgatatcgaagctgttttctacgctatttctaaaacggttataccaaaccccagatttttgaatccggttttcagaaaaaatgccttgtggtgaaaacaatatttcacatttcactccataactttgtgagttcggcacggatcgagaccgggataagaccattggaaagagcagctcgagctctacaagaaggtatggaaagaaaaaatagttatttctgggactttttcagaaatcagaattaattctccaatgtggcccaaattttaggcccccagccacagccccttgcttctcccagttttaagtcttggatttgtcaaataaa

SEQ ID NO: 69924 - DNA, 132 bp, Heterodera glycines
atgaaaaaaacatgtaagccccaacatttttttctatccgaaatatgtcctccaccatcccagaacataactctttttgccaatgtgagcaaagcgcccgaggggatgcaattgtgtggtgccggtgccgtt

SEQ ID NO: 69925 - DNA, 383 bp, Heterodera glycines
atgcccttacaaaacgaaatcgttttaaaatattcctttctggacttgacttggtttcttgatatcgaagctgttttctacgctatttctaaaacggttataccaaaccccagatttttgaatccggttttcagaaaaaatgccttgtggtgaaaacaatatttcacatttcactccataactttgtgagttcggcacggatcgagaccgggataagaccattggaaagagcagctcgagctctacaagaacgtatggaaagaaaaaatagttatttctgggactttttcagaaatcagaattaattctccaatgtggcccaaattttaggcccccagccacagccccttgcttctcccagttttaagtcttggatttgtcaa

SEQ ID NO: 69926 - DNA, 1028 bp, Heterodera glycines
atggaaaatcgacaagcatttcgggatgaatttccattaatatttaaacgaaatgtaaatgtaattcaagtttctccacaacaaaatgtaagcacattcgctggaagctcaggacaacaacacgaatctttgataaaaaaatttttttattcattttaaaaatataacctttcattcttttcaccgtattttttttaattgtcccctaatcgcaaaaattggtcattttggacaaaatctatcaacaagttgcactcaaattttccaaattttcctggcggcgccgcctattctccataaattttttataaaaacgcgccgcaaaaaaaccggctttgaaaaagtagagttgctttaaaataaaattttggtcattacccgattcgcgagggtgactgagagagagggggaagaaaacagagagaatgggagaggaaagtgcgagagagagaaagaaagggagggagggaaactgaaagagaaagagaggagggagggaaagagagagagacaaatccaattcatgaagtcaatcttcctcctttcttggctttttcccatttttgtctttgactgaaattctcttaattatcaaccatatgggaatatcggtaagtatccgccagttgccggctctccccacaacacatcgcttcccggcacattggccacaaaccaatggacgaatgtccttaaatgaaaaaaaaaattaaataatttgtatgaaattctatcaataagtgccagagatcatgaaacaattaaatggctatttatacatgataaattagtaaataaaacaataattaaaattatgaaaaatattgtagtaatatatgtattattataacatgaattttaagaagatcaatcgagttctagcgatttggaagcgtctctcgagcgtttaaacggtttattttaagttaaaaaaatgaaaattaatttaccaatttaaaaccatcaaattctgcaaatctgcaaatgaatctgatgattaacgttagtaagataattttttgtgtaaa

SEQ ID NO: 69927 - DNA, 733 bp, Heterodera glycines
atgaacgtgtttcaaattgtttggtgtttcgctgcaattttatcaatgtccaataccgctccaagtgcgaaaaatatatttaaacgtttaaaaaataaaaaatatgtttctttagacataaaagcaaaagatttaattactaaaaatgaatcaaattcacaacatgctgaaaccagtgacaaaactgcatcaagctcacaaaaaaataaatctgatgagaattgctcaatttgcttggacagcattgctaatgatgataattcttcactgaaaaccttacttaattgcaaagttagcaaaagccatataaagtttaatatttaaaaattcatttataatttttaaattcaattattaatatttttattcaaattattgaaaaaaatatattaataatataatcttgttttatagcacagctttcaccacagttgcattgatcaatggtaattcttatttataaaaaatattaaaatttttatttttcaacaatatataattagcaaattagcataaaatttcataagcccaacaaaaataaataaataaatattttcaggagttctagcccttctctaatatggaatttaaaaaagctaaattcgatgattagtccattggttttcattttgcaattttttcaaaattccgataaccttatttttttcgcttaattttattgggttaaggttacaaatcaaaaaacgatgtcctgtatgtagaggagaagtta

SEQ ID NO: 69928 - DNA, 372 bp, Heterodera glycines
atgtgcatggttaagtgggttgttgtgttcttggttattgtcttcattttagcgttgatcactaccatccctccaagtaattactttttcttataatttgtaaaaattattcctttttcagggaatttaatcacaattttaacaattaaaaccataaaatcttgtcatttttggactaaatctattaagaaagcgcactgataaatttcaaaattttacccggcggcgcctatcggcaccgccggagctccaaaataccctttctttttttaaattgactcaaaaaccgcgaaaaaactaacgaatttttgttttgtgcgtttttgaaatgataaatgttgtaccaaattgaatcaaaattaaaaaaataaa

SEQ ID NO: 69929 - DNA, 683 bp, Heterodera glycines
atggtcacactaattcaggaaatgaaaaggatccaacccgagggtccttaccgactgatcggctattcctacggcgcttgcgttggctttgagatggccactcaactccaacgcagcgatgggaacgaaagtgtggagaagctgattctgttggacggttcccacctttacatgcagacgtacagaaacgtgagtgaacgaagggagaagcagtttctcgtggctttgctcagaagctcaacaaatgaattcttaggtttaccgcgttgcgtttggagtcaccggcgacactttggtcaacaatccgttgttcgagtccgaaattatgtgtgccatgactttacgcttcgccaacgtcgattacaagcgtttccgcgtggaaatgctgcagttgcccagtttcaaagagcggctccagcgcgtggtggacacggtgatgggcactgggctcttccagcggtcggacacaatcgcattcgcagtggacgcaatgcgacacaaatttgtgatggcggacaagtgagtattgctgcttgttggccattcccggcattcgcgacaatttataatcacttctcaggtacaaaccgaaggagactttcaagggccacataacactcgtacgcgcggaacaaggcgcggcacgggaagaggacgtcggcaaggactacggcatcggacaa

SEQ ID NO: 69930 - DNA, 65 bp, Heterodera glycines
agtttacaatataaagataatattaaaggagcaattagtgaaaatgcatataattagaaatgatc

SEQ ID NO: 69931 - DNA, 224 bp, Heterodera glycines
aatggggtttcccatcgccgatggctcgtccgtccgagatgaagtatgccgagaggattggcgttggcgggagtgaggtgggtatgaccgcgatggtcgatgtttccccacttttccggcactcccgggtgaagggtaagccgttgagtctcgatttggccgttgtttgtctcgatttcgatccatgcgctgagttgtaggtccccattcgatccagctgaact

SEQ ID NO: 69932 - DNA, 280 bp, Heterodera glycines
  unsure (1)..(280): unsure at all n locations
aaagtgggggtgaaatttgatgaagacgaaaagcgccgcccaagcngatgattccgagnnccacggcgataagccaccattgtcccgtcgagagcaatcgaagaaagtganaaggggtcaaatcccccaaatttgnccatgtcagggtgaacgtgctgcccggctcgatgtgaccgctcgctggatctcgctggctaaagccgaattgctgctgtttggggatgaaagcaagcccccctttaagtttaaattttgttgtccccgccgggcatttcacttg

SEQ ID NO: 69933 - DNA, 847 bp, Heterodera glycines
atgattaatgatcatcagccgcctattcacattcacaggtgagttgcaccgaatgttgtgaccatgacaagtgcaacaacaatcacacgcttgattattattatgcggtgatggcacaacaatttacatcgtaaaaatttaaaaaatataaaattagaaaataaaaattatttttaagttggacaaaaccggtgaagaatgaagctaactacaataaaaagaacaatttgaaatttccttattaatttttagaatttttcatatgctttttgaaaagtattatgtattatcattagtcgctaaatcaataagctcttttgctgctattttggttgaatttcatatatatttttaaattttatcaccaaattataatttagaaaaattcacaggcaacattcattagtattaaaaaaactgattttctggcagacataagatttttaaagttaacaaatttttggaatttacatgcttctttgagtgaacattaatcatttttagttaaatttttaaattaatttaaaaatgcaaggaaattttcaaataatttaaaaacattaagcaatgggctgatggggaaggggtttatgtaattgaaatttcctgttttctaaatgagtgatcaaaaatgcttttacccgctgcagtgatcagttgtgatcaggttttatgggagaacacacacgtcaattgaccggccaaacaacagcagacaacagagtggaaaacctgtgataattgcgcaatgtcaacattgagttaatgaagctaaaacaatttatgtaattttgatttttatttatttattttcaaaaatatatattaccaaaaatatagctaacaa

SEQ ID NO: 69934 - DNA, 501 bp, Heterodera glycines
atggagaaggcctgcaaaatttggagagattatatcgattttagtgcgctaggttcgataaaactttttaaaatataagcctaaactttttggcctgtttaaaaaggaattaaaaatttttaaaaattttattcatctcccttttgatagaaaaagcatcagagagccttatttaacttttaattaacattttgggtgcgtttcagagcagtttctgaaaaaatatttatgaattgattttgctaaaaaaataaaatagtgaagctttaaaaattaataaaaaattttaaattcagaattactggagttagcatcatagcagtgcttttccttgtctttttgatgctctcgcaaaatctggttcgcttctgaccagtttataaaaaaaaagttaagcctaaaatttttcgcatatttaaaaagcaattaaaaatttttagattttttattcatctccctttttgatagtgaaagcatctgagtgcctaaaataacttgcaa

SEQ ID NO: 69935 - DNA, 168 bp, Heterodera glycines
atgcattccttctccgctcagtcctcgtcggtgtcctcctcgctcgactcggccaaggaggaatggctcatctccaactttgaccatgccaacccatcccaacgcgtgatggtgctgccacggccggcatcccttcacaacgacgattatgaggaggagacggcgaag

SEQ ID NO: 69936 - DNA, 938 bp, Heterodera glycines
atgccgacaaatggtagcaaaggcgatgaccagcagcagaggatggtgctgagcagacatttggccagcgagggcaccgccaatcggccgaacgccggcacttcgaccggtaaaacgcccgggcggatggcactcattcaaaaacaaacattttgtgggacgatcattgcatttttattattttggttttttgatgccccgaggcatgggccaatattgttgcaccaattactaattcctcattaacttttcacctcggcttccgctccccccatttttgtgctttgtcgtcgcttcggccgtgtgtgggtgccaaaggggccaattagtcagtttgtgccgtccgcttcatcccatcccccgtgggttaattgctcacttttctcattggcaaagcggtgattattcattcgaataagtgccgtatttttcaacaaattggcttcaattagtcaacaaattttgttgttggtataagtgttcgttttttgtgctgtcctttctccaacttcgtaccgacaccgcctcagggctcttcagagaatttcggtgccaattcgagaaaaatctcggcttttcgagttttatttcggtaaattttcccttccccatgggtcatttatttatttattgactcggtttatgccaagaatatcacattggctaattattctctctcgacctttagattggctgtccatcacttacccaatgggtaatttgtcgtcaagtttgcgtcgctcaatgccatcagtgaattcgtccgccgatggcaccggtgccggtgccgaacacctcgtccagcgggtgggcaccgcccggcatagcagcttctccacggaggatggcgccgccatgtgccaaaaagagaagcaacaaaattcagttggcattgccgactccgaaacaaagtgcgagcaattaacgttgattgaccc

SEQ ID NO: 69937 - DNA, 757 bp, Heterodera glycines
atgaacccaaattggatggaacagcggttcatcagcagcaaagaagagggggaggaacacggagaaaaggacggagaaaccaaaggtaaacagccgaattttatacgtgagacattggggcacaaatggcatcgattgtccaaaataagacacactcatgaccagccaggctaatgtccaaatccaaaattgtaaccgttttatatatttcacataaaaatagtaaataaatgcatcatttaagtggaaaaggaaggaacactcagcgcaacggccaacttttcgtcgacgtatgtgcaatattcggtcgatgggacaaacaatggaacatcccggccaattggggtgccaacaattgacgaacagacacaaattgcggcacaatacggccttttgactgtcgaggatgaggacgaggaggacaacgacggacagaaaaaggtgcggcaaaaattattttgcgtgggaattcgaagaattatggaacattaaaaaggaaatttggacaaattagtaatgtaaaacaaaacagtgtttctcctactataataattcaaaaattaattggtttttaaaaagcgaaagtttttcaattttagggttttccattttaaatttttagcagtcaatggaagagacaaatggtgcaaacggaaaacgctatcatttgctaatggtcgaagaggaggaggacgaagaagaagaagaaattggtgacgaagagaggaaaagcctggaagacacagttgatttctga

SEQ ID NO: 69938 - DNA, 492 bp, Heterodera glycines
atgatttatccgagcttaacgcaaatgggtcaagataatggcgaagatttgtcgctttatcgctacaaatttgcaactcgtcaagcaaatggaatagacaacgacactcaaattgcgcttgagccagaaaaagcaaaagtaattaattgattaattggtttaattagttaataattagacttaatttaatcaccacataattaaaattaattttccaattcattcagatggttgatctttaccatgcataccttgtcagaaacaaaacggacaagcaggaaattgcattgcaagttgaagcatttgcaatgtcattgcaaatgattcatgtgaatgaattgacaggaagtgatcaaagtgatggttgatttgtagcgagggtatactgtatggaatattgttgtatttccaaaatagatcgataattttgtctagttattattattcccatttgttaactctgtttttgcttgactaaattcaaacaataaa

SEQ ID NO: 69939 - DNA, 503 bp, Heterodera glycines
atgtcatttctccaaaatgcctggccaatttggcacattctgttggaattcactaaaagcaagcaacaaataatgcattctgtttccatggagattatgtgcattaaatggacgcaaaacagaagagatacagtgaaatggcggcagcaagtgtcaaagaaaagatgaaagaaattggcgagtaaaagcatttgcaacaacgaaaattacaccttaataacaaacaaattcaccgatggaaaagttttaccaaaggccaaaattattaaacataatttcttagctataattaacctaaaatcactcttttgtcaaataattgcttaatattacaactatcacagcaaaaaaaaaataataattacccttatttaagggatcagattcttcattggattcaaagtctgtagaaaccggtgataagtggttcgacagagaaattagcaaataaatagctatcaaagattgtgcttggaaatctgcgtttaaaatttcaaaataaa

SEQ ID NO: 69940 - DNA, 914 bp, Heterodera glycines
  unsure (1)..(914): unsure at all n locations
cgactcggttcagaaacaactcgcccggctgcttcagctccctcccccaattggacatgttgtcggcatggctttggacccacagaatcggcttgttttattccatcgttcgggtcgcatttgggatgagcagtgagtgggcaaaaccacaaataataatgagtgagtgctgatggtcattcccttttagttccttcgacgagaataatcggttcaaccggtcagtgacttatcagtgccaccgttaattggtaggctaattggactgacttttcctcatcagttcactcggagcaattcccaacgcgaccattgctgtcgtggacagcaaaagtgggcttctgttggagtcccatgggcagaatctcttttacatgccgcacggactgaccattgactcggagggcaatttgtggcttactgatgtgggcagtcaccaggtgcacaagttggacaagttcttccgaccgacgatgagtctcgggaagaaacttacgcccgggtgggctcattcagctgagaattcgcaatcgtcgccttttgttcagttcggatgctgaacacttctgcaaaccgactgacattgctgtgtcgaccaatggcgactttttcgttgctgatggatactgtaacagtaggataatgaaattcgaccgcaatggcaaattgataagccaatttggccaccaaaactgtgagtttgttggtcggactatgaataatcacacatttagcgggaaatcctcctaaatcgggcgaattcttcgtgccgcattccatcgcactaatcgaagacttaaaccttgtctgtgttgcggatcgtgagaatgaacgcatccaatgcttctcagttgggcttggaaggcacaactcacaaaccgaaggggcgtatgtgcccacgnggcacatttgtg

SEQ ID NO: 69941 - DNA, 623 bp, Heterodera glycines
atgactaatggctcaggtttaaactacatatttccgcataactacactgtggacaaaattgtgttttttcttttgttgaggatgttgataattaaggtaaatgtgggaaccaaaataatggcactgtaattagtgtatgtttctaaacataggtcgagaattgccaattatatttattagtaaaatttagcgaaaaatcaaaattttcttacttgtattgcaaattttataactttgttgcaattgcgatcaatttgttgtggaaaagaaaaataaatcgattttatggcatttacagttgacaagattcccggttctaatctatttttaaacgcgttctaatacaaaaagctgcaattaataaaaataaaacctatttaacatcagttttgccgataaaaatccaataaagacagaaggaaatttgtaataaaatagagcatatatgaaaatttcagaactttctatacgagtatgtaatattcaatttaacgagctgatcttcactttgtttagttaaattcttgacctttttaaagggtggttgtatacatgtagaaacaatcgaatgttgattactgcagaaaagatagaccgtattacgaaaaataatgaaaaataaa

SEQ ID NO: 69942 - DNA, 873 bp, Heterodera glycines
atggcccaacccccagcaagcgtccctccacccacagagtatcgacgcgaaaattcaaatttgaatttagcgccaaaaggggcgacaaaagtacaggggtcactactggtgttttctaactaaaaacactgtatatttttggaacattttttcaattaataatgtattaaatattcgcaggacaaaattgctggcgatggttattcatacacggatgacaatgtgtgcgtgttcaacaatgtggtgacaagccgtggacctggtgagagaccttgctcaacaatttgattgaatttaatttaaaaattattaatttatttgatgaatggcaaccgattttttgcagggattttttgagtttttatgtatgattaagtttttattttttttaatctaacccaagttgcataaaatttggggtccgtttagcgtatggggtagctaaagcgcgaaaattttgagtctgactatttttaatgcatttttctggaaattttccaccccttcccccaatatggctgtaaaaaagccctagaaatcatcaaattaagaatgaatttctagcatagcccccaaaaaaaaaactgacaggaacccacggattttaattgtggcgcaattgtctggcgcctaactttcaaatcagttaaaaatttaggaaaatttaatttttataatttcaattgcaggcactgcctttgaatttgcgctgcaacttgtcgaaatgttggtcagtgaggagaaagcgaaagaaataagcaattctttgcttgtccattgatcagttgctcttatcaaactagtcaagatgagatgatcaaaaagcaatggaatatattcattgaatttgtgtgatggatacaattttaccaa

SEQ ID NO: 69943 - DNA, 1102 bp, Heterodera glycines
aaaaattttattcatctcccttttcgatagaaaaagcatcagagtgcctaaactaacatgtaaataaaatttggtgcgtttcagagcattttctgaaaaaatatttatgaaataaaaaaatcgattttttcaagtgtccgtttggggtactcaaacaattatggggagcaaaaatccaacgcagaattaaagtacagactatagggaagctattcccgaaggattcggtctccccataaatctgggcgcatcggttcggggggactgccccgaaaacaaaaaaatcgattttttcaagtgtccgtttggggtactcaaacaattatggggagcaaaaatccaacgcagaattaaagtacaggctatagggaagctattcccgaaggattcggtctccccataaatctgggcgcatcggttcggggggactgccccgaaaacaaaaaaatcgattttttcaagtgtccgtttggggtactcaaacatttatggggagcaaaaatccaacgcagaattaaagtacagactatagggaagctattcccgaaggattcggtctccccataaatctgggcgcatcggttcagggggactgccccgaaaacccaaaaaaaaatttttttgaataaaaattatttaaatgaactgactagataatatttaaaataggttatttctcttcctttcagtatccctgcaaagtttgctgcgcttctgatcagtttctgaaaaaaagttaagcctaacatcggttcagggggactgccccgaaaacccaaaaaaaaattttttattgaataaattatttaaatgaactgactagataatatttaaaataggttatttctcttcctttcagtatccctgcaaagtttggtgcgcttctgataagtttctgaaaaaaaagttaagcctaaactttttggcctgtttaaaaaggaattaaaaatttttaaaaattttattcatctccctttttgatagaaaaagcatcagagtgcctaaactagcatgtaaataaaatttggtgcgtttcagagcagtttctgtaaaaatacttatgaattaattttgtaaaaaaataaataaataatgaaagact

SEQ ID NO: 69944 - DNA, 432 bp, Heterodera glycines
atggctggaagagatacaacaatggtaagaagaggtacaacctcgggttgaagaggtgctaccgtggtacaaagaggcacaaccatggttagaagaggtacaaccacgggtggaacaggtgcaacatgattagaagaggcagaacaatggctgtaagaagtacaacaatggttcgaaaaggtacaacattgggtggaaaaggtaacactttggtctgcagagacaccaccatgattatagaggtacaaccacggaaggttcgaaaaggacaacattgactggaaagataacacattggtctgcaaatgcacaaccatggctagaagaggtacaatcgcgggcggaacaagtataaccatgtctgtaacaggtacaacaattgtaaggtggaagagttgctaccgtggtataaagaggcacaaccatggttag

SEQ ID NO: 69945 - DNA, 859 bp, Heterodera glycines
atggttagaagaaatacaaccacgggtggaagaggagcaacaatggttcaaaaaggtacaatcatggttagagaggtacagccatggttggaagaggtaccatgtctgtaagtggtacaaccacgtatcacaagtgtaagaggtgcaacaatgattcgaaaaggtacaatctgtgctggaaaaggtaacactttggtcttcagaggcacaccagttttttgctgttccatttcagcttaaatatctcaaacatttattgataaaattttacataattgtatgctaacagggcagattttgggttataaaaattttttagaacaaatttaattggccaattattttttgcaaaaattatcaacgaataaatttttaatgtttggaacgagattttttgggtgagtgtagaacattggttataagtacagctatggtcgagaataggtaaacccatggttagaaaaggtacaaccgtattctcaagaggcgcaatcatggtgagaagataaacaaaacaatgtaattagaatcggtacaactatggttaaaaacctcctctcggccgcctcagacgcgcgcttctccccccccccccacccaaatagtgttttctttttaaaaataactcgccttttaatttttttgataatattatttatttttataacattaaaagaatttatattaattttatttttatcgaaaattatttaaaaattaaaaaaactaaataatttaaactgaaacattttcacctccaccattgcttgggagcattgtgtaaacagcagttgcgagtaatttgcattttgtgtcatctccctcagttggacaatcacagcttcaacagcataagcta

SEQ ID NO: 69946 - DNA, 823 bp, Heterodera glycines
atggcaaatttaatcactaaaaattttttgttagccaccatcttcataattgccgaagctacactggaggatgatgcttcaacgggtatttaacggattcatttttcttattagggcgcggtagcaatttgaatcctcgctctacagaattatgtaacccataattacgggaccggaaatcgtcaaaaacgccgtaatttccaatctctattccgtaaatgagtggaacattgacatttttattttttgaaaaatattttgattatgtttaaagaaaaaattaaatatttttattatgtttaaagagaaattaaataaaaattaattaaattattcaaattacaaatttccctggcggcgcctatgccattattccttattttaaaattttctttatggtatggttgggtcttcgaatgccgatgcaatgcaatttaaatgttttcacaatttttggtcactatttaattaattttaatttttttggcactaaaatttctcactttaattattttaggagagacttctactaaatgccatgcaagtaaaaatgatggcacgagcctgtttcgagaagacaaccaggaggacatttgtaattttttctaaataattttgaagagttttttggacccttaaaaatgattaaaacgatagtttgtctgggcagtgccaggcactgtcgaagctccaattaaagcccaatctttttcgaagtttgaagttgaaaaaatgtgaatgttggaagaacaagttttcaaaatcaatcttcccaattacggacaaaagttttttcataaaattaaatgacggagttaataaa

SEQ ID NO: 69947 - DNA, 574 bp, Heterodera glycines
atgatatacccgggtataacgaacttcttcaactctttaaacaagaatcccttttaaaacgcagaacaaaaatcgatttaaaacttttccatgatataattttgggaaagatccatattcagcataatgattctttttcaaaaatatattcaggactgaaaaacgattatattataaaaaccgcttattgttcaaccaatgttcggtttcattcgttttttattcgtacctctcgcctctataggagtttgcctaaagaggcgaggttacttaattctactgagtttgctaaacttcttgacacctatgatattgatgttttacttttgaaaccgccccatctcattcagtgaccaattttattttatttattttgttttaatgtcggttcacgcttttgcgtataaattgaattgaatttcccttgttgcttttttggatggaatcggccttgaatttctccgaatatttataatcataatttgatattcctccgccaggctttttgtgagaaaaatctgaacaattaacgaaaactattttggctcttaattttggcaaaatgtttaataaa

SEQ ID NO: 69948 - DNA, 49 bp, Heterodera glycines; identical to SEQ ID NO: 51181

SEQ ID NO: 69949 - DNA, 2171 bp, Heterodera glycines
atgcctttgttcagtggccttcgcgcattcaaccgcaaaatctgttacgaactgttgatcattgcctatgagaagacgggacaattcgggatgaaaccggacgaaaagggccgtatgggcgagattgtctacgacagcaaagccactatgtactcatccatgccgttccaccttgagtgtccgaagattgaaattacgcatgaagaaattgttgacgactacgtgcgagatcataccgcgatggacagctttttggtgactattacgccaaaccatcagaagcctgtgttggacatttcggattatcgtcagtattattcggttagtttttgaacgctagacctcaggttgcaaatgtttacaatttagaagaagtctctgttcgacgaagatcgcactgtgcgcacttttctggaaatgtgtctttcccaattctcgatcaacaggtattgtaatacacacagaaagcaatatggtatgctttgttttttgcagagacatttactcgccggttggagccggcaaactctacgaagtgtccccggaggaacgagtctctgctggcaatggcattatactccgtcccggagttgcgaagggtattcaccttttcgctcaatatcagtgatgggttttttaggagttcgagtcgtgcgcaactatggagaattggcgcctgcgcttgttttggacagtgcgttttagagtcaatttcctagccaaatgttttgtcttttagtcaaagtgtcgccattctacgagtccaatggacttgtgccaactatttttgctattatgaacaaccgcatgccgcagatgaacgattggaaccatatccgaagagtgctggtcgatgtgcgtgtgaatgtgatgtatgcaaagcatagatccttcggtattgggcggttcactgatcaaccgatgtcaaagctgtcgtatgttttcgttgttacagtctaacacagatttatgtttaatgatttcgctttagtgtcaaatggcagggcaaacgtgtgtcgatgcccgagtacttcaccttgcgatacggcatcaccatcgacttccctgattttcctgccgttattccgaacactccagtgccaaaaggtcgtccagtagagacgttccccattgagcaattagtcatcatggaggatcagcgcgtgcctttggagaagatggactcgggcttgtctggaaagctcttgaaagtccgttgctgcacagcattacattattttttgattattaacaaatgtttaggctaacaccgttcctccgaatgaacgaatggacaagattctgcagtgtgcgttcaaaatgaatgtgttcaatgtggataacccagtgctgagcgcttttggtatcaccgtcgaccaaacatcaaatcgcgtcgtgatcggtgtgcgttccagtccgcgtattctctacgccaagaatcagataatcaacccatgtccggacaatgtaaatttatgttttttttcctatcaaaacagcatttttagaccgaatggaccaagttgggcgcacaggcgcaatatctgcaaaccaacgaattggtgaattggattatccttaccgaggagcgccatttgcggcctgacaagcagtcgaaggaaggccttgtgaaggtgtttgccagcaagctgattgataaagcgcgaaaacgtggcttggagctgaccaacccgatcttcatggtgtttagtcgaagtggcattcagggttgggtggagatgcttgaacgctgtttgaactcgaacatcgaattcatcatgttagtagtcgccaagggaattatatttattttaatgtttaacaggcttgttgactacaaaaccgaggactcacatggactgctgaaatactacgaagcacgttaccatgtgccaactcaacatgtgtccgttgagaaggtcaccgaaattgtgcacaaaggcaaaactcagacattggagaacatcatcaacaaattgaactgcaaaaactttggcctcaactacatgccgttggtggagcgctcggctgaacgttttgcgttggaaaaaggaaacgtgctcgtgattggctatgatgttgcgcatccggcacccaccacgccacaggaacgtcgtatgcttcatgtgaagggtgccacatgcgattcgtttgacccatccaccgtcgga

SEQ ID NO: 69950 - DNA, 840 bp, Heterodera glycines
atggctacgactgactggggccaattcgacgctaacggaactgactacgatgccatctacgacggcacagatgacgaagcgggcactacggacaacgggcagggcggcaacgtgctcaatcacttgctgactcaggtggaacattcgcgacaattgctgtttctgtttataattgaaatcccatttcaggttggcgccggaatgactcttcagaatctgacgctgccggcctctgttctggaaaggcgctctctcctggaaatgtacgccgactttttcggtgaacagcatcggatttttggattttaaagaaaaattcccatttttcagcccatccagacgaattggtcagcgcggcttacgaaaccacacctgagaaaaggtgtttccttttcgctgacaaccaccctaattctttttttaacagattccttgccgtcctgaagtactatctgaactccttcttcccggctcgcaaaagtggcgtcgccaagaagccgtacactccgattttgggcgagacatttcgctgccgctggacgctgccggacgtgcctttgaacacggagcaaactacccgcggaccgttcccgggctctgccagcaatcaggtcgagtttgacgcaagtgccagggtcatcattttaaacgaccaaaatttttcagttgacattcatcgcggagcaagtcagccatcacccgcccatctctgccttctacgctgaacatccggcctctggcgtctgctgcacttcgtacatttacaccgagtcgtacgtcgccggcctttcttcccttggcgtccgtaacatcgggagagcgactgtggtactaggaaat

SEQ ID NO: 69951 - DNA, 2264 bp, Heterodera glycines
ttttttggtaaaccccatcggatttttggttttaaaaaaaaaattccaatttttcagcccctcccagaggaattggtccagcggggctttaggaaacccccccttgagaaaaaggtgttttctttttcgttaaaaaccaccctaaattctttttttaacagattccttgccgtcttgaagtactatctgacctccttcccggctcgcaaaagtggcgtcgccaagaagccgtacaatccgattttgggcgagacatttcgctgccgctggacgctgccggacgtgcctttgaacacggagcaaactacccgcggaccgttcccgggctctgccagcaatcaggtcgagtttgacgcaagtgccagggtcatcattttaaacgaccaaaatttctcattttttcagttgacattcatcgcggagcaagtcagccatcacccgcccatctctgccttctacgctgaacatccggcctctggcgtgtgctgcacttcgtacatttacaccgagtcgtacgtcgccggcctttcttccattggcgtccgtaacatcgggagagcgactgtggtactaggaaatgtaagtggacagaattatcggacaaaaatctgctgatttcccccattttcctttcagcacaatgagacttacaccgccactttccctgacgccgtcgcacgaaactgtcacgccactccgtggttcgaactcaccggcaaagtgaacaacattttttgtcttaattcatttccagccatttttcccccaaatttcaggtggaagttcgctgcgcgcagactaaatacgtggccaaaatcgacttcctggcaaagcccctggtcttcggacaagcgcatcaaatcgttggccaaatcttccacgggcctgaacggaaggtgccgctgatgacactgaagggcgagtggaacggcgaaatcatgctgagacgcactgcgcgcgggtcattccatctgttcaccaacgtccgggccaagccagatgtgcggaaggtagagatttttcaattttcactaagctgattattctttttatttttgtcaggagtgcgttccggtgatggagcaggaggacaatgagagccgaaagctttggcgtcatctcactgcagcgttgtacaccaacaacacacagatggcgactcaaagtgagttttgaaaggaagggttcaaattgcattaattaaggttttccccgtttagttaaacagcacttccaacaacgccagcgggacgaggaggcggagcgcaaacgacagggacgtccatggagcgcgcgccactttgtcagagagggatccgggcttccgacagacgcctggaaataccgcgatgcaccgtgatagcgaacccgaaattgtctgtatattgtatattagcccgaaattgtctgtatattgtatattagcccgaaattatctgtatattgtatattagcccgaaattgtctgtatattatgtactaatatatgtgtaaatatgtacttgacagaccggagccagaaactcacaaaaccacttataggttttttatgtgctgaaatcgagaaaaattttaaaaaaggtctgcggcaacgcgtttaaacaattggttttttcaaccggttaaaaatggggccttcctgattagaagctttttctaacctattgcttagcgattagacaattaccaaaaaagttataacatgaaataacaaaaaaaccaaagttttggaagttttttcctaataacttttttagaagctaaaatttttgtttgttttttgcaagggctggcgccaaaacgaccgattccccctgggtccatgccatcgtttggcaacctggatttacctgggttttcgtcccgaaaaaccaggtccagccaggtcaaccatgcaatccaggccaggcaaattccgatctctaacactccacaatttaatgagaatgcttaagattcataatcgcaattaaaataatacaaaattatcaaaaaaaggaaattacaaatttaaccaaacaagtcgaattaaattaagaattttcatttagaagaacaacattagtcttgctaaattatccttcagagttcagcatgttccccctttagctcttccgggttagcacaagcggtcggagattttgccaaaaagtgatattcgcacttggacggttcgctggtttccacaagttcgaactgttcaccgcactcgaactgcaccaaagtggacctacgaaatgaaacaacatacaaggaatatgaat

SEQ ID NO: 69952 - DNA, 713 bp, Heterodera glycines
atgacagccatttcggctattcctcaccctcctccggtccccctaaacaaagttaggtaatttctctgcgttctgttctgacccggctcgtcgcttccgtccgcgcagtcgcaatagtcgtcgttgacctgttcaaatgggatgctcttcttcccgtccaaacactcaaattgtgaccgcgtttggtacaatggagcaactaaaaataggaaaaaaatttaaaaatactaataattttgccatttacgttggggagagactcctcgtggccgagttggtaattccttttcctccccttttgagcacaccgaagaaaaatggacagtcaaaacaacaaaaagagagagcagcggcaaaaaacaaatgcaattactcataataaattatttgcagaggacaaagagaaattgcttaattgttgttgaactaatagatggaaagaaatgaacaaacggattaaagcaaatgatcaagtcgcgaaaacgtgtgacgtggaagtggaatcaatcaatgaacaaaaatagaggatggactaattgatgagcattccgaatatacaattaaggtacagctggaaattaagagcttggtcaccaaagtaccggtttttaggtccttaaatggaacttcagtaccgggtctgtaaattttccgtaaagaattgaaaaaccccgaacgattcggtcaacctcgacggtcggggtctcgtccta

SEQ ID NO: 69953 - DNA, 2700 bp, Heterodera glycines
attgacctccttcttgcgcagccgggcctcgtcaccagcatcgttacactgctgaagagcgactcaatccgagctttgactggcgcacttcggacggtcgggaacatcataacgggcacggacgagcaaacgaccaccattctcgactttggagtgctcgatgactttgtgagtgtgtttttggcggcgattatactcccgcatcattgttttattttcagaaaatgctcgtcgattcggacattcatcaagtctcgcgggaatgcctctggattctgagtaacgttgcggccgggacagctgagcacgtgacgcgcctgttctccgtggacggactgtccgacagtgttttccgcctttgccgtgacccgagcccacggaagagaaaggtgtgttttgactatccgatttccttccttttcactttcatttttgacattttcaggaggcttactgggtgctggtcaatgcaatgatgggagctcctatgccgctgtacgaccatttgctgagcggtgggctggcaaatattgtggcgcagctgcttcgtgagaatcctgacgcggcgctgctcgaacggacactgaacacaatccgcgcatcactcgaggaccgacctcagtccaaccggcacttcaccatggctttgtttcatcacgtcggcattgtcgggcaactgctgtgcgtcgccagaggagcaacaacaaacaattcggcgccgtcacttatgaatgcactttcggtcggtcgaaacttacacaataataaagttcttggtaaaacggactgcttttaggaacaggcgtcgtccattttgaggcagcattttggcatttcggctcatgactgtaccagctgcaacaacaaaaagaacacgaggggcacgtcaattcaagtgcgaatcaaaaggacctaatcgacggagggcgacacagatgaaacgcgacgacatgccatttctgattgattataatgttcatatatgttggcaaagctattgtataattcccacatttcatatggctgttcgatgtatgtatgtgtatgtatttattgtgtacagtataatttgcgcataaaagcaatttaaacaattcaagaccaaaataggtctacctaattcgaacaaattgaattctgaaaaattgtgacttccgtctttttgttcgctgaaaaatttattttttgaccattttattaggacgagaccccgaccgtcgaggttgaccgaatcgttcggggtttttcaattctttacggaaaatttacagacccggtactgaagttccatttaaggacctaaaaaccggtactttggtgaccaagctcttaatttccagctgtaccttaattgtatattcggaatgctcatcaattagtccatcctctatttttgttcattgattgattccacttccacgtcacacgttttcgcgacttgatcatttgctttaatccgtttgttcatttctttccatctattagttcaacaacaattaagcaatttctctttgtcctctgcaaataatttattatgagtaattgcatttgttttttgccgctgctctctctttttgttgttttgactgtccatttttcttcggtgtgctcaaaaggggaggaaaaggaattaccaactcggccacgaggagtctctccccaacgtaaatggcaaaattattagtatttttaaatttttttcctatttttagttgctccattgtaccaaacgcggtcacaatttgagtgtttggacgggaagaagagcatcccatttgaacaggtcaacgacgactattgcgactgcgcggacggaagcgacgagccgggtcagaacagaacgcagagaaattacctaactttgtttagggggaccggaggagggtgaggaatagccgaaatggctgtcattttcgtgtcatcatttgcccgggaacccttgtgaaggacttacttatatgggatgcgtttttcatttcgatttttctttagggacgtcggcgtgcaaaaatggacatttttactgcaccaatttcggctttaggccgcaaactttgccgtcgagccgagtcaacgatttcatctgtggtatggatttaatgtgtcttatttggggctttttgtagcgataaacccgctttgtctttccccaaagattgctgtgacgggtccgacgaatgggactcgggcaccgaatgtccaaatgtgtgcgattcgctgggtgccaaagcgcgcgaagatgccaagcaacaggccgaagtgcagacggcaggctatgccaagcgcaaagagttggccaaggaagggggtcagtttggaaaaaaaggatggggaatggttgaaaatgggaaaaggggggggggttgaaaactggggcctttttgggggaattggaagtaatgcgatgcaataactggcgtaatgaaaaacacactatttttcgcaaatgttttgacaattttaggcaaaatgttgtcggaaaagaaatcggaagttgaaaagaagcaaaaggagttggacgaattggccgaactgaaaaaagggacggaggaggcgaaaaaagcggcggaagagttggaaaaggaggcgaaggacagggaggaaaaagagtgggaggaggcgaaaaaggagcggacggaggccgaggcaaagcaaatgttcgacaaaatggagaaggacggggacggaaagtgcgtttaa

SEQ ID NO: 69954 - DNA, 899 bp, Heterodera glycines
atgtatctgatcaccacccttttgccaacccatggatcagtgccacaaaatgggaatgcccagcaacaacaacagaacggtgtccaccaccaccacaacaacaatcacagccaatcaaacgggcatcggcgcaacacatcattacagcatatgccatccgccgcgttgatcaaccgtattctgccaaccgaactcatactacggtagacatttggcatataccttcttttactgtgttttattttgcattcgaatacggaactaataaaagaagactacatattctcggtagcagtataggacaattagcgaccattaccgtatgtattacttgactggtagtacgatagttttgcatactgtcgtccttggctacattttacattcaatatgggcaaatataaacatactttttgaattatattaaaaaatactattaaaaaattcttacagtaagctttacatggatttttaagaaaactgtttttgtttatggtaaaacaccgtataataaaaatttactacagtttcatggaaagcatgcaaaaaagtaaatcaattatattttttcgatttctcaaaaacatttttatgcattctaaatattgtacatttgttattttaacttcctaaatgccattgaatttactatttcaaatgcctaaatttaagtgccaatttttgcaagggtcttttcctacttggacatcacatcgcttggccgttgtgcgcaagtttgtcgaacatggaacaaattggccatggacggcagcaattggatggaggtggacctgttctcatttcagcgtgaagtaaaggtgaaacaaaattttttaagtgtattatttatataattaaaaaggttttttatttaatttaattttaatttaaataataaa

SEQ ID NO: 69955 - DNA, 981 bp, Heterodera glycines
atgcctttgccctccacttcaaccatttcatctgttgctgtgcaaaacattgctgcgtatgttgctgatgacaatggtgccatggtgtgtttgcgtgccgtttacgcaatggaccgtaccgcgcattttgatcataccgtacgccatgatggcatactgtgggatttgcgtttcgcgaacccggaccatccgcccgagcggccaatttcggagcagccgcttgggcgctatcgtgcgccaaggtttggcgccgccaccattgcgccaatcgaggactcaaaatgccagcgtcaaaaattttggcgctggcgccgccgtagccaaggggtaaaattgggaaaagcaaattttttcttttttttaaatttattattaaataaattctttaattttattaatttatttttaattttataaaaaaataatttaatgaaaaaaattgtttaaaatatttcatattccttttttaatttaaaatctttataattatattatattgcatttaaattaatattttaaaactttttttaattaaaaaagatttatttttaatttttcattaattcttttatttcttaaatattaaaattaatttaataacatttttattattgtacatttttaataatttttaattaatatttaaaaataattttataatttaaataaattccattaatttgtatttcttaaattattatattaatttaataatacaatatttaatttaatcccttttatcaattgttccccaccttatcagttttcatttgtgtcaattatcatttgaaacaaaattttgtttttggttccaattctcgatgcatatttattctcaccaccccttccgtttgatcggatgttgttttcaaaattttgtttatctatttaatataattatcataaattgtttaattaattttacagtcttttattttaatttttcaaaaactataaatttaatttatttaatttaataaa

SEQ ID NO: 69956 - DNA, 508 bp, Heterodera glycines
atgaatcagactgatgaatggaatgcatatatgaatgaacaaaaaatacgtggcatggattgtgcaaaaaagtgtaaaattattgtctccatgatacagtatgacacaaaatgatacggtgtcacaatcgaatttgagagcattttgaatgttccaccggaaaattttttttattttttgaaattatgcaaaataatcattatgccaatctataataaaaaattatttcctgaaaatactaaactccatttaaaagagcacaaaagttaaattttaaccttggcattacaatcccataaaattcttgataattttcataattttagacccatccccccccccaaaaaaaaatctatggaaaacccagatttcagcgaaagccggccggtggtccaagctctagcgataaaatcggaaaattattttgacacaaatccaaacaatcccacgggttgatctgactgatcccattggtcatccgtaaaggatcatcagcagcagaagcaaa

SEQ ID NO: 69957 - DNA, 145 bp, Heterodera glycines
gatttattttgcttctgctgctgatgatcctttacggatgaccaatgggatcagtcagatcaacccgtgggattgtttggatttgtgtcaaaataattttccgattttatcgctagagcttggaccaccggccggctttcgctga

SEQ ID NO: 69958 - DNA, 1615 bp, Heterodera glycines; identical to SEQ ID NO: 41925

SEQ ID NO: 69959 - DNA, 774 bp, Heterodera glycines
atgcaaggcggacagccaccagcaatgaacatggaccagcattacgagcatctcggcgttccaaccggcttccaacgagcacaatccgccgatcacgtaattcagcaaatgtcagaccacgtcgacaacattgatcgatcgttgcttgccccgtggcagaaatttgacgcggtgaacactttcgtgctgccgtcgattgccttccatctcaaaaacggggaagtgcgcaaagccccactgaatgcgctggacaaaaagatcgtccgtgtggcaaagcggtggctgaatctcccacagcgtgccggaatagagccgctctacctgagcaatgccatgggaggcctcgcactgacaccactcaataccctcgccgacctcagccaacttgttcatggcctgcggctcctcacttcccgcgacttggccgcaacaacaatggacctcctgtgcaccgtcgttgccaagcgtctgcgccgggcaccacgacagcacgaattggccagatacctcaacggttcgatggacggcgacatgaacaacgagtcgacggacatctcttcgacctggacaaggctcagaatggcaacgaggcgactacgaacaaaaattggcgtcgaatggtcggtcaacgacggctcaatgcaactgctcctgaacgggtgccaaatccaaccaaaatcagccgaattctgcctgcgctcagccatccgtgacttctaccaccgccgattgctgtccaagccagaccaagggaagacacacagtgtgacaagc

SEQ ID NO: 69960 - DNA, 276 bp, Heterodera glycines
atgtcggcgtcaattccaaggcgttcttctcaggattcgctggcagaaaaagtgaaaagcaaggagctgatctacgaggccagaatgaagatccaggaacgactgaaggaactcggtttccccgtccaaaacacaacggtcaaagggccaagtggcagcgaacgtttccgagaaacggtgctcaaacccgaggagacgagcgcattcactcagttgcacatggagaatataaagcgacttaacgaggtttttgaacacaatttgtgtaattactga

SEQ ID NO: 69961 - DNA, 989 bp, Heterodera glycines
atggatgtgaaggattcggttggcccatctaaaatcgctgtcaattgtaccatttgtgtgcccgtttggtttggttttgtacgtgttgaagcggacggcgaaagtgtacaaattgaggacaatctgtcattgaaaacaacacagttcaaattgcctacgaatggcgatgacaaagtgagaagagagagggcgacttgtgccgattctatgggtcccttcgctttttcagagagtcgtcatcgctgccaatgaatgctttgtgtttttcttagtgggcagttacgcactttactcgttcgaattgcgtactgagatgagttttttggggtgttcggcagatgactcaccgaccgtccctttttaaactctcttccgaattgagtcgcaaagttcggcggatggtcctcctccccttggccgggaatggcttcctgtggaagtccaattggtccattctgaattccctcctccgtccgttgccctaagccatcaatttgaccattgggacgccctcaggggacggaagggaattgacaaattcgaagtgagtttttggcattcgcttaatcgtgtatccatagtttcagcatttttctgccgcttcctccacaaaatccaatcgttttttggtttgcactgcttttggcgcttttttggcaacgaatttcgaaaattgcgccgttttggagaggtaaaagcacatttaaccaacaaaacaaagaaaatatatttaagaatttgcgattcgcgcctcgggaaaaatccgaaggaagtgaaacgattcgaattgccatttcgaataggaaaagtttgtgtgatgttttttaacaaataaaaagtgaaaaatttcattaccagatcagtgccggaagggaccacctaatcattttggactctttgaacggagagatttggagtttcgggacggggacgaggggcgaattgggcacggggcgagtggaggcggacaattgggcggaggggccgag

SEQ ID NO: 69962 - DNA, 429 bp, Heterodera glycines
atgcgcacccgtccgatctggcaagttaagcaacgattgctgactagccaaaaggttcggtgccgtgatgaaacgaaccagcactgcttaccccgcggcacccggcacggtcccccgaaggaatggatttaattaaattctctccttcggggatttttttccattaggtcgtccgttagcgttcgattgctctagtcaatttttaaaaatttttgttgaaatatttgtcgtgctctgaagggcggcggccgagtgagtaccttcggtgcaggaaaattattaaggaagagagttcattatttatttgttttttgcataattaattcataaatatttttttcagaaactgctctgaaacgcaccaaattttatttgcaagttattttaggcactcagatgctttcactatcaaaaagggagatgaataaa

SEQ ID NO: 69963 - DNA, 757 bp, Heterodera glycines
taattaaatccattccttcgggggaccgtgccgggtgccgcggggtaagcagtgctggttcgtttcatcacggcaccgaaccttttggctagtcagcaatcgttgcttaacttgccagatcggacgggtgcgcatgattccactgttccaagcaccccaccaaaagcaaaacgatataaccaaaatataaggaaaaattttttctccatcttcctttttgatactaaagcatcagagtgctaaaattaagttgtaaataaaattttggtgcactttagagcactttctgaaaaaaatatttatgaaacaaaaaaatcgattttttcaagtgtccgtttggggtactcaaacatttatggggagcaaaaatccaacgcagaattaaagtacaggctatagggaagctattcccgagggattcggtctccccataaatctgggcgcatcggttcggggggaatgccccgaaaacaaaaaatcgattttttcaagtgtccgtttggggtactcaaacaattatggggagcaaaaatccaacgcagaattaaagtacaggctatagggaagctattcccgaaggattcggtctccccataaatctgggcgcatcggttcggggggactgccccgaaaacaaaaaaatcgattttttcaagtgtccgtttggggtactcaaacaattatggggagcaaaaatccaaagcagaattaaagtacaggctatagggaagctattcccgaaaggatcggcctcccc

SEQ ID NO: 69964 - DNA, 1919 bp, Heterodera glycines
atggtgttgctgagtgtcttctgcgctgagctgctcaattgccgtgttcagcaactccgcgaccgcctcaatcaccctgaagaccgcacatacattttcaattcactgaaaggtcgtaaggtgaccacaacttataaggatcgaaacggcatgaccaagactttcttcattggcggtttgtctgaaaagggagcagcactcactatggcctatggtcgcctctcgtctcccttcaatgtcaacatagcggcccacttctatgcgcggcaccgcataaagctccatcacccttacatgcattgtgttgttgaacggttcacagctggaaaagaggaccgattttatccaatggagttgcttgagttggccgatgacaatccaatgtggaggcggtgggcaggcccaatgtttaccgagaggatgtccacaccacctacacgccccgatgttcaattcaatcttggatattgtgatgatgatgatgatgacgatgatgaactaattggagacggacgcgaccaatgtacacaacaatcatctcccgacatgtaccgctggtgacacacacacacacacatgcgcatgcatatatgcgcacatatacgcatgcgcatgtaaaattctctaatttacagcatttttatgccttttttacaattgcttcttctaatccttaattatgcattttttctacccaaaactgaccactcccaaacattaattatgcttagcttttaaaattgtgtcttccaatcgttaattttttcaaaattgtgtcttccaatcgttaattatgcactttttctacctaaaagtgacaacttccatcgcttaattattttcaaattttatcttccgttgcttattctgcatgcttttaacgtccttaaatatgcacttttctacctaaaaacgacaacttcgctcacataaaaatagtatcttccattccttaattttttcaaaattgtaacttctttctcttaattatgcactttttctacctaaaagtgacaactcccacgcttaattattttcaaatttcatcttccattcgtttattatacatacatttttatgaaaaacatgaataacacacaaaaaaaaagataaaattacagaaattgttataaaataaagggaaattggggtatataacatttatcggttgtggttcaccagtctcagcatattttaacaccttgtccttgaacgtgtcgtagcgcaacccctggttctggggcaattcaaattgtaaatagccccgcgtcttctgccgtcctttgttaaaaatcccatttctgccagttgagtttgcccctttgtcccattttgtaccatcccttcacaaaaattcaaattcctttcttcgcccggctcaactccggccaattttgtgcaaaaaatttttttctcacaaaatttttcttttgttcaattcgttggctaatttgcatttttttttgttcgtccattttttgtgcaaatttttttcccatcttgccagatgcgcttatttgtgcccgcccctcgcaaaaaattttcctatttaagcgcctccggccaagggatcgctcattttcacttttctgctgctccctctctctcctctctctttctctctgaatccaataaattttacaaaatttgcccccccccctctttgtttgtcatctatcatttttatgaggcgaccaatttttaaatttttcatttttcagtttcaatggctttttcaaaaatcgcagctaatgcaattgccatcgacctcggtacgacgtattcgtgtgttggagagttccagcgcggaaaggtggagatcatcgcgaacgaccaaggtggagcaaaaaggcgcaagttcgacgacccggcggtgcagtcggacatgaagcgctggccgttcaaattggtgcaggagg

SEQ ID NO: 69965 - DNA, 833 bp, Heterodera glycines
cgccatccaattgtcggcgaactgtcccccaaggccaccgtaatggcacgaatgctcatccgcgccttgcaggtacttacaaaaccatttccaccattcaatcaaaatacggtggtggtggttgaatactgtacaattccaagtccaccgtttcttcagctgctcctctgggccggcgagcgcagtgtgctgggcaagcgcgagcgggagaagcgattgcagcaaatttacggcacgacgggtgggccaaacaattttggcattttttaatttgttttttaatctaaaaggtgatggcacatgccggaagagacggcaccaatccgtgcagtcatcagccggtaaatgataattaaatttttataaattatttgaaattcaaagcaattttcttaacacattgcattaaaattctcaaaattttcccgacggcggcgcctaacggtatcgctgtctctcaatttaccattacctactcatcattgttggaattgttggcttattgtattgcccccccccccttcatctttagggtgttcagccgctcgtcaccccacccccaaatttttttcttaattttcaaaattcgaattttttagaaaaaaaattttgaaaaactttttcagaaaattctaaaaatagtgagaaattttctagcgattttctgggaaattttgaaaaaagttaattttcataaaatttcaaaaaatagcttgaaattttttcaattttagtagagaaaatttttggcgggctggcgcgagaaacgtagtgcaaacatctttagaatactttaaaaataatttttattttcgaatgaatggtataataaa

SEQ ID NO: 69966 - DNA, 383 bp, Heterodera glycines
atgccaaaacaaaacgaaatcgttttaaaatattcctttctggacttgacttggtttcttgatatcgaagctgttttctacgctatttctaaaacggttataccaaaccccagatttttgaatccggttttcagaaaaaatgccttgtggtgaaaacaatatttcacatttcactccataactttgtgagttcggcacggatcgagaccgggataagaccattggaaagagcagcttgagctctacaagaaggtatggaaagaaaaaatagttatttctgggactttttcagaaatcagaattaattctccaatgtggcccaaattttaggcccccagccacagccccttgcttctcccagttttaagtcttggatttgtcaa

SEQ ID NO: 69967 - DNA, 764 bp, Heterodera glycines
atggccaccaccgcaccggcgccgtcgtcggctgtcaccgccgccgttgcaccgtttcttccggaggcaaaatgtgccgctaaccatcaccatcatcggcacaaagcaaatgccatcatcgtcaatgtcaacaatatcaacagaagcagtcatcatcgcaaaaaagtggcggcaccgaagcggaagaggtatttgttgtgcttgttgttgattggggatgccgccaggattcaaattgaaaaaaattttgaaattttcggcattttttaacaaattttgccacaaattggtgatgctaggcagataattcattggaactttttttttcaaatttacttttttagaccttcaaaatcaccaggaaacatttcttccgttgcttttcatcatcaacatttgtcgtcgtcgttgtccaccgccgccactcatcctttgaatttgtcagaggcgacggcaaagtgcattttcatttattttttgctatttctaacggatcaaaaaaaagccaccaaaactgtggttccgcaaaagtcggaccccattttcggacagcaaaatgcccaattttagttggggccccaaaagtgttcgggccgcaagtgtcgggacatggcttttatggtatttgcaaacttccaaattgcaggaccaacaacaacaacaacaattctggtcttgttgctgcagttgcgattggaaatgcgcaaaatgatgggcaaccgttggtaccgccgccgccacttcagtgccataaatgcaaaaag

SEQ ID NO: 69968 - DNA, 248 bp, Heterodera glycines
atggaacttactgaacatgttgtttttctcgacaccgctctcaaagagtaattaacacttaattagcatttactgcctattaattatataatttatttgcccttggatgttccaatttaagcatttccgagttcgattctcagcaaaagcaagtgaacggagtgaatgttcactcggaagaccaatcgaagctttacattctcttcaacaattcatttgttgttttttacgacattacttccgacgag

SEQ ID NO: 69969 - DNA, 727 bp, Heterodera glycines
atgatcagatattacatccaaaaaagattaaaaattttcactttaaaattcagcgatattggccaatctgaggctgatgaacaagaagaagaagacgaggtaggataaacaatagtgaacgccattgaagaaaagtgttatatgatatctcttaatcgattcggttcgatgagtttaagcacgaaagaatggaactcgggttgtggaatgccaaaaaaccggtttttgaaccggttaaaaactcgaaaattgacgaaatttggcacttttaacttctttttttttaaataatcgaatccttacaaattttgtatcatttaaagctatttacagctaattgtaagtctaaaaatcagctggtttcaattctaaatattttttgaaatgattgtttcttaaaaattctttttttttaatgtttatgtttaaaatgtaaattttattttttatgattctaaaaaattttcgtaattaacaataattttttaaaactaataattttaattaatttataaaatgctaaaggatgacgaacaacaacaaaaacaacacttttcggccgctcaattggaccttttggaacgcctatttgagaagacaaaattcattgacttttctacgcgttcagaagtggccaagttggtgggcattacgccagagcaagtcaaagtgagagggatttttaattaaataatacaaaatttaatagccatatttaaaaaataaa

SEQ ID NO: 69970 - DNA, 561 bp, Heterodera glycines
atggcacaatttgtgatattcaacgcattggaaggcccactgccaaatatatccggaaaccgattaagagcgagtcgaccgtaggtttttttaaatttttcttttttttcttttttacttttttttctaatagatttttttttgatatttttttatcgttttttttcttttaattatttttttttttattaatcttttttttctatttttttgaattttctatttttttaatcattttttactttattttttttgtttttctaatttaatttttttttatttttattttaagaagaatttatttttttgttttataaggttaaaataaaaaaattagcttattttattttttttagaatttttttattgcttattaaaggatcagctagtgaaattttcaagtaaatgtttattatatttcgaattatttttattttaagtttaaaagatttttcatttattagagtttttattttattatcagaatttttgtttttcattcaaagggaaaaaatttaaatatttttttttttagttttctaaactaaattttcctattaa

SEQ ID NO: 69971 - DNA, 387 bp, Heterodera glycines; identical to SEQ ID NO: 52041

SEQ ID NO: 69972 - DNA, 247 bp, Heterodera glycines
cacgcctgtttcagggtcgttaccataaaatgcactgcttgtgcgttgcttcgtgggatcatgtacttgtacgtgttcttacgttacttgctcagctcggctgtggggttttggtgtgctggcgcgaacttgtggttctaattcgcgttttacggaccgtaactcaagcgcaccaatgctttgcatgctgtggcggagtgcctggattactggcattcctgctttgatttttcgacctgaactcaga

SEQ ID NO: 69973 - DNA, 1892 bp, Heterodera glycines
atgacaaaattggaccgcaggccgctcggcaatgatgacaatgagctgcaacaggacgacccgaaaagcgcgttgcgcgagtcagcacagctccgacggtcggcattcattggcgttgccattggcaccgccgcgatgcttactgcagtgattgcagtgccaatgctgtacaattacatgcagtatgtgcagtcatcgttgcaggaagagctggcattttgccatcaccgaacccagggcttgtgggatgaatatgccaaggtgggtggaagaatggatcaattttaatcagtttttaatgttgaccagatttagaattgcaaagcgtaagtataatggtacaaattcggccctcataaaaactgttattgtatttttattccttaacttcgtctaaatgatccgataatattactttgggcagaactacctttcatgatcagtgatattttatataaaaatgcgtcctatagtttttcgatatttaataattttccttgtgtgctctaattaattactttttcccttttaggtccagcatctgaccggaaacgaacgggccaaacggtcttcctacgctcgcgctggcggaaccggcggtggtggcggcgggtatgcccaggccggaggcagcagcggcggtgggagtggcggctacgcgcgcgcaggcggaagcagcggaggcggttacgcgtccagcggtggcggtggcggaagcagtggaggaagcggcggcggaagcgctggctattccaaatttggtggctatgcttcctccagcagtgcgacttccggtggcggccaacaatgtacgtgcactaccggcccacccggtccacctggacagcctggcacggacggacagccgggcaatgacggacagccgggcggaccggggcagcccggtgcggacggacaagcgccgcctcaggagtatggtggcagctgcactccggaatgccctccagggccgccaggtgaggggaaaacgtggagaggaaggccaatgatggcacctggaggaaaaaaatcgtattataaaagacaaaacgaaatgtctctgatcggaactgatcagcaaaatctatcggcaaatatggccactaaaattataaccgtgtggggaaggaaattctaaaaaaccttaatcactgattagataaacctgatcataggctcttaatcatattggccaatcaatttcgtttgctgatataagcttcagctcaaatcactcttgaatccatacccttgggctgctgatttaaacaacgcactcataaaaccatttcaggaccgcctggacccggtgggccaaaaggtccgcctggaaacccaggagcaccagggagcacgccggagggcggatagtaagtcttgtttttagtgctctaaatgttttaaagaattttatttgccattattgtaattttattgcaaattatacattaatgaattggaatgttcagcggtgcttctcctcccggaccgcctggaccctcaggcccgcctgggccacccggaggctcgggcacgccaggccctcccggaccccctggacaaatcactggcggtaaaactgaattttttttaacaaatttacccctgttctttttgtttttcagggggtgctccgccaggcccacctggccctcctggaccacctggacagcccggacaagctggccaacttggatcacctgtatttttttttatcaagatttgttgtatcattcaaactgtcatttttctagggcaacgcacagcctggtccgcctgggccccctggcgatgcgggaccacccggatctcccggaaacccgggcgccccggggggacctggccaagcgggaagcgccggcagtggagggggatgcgtaagaactttttga

SEQ ID NO: 69974 - DNA, 951 bp, Heterodera glycines
atgacaaagaatgactttgccattgtgggagaaaatattttagcgcttttttggaggacacgacaaatcggaccacgaggcggtagatgaacttaaaaagcgccacgatgaaatttttggcacggattaagctcacaaatggcgaattgatctaggatgaccaatttatttgattgtttccattacagattttccattttcgggactttggtcaattttcttcatcgaacactctcttttcgtgcccaaatttaaaattcaaaaggtattagttatacaaccaagcatgaaaatattcatggatctggaaaaaaattttctcaaggataagccccactttgtcccagtcccgatcgaaaatccaggtcccggtcccggcgtttcaggtccggcaagtaccggtcccgaaaaattcccggtcctgcttcctgctcaactctttgtacaataatatatggaatccatatttttttcctgtctgatctgtgggtgccctgaaatgaacgaaaaacatgtattagcttgtttggagtttttgttatgagttcgatattccatattttcgtatttttctttcgataaccatattttcgtatttttctatgtttcaggatttatgtccatatgttggcattatttacatgttttatgtcaattttttggatttttcaaaaaaccgctattactaagtagaacgtcccctcagctaaatggcctgtttaacctcattagaaaactaacagaaaaaaattttttttacaaaatttctcaaaaatgttttttttatttaaatgtttctttaatgttaattttgtgtaaaaaataagcaaaaatgtggaaaagttcatattttaataattatgatgaaaatagagaatatttggctgaataattgtaaaatagcatattattcaaaatatatatttgaagaagttagtatattaaaataaa

SEQ ID NO: 69975 - DNA, 211 bp, Heterodera glycines
atgattgtgtggaaaatgttcttgcgttggccaatcgttatctgttggaatctgttgaaaatcgttgtgttgactttttgatgaccaaaagtaaaaaattggccattttcaaattccgtttggcccatcagtacggtgttattggcatgaaggtcaaattaaaattagaaaattaatacatttaaaattagtttcagagaaaaattcttag

SEQ ID NO: 69976 - DNA, 850 bp, Heterodera glycines
atgcttgtgccaacttcccaatttccctttgccaatgtgtttttggcatttaaccacgcgcgccattttgaagaaaaggtaaaaaattattgtcatcagcagagatgagattttttggaaataaaaaattgcctaagggtagccaaatacagaggaaaaacctcatccccgatgactctttaggttagagccctaaattgtatgttttcatttttcatggtttaaaatgattttgcactgtctcaaaatttaatggtttaaatttttgagtgcttaaattcatttttaaaaaattttcatccatattttgggatttttaccatattataaaccatttttcgggtattttttatatataaacatttactctaatgaacatttacatataattaattataaatatgtgcatttccgttaattcgtaggaatttgctctccgttgcttggatcacatcgatcagaatgcgtactcattgctcaaatccgatgcttttcttaaaattggcacaaattacctctgtgaaattctggcccgtgatcagcttcaggctgaagaaatcacaatttggaatgcggtaaattaaacatttggtgattttggcactatttcgaatttttgccaaactataggctcttcgctgggcggacgaacaatgccgtcaaatgggcaaggagtgttcggcggagaatcgtcgtgccatgcttggaccggcacttttccaaattcgttttccgttgatccaattggaagaatttccaagaaacattggtaattaattaaaatttatcatcacatataaatattttcattttatattaattggaacagacaggtcggcactgcgtttta

SEQ ID NO: 69977 - DNA, 58 bp, Heterodera glycines
ggctatagaggaagctattccggaaggattcggtctccccataaatctgggcgcatcg

SEQ ID NO: 69978 - DNA, 157 bp, Heterodera glycines
tcaaattctttgataacgaaattgagagacgagtcgaattgagaaaaagtgccgacggatacagcggagacggcacttttttggacattttggaccaattcattgaccaaatggaagagcaaacggaggaaaagcaaagcgaaagcaatttcataaa

SEQ ID NO: 69979 - DNA, 107 bp, Heterodera glycines
atgcgtcggatgtgcttcaaatggggagcaaatgccaacccgaagactgcaacggcaaaggcatttgcaacaacatgggcaattgtcactgcgttgcgggatacggg

SEQ ID NO: 69980 - DNA, 162 bp, Heterodera glycines
ccggtggcgcctatccggcacacgccggacctacattttccactatttttacaagttttttgccttaaaacggccaaaatttggtcatttttagtgaaaaagtccagttgttacccagccagggaaaaaaaattattggataaatttgcaaaaaaaaaaaaa

SEQ ID NO: 69981 - DNA, 133 bp, Heterodera glycines
atgaaaaatgagtataagcaaaaaggaagaaaatattcgagaaaagaatggcaccaaaattatgccgaaattagcaaaaaaattggaattagtcgcagaataattgatgaatggaagaaacaattcggaatga

SEQ ID NO: 69982 - DNA, 822 bp, Heterodera glycines
  unsure (1)..(822): unsure at all n locations
atagggcgaggcaaaagatcaaacgccagaagaaacaaccggaagccgttcgacgccaggcaatcgccgacttgctctccggatgcccgaacgagttcggccaggtcctcaaatacatcgtgagttcgttcgttcgttttttccaaaattaataaactaacaaattaaattttgcaggacgacatgaagtacaccgacaagcccgactacgactggatcatcgcgacattgcgcagcagcctcagcaacgccggcgtccaggaattcccctacgactgggagacgggcaagcgcaacgcggcaccgggcgctggaggcggcggaggaggagacagctacttcaactgatgagccgtgcagcagcagcagcagcagaagaatcgccaagaagcgncaccgngcagaanngaacaaangaccagcgcggncgnnggcagaaaagccacggcgacgactcggaacgngcnanggaagagangggnngacccccgcanganggnggaaaggaagncgnaaccgnaacaggcacgggaaaaacgacgcgcnagaaaacgcgnnnccccgaaagaccgagcgggccgaaggccaannaagagaaagagcccacgcgccgngccaagnganngaaaaaacaagncaagngcgagcaaaacnnnggnngaagcagacaacanngcaggnagngacnggnnaaaccancngaaagcgngggggaaagagnnnangcgacncnnngcgngagcancnnngacnnanagaggcaaanagcgaagcacagggaagaacatggcgaaaaatacaaagaaaattacgaaaaataaa

SEQ ID NO: 69983 - DNA, 3569 bp, Heterodera glycines
atgatgaaagtaacggcgattgtatgctcatttgtcctgaatgcttttgcatcagtgaggaacacatgaaaaacgagcgagacgaattgaacagtcagcagttttatccggtccctcacgacgaatttggccaccacctttggtccaacgctgtgcttgtcatcggcttattgttgagtgggtgtggctaatgcaccagttggtttaattctcatcctatttttgcaatttttttcaggggaacggctaatccatcccagtgacattgacccgatttatcggcatttgccggccagtcaacggcctcggaatatgccggtgatgccttcatcggcctttcacgtccgtctcttcctttttcttcgttcattcggattacttttgttttttgagggtcgcatgaaaggctttcccgtggtgcaagtggcgcttatctccgagtcggctcagctgcagatgatgctctccacttatggcatcaccacacaaactccccacgaagttgagcccgttcaggtctgaccgaagaatttggaaaagtacaaattggaaaaactaacaaaacattgactaattgtttgtctcctctctcagatttggccttcatggcgaatggtgaaattgtacgagcgtttgggccgagacgaaaagttgggccttggcggccgaccgttgcgacccttggggccattgaacacgtcgaaaatatttcgaatttgtgggaataccgtggtcatttacccgctcatttttgagctgaaagatttctacacaaacgcggactcttcgactttaattgaggacataaaggcaattgaattgggaaaacgagttttggacaagaagtgcttttagggtgatttggaattcatttcgagaaggtggaaattgagtggcaggttcattttagcacttacaattatgcatgaatttagttttcttttacgaaaatactccttttaggccaactttttgtatgattttgcgtgaagaaaatgtcgccggagagtgagtaaaatagttttaaatggaacctccttaaaactatttcaggtacttttcaaatatgctggaccttttggtcagtcttaaaaacggcttcgtaaatggtgtccgagttcggctgggaagaatccatgtcagtggtgtcattcttcataacctattgaaatgtttatatttattaagcaattgatcaacaccggctgtatagaacatgtttgtactccaaatgaaaactccattctatacaaaatgccaattcttccccattttcagattgacatggtcaacccagacgatgtcgagtttgatgtcgatgtccttgaagaaattgacgcaaaagaagcattgctccgagcacggaccaaactgaggaaagtgccgccagaaaagttagaaggattactatcggagcagcaattgagcggaatgggagaccacgaattggtcggtggagcctttattattgtaaatagccaaaggacggaaacaatgatggaaatcggcgtgctttggtcacccctcccaattttacacttaatttagtatcaaataatcgcccgaaataatatcgaaaaccttcgcagagtcgcttttgccgtgggttattttcctctttccctccaaaatgcttctttttagatcgctgtgttgcaaatgcgttaccctggtacttttgttgtacaaggaggttgtccaaaggcaagcacatccaaaataatgacatcgattgggttaagaaactcttctcgcccgaatggaacgtgtgtacagccaagcgtgccaattccgatattggtggttggtgcgctattgcgcggctaaattacgcaaaactatgatcagtttggcgccgtaatacacctgttcattctctgttttcacgttaattttctttcaacagatcggtcactaatcttttggtccgtggaaaacaggtaaaaaaattgcctatagatttgaattaaattcgaaaatgcacttttgggttatcatcggccaaaaagcatcaaaagaaatcaccgtcaattcgccgtcaacgcccgtagaattgcagaaggccttgttcgacagttgcatagacccgtacgctgcggtgtttcagcaagagctgataatcgcatgttcagatttggtaacgtgggaaatatctcattctaaattcctttttggcacagataactcagaaaagtgcctcctttgacggcgttctcaccattcgtttggcatggtgacttatatgcattttccaatatttaactattttttggaaaaaaattcattaggtaaacattaaatttcattgcaaatcataatgcttacctaactatgccgttttaaaggtacactgatgcgattgatatgcttctgtgctttgttatggaagacctaaagaaccgtcaaaaattgaacaacggaactgccgcttctccgattaaaaccaatgatttggtgacattttttgaacgcatttggcagggttccattcgcagagaatttggttttttgcataaaaattttttaatttgggttttttaatagaaagtgggaagagcgtttgtgccttcgatttgcctccgacagttgtcaaaaatctgcttgctgaactgttgacaaagcaagatgtctggagattgctgtaagtttggattgtgcatttggatttatttattttttcttatttcagttcgcctttgcaaatgaaaaaattgaacggggcactgaaccgagtaccgacaaatttgtacgacagagtttggaaggtcggtcaaaatattcgcagagaaaatggctggcattgctgtttaagatactcgaaagagtggagcaaggcatcgtcatttcaggccatgtccttcctcaggttggaatccgaatcaaagaatgttctacaaattgaaaccaataaagttgtccaaatccattctcagtacccaactctgcatgttatgacgcagcatgagctcaatttttcatacaaaattggtgttgttttcgacttccttgaattggattccttacccaccctttttagagtcgatgatgagcgacatcgcaaaccctgaaaatcgtcagctgattgtcgaattgttttgtattgtagctacaataatggagagaaacccagtaaataataagcgacatttttaacgatgcaaagacgctgaattaaggaaatttatttcgccggtgcgttggactgtgacttggtcagtcgttttaagtaattcccctgatcaccgattgtacgcttcccattccagcttttgtcacaagcattcaacatgttctgtgaagagcggagggtcaaagaccgcgtgaacatgacgcctttctacgcaatcgacgacgacccttccgccccctctacttcctcttacttaatacgggtgggcgtttcttttacacagattggacttggttgttaaaaaacattttcactaaaatgtttaatacattcttctccagattgttgttgacaaattgctcaaagacacaaataccaaacacacaatcagtcttcgaaacaatttactgcaaaaggccgaagaagaatgttcaattat

SEQ ID NO: 69984 - DNA, 585 bp, Heterodera glycines
  unsure (1)..(585): unsure at all n locations
atggacctgatcgccctcttcattctcgttttggtcgaaatgactgtggccggtgctcaaatcatttacacgccccacgaggtggcctttctgcagaacctcgtattttacattgagcgtacttatcgcacgccggactttggcatttgggagagagggacccgatacaaccggggcaacccggaactgcactcatccagcctgggatttgtgaaggttagtgcagtttattggttttagtcactttgtttcccttttccaattacaggccgcgctcgagtcggtcaatggttttaacgcatatggacacaaagggaccagtgactcggtcatttacgttggtcagtcattcatttactgtgtcattgcgaattgcgatgcatattttcttttttataaaatcacagacattgacggacacaaccgcaacagaacgacctttgagactttgttgcctcgcgagtccaactccaaaaacaccgacgcgtcattgattttgaccatcggatggncttcctttgcgacccatgacgaccaaaagtttgagacgacacttagcaaatgcctgcgccacctcgagggacg

SEQ ID NO: 69985 - DNA, 700 bp, Heterodera glycines
atggtcaaaatcatgaagccgggacgtgtggtgattgtgctcagtggacgctatgcggggcgtaaggctgtcgtcgttaagagctatgacgagggctcatcagagaggccgtatggacatgcattgattgcgggaatcgacaagtattttcatgatatgattcttggttttatcaaaatccctaaaggtatcctctgaaagtgaccaagaagatggggaagaagcaagtggagaagcgaattcgcatcaaaccattcctcaaggtcaccagcctccagcatttgttgccaactcgttgcatattcgaggccgatttggacaagagtttggtgaacaaagagtggatcaaagagccgcgaaagaagaagaatgccatcattagcgtcaaaaaagaatttgagaccagctacaaagccggaaagagcaaatggttattcacaaaacttcgtttctgagcggttacagaggggaaacaaagcgatttccttatttgcattgttgttgtttttgtgttatgagtaaagatttaaagaatcgaagaaacatttttgatatcgtaatttaattcacataatatacataaaccaatttgaaagcatgttttcatgactttttatacaattagaaatttcgaaaaagtgtggggataaactttataattgcctccctctgtcttcatccgtttggcatcactaataaa

SEQ ID NO: 69986 - DNA, 990 bp, Heterodera glycines
agtggcatttactggtgtttagctgcactcaaagtattgggagaaaatataaacgacgaagaaaaattagctgacctcatcaaaagaaaatcaaaatgaagatggtggttttgctgcggctgatggccatgactcacacattttgcatacactaagtgcgattcaagtggctgttatcattggcagactcgatattgtaggtgacaaattttattttcaccaaaaaaacgatcttcagataaatttggatgcgaccgtcgaattcattaaatcgttacaacaaaatgatgggagttttgccggtgatcacgggggagagattgacacgaggttttctttctgtgctgctgcatctctgtattttcttaatcgtcttggttcaattgacgttcataaagcagttgaatttgttattaactgttacaattttgatggcggctttggaacaaggcctggctctgaaagtcatgctggacaggtggggttgaattatttttaaatcttgagtaaatcgctaccaacttgcttaggtttactgttgccttggaacactctctgtttgtggttgcttggagcttattgatgtggaacgaaccgcaacatggctggctgaacggttccattcaaatacatgttttgtttattatcttttgcttcaatagacaatgcccttccggcggactttgcggacggcccgagaaactgcctgatgtgtgttattcttggtgggtgcttgcatcattggccatcataaaacgattacattggattgatggcgaatctctcacccacttcataatcgccagtcaagatgatgaaaagggagggatcgccgatcggcctggagatgaatctgaccctttccatactgtttttggcctttacggccttagtcttttgggacataaagggttggaggctgttgatcctgtattttgtatgacaaagaaatctctggtgaattttgcttttgcgtgatgatatgccagc

SEQ ID NO: 69987 - DNA, 452 bp, Heterodera glycines
atggcatttttcacaaattttctgtccatcggagttatttttctcgccaattttgtcccacaagtaagccaattatttattaattattccatagtaatcttctttttttcaggcttctccatgcactaatgttataggttatgtaccaggatgctgtcatgacatagttagcttaacgtaatatttttaattttaaaaataatttatccaggggagtaactaacatcgtaattgtcccaagacttggtatatctttgtgatttttgggaagccaatagagtttgttaggcgctttcgaatgataccagtgttgttggatttggtcaacaaagaaaacagttatgatgctctaaacttggctcagacggaactgccccacttccatgccgagaacctatagccccgactgtcagtttccgaaatgtcgggcccctaaatgtcgaataattaaa

SEQ ID NO: 69988 - DNA, 473 bp, Heterodera glycines
atgaatcccaaaataattccaaatgaacttttgtttgaaataatcgcctttatccgctttaaccgcaaatgggcaaagtgccgagtttgtttttcatttgatcaatttttgatccgacggcaagctgattggctgaaattaatattcacagtggtcagacacatattttctcttttccacaaataaatacatgaatttactctgtttttctccctcgtcccccaccaaaattggctcttttaaaagaggacgatccaatgcatactgtatttgatggattactgtcgcaaaaatattgtttctaattaaattatttaaaataaatactcaaaatacttttcaggttaagaactgcaaatcgttggtcagaagtttggtgaatcgcatcaaacagattccagtgaattatgaggtccacatggatggtgtgccacaaagtgcggcacgtcatcatgctgaattgacgtacattg

SEQ ID NO: 69989 - DNA, 367 bp, Heterodera glycines
atgtcatcattcacgacttcttcatcagcggacgaattttctcctctccaacgtaaaaaatttgttaaaattcataattaaaatacaataataaaaacatttttcaataattaaatttgctaaaattaattttttttttttttaattaatttttcatttttagcaatttttccaaatctgagcacatcggaggaaatgagtgttctgattgccagaattgctgagctgaatcgagcgaaaacaatggagccatcaatcgcaagttctgaagtgtttggacaagacggatacggtagagaatttaagcataattgaggggttacagtatgaaattttataatcaaagaaatggttttgaaatttatta

SEQ ID NO: 69990 - DNA, 1772 bp, Heterodera glycines
atgccgtggcataattcatctgcaactagttgtaggcatcggcctgatcaaaatgacatttagcctctaatacatttttgacacactattttcatagggaaattggcgattgaagtttttaaaattttttaaaaatctttttgtgttttccagtgcctggccgttcgccctcgtcactgaagcgtgcctcgttgccgcccgcctccgccatgttcacgccgccgtccacgctgatgccgatgccggagcagcgaatccaactcagcgggcagtgccaagcgtgccgcttggaacttagtgtatgttttctgatttaaaaaaaaatccaacaaaacgccaagatttttccatgacttttaaaaaaaatgaatttcaggaccaacacaagggcatccaatgcacagcgatcagccagggctgcaacagagtgttccactgggtaggctttcttcaaatctatctgatcagaaaatttttgtcccatcattcccttcctcccctacctaaaggtcatttgttgaaatgatcagtcattttattccaacatttttcattctgacccgattttgtttgttggggggtggtaaatttttaaaaattttcacacaaaaacatatttcaagaatttgctttgctggttttctttcaaatttactgaccggaaaaatttagaaccccccctcccccccactttacccaaaggtcattattatatgttgaagtgatcactgatcaggcattttattccaattttttttttcaatttgacccgattttgtttgttgagggatggcaaatttttaaaaatttgcaaaaaatttctacacaaaagcaaatttcggaatggactttgaagaggaggggggccttgttgttggtctccttcccttatgcaatttaagcgacctgatcaacatgaatcgattacgtcatccccgccccgaaaattaaaaaaaaacaaacaaaatttaaatttcatagaaagtaaaaaaatgaaattttgaaaaatccaaagtttttcaaaaaatgccatcccttttgcttcccttgcaggaatgtgccgatctgacgccggaagcgttccaagaattctgcaaggacccgcgcctggaatggatttgccgggactgctacgcgcaaaagggggccaactgcgtttttgcaatatgacgacgacaacacaatgccacacaaacacattcggtgctgtgatcaaatcgattgatcgactccaatcaatgccaatcaatacttcgatcaatcaatagcagtgtttagcatggaaacactgatcggaggatgactgacctttccaatgatttcatcactaattaacgccatcccaacttttttatttttttacaacgactcaaaagccccccactttcctaatgaccaaacaaaaactttttgctatacaaaattagctgtatgtgtgtgctgttgtttagcgtctccaaaaacattcattcactttttgcgcctcttctgcaatacaaaaccaaaaaaacccattttcatttatatttcatattcttaaatttaattaattaattatttatattttaaattcatcttttagatttatgtattgtttttatattatatgatgatattttcttgtgcagagctctttaacaatatttaatgctttcttaattaagtaaattttggaatttatcactcgaaaatttaaaaaaatttctaaccaaaattggggtcagaaggctgtaactttttgagttgagcattaaaaaatgtgaaaaaataaa

SEQ ID NO: 69991 - DNA, 147 bp, Heterodera glycines
atggtgggggagttggggcttactgtatcatggagggctattgagtgggtgggcgcattggctcccggacaatccgacagtggacaatcggacagaggtggacaatcggacagtgaggacaatccgacagagatggacaatcggaca

SEQ ID NO: 69992 - DNA, 60 bp, Heterodera glycines; identical to SEQ ID NO: 51396

SEQ ID NO: 69993 - DNA, 196 bp, Heterodera glycines
ggttcgatgaaactttttaaaatataagcctaaactttttggcctgtttaaaaaggaattaaaaatttttaaaatatttattcatctcccttttgatagaaaaaacatcagagagccttaattaacctgtaaataaagttttgtgtgtttcagagcactttctgaaaaaatacttatgaattaattttgcaaaaaa

SEQ ID NO: 69994 - DNA, 306 bp, Heterodera glycines
ttaagcctaaaatttttcgcatatttaaaaagcaattcaatatttttagattttttattcatctccctttttgatagtgaaagcatctgagtgcctaaaataacttgtaaataaaatttggtgcgtttcagagcagtttgtgaaaaaatatttatgaattaattttgctaaaaaaataaaatagtgaagctttaaaaattaataaaaaattttaaattcagaattactggagttagcatcatagcagtgcttttccttgtctttttgatgccctcgcaaaatctggttcgcttctgatcagtttat

SEQ ID NO: 69995 - DNA, 431 bp, Heterodera glycines
  unsure (1)..(431): unsure at all n locations
atgtttttttntgtgaagtatatattgagagatgtttngttgtttgagttggtgtgtgtgattttttgtggatagtatgtgtatataaatgtgtttttnttaagaaggaatgaaataatatgngtattataattagatagnttaaaataaatttatttatattttgtatttttagaggaactcagccattgttattatgactcaactgtttatttccatccgtgacaatcatttataagataattttttgtcaatatggatctctaatttatttatgaggacatcagagataaaagttagctgcaacaatgatatccataaatatggccgaatcggaaagtataaggaatattgtcaatagacatcgtagtttgcagttattttaaaattaacgactaatctattccttttgtcttaggctacaaaataaa

SEQ ID NO: 69996 - DNA, 1056 bp, Heterodera glycines
atggcagctgaagccttggtgaaaagtgagcttgagaagaaggaggaggaagagccgaagaaagcagaagaagccaagaagcagaaggagaagaaacttaaagagctggagaaacaggcggtagaactgcgagtcatgctggctgaggtggaaaacggtggcaaaaccggcaaaaaccccgggaagggagattcaccggggagggcaaagtgggggaggaaacgtggaaactccccgctcggacaacccgaaagagggcggacaggacgtcgacgacaccttatcattggaggaggaggcggtgccattgctgcgccgtccggcgggaatgtcggcaattttgttgccaacgagagggccggaggaggaagaagcggcaacttggtcttcaacgccgacggcatggcgagggaattgtcagaggatgaggaaaatgagtgggctggggaattttctgtcaccctcccccgcccaaccgcttcacccgaacaaaggagggaagaagcgccggggaggacgatgctaatcaggaatccggaggggacattcccggatgaagaccatttcttaaatttgtcgacattttcacccctcctattttttctccttacaaaaattttcatttctttcttttgctttaaatttcacttcttttcatttttgccatttacataatgttttcttcaacttcaccacttgccttttctttccaaattttctgcctattcacatctgactccgatttctattcctttgtttacactttctcagatcggacatttccatttggccatttgcattcattatttttcctttgtttagcctttttccccgccaatttgtgcccttcggcgtctaattttggcttcactttttcactcgtccaatttatcatcatcgtaatcttcttccctctgaattattcccactttttgacccccccatcataatccttatcgcttttttctcctccaatttcttttaccatatatccaacgacatcttgccttttaatcaccgaccaatttctgaccattttttatcatcatcaataaa

SEQ ID NO: 69997 - DNA, 175 bp, Heterodera glycines
actattagagcatctgaagagctctcgaatgataccaagattgttggatttggatgacaaagaaaaaaagttatagtcgaaaaacatgtgctggcgcccaaccgtgcgcgcccaaaaattttgaaattttgcagactattagagcatctgaagagttgggactttttgcttgtca

SEQ ID NO: 69998 - DNA, 132 bp, Heterodera glycines
taaaaagcaattaaaaatttttagattttttattcatctccctttttgatagtgaaagcatcagagagccttatttaacttttaattaacatttggtgcgtttcagagcacgttctaaaaaatatttatgaa

SEQ ID NO: 69999 - DNA, 165 bp, Heterodera glycines
aaaaaataaataaataaaattttaatttaaatttaacggattttctgtgataaagccgcttgcttcattatttgtttcttcttctgctgttggccgatcagcagtgaccaaattcccattcacatcgaactgttgcggtggcagcgattgctttacggacaaacg

SEQ ID NO: 70000 - DNA, 742 bp, Heterodera glycines
atgccgcctcttccacagccaacggaaagagacgcaaaaatggaaaaacatttcaatcgccggtttgggactcgaccgcaacaatttgtgtcaaataagccaatttgggctagacaccgactctcgcagaactggagtgcaggaaccatctgtgaatgcaccggagtcatttacaaggtcaaatttcccgacggttcgacaaatcgcttccatgcgaaccaattgcgaaaccgggaaaacacggcaaatggacacgaaccattgaatgttttaaatgaggcattccatctgccgatcaccgcgccgaacgttggaaatgtagggcaggaccttgagccaaggcctgaaccgatcaacgatgagctccaggacgagatcgaacccgaacaggcccgtcgaagcccgacaccgccgcaacaacaagtgccgcgccggagtggacggaaccgccgagcccctgatcggtactcgcccggatgagccaatcaaaaggggaggtgttcgggtgatgaccccgagagagacatttaaattattttatttaagttatttccctctctctgtctcccgcactatttctctcattttattgtgtctgcactccctttgtaaggtcagacacatctttcctcccccatattgtgacccccgctcatttccatcgttcattctgtcttcttgttaatttcccacatttttctccgattgtcctccgccccaaatattaatttatttgtttcca

SEQ ID NO: 70001 - DNA, 481 bp, Heterodera glycines
aattgttccgaggaagcgaatccatgtgatattattaaagaaggatttccaaaaaagtgctgcagaccaagaaccaaaaaaactacggtaggtatacgatattagtatacaaaatgtatatgcgttttacgagtgtagttttttagaataattctacagaaagggatccacatgacattactgaagaaagaaatgcaaaaaagcgctgtagtcaaaagataaaagaaatttttgaaagcgagacaactcagccgcagccagacaatttgcgctacccaattaacgagtatattagtactaatgagtttgcgcatgaagatattatactcgagctgccaattagtggtatgttaattagttttattacattttgaagacagtttttgtttcagaattcacaatggaatacatcagggaatatggtttggttcgaccgctgttgttcaaagaacaaccagagaatttgggaatgaggtcttaa

SEQ ID NO: 70002 - DNA, 96 bp, Heterodera glycines
agatgcctgatatcccgaaataaatgcatcaacaccgaaatctccggagtgcccgtcagtttttgctgctgtaacactgaagatttgtgcaatgga

SEQ ID NO: 70003 - DNA, 431 bp, Heterodera glycines
  unsure (1)..(431): unsure at all n locations
tctgnggaccaattcttagagtcttgngaccaattcttagagtctttggaccaattcttagagtcttgggaccaattcttagagtctttggaccaattcttagagtcttgggaccaattcttagagtctttggaccaattcttagagtcttgggaccaattcttagagtcttgggaccaattcttagagtctttggaccaattcttagagtcttgggaccaattcttagagtcttgggaccaattcttagagtctttggaccaattcttagagtctttggacaaattcttagagtcttgggaccaattcttagagtcttgggaccaattcttcgtcttggatcagttattagagtctttggaccaattcttagagtcttgggaccaattcttcgtcttggatcagttcttagttttcttgggacaaattag

SEQ ID NO: 70004 - DNA, 1356 bp, Heterodera glycines
atgaaatattacgacgttcgttcactctacccccacacgaatgctgtgacagcataccccgtgggtcacccaacacgagtgaacatcattggtgaggcagagcaggcggttgactggcgacgcgccgaccaggtgccggtccgaggcattctaaaagtgttcgttgtgccgccccatcacgttgatgtgcctgtactgcccgtgaaatttgatcagcggcttcttttcccgctgtgccgtacgtgcgctctgcaacatccgcatggagccgtcaatgaggactacgagtgcacgcatcgcgaggatgatgagcgggggtgggtgtccactgtgacgtcaatcgagttggaggaggcgcttcgcaacgggtaccggtgtacggcctactatcgctccgtcgagtgggacgatacgcggtggagcgaccgcgtttttcgaggctacgttgcagaattcatggccatgaaaacacatgccagcggcttcccggatgaaattggcacaaccgaggaagatcagcagcaattcatagaggaatgtgaggacaaattcggaatccgaatcgagcgggaaaagatggtgcacaacaaggccaagcggaccatcgcaaaactgtgcaacaactccctgtgggggcgcttctctttgcgcaatgggttgtccaaaatgattgtgaccgactcgcccgcggaactgcgcgctctgcttgacaacccagcggtggaggtcagctccgttgaccagctcaccgacgaatgcgttctggtcacctatgcggccggaaacgaatgggttgaggaacacgagtgctcaaacattgtgctctctctttggacaacatcagtcgcgcgcctccacttgttgcggctaatgcagacggttgtgcgcgcaccaaactcggtgctcatctacaccgacacggacagtgtgtgtttcgctaatcgtgaggcggacgggtgccctctggagacgggacctcacctaggcgacctttcggatgaatggccggaccatgaactcgtggaatttgtttccggcgggtgcaaacagtacgccctgcggatgcggcaccaccaaagcggggaggagaaaacagtgctcaaagtacggggcataacactgagcgccgatgcctgtcagcttctccactttgacacattcaagaggagtgtcctacactacgcaatgtgcccaatgtgccattcaaatgatgatgatgatgatgatgatgatgatgatgatgatgatgatgatgatgatgatgatgatgatgatgatgatgatgatgatgatgatgacgaagacatttgttcaattttgattgagtaccccaattttctgaggccccaacattaa

SEQ ID NO: 70005 - DNA, 1209 bp, Heterodera glycines
atgcatcgcgaaatccgcgaaacaatgcatatgcaactgcacagatgcagtgacagttggtgtggtcctagcgacccaatttacgggcggtgcaagaaggggttcccagccccttactcaaaatgtacgattttgcgcccggacaggcccgcgatgtatttccggccttcaccatctgatggtggtgcccaattagaggtaaacggcttaatatacgacaactcacatgtcgtgccgtataatccttatattctgctgcgttaccgagtacaccataatgtactgtttgcatatggtaacaaagcaaatattaaatatgcactcaagtacccattcaaagggccaggacattgttatgtcgagtgcaaagaagagtccggcaataaaattggaattgatgagccggctcaatatgccaagatgaacttccgtggtgcaacggaagcatatgccattgttcattcaatgccatttgcccgtctttcgcatcatgttgtcaaattggcaattcatttgccaaaccaacagcccattgtatatagggcattccagctggtgagcaaagctcaacaaatccagcaaggcgaactgccagaaacgcagtgttcagcctattggaaacaatggcaaaatgagtggaagaatgatccaaagtttaaggacattcttttcgaaaaagtccctgagcggttccgatgggcaaaggacaaatgggtcctgtacaaaaggcagcaaattaaaaggccacctatcggccgaattgttcctgtacccccatcggacccggaaaggttcgcgctctattcacttatgcgtcactttcctggagacccagaccatcttaagatggttaatgggttgctttgtacctcattcactgaggctgcaataatgcatggtcttcttgaagacaacaaaatttgggacaaaactctggcggaggcagctctgtcgcgctggccagatcagatgagatggctttttgtgagcatcctggtctatggccagccgagtaatgccatagaattgtggaacaagtacaaagaccaaatgtacaatccgcaaggcattattactccggcacagcataaagtagcagagcttgaagccctagccgacattgattggcggctgcacagctgctttaacttaagctgtgtgcattttagcctgccagacccgccaacttcaattgccaaaaatacttga

SEQ ID NO: 70006 - DNA, 380 bp, Heterodera glycines
  unsure (1)..(380): unsure at all n locations
acgattttgtttaccctcccccgtcncctcttaggtgtacgcatcaaagaagtgaaggaagtgttgagggcgaagtggtcgatttggcgccggtggaggccgaccatccgatcggaggctttgggaagacgatttcgcatgttaattgcgttctgaaaacgacaaaagggtcgcgcgaattacgtttggatccgaccatttacgactcactgctgaagcaaaaagtgacaccgggagacatcatttacatcgaggcgggctcggggactgtcaaaaggatgggccggtcggacattttcgccaacgaattcgacttagacgctgacgaatttgtgccaatgccgaagggagacgtgcacaaacagaaggaaattgtccaa

SEQ ID NO: 70007 - DNA, 1254 bp, Heterodera glycines
gcagcaaaagcccaacaaatcgctgccctttagcaatggcaccaaacgcgcgaggggacggcaccgaaagtttgctaatcgggcgggggatggccatcattcagcggaacgcggaacccaacgtgaacggcaagcaggtcgggcagctgaaatggcatttctatccgtcatcctttgcttttctgtgcagttggttgttttaccccatcaaattgtggtggacatcgaattcgattgtcattcgggtgaccatttgtccgcttttcccttttctcacggaacaaattcagaacgtttcttttggagtgatatttccggacattccattcgttctgcttttctcaatggcactgggctcagttccaacttttccgaagtgctccgaagccccgagggtttttgccgtgtttattttcacataaaagagaaatttgcgcagggattgccattgattggccttcgcgcaacatttactatgtggacagcatcaaaaacgaattgggagtgttgagcatcgacggacgctttcagaaggctttgctgacggagggactgaacaatccgaggcattcattctctcccctccccccattcgttggcatttgatttgaattccaacagggcattggtaatcgacttggaaagtcggcatttgtattactccgattggtcccgagaagggcccaaaattggcagagtttcgttggatggaagtgcaaatgaaagtcggttcggagagacactcccaaacaatcgttggacaacgacggacttttcagttttcatttcggacgacgtgcacttgcccaacggaatggttctgctgcagcagcggagatggctttgttgggttgacgcgggcattcagcaattgtcatgcattgggctggacggaacggggcgaagagtggtcagtcaatcaatcaatcatcactcataagctatgtatgaccccctcccccattttggcatcggaattaaaattttgccacaatttctgaccgtttcaaaagaacggagataaatggcgaaagccaaccgaagaaaaggcattttcagatttacgccccgcttgagtatccctttgggctgacagtgaatggagcggaggagcgcttttactggaccgattgggaagagtttgggttttgatgccttcggaataactgcccctattcttaagcatgaaaatccattccgtggatgttttcgacagaagggtacacccaatttttgccaggaggtggcggaaaa

SEQ ID NO: 70008 - DNA, 946 bp, Heterodera glycines
atgggcttaacactgttggccaccatacccgcttcatcatgtttacagtccgagcagcgcgagctgtacattgacaactttacattgatgttcttcgacagcttaatggtacagttcaatggtgtttagaatgaacttttctacgatagtaatggaattaattggtgcctaaaatttggaaattaaaataataataatttcattaaggttgctttgaactctgcttttccggaacatcaagttcaatacgacttctttgaatgtaattttattttaaattaattacctttataaaaaatattttaattttttataaaatgtctttcgaattcaatctttctgaatttcatcaaataatttttttacacaaaatgtgaatttaatatatgcaaaaataaaaatttaattcgatagcattatttattgattaatgatgacaaacttaatatcactactaattatcataattatgagtaattcaagctgattttaagatgaggatgaggacggtgaaattatgcgagtgcgtacggacgaagagttggccacctttttgtccgatttagcaccaaattgtgggcggcaacggcaaccgctcaaaatttgtttgagtaaattgataaaattaatacactaattaagtgtgattaatttgaaggaacgtcgaccaattgccatcggcaacaaagcattgattttgaggacgatgaacatgaacaacaacaacaaaaccaacagcaccaatttgagccggaagagctgcagtttgttgaacgactgtcagatggccaatttggcagtgtgtataagtgagaaaattaattgaatgaatcagtccttgaaaaatccttatttcgaggatttttccgaggttggccacttccacaaaaagtgcaaaaatcaaatatctgattttttaatatgttttttatcaatgtttttaata

SEQ ID NO: 70009 - DNA, 523 bp, Heterodera glycines
atgaggcctacaaaattcctggctagcggttttcgagtcgagaaatctctcgggtttttggtggcctcgactctcggacttacttttttcatctctcaactaacatacagagcattggacacccgaaatgatcggatgatggcggtgaaatgtatcgcggtggatggcacaagcggcacacggcaaagtctgctcaacgaaattgccattcttaaggtgctcctgtgatctgatgcaggacagcagcagatctataatccaagcaatttaaagaaaattaaacaattattatttaattggagcccattaattaatttattaaaatttcgcattttagattggataaaaaaaccaacaaatataggaaactgaagctatcaaaatgcttgaaatttgtccaattaattttatttcacttttcatacttctcagtagaggtgtgcccatgcgaacattgtccaattccatgcggcactttttgtggacaatcaactgctcatttgcatggtcaagcaaatactaa

SEQ ID NO: 70010 - DNA, 913 bp, Heterodera glycines
atggcattgggccgtttcccatttgggcctggatcagcagttatggtgccaaatctgttcacaatcgaatcactgatcagcaggccggaaacgatcgccaccgtaatccgtcagccggaactgagtgccgttgggtacggtttcgaccgtctgatcgctggatggtaatcgggaaatattcaaaaatgatttgaaatgatgagcagtaacattaataataagctggaacataaattgattgaaggaaaatcccatttttgggtattcaattgtccgaagaaagaaaacggtatgccaaaattttgtaaaattaacgcattaaattggaatgtgcgctaaatgggcgtaattttgggaatttcgatcacaaaccttccttgatttttataattttctaattttatttcacctgaaagccgacaatttttagggttgatgaaaattttaaagagtttcaaagggaattgccatttaaattgaaaaattattaaaaaattgcatctcaaatggatttttattcactaagtttggaatttccagtctcaatttaaattttataattaattagtttttttgctttagagagatatatttaaaagaataattaaaataaaaatttaataatattttttaaaatatttttaaaaatttctttcagtctttcactaaatccgaaagaacgtctcagacccgaacaaatttatcaacacgactttttggcagctcatagaccaatggaccaaagtttggtggccaaatttattgctgaaaagaggcaaaattcacaattttgcggaaataacggaataatttgagaaaattcacaccgtgtcaatgtttaaatttgaatctatgtaaaggaaactatttaattgaatataagaaaatgcataacttggtagtagaattttca

SEQ ID NO: 70011 - DNA, 214 bp, Heterodera glycines
gtgcttagcagtccatggcgtcgccactccatctttttgggcagtcacgcaattgcagcgagcgaagaatttgaaaaatgctgtgtaaatgggatgaatttggcggaatatttaagcaggattgacggagaatgaatgaatgaatgagctgctgatgaaccatatgaaacaaatttttggggtttttaactttttttttcatttttaaatgcaa

SEQ ID NO: 70012 - DNA, 505 bp, Heterodera glycines
caaaagttttttacaaccacttattgccaatataatttcttgcagattgaaagccatccattgcctgccggttctcggcacagcaaagcactaatagggtgtttgactcacttcaaaaaataattcattacccaacagttttttacaaccacttattgccaatttaatttcttgcagatttaaagccatccattgcctgccggttctcggcacagcaaagcactaatagggtgtttgactcacttcaaaaaataattccatacccaaaagttttttacaaccacatattgccaatctaatttcttgcagattgaaagccatccattgcctgccggttctcggcacagcaaagcactaatagggtgtttgactcacttcaaaaaataattccatacccaaaagttttttacaaccacatattgccaatctaatttcttgcagattgaaagccatccattgcctgccggttctcggcacagcaaagcactaatagggtgtttgactc

SEQ ID NO: 70013 - DNA, 405 bp, Heterodera glycines
aaaaagaccgaagcgccgccgctttcgccacccaaatcgacgcaaggaaaagcggaagagcctccgtcagatgttttttcttcaggtgggaaatggattgagaggagaaattgcgtcatttgttgtgtggtgcccccgaaatttccaattttttcagacaacaacatggactatggaacattgaaggattttgaccccaaccgatttggagcaccgccactgaaaacgcagcaaaacatggaaaagaatggtgaaaacgaacatgaacaatttcggggatgagaaaattgtgatcactgatcagtcatttattttgcaaattttttagcaccgccgctcaaagtgccagagaaacgtgccaccgcaaaaaaaggcaggataaaaatggatcaattggaaatttga

SEQ ID NO: 70014 - DNA, 75 bp, Heterodera glycines
atgtggtcatacgtatcattaccaatgcatcgacaaatagagtgcggtgatttggctttttataacttccaatta

SEQ ID NO: 70015 - DNA, 408 bp, Heterodera glycines
atggatgtccatgacgaggaagttgaaattattgggactaggtcaaatgagaggcaaatggaccgggctcatcgacaagaacaacagcaggaaaaattttactcccaacaacaaatgtctgaggaaagtgaagaagcattgttttgcatttctaagcatgacgttaaagaaataagccaagtggtcaaagcaatggcattccgagacgtgagaagcaatggcaaaaccatggcagaaaacattccgttttagcattgcacattaaatgtaagcaatgagggcattcgcttggcagttgacgaccaacacaatcagcaaggcagtgcctacttcagatccgagcacttccaagacttcaactttcgtacccaaacatgcagcattaaaataccgatgaggcctcttatg

SEQ ID NO: 70016 - DNA, 533 bp, Heterodera glycines
atgtctggaagtgaaccagtgtctaatgagatcctaaacaagtcagtaataacagttgacagggacgaatggcaaatttttaaaattttatagctaatattgtcgggagaagtgccatttttattcggaagttttttcagaagattttgggtctcgatgatgttaaaatttatatccggtataaagcattgatcaatttctataatattacccaagcatggattgcttgagtcggtttcactattattaaatgaattggcaaataaggtggcaaataattcagatttctcagcactgttatgatagcatttattttcataaattagattaggtatttcaaagggattgacattgaattttgtatatatttataaattgaatttcttccctttgaaatagcctttttctcaatttggctatggtatttatttgtttgtatttttatatgtaaagaaatgctatcgtatagtgcttttttggaagttttagcttgcctgaataatttagccttttctttgatggatgctaataaa

SEQ ID NO: 70017 - DNA, 646 bp, Heterodera glycines
atgcttaactttttgcaatcgcttaaccaaacatttgctcaacagcaacaaaaggcgccggacgatgaagcggaggaaggagaggaaatgaaagagcaattggcagagccaacaatcgacgcattggtggaggaacggatgaaagtcaattgaggggagggggggggggaggggaatgatcaaatttaaaaaaaattaaaaaaaaaagtcgaaaaatgattgggcttaattaatccctgaccaaaagtggtcgtctacattttcacggattgccgatgcatttctcattttcatttttttcttgtaaattttagcaattggagcgttttacgcgtgaaaaacgcgaccgaaaagaagcggagaaaagagcagcggacagaagaaactaatgggaaatgaattgaagaattaattaattaattaataattaacaaaggataattaattaatttttcagaattattttttaatgagaaataaaaataattaattttttaaattaatgtcgtcattagcccatttaaccttttagattaattatttgcctatatttatttgtaattctttctccttcttttattaatcttttcttatcaattattttttgcttatttgtcgatttttacaatttttgataataataata

SEQ ID NO: 70018 - DNA, 556 bp, Heterodera glycines
atggagactgggagattatttttcaacctagttcaaagggggtatataattggagaccggcagattaatggagactggcatataaaaagagcaaatacggtaaatggataaagtatattatgtaaattattgcttttcagccgttgctcaaagacttggaggtgaaatttggacaaaagttcaagccgaccaccggctttgagggaattgtccaagggattgtcgtcggcgaagacggatttgtccacgtcaacggcgactaccggcggaggacgaatatgcacccggagggcttctgatcacttgggccgatcatttaggatctgatcaaacggcggaaattccatgtctttctcaattttatgtgccaatgccaaagcttttccctttttttcacttttcatatttttaccggtttatttcacttggctatttaaataatgtgcatctttcttgtgtgtgtttatattacttttattccttttaatttgtttgtttttgctgttttatcacttcaatgacattttgtgcaaaaataagtgaaaatgaaaataaa

SEQ ID NO: 70019 - DNA, 3827 bp, Heterodera glycines
  unsure (1)..(3827): unsure at all n locations
ttcaccctcttttctgcactaaaagcaaatgcaaatgttttgaggatttggggcggcggattttacgaattggacgaattttatgagcaggcggacgaattgggtaaaaggcaattaattaattgctgctaattatttattaattaatgagttaatacgcatttatttgtaatccttcgataatttctgatggttaattttcaattttcgggcttctcatttggcaagattttatgttcgcctgctcattgtatcccatcgatcctcattttttgcgttcggtggaagccgaaattgaggaacaagtaaataaaaaatagggaaaagggacgagtgaatggcacggattggcattttgtggaaatgccattgtttaaccgaaaaaacatgatctctcccaacagcattctgatgaatgatagttacgtcaagataaacaatcacaaatcatctctgttttccgattgcgatcggatcattttttctggctcaatgccaacatttgtccgtgccctttgtgtatgatcggcttcacttgtccagactgatcagtgtgatcagtgatcagtctgtccttcccccctcttttggcactatccacattctctgtccttttcatgtgcttcgccttcggcaccatccgtcggtgctctgttgggcggggaacaatgaaaacgaattggccgtgcgttcgcaatggtatccttcgtgggattaccccgaggaggcccaagcgcgggactatgtgaaactgtacaaaaaacacattcaaacattggccgtcaagttggacccgaccagaccatttctgctgtccagcccatcgaatggaatcgaaacggaaaggcaaattaattaaaataaaataaattaaattaaaaaagtaacgaatttcagggagggcggagtgtctaaaaacccgggcgacccggcgtacggcgacgtgcacttttactcggagtcggtcaatctttggaagccgtccaatttccccgtgccgcgctgctcctccgaattcggtgttcagtcaatgcctttgcggtgattgggcacccgccgaagtgttgaatgaattcgcttttccatcagtgggacaatggcacgttggattggtccgtccgattggaattacaaaagcggcactttggtcagtcggcaacatcaccccggcggcgttttgaatttgccggcaatcgtttcgcaacatttcaatgtcttcgtttggtccccccattttcaattcctttttcattttaagctcctctcctccaacttttcttctctctctttgtccgccccttttttcatcgacaaattcgcttttctctcccaaattcatcaggcaattgcacttcaagcgcaaattgagcattaccgaaggtgaaaatagcaaaactgaacaaacccagcgaagggatggaatggcatttccatttcatcattttgcattttgattttgggtcgttttggcaaagtgccagttcagtgttccttggctgttacagtcactttttgcccttctgcttggaatttatctttgattactccaaaatgctctctctctttttctgaaggttccgttctcatttggacgaggccgggcttggccacacaatgtgcgcgatgtattggcaattgaacggtctgtctgtccattgcgtaattacaagcaactaattaacaaatttttcaattcaattaacagatgtttgggcagcgcccacttggtcaaccgttgactttgacttgcgttggaaagttggccaccatttcgtgcgccgttcgttctctccgctaatcgtttcaatggtccgtttggaaatgaaaggacaatcactcgattcaattttcatttattttttagtttttggactcaaatggcattttccgcctttggactgtctccgatttgtctctgtccgtccaaaatgccattgtgcgactgtcacttttcccccttcgcaacggactttccccccttttcactgccaatgtttccgtcccaaatatttctccgctttcctcccaagagattcctctcccgtaaggcattaattaattaataattaagggtaattaatgatcaaagcatttctctttgttttcctaattgttcagtgattggcctcccattgcctttgttcgtcctttctcttcttatgacgagggtgacttccttctcatcgccgatctgatcagttcccgtggtgatttgctaagtccccgtgccgttttgtaccccgacaaaatgttccacgcggggctctacggaagtgccgcggtgtcctccctcagagacaacaaaaacggcactttctccgtgaaggtcactctcaccaacaatgttttgccattgctttggctcgacctcagtgacgcgtttaaaaagtgccaaacatttgccaattttcttttatttttacgtttttttcagtgccaaccctgaagtgcttttcttttttgaggtcatccacgggcatatttcactaactgccatttttccatttacatttttaggaaaatgcatttccccgcagttttcgtcccaccattttttcacgctttcaaatttgtagaaaacccaaaagagttcgaatttggcaaagatgacatttgctttgatggcattgtgacganacaaatgtaaaaaggggataaattttatcatttttttactaatatttattttcattttcacttatttttgcacaaaatgtcattgaagtgataaaacagcaaaaacaaacaaattaaaaggaataaaagtaatataaacacacacaagaaagatgcacattatttaaatagccaagtgaaataaaccggtaaaaatatgaaaagtgaaaaaaagggaaaagctttggcattggcacataaaattgagaaagacatggaatttccgccgtttgatcagatcctaaatgatcggcccaagtgatcagaagccctccgggtgcatattcgtcctccgccggtagtcgccgttgacgtggacaaatccgtcttcgccgacgacaatcccttggacaattccctcaaagccggtggtcggcttgaacttttgtccaaatttcacctccaagtctttgagcaacggctgaaaagcaataatttacataatatactttatccatttaccgtatttgctctttttatatgccagtctccattaatctgccggtctccaattatataccccctttgaactaggttgaaaaataatctcccagtctccatttatgtgccgggggggggggggggataaatagaattttttaataatttatttggccggcttcttcgtgatcgtttcgtccatctttaaccgtttcagttgccctaaactcgcgcaaaaaagcccagaaggctgtttctatgcctcaaaacataaaaaattacaaaaaaaaacttcattttgatcacgttaaaaatttcgacattttgaccgacttgtcgacactttgtcccactactcccaaacattgttagacctgtcaaaacattgtttaacccatttaaaaacaaatatcaagctctacgcactcaattacccccaaaatctcccactcactgcgaaagccgacttttttgaccaaatttttagacaaatgaccaactcaactttgggctagggactcaaattttttaaaagaaccgcctcaaaatgctctaaccaaaaaccacctcgcccattacccacggcaacttaaaagccgctacgggcgcaaaaaaaacatgcaactctaaaaaaattcggaaaaattccctttttgaccagtttttcggacaaatgacctacttaactttgagctaggggtccaaaattt

SEQ ID NO: 70020 - DNA, 1075 bp, Heterodera glycines
aggttgataaacaattaacattgataaaagaaacttaatgaaaaacgcattttttaaaggagtttcgctcaattttggacaattcgcggtccggtaccgtactcttctcattcggcaccgtagccaacacgcgcactttgggcgaatcgttgcgacggatgcttctccgcacattcagccaattccccgattttgagttcatttggaaattggacggagaatcggcagaaaatgagtcggaactgatcaaagcaacaccaaatgttcacactttcgaatgggtgccgcaaaatgccattttaagtgtgccattcttttattgcactccttaaattttgtcgaattttgagggcatccaaaattgcgcgcttttgtcactcattgcggccaaaacagtctggccgaagcagcaaaaatcggtgtgccaattgtggccattccgctgttcgctgatcagctttacaacgccgtgttggcaaagcaccgagggatggcagtccacgttgacattcgccagctgatcacagacaaaacgggcaaagtgctgggaacagcgctcagtcgggtgagcaaaggtggaccatcgattgatcggatcattcgatcacttttcacaaccaaacaaaatgaatgagaaagcaaaaatgaaaagcacttcaaatgcatagaaaattaattatttttaggaggatttattttactaaagcttttttttgttttggacaatcagaattttctcaacgaattgggaatggcatttcgaattccgatgaagaatcattaatctccaataatcagttttaaaattttaacagaatgttaattggtttcttaggttctccacgatgcctcttttcgtgccaatgccaaactcatccgaaagaaaatcgctttgtcgcccttcggtgcaaaagagcaattggtgcgttgggtggaatttgcagcggaatttccgcatctgaacgagcttaacttgccaaccgatgctgaattgggatgggttgcttattattcaatcgatgccattctgttctccattggtgcgatatttttggcaattttggcactttttttg

SEQ ID NO: 70021 - DNA, 77 bp, Heterodera glycines; identical to SEQ ID NO: 42007

SEQ ID NO: 70022 - DNA, 522 bp, Heterodera glycines
atggctaaagaaaatgaaaaagaattgaatccggaggtaatataattaatttaatttaatattttattttaaaaacttttttttccttttcagttggataagccaaatccagaagaaatgccactcttggaaaacactcccatcaatgatttagtcaaaaaaattgaccgttcagttggccatacatcaaaatctgatttttcaaagcaattctcatggctgttgaagtgtgcattatgcataattttgccggtaaggcacattttaatgaagtattagttaattaatatgtacatatgttggaatgggttccttttttaatttaaaaatttttgatggagacacgaacttgctgattagattatcactgatcaataaaaaaaatttcattttataaaatataatttttcttgattttgattcgaactttctgctgatccgaaatcattgatcaacaaaaatcactttcagtttatgaagccaaatacattttcttggcctttgacccgaacttctttttga

SEQ ID NO: 70023 - DNA, 342 bp, Heterodera glycines
cacgccgatggtggccaaacgaatgccatgacgacgtggggagagggagaagcatcgcctggccaattcgagagtctcgaccaaattccgtccagggacacagaaattttaatcaaattgaatttaaaattcaaacccaatgaaatttatttgttattattgttcgtgttttcattcttcaaatatcaaaaatatttttgacatatcgcccgccaccttcatttgagaaaaaacaactgtgagtccctaattttatcatttaaattaataattcatatttatatttttgtttgtccattagttcgttcattttttctcaattaaatgattaattaattttgt

SEQ ID NO: 70024 - DNA, 3610 bp, Heterodera glycines
atggtcaatgtgctcggcttccccgctttgaccgctccgaccagcaaaagttgggtcactggcatgccgttgggcgtgcagctgatcgccgcaccgttcaacgaggcgcttctgatcgctgccgccaaagaattggaacgcggattcggtggatgggtgaaaccgggccaaattgtgccaaacatttgaattgggcgaggacggaaagaggggaaggaaagacggacagacaaatgatcaaacgacaaaccatcaccggactaagaaaaaatgcactaatttcatgaaagtgttcgaggaaaaaataaaatttatgaaaattcaaataatgggtcattttaaagaaacttttttaaaaattagactatctgctttatttattttttgcaaataaatcgtcataacttatctcagctcgtgctggcgcattttagaaatcctcgaaatggtcaaaaacctaaaaaatatataaacccacaacttttggtacttccgggttttgtcaccccccccccctgttctaggctagtttgtaacattggtctcgaatctgacatgtatttggacatattacgaaccccggacccaaattcgaacaaaaagtctgaaataaaatttttaaaattcactttttgttctaaaataaattaaaacaagcaaaaataaactcaaatcattacaacatcaaaaaataatcattgtgcacaggctcgaacataaatgtgagtttctgaaaaattcgaattttcgactttttgtttgaattcgggtccgggatttgaagtaggccaaaatggatgccatattcgtgatcaacaaccccaaaaacccttcactttttcacgactttttagcaaaaaactggggttgatcggaaatattttcagtccttctaatttgcacaaatcattcattgtacaccaacaattttcataatgaatactcataaaatagttaattatgcattcatttgatatgtaaatcaaaaaactgccattggatttgtccgtccgaagcagtgaatgaaaaagcgatcagcagcagcgaatcagtgaaaatgattcgtcagcatcagtttttttttgtcatcacttttgctgtccattcttttcgcttacatttttcattcattcattcgttccattaaatataatttttccaaaaaatattttccatctaattgataaaaatatttatttaatagccaaaaccaattgatctgagggttttgtaaataatagcttcatttatggaaggagaggggaggggggtcattaagttgtaaagttgtaattacatcctaaccaacaactcaaataccgtgtgagagtgttgtcgagaatgtcagtccttgagtgaaaattttgaatggtcgttatttacaggaacccacccacacacttaccgtacccagcactttaccctcttctcccttcattctttgttcaccgatttcgtgtgccctctccccaaaatgtgctcctccgtcagtgccgtcgtccttctcgcggctgaactgcttgcatttgccgtcctcgtggcaaatgccgccgacagtccctttttttctttttcttttttttgttctttgcacttaacttacaaattcagagaccggacattctgaaaaggtgtgcgctccattgaaggacaaggacaagggcttttacgatgaatgcttgaagtcggaggtggtcaaacaaaagggattcatcccgaagcatttgcgccctccgtggttggcccttgacatattcggggacaacagagcggaaaaggtggacagcaattgctacgcctgctacaagggcagcatggcgagcggtggaaaattcgatgaggaggaatactgcgcatgccatgtttgtttttgagggttaaaactgcacaattgacattttagaaaaatcaaacatttgtttttcaaatttttgcttttcaaaaactttttgtttttgcaaaaaaataagaccctgacaaaattctctctgattttacttttcttgggttttttgttaaataaaaaaaccagcagacttttggccaatctttggtttgggatttgttttggctcactttctttagttttatgatcggtcattaatttttaaaacttcttcagtatgaaaacaaagccccggacattaaatttggaaacttatttggctccatccaattgagcgataaactcgacagttgcgtggataacttctacaaagttgctttggtaggcatttaattggccgttgccctttcgcctaaatttttggtgaagatttggtactgtatgtcagtttctttggtactgtagggttcggattgatactgtacgaattgaattcagagcaaaccaattaaatcaactacatttaaaattatttctttgttgcttagatgccaaaatgcggaaatgaaaactacgaccatatccgtcactgtgccattgtaccaacattttatattttatttatttactttttaatttaatcattttatctcaaaggttcacttctacaagaacgatccggcaagcgaacccgaaggcgccgagtttaagcgtaaactttaaaaaaaacatggccattcattccacgggcttttaagggactcttttgctgttggacgggtgcgtgagcggagtgaaaaccgcatgcaaaggcaaagtgaaagtcgagttcaccgagccgggcaccggcttcttctccggaaattgttacgaagaagccaaaactgcgctcgagaacgagtgagtgtccgggcccaaaacactatctatcattgctgaattagtggccagactttggcaaaggttggaaaataaggacgatttggaaacttgtcagcacttagctggtttggctgtacattataatttttgcagtttcgaactcagcaaagggaatgacctttctggtttttctgaaaaagacgagaatggcactatcaccggtggaaatttatttattttttaaattaattccttaattcattagaacaagcagacgacagcaccgtgttcacgttgcccgtgctgttgcagcatcgcaagtgcagcggactcggcagtgccaccatggacaacacgttcaaggacatcactctcacaatcagcggcggcgagtaagcattgaacaccaattacatccaatcactttcccactaaatatttgttcagttgcgagtcgcaaagcttcaaactcaaggacgtggacgcaagcaaagtgagggaaaagcaaaaagaggggatcggtcgaatggaatcggtcggacacactcacatgatgagttttagcagcaaatgttcaggcagcattcaatttcttttttcaaattcaaaatcattaattataagacgcattaatccatttatttgtgattggtttaataaaagttattttttgttcctaattgtgccaataaaaattttttgtagggccgtgtgcaggaaatgcgcggactcgagctgagaatgagcgacggcactgccaaacaatggactgacgattcggggaattatcaatacacaaagaaggatcagctgatgttgaagccgatggagaacatcgataaaatcgatgaatttgggaagttcaaaaatccatcttactga

SEQ ID NO: 70025 - DNA, 1057 bp, Heterodera glycines
atgaagggagaagagggtaaagtgctgggtacggtaagtgtgtgggtgggttcctgtaaataacgaccattcaaaattttcactcaaggactgacattctcgacaacactctcacacggtatttgagttgttggttaggatgtaattacaactttacaacttaatgacccccctcccctctccttccataaatgaagctattatttacaaaaccctcagatcaattggttttggctattaaataaatatttttatcaattagatggaaaatattttttggaaaaattatatttaatggaacgaatgaatgaatgaaaaatgtaagcgaaaagaatggacagcaaaagtgatgacaaaaaaaaactgatgctgacgaatcattttcactgattcgctgctgctgatcgctttttcattcactgcttcggacggacaaatccaatggcagttttttgatttacatatcaaatgaatgcataattaactattttatgagtattcattatgaaaattgttggtgtacaatgaatgatttgtgcaaattagaaggactgaaaatatttccgatcaaccccagttttttgctaaaaagtcgtgaaaaagtgaagggtttttggggttgttgatcacgaatatggcatccattttggcctacttcaaatcccggacccgaattcaaacaaaaagtcgaaaattcgaatttttcagaaactcacatttatgttcgagcctgtgcacaatgattattttttgatgttgtaatgatttgagtttatttttgcttgttttaatttattttagaacaaaaagtgaattttaaaaattttatttcagactttttgttcgaatttgggtccggggttcgtaatatgtccaaatacatgtcagattcgagaccaatgttacaaactagcctagaacagggggggggggtgacaaaacccggaagtaccaaaagttgtgggtttatatattttttaggtttttgaccatttcgaggatttctaaaatgcgccagcacgagctgagataagttatgacgatttatttgcaaaaa

SEQ ID NO: 70026 - DNA, 190 bp, Heterodera glycines
atgcaatggaaaccggaagtgcgtacaaaagtgattagaagaggtgcaaaagtgattagaagaggtacaactgtgattaaaggaggtacaaaagtgattaaaggaggtacaaaagtgattaaaagaggtacaaaaatgattagaagaggtacaactgtgattaaaggaggtacaaaaatgattaaaagag

SEQ ID NO: 70027 - DNA, 436 bp, Heterodera glycines
ggttcgatgaaactttttaaaatataagcctaaactttttggcctgtttaaaaaggaattaaaaatttttaaaatatttattcatctcccttttgatagaaaaagcatcagagagccttaattaacctgtaaataaagttttgtgtgtttcagagcactttctgaaaaaatacttatgaattaattttgcaaaaaataaataagtaatgaaaaagtcagaatttcgaaaaattttaaaaacaacaagcgttggcattttttctggttaagttagtcctttacaatggagaaggcctgcaaaatttggagagattatatcgattttagtgcgctaggttcgatgaaactttttaaaatataagcctaaacttttttggcctgtttaaaaaggaattaaaatttttaaaaattttattcatctcccttttgatagaaa

SEQ ID NO: 70028 - DNA, 331 bp, Heterodera glycines
tttattattttgcaaaattaattcataaatatttttttcagaaactgctctgaaacgcaccaaatgttaattaaaagttaaataaggcactcagatgctttcactatcaaaaagggagatgaataaaaaatctaaaaatttttaattgctttttaaatatgcgaaaaattttaggcttaactttttttttataaactggtcagaagcgaaccagattttgcgagagcatcaaaaagacaaggaaaagcactgctatgatgctaactccagtaattctgaatttaaaattttttattaatttttaaagcttcactattttatttttttagca

SEQ ID NO: 70029 - DNA, 116 bp, Heterodera glycines
aatttttaaaaattttattcatctcccttttgatagaaaaacatcagagagccttatttaacttttaattaacatttggtgcgtttcagagcagtttctgaaaaaatatttatgaa

SEQ ID NO: 70030 - DNA, 399 bp, Heterodera glycines
tccttcgccgaggccgtggttcccgtccagttcatggtgctatcgacgttgccgttccgattcaaccatacggtccaattggcgaatgagatcacccaagaacgcttagcgctgacaagtcgtacacgagttgatgctgctggagaagtgcagacgattgtgatggtgctacgctcttccatggagtttgatgacacacagttgaaggaatggctgaacactacgagaattaatgcggcgtttcatgacaatttggtccacattggcttcaacgacaacgaaattgggtgtgttacagtttgggggtttctgattttccaaccattttttcagagaattgccatcaccatctgctgatgctgaatccgcgtcgagaacgagaaccaccagcagatcgtt

SEQ ID NO: 70031 - DNA, 879 bp, Heterodera glycines
atgctcagcgagtataaaagcaacgaaattcggccatttcgctcttcccacacattcattcattcatttccgtattttcgccttccgttggcctcgacaacgcaacagcagcaacagcagacggaaacaatcgacgcagaactgtgcacaacaaccgacgtcatctgtctgctgttaaacactgggcatatctcacaatcatcaccatcatcatcagcagcagcaaaagcagaggacaacaaaacgcatggaccaaaagtgataaaactttagaaaattttttgaaaaatcacaattttctttgtttttttcagccgactcagcgacttcgcttggatggaaacattggcgtggctcggtcgtgcagaagtgggcatgaagctggcgctggtcaacacccggttcaacatgctggtggacaagcaattcatgctacggcagtggcgctttggcgagtttcacatctgcgagcgggaaggagcacaacgaggcggcgcagaaatcatgacatcggaagacggcaccaacttcatcacgttgccactgcccaccacgccgatgccgagcagtgtcgtcggcttccaatcactctccatttggtcgaaaaaattcaataattttcataatttccccccatttttgcaggttcatcaacgcggacgtcatcaaatttctgcgccggattcgccgtctgttcgccgaggacatcgcactggaattctccactcggcacacggagtttcgcagttggcaagtgattgcgcgacatgtttggccactgttacgggacgggatcagcacattggtgtgcctgaggaagtgcgatttggccatgctgcgcaaacacgtgtcgccgaccgtgctgttcgactgccctga

SEQ ID NO: 70032 - DNA, 508 bp, Heterodera glycines
atgaccgctgaagagatggcatccgaggagatgaaaaaggtccgtgaacagttgaccaaggagaccattttggagcaccaaatgtccgtccaagaaggtcagtggaaagtttcggaatcgcaacattgtgaccgacggaaaacttggcacctttttgcgacttttgacggttttgggtccccaattttggatggtttccaccggttttatgccgtaaaaaatgctaaaattacgcgaattggaaaaaaaatcagcgatttatggggacacattcacatatttaatttttcaaactaatttaattaggaattttttaaataaaaaaatttttccctattttcaggcactccgacggacatgttcaagtgggttttttctgcgtttttttttgttgcaatttcagtacttttgccatcacacatttatttgttattattacacatttattgtgctttttgcagggcgttgtccacttccaaaacattggaccgttttgggaattggatga

SEQ ID NO: 70033 - DNA, 65 bp, Heterodera glycines
tctccattaaaggccctgtctccaattatgtccccctttctgaggatgttgaaaaataatcgccc

SEQ ID NO: 70034 - DNA, 623 bp, Heterodera glycines
atgtttgaaatgttttggttcccgggattaggtcaattgttcggtcaattcatggtcttgagaaaggttttgggtcttggagtcaacaagtctcggtctgagaaaggtttgaaaattttggggctcggaatccatcaattaccggtctcgagaaatgtttatattttgggtcccgggtttggtcaaggttttagcctcaagctacatcatcacgatgtaatattcgcccgaacaccgtatacacaaaaaaaaaccgagccaaattacagtaaaacaaaaatttactacagtaataaactgacagttgtggccaaaatgcgcagtgaatggagatgggcacggccaagccaagtcaatgcgaatgcccatgccaaaaagagcaaaacggtggccatggacaaaatgacacagcaacggatgtgccaaccgtagtcaaagcggggcttaattcgacacaaattaagtcacaatggttggcattttggtagccataacgaagatttttgctactttgatagtgaaaatggttacgcttttccatccatgaggcaaatttttttaggtaaaaaatgactcaaaaattcataatttttaatccgtgatcaggccatgttcctaataaa

SEQ ID NO: 70035 - DNA, 555 bp, Heterodera glycines
atgtatctgtataaatttgctcaagtaaattgtaaatcggaaattattagcgtttatcaactccatacttccgcaacacttatacagtttattttgagggggtaatgagctgaaattgtaagaattatacaagctggccaaaccaaaataataaatggaaaattattggcgcttatcgactcgatccttctgcgacgcctatacaatttatatttccatgataatgagctgaaattttgagaatttcaaagtgataatgaaatgtaaatagagaatctcacaatttcagctacttaatctctaaataaatactgcagcaatattgtagaaggatcgggttaataatattctctgatttattattttcacgaccatccttgtgaaattctcaaatttcagctaattatcatctaaatataaactctaacagcgttgcggaaatattgagttgatagcgccaataatctccgacttattattttcacgaccatctttgtgaaattttcacattttcagctcattttcctccaaatgtatctgtataaatttgcttaa

SEQ ID NO: 70036 - DNA, 135 bp, Heterodera glycines
  unsure (1)..(135): unsure at all n locations
aaagtacagggctatnagggaagctactcccgaaggattcgttctccccataaatctgggcgcatcggttcggggggactgccccgaaaacaaaaaaatcgattttttcaagtgtccgtttggggtactcaaaca

SEQ ID NO: 70037 - DNA, 389 bp, Heterodera glycines
atgccaaaacaaaacgaaatcgttttaaaatattcctttctggacttgacttggtttcttgatatcgaagctgttttctacgctatttctaaaacggttataccaaacctcagatttttgaatccggttttcagaaaaaatgccttgtggtgaaaacaatatttcacatttcactccataactttgtgagttcggcacggatcgagaccgggataagaccattggaaagagcagctcgagctctacaagaaggtatggaaagaaaaaatagtcatttctgggactttttcagaaatcagaattaattctccaaatgtggccccaaattttaggcccccagccacagccccttcttctcccagttttaagtcttggatttgtcaaataaa

SEQ ID NO: 70038 - DNA, 460 bp, Heterodera glycines
aacaatggcgggattgacggcggactgatcggcgccccccggagcgaatactcagccgatgcaatgcgaagcgggggacaattggcggcccgggagggcgagcagctcctcggtctgctgagaatgtgccgtcagaaatcggtggggccggggaattccgaaatatttttttgtaaaccaagatttagctgaaacgttcgcaacacaatttggaggggctttgctccgcacttttccaaatggccaaagaacagcgaaggcgaaaacggagggacattttggggagggaaaggcaccaaaatgaaatggcaacgaaacgtccttttttgccaattggggaggacgaagagcaatggctatggtggtagcagaaaaggacaggacaaaaaggagagattctgctgatcagtcggaacggagagagattcaaatcgaagcgatcggaaaaagaaaatcagaa

SEQ ID NO: 70039 - DNA, 666 bp, Heterodera glycines
atgagcacaccaccaaaagcagacgacaaaaagaaggaagtgggcggaattatgaacatcggcaacacatgctacatgggcgctgcactccaagcattggccaacgtgacggcactcagcaattttctgatggaaaagtgggtgccaataatgccaatgtccaatgccatcaatttatgttttcacccctctttttcagcgaaaaccgactgcccaacaacaaactcgtcatggaatatgtgcaaatgatcaaaagcattttggtgttgcgacaaccggcggcgccattcgaactgaaggtgtggtgaacagtgtgccgtggtgatggtggtgttgcgtttcatgactcgccgttttttcaggaattcatctccagccgtaccaatttgttcgctgattcgttccaacatgacagccaggagttcatccaattctttgtggacgcgctgcacgagtcgatgaagggcattctgcgcggtgttacgcaaggcgtcagctgtgacatgtacagaaatgacggcgcgggtggtagtgctgatcaacgtgacgaccaaatttggcgcaatgcaatcgacgtaatgccaaattgtgtgcttttttttgtacttaatttggcattttcagcattggagaaacgaagtgctcgcaccaaagaaaggcagcgtg

SEQ ID NO: 70040 - DNA, 438 bp, Heterodera glycines
atgagaataagaatgaatcagctactgtttactcagacttctcggtaaaagcgacttttattttaataaaactttttcaaaagaactaaaattatgaattcaaagcattatttttattttattttatcataaacgatttctattatctgaaaaatattcttttagatactgcattacagattgggattttatttggggtatgtcaaattgcccatttgattcaaatatgcttattctttgtcacattctaaaaaaggtttattatcacttgaatcaatcaaccggacttacaacatttgaaagtggcaagcaaaaccagacataattttcgatgatttcgtggccatggaagcccccgcggagatcacacaaaatgcgacaaaagcagccgtacaaaacgacgcgtattttccccaaaattttgaccagcgtcgacaa

SEQ ID NO: 70041 - DNA, 63 bp, Heterodera glycines
gttaagttagtcctttacaatggagaaggcctgcaaaatttggagagattatatcgattttag

SEQ ID NO: 70042 - DNA, 142 bp, Heterodera glycines
taagcctaaactttttggcctgtttaaaaaggaattaaaaatttttaaaaattttattcatctcccttttgatagaaaaagcatcagagagccttatttaaatgttaattaacatttggtgcgtttcagagcagtttctgaa

SEQ ID NO: 70043 - DNA, 1020 bp, Heterodera glycines
atgtccgcatcaattatcaaaaatggggttctgggttttgttcgtgttttggctctatggtctcgtactctgctcgaggcaattagttcgggaagagacagggagtgagtgagagagagaaagagagagagaaatctagaatcttccaaattaaacattcttggaatcatcaatagccctaagagtcctcaattagtttgtaaaatttaaaaaaatagttgtttgtttcaaaaaatttacggtcaaaaatgtccgggaaacgagttttttgaagtttacaagccttaacttttttgatagactaaaagaggactcttacagctatcgaatgacaccaagaatgtttaatttaggtgattctataaatgatcccttaaattttacaaattattttatggtagtgtctttttatggtccggtggactgatagagccatcagagtgcttattccgttcaggtttaatcaacccaaacactggagtgttcaatgaccgtgcgaatgtacaacagccagtgccgttgtaccatgcgcttcggcgcggctttatcaaattgccgagcatggcaacgggaatcgcattgacacttaccgattgcgttgagtggttcttcatcgacgacaacaccggcaaattcagcgaccgtttttccgatgatcagttctcattgttcgatgcgatccaccaacctcgtccgctggtcaagagcaacgtgcgagaaatcattgacatggcaaacaatcggcggcttactgttgcggaagcggtgcgtgcgaatgtcttgtgccaagacactggaagattcatcaatgtgcacggacacgctgagtcgctgcgtgatgcgtaccaactcaaattggttcaaaagccgcagactttggccgaggtcattgatagtggctcgctggacaacgatggtcgtttcatcgatggtgttaaacctcgcactctgctcgaggcgatttgttcgggaatgctcgacccggatgtggcgcacatcagagcgggaccaggcgacgaa

SEQ ID NO: 70044 - DNA, 154 bp, Heterodera glycines; identical to SEQ ID NO: 64263

SEQ ID NO: 70045 - DNA, 735 bp, Heterodera glycines
atggtccgcactttctttcacgacaacgaggctgggttcaccaaaaaatattatttctgcgaactccaattttttgctatcaatgaattggtaaatgggatttcggcgtttttcgcaaagcatcatttgtccattttgaccaattccggacaccggatccgaactcgaacaaaaagtcgaaattcaaatttttctaatttcagaaattgaaaaatttaaattttcgactttttgttcgatttcggacccggtcttcggaattttatacaaaatcttcaggatttagaatcacagaatgaaacaaaataattgtgttgaattaaattgaaatattcccttttcagccttgggacattgccgtgttgaagttctacgcagaaaccatgggaaatatttgggaccccctttttacgtacctggacgaagtcatcacttcggtgagcctatcatttacagcaaataattggcattattttataatggacaaataagcaaagtgtacaattctttattttccaaaataatcaatcagtcttatttaacatttagctcgagaatggtgacatgccggcgtacattaccgaatcgtcgccaaaaaattcggccaattctctcgaggacctcccgtcggttgaggcaccgcaatcggatgattagttggagtgacaaacacttttctggcatctctgttccttcatcaaaaatgtcctttgttgttgttatgggcataataaa

SEQ ID NO: 70046 - DNA, 56 bp, Heterodera glycines; identical to SEQ ID NO: 67737

SEQ ID NO: 70047 - DNA, 504 bp, Heterodera glycines
atgaatggccaaaaggatgagaacaccaaaagtgggacttttcaggaccaaacgattcgcagtgttcgcgccgtgggcgtcggtccgatgatcgccggttcgccgggccctgcccaactcggcgaccagcagcagtcgtgtgccagcactcagcaacaattcttggcaccggtcgaaattcgtcaattcccacaaaatgctcgcctttggactgagcagcgcccgatcggagacggaggagcggcgacacaaatggacgcccaattccatcccaccggaacacagtcgataatggtaccacaacatggccaatccacaggacggtcacttccaacgctttcagatgccaaatggcgccgcatcggtggaatttctgcagccgccgccgcccaatggcaatttccaatcgctgtccaacggaatgcaattgttcacgcaacaaatgatgtccgattgaaagcacattctaatgaatggaagcaaagatcttttatttgtatttaa

SEQ ID NO: 70048 - DNA, 56 bp, Heterodera glycines; identical to SEQ ID NO: 67782

SEQ ID NO: 70049 - DNA, 633 bp, Heterodera glycines
atgattggttttatgagcacaaatgcgcaaaatccaccacaaatgcaaaatgcttataacccgcaactccaacagccgtatttgccccaagggaaccaccaatttggcatgataaaccaagcacacattccgcaagttgttcagccaatttcgcaaccacaacagcaacaaattaatgccgctcaaaatttggctcgccaaaatttcgaaaatcgtccaattgagaatgtcattgaacggggaagagaaccgggaatggaccaagtagcatacgcactcataattagtcaaatccccgctctaaaagtcaatgaaggtgcggaaaagttccgtgaatttttcaagcgttttgattcgaatactggcgaatggacaaatgcgaaaaggataagttcgctcgagtccaaagtttttggacgagccgagagggcctttaggtcggcatgttcgacagtacctttccgctatgagttaatcaaacgtgaaatgttgcggcaactagaggagactgatgcacgcgaatggaatgcatttgaccaaaaagtcccgcttataaacccaaaccgaacaacgcaaatccgcaacgcccacaaaatacgcaatcgcgaaattttctcaggcaaaattatttag

SEQ ID NO: 70050 - DNA, 1611 bp, Heterodera glycines
atgccgccaccgcatgaaaagacgaccctccgatcattccttggagcattaaattattatggtcgtttcataaaggaaatgcgccaaatccgcacaccattagaccaactgctcaaaaaggatgaaaattggaaatgggaggcagaacaacagcaagccttcgaaaaggcaaaggaaattatgacgtcggaactgctattgacgcattacgacccgtcattgccaattgtcgtcgcagcagacgcttcaaaagatggaatcggcgcgacaattagccacattttccccgacaaaagagagaaagtgatcgaacacgcatcgtgcacactgtcgagcgcacaacgcaattacagccaaatcgagaaagaggctttggcactcgtttttgcagtgcaaaaatttcacaaaatggtgtttggcagaaaattcactctgctcaccgatcacaaaccgctgctggccatctttggttccaagaagggcataccaatttatgccgcgagccgactgcaaagatgggccttaattttgtcaaattacgagttcgacatcaaatatgtcaacacagcagcatttggacaagccgacgtcctttcccggctcatcgcaaattacccaaggccagaagaagacattttgattgcaaacatttgcacagaaacggaatgcttcatcaacagtgtattccaagtccaaattgatcaattgccattgacagcggctgagattgcggatgcaacagccaaagacgaaattctctcagaacttttgagactgccaaagaatggttggccaaacaaatgcaacgacccaaacatcgctccattctttccgaaacgagacgaaatcgtggaagtggaaggttgtttgctgtaccaacagcgcgtcatcatcccaggaattctacggggtcgagcattgaaggctttacatttgtcacatccaggaattgtgcgaatgaaagcgctcggacgccgtcacatttattggccaggattggattcggaaattgagaaaaccgtcaaatcctgtgaagaatgccaaaacgcacagaaaaatccgacaaaaagcacacttgctccatggacgccaacaagcaaagtctctgaaagagttcacattgattttgcgggcccatgcgacgacggatttgtgtatttgattatggtggattcctactcaaaatggcccgaagtctgccaaatgaagagcataaattctcaggccacggttggtttcctccgatcgatcatttacagactgggagtcccggaagaaattgtgtcagacaatggaacacaatttcgttccgctgattttgccaaattttgcacagaattcggcatcaaacacactttcaccccgccataccatccacaatcgaacggacaggcagaaagattcgtcgacacgttcaagcgtgcaatgaagaagtgctcgaaaaacgacaaagattgggccgagaaagcgctcctttcttatcggacgactcccaacgcgacatcgaacggctactcacctgatcagttattctttggacggaagctccgtaccaaaatgtcgcttgttcacccgaggggagagccaattgagaatattgatcatgactga

SEQ ID NO: 70051 - DNA, 309 bp, Heterodera glycines
atgaacgcggcaaaattggaacaaattttgaacgctgtgcttacgcaatccgaaacaaggatgcagcaactgcttggaaatgcagtgccagcgaacaacaacctcagcaatgccaatttggcgagttcaattgacgcccgaatttcgaaattttattacgacgcggagagcgcaaacacatttgaacaatggttcaaacgttttggcacactaatcgaggacgatggaaaagacttacctgaagcgacaaaagtccgtcttctattgggaaaattatcggacgaggactacaacaaataccgagacagc

SEQ ID NO: 70052 - DNA, 748 bp, Heterodera glycines
atggcggaggaaaccagcaaaaccagtgaaaacatcgctgaggacaacggcatcaaagtgctcgactctttgtttgccgccgtcgcccacgcctcaaaatgtttggcattcgctgccggcacgcccaacttctgcttggccacgcccgccttcctggctgtcatggtacggcctttcggacacttcctctatttttaggggaggatggtcagtaataaaatggtgttttcgtaatttagaaacacttccgctccctcctccttttttgggttggcaaataaaatgccatcatttcgctgtgtgatttaggcgctaggatttctataaattgtaacctttgacacgtgcgcatcagaaattaaccccacaaactgcggtcaaatttatccttgcaaaaaatgttggcaaattcggcggttgcgcccgaactttttttttgtcggttgagtaagccgaaaaatggaccaccttttttgttttggcctctgttcaaaccgaaagtaacacaccaatttaaaaaatcaaataaatcttcggaatgaatttccccattttccccaaaaactctgtttttctatttttaggtttggtgctgtttcctcatgccggtaatggtcatacggggagagggcatcatttgaattgagtcgaaatgcgttttgtttcagcctgtcgctgtgcttttccgcagctatcgccgcgacggcaacgcgttcactgtgcaggcggcgtacaacgtcattctgtg

SEQ ID NO: 70053 - DNA, 85 bp, Heterodera glycines; identical to SEQ ID NO: 65905

SEQ ID NO: 70054 - DNA, 799 bp, Heterodera glycines
atggctgacccattgaatacccgcgggtcgactcttttccaggcaatttcccccgaatgctatgccaattcgggcacttttgcgcacattacgggattaatgccgtgagtatttttgcgcactctaaacattactttacttttaccattgttacttttacagtaatcacgaataccgtttccgattggccgcaatgaccgccacgggtgatgtgctgtactccgagccgatctctgcgcgcacccgacatgaacaggcgccagtggtgtacaacagcaaagaacgacgcgaattggacggaacacatcatcaacagcagcacaatgataacagagtagggaagagcaaaataaaaatgagcaattaaatcacgagtgggaaatttaagggcactttgacttaccaaacgaccccacgtacgtccatccttggccacgactcggctgaccatcatccgccgcatcatttgttcggccaatcatccaaccatatcaaaaaattggcggtctcctccgttcaatcatcgtctaaaaaacagcaaaagaatgtgcaacaaaaaccaatcgcaccacaactgtcagcggaagaacaaccagaagaaactacggcaacttccagggcgatgttgccgaaagcgccgaactgttcagcacccaccttctcggcattgactagtgaaagtgcacgagtcgcctggaaattggtcaaatccgccgaagatggaggaacaaaggaactgtcaccgaaggtggagaaacaaaggaaaacagccaaagcacgtcgtcgacatcagcactga

SEQ ID NO: 70055 - DNA, 579 bp, Heterodera glycines
atgggcacagaatttaaaggcttatatgaagaacataaaaaatccgaaaaagctaggaaaaaatatttaaaaaatcagccaaaacaaccgattcgtgcagctgttgcaaatgaattttcgagacatagtaagaaaaattaaaaaacaaaataaaattgtaaaataaaaagtttgaaaaaattgggtattttaaatccttgattattagagatcggatacggaccagatccgtatacggatttttacggatccatagtccgtatttttttcggccgatacggattttttacggacaacagttttccctggtttttagtccgtaatccgtatcgatatcaagtccgtaatactgatactgatccctattttcgcaaaattccgatctctattgattatcaacgaaatttgtttaaaaatgcttaaattcatttttacttaatttttcttggattacatggtggttgaatataccaatggacttgaaattatttatgtatttttattttcatttaaaaaaatattgctgatttttattgaagaaattttcgggatgaagaaatttttaaaagcttccgcaaa

SEQ ID NO: 70056 - DNA, 660 bp, Heterodera glycines
atgcaaatgaccaaacgaagaactgcactttcaactccaaaacaaggtaagaaccataaaaaagataacgcgaagaacggcgaatgcaaatatagtaattattctcgagtttcgctattatcacaaatgtttggctattgcatatcaccaattttttgttaaggaaatgattggactttccgctcaaactgcttaacgaaagtatatcaaactttaaaaactgttgtgaattcttgtccccagttatataatgagaaaattatatgtacaaatatttgaagtttatttatatttcgtttttgaccaatcttcaaattttggcatgaatttttttcaaaaaactctttagtgtcgaaattactcagtgtccaaaatactcagtgtcgaaattacccagtgtcgggattacatggcaccatttttaattattccaaaatttaaacagggcggggactatatatttttagaatttttagtagaaaaaacctgtttaaaatactggggtcattttcgcgaggccgtttttgcgcgagtgcctgttttagcattagaattgttcagatgttattgtacgaggcattggcataataattgtggtaaaattcattttaaaaattgtaacagtctatatcaagtaggttagtgcacgaccggttatta

SEQ ID NO: 70057 - DNA, 774 bp, Heterodera glycines
atgaccagtgagtgagaagattcattaaaaaattgctttttgggggtcagtgattcaaaagggtgaccccttcgcacaccgggggggggggggtcaaaacgaagggtacacctcaaaacatcgacgggcgaaacttcaccgggacataacttaccgcaaattaaaaaaaaagattttcgtaatactgctgagggtacccacctttttggcagaaaaatgtttgaaaagattgcttaaagacatcgatttcccatcaaattttcatttctaacggcggaaaaattcgaatttttatttatttttccatcaattttcagttgtgacgcccctttgggttggcgcaatggatggccacttcgaagtgtgccaagcgttggtcaaacacggggccgacgtcgacttgggcgcgccgcaatttgccatgtcaccactgatggccgcatgtaacatcaatgcccggctggacactggtctttttttcatttctaaacatacccaaaatttaaattaaattttattaaaaaaaaaatccctgactaagccagtcggtgatgcttatctcagcgtgccatcataaattctgttattttcattctgactgttgcagttgatcttctgatcaaaagtggtgccaatgtgaatcatagcgacccaaagggccataccgcgttaatgtgtgcaacgaagttggggctgaaagacatcgtcaagcgactggtgaaagccggggcaggcgctgaccaagcgaaggaaacgggtaattaccgtaataaa

SEQ ID NO: 70058 - DNA, 51 bp, Heterodera glycines
gaatatgaagcggatgcactgaaatcggacggtgaattggagcgcgaagaa

SEQ ID NO: 70059 - DNA, 824 bp, Heterodera glycines
gtagagaaaattttatcgaaaatttattttaatttaaaatctccggcaagttttgctggaattcaaaaaattttaaatgcggccaaaaagattgacccgaaaattacgaccgatgacgttaataaattcctagaaaagcagaaaacatacacgattcacaagcccatcaggaaaagattcccgagactaaagacgataccaagtggcttccataccgattaacagtgcgatttgtgcatatttgaccagttgaaaaagcataacgacggttataaatatttattggtctgcatcgacgtgctgagtcgaatgatcttcagtgcaccggccaagtcaaagaagagtgaggacatgatcgaagcttttgatcgtgtgttcgaaaagtctaaaattatcccgatgaaaatatatagtgacagtgggcttgaattccaagcaggaaaaatgaaaaaatattttgaggaaaaattcatcatcaaaaatgtaatgtatagtcctgatctgcacgccggagtcgttgaaagggcaaatcggacaataaaggagcgcttgtacagatattttacaaagaaagacactcttcgatgggtcgacgtaatagacaaaataataacaaacattaacaacagtgtgaatagaacactgggagccaaaccgtcttcaattaattttgaaaatgcccgtgcgctctgggaaaaattatataaggagaaggaatttaaaatttcgaaaaagaacaaatttaaaattggcgatatcgttcgaattacaaggaaaagggaaaatttcaaagggatacctcccaactttaccgaagaattgtt

SEQ ID NO: 70060 - DNA, 56 bp, Heterodera glycines; identical to SEQ ID NO: 52733

SEQ ID NO: 70061 - DNA, 774 bp, Heterodera glycines
atggcccatcaaatggcacgagcggcgatcaacaaaggggcacgagtgctgagtgtacttgagaaggtcaaattggtctgctggtttgaggagacgcattcctttgcgcaagttgctcgaaggtagtcaaatggcacaacaaatggggaaaagaagatgcagtggaatttggagtttcccaattcaaaaatttaggaattttttaaattccaaggaatttcggtatgacatccatttcagttgattcgaaaaaacccagacagtaattcgacaatataaaataattggttacgattttaggactattctaattaaatttacataaatttgggcggggcttttggcattctcgaatttatgaccatggagactcaatattatcatggaattccgatagctcaaaaaatttcggcattcaatcgaaattccgtgccaaaaatgttggaactcagtaattgaaaccggcattcctacacatccctgatcaccacaaataatgattaattttttaactcttgatcatattccaatttttgaagatatcgggccgagttcggcatggagccaccgcaaatggaccaagtgaagaagttgcaccaacgattcctgaacacgggctcaattctgaatggcaccaccacaccgcagacgatggcaacggcattatccgccggcatcgatgacgtcgtggtcaaccaatcccagcaaatgtcggtggtgtgcgatgcgggcgcgttggatgccgaggaacagctgagaatggcacggatgtga

SEQ ID NO: 70062 - DNA, 1053 bp, Heterodera glycines
  unsure (1)..(1053): unsure at all n locations
agagcggaggaggccttgggcgcggagacgaccccgctgggagcagaactggaaaaactttgtgcaaacgccgaacggatcgcagtgcaacaggagaagctcatggaaaagatggaactctacaagcaaaaactgagcagcggattggcacatggcacagcaatgctggtggcgtccaaagtggtcggagagcggacacccttcggagaagccctgcagaagacggctcaaactctggcagctcttgacgcggcgcgacgacagctcagcaaaagcgacgtgaagctgggaggcaccaccacaacaatcagcgctatccgcgtgagttagcttgttttgtttttgttttttgctggtaatttcccattttcagaaacaactggcactgctgcagacgaaacgcttggatttggacgtcttcaaagcgaaatttaggcgcgcatcaacaaccgaggaaaaaaatgccgtgagaatgttttttgttgttgttgctgctgagttcacgatttttcaatccttttcagattcagccccaattgcaacgagcacagagcgagttcacgcgccttcaaacacagctgaaggagctcgtcttggactaccagaagaatatgcagaacatgaagaagagcctgctggagttcgtggaggcccaaatcaaattccacacgatgtacgtccaagcggcaacaacaacagcaccagcaaagccgatggcagaagctccgagaccattccccgacaatttgatccaaaaaattgtacggtcgaaacaaatggagtttccgaaagaggtgaaaaagcgagttttgcattgtcaatttcatccctttttgcaggtttccagcggagaaattcaacaactgtgcgctgccgcaactgacgccttcaaacgccaaccatcgctggtcgaaatccttccgcctgttatggtctgcggcgacgtccacggccaatttcctgacttgatgagaatcttcaactgcctcgggaccccgccggagaagaaatacctgttcctgggcgactacgtggaccgtggcgcgcnaatcc

SEQ ID NO: 70063 - DNA, 796 bp, Heterodera glycines
atggacaaacaaaagaaacgaacgaccgaaaattatgagaagggtgagagagaagagagggacagcagcagagaagaaaaggacgaagagagcggaggaagagcgaaaaagagaataggcagagaaaattggcaaatcccagcggaaaaacagacatttttgaaaattaatttgacacaaaaaggagaaaatgccattaaacaatgacaaaattaaaatgattttgaattttattaacaaggctttttagtttatttttcggaatatttaatttaactaattttattgacccccaattagcgacagaatttcaattaaattaatatattccacttagtccgttggttttgatttttattttattatacatcttaaaaacatgtcaaaaatgcaaattaattaattaaattgggattttcccccattttccatctcccatttggccatcacataaatttgcatcgatttgtcttctcaaaaatattcccttccaaaacagaaattgaaatgccccgcagatgtgaagtgtaatgactccaaatgttcacattgttcacacattcctgctcggtcagctcaatttttgtctgaaaacgaattaaatttcatttatttattttttaattcaattaaatggaataaaaatagcagataatttacaaacatttaaaatttagagctgataattaacattattgagtttttatggcggggtggggtaaagaaatcatttgctatttgtaagggaagagattggcacaatccccgccttacggcatatgccccaattagttaa

SEQ ID NO: 70064 - DNA, 485 bp, Heterodera glycines
atgatgactactgcagcagcaatgacaacatccaccacaccacagctacaacatcatcatcatcatcatcaacagcagcagcaaagcatttttgcccggctttccgccaccattggccaccacagtcaatcggaacaaaaattggcacgaatgagggccgcttattctggcgccaacgaaggtggcggcggtgccagtgccaatgccaaaatccaaaaagccgggtaaggagatgctgggttttttggaaatttttattagataaatgaattttgctgagggaaattgaaaagcaaaattagattattttatgtgattttttttttgtgaattttttttattaataaatgaatttttaaatgtattttatgggaaaaagcgaaaagaaaaattaaatttatgtgaataatttaatttaattttagttaatgtaaattttttttttttatattgagagttttaatcttacaagctgaattaaatta

SEQ ID NO: 70065 - DNA, 658 bp, Heterodera glycines
atgcgcacccgtccgatctggcaagttaagcaacgattgctgactagccaaaaggttcggtgccgtgatgaaacgaaccagcactgcttaccccgcggcacccggcacggtcccccgaaggaatggatttaattaaattctctccttcggggatttttttccattaggtcgtccgttagcgttcgattgctctagtcaatttttcaaaatttttgttgaaatatttgtcgtgctctgaagggcgtgggagggggggggggcgaaggcccaccacgaggccgcgaagaggccgagtgagtaccttcggtgcaggaaaattattaaattttaaaattttttaattgctttttaaatatgccaaaaaatgtaggcttaacttttttagtgaaaattcgatcactcatattttttgctaattgagcagaagcgtaccaaactttgcagggatactccccggtaaaggactaacttacactgaaatgagcgccgagctagctggctcaaaaaaatttttcgaaaatctgagtctttcgtttttatttatttgcaaaattaattcataaatattttttcagaaagggttctgaaacgcaccaaattttatttacatgtttagtttatgcactctgatgcttttttctttcaaaatgggagggga

SEQ ID NO: 70066 - DNA, 450 bp, Heterodera glycines
atggaagaatgggagagatccttccaagtggcggccaaacgatggaaaaacgacggacaaggtgtaccgcaacacaacagaagaccaatgggacgagtcgcgacacccgtcatgtcgtatttggacgggatttttcagcggcgtgccaaagtgccgtccgtcgccagcatgagagtgacgaacacagcgcgagaatggatcaatcgaaatcgagacgagatgggggcgttccccccagcaacagcccatcggccggcactgatgcaaccaaaaatcgaaaagcatcaggctcacgtgaacgacgactatcgggagcgtcagacataccccattcgacggcatgctcgagacgagggagaacatgatcggaagcacgggagggacgaaatcacgggaatgacaacattcgagactgttcggctgcaaccgccgataccgttctgcgtgtag

SEQ ID NO: 70067 - DNA, 888 bp, Heterodera glycines
atgaggactatcacacagacaacacaaccgcagctgttgatcgggattcgaaaattctgggatttcgtgaccggctttcggaaaacggaaaggggcacgtacattgtcgacacggtttttgggccaatcgtgtgcggcgaacggttccaagtgagtagcggggcaactcccgctccgtccgtgttcatgaccttgccatgcggagaagatgaacgcgatcaaatgccgccgatcagagcagttgaacaattttggtcattggaagcaatctggataagagacgacccgacagacgacgcggatgcgcaagcagtgatacaattcgaacgatcagtgcgccaactcaacgacgggcgctactccattcgattgccatggcgggagtgccaccccgctttgcccaccaatttcagcatggcctatcgacggctaacgacaatgcttcaacgactgcagaagactcccgaggtgctcaagcagtacaccacagtgatcaccgatcagctcaatgcagcaataatcgaggaaacgacgatcggagctggtaaacacgaacacttcatccctcaccaagcagtgatcacgcccaaaaagttgcgggtcgtctacgatgcgagcgcacacacacgaggggcaccttccctcgacggctgcctactcagaggcccagtttggctgccggatttggccgacatgctcattcggttccgagcatgccgagtaccagtgatcgccgatgtcgagaaagcaggtgacataccgatttcgacgcctcgcatttgggctcacgccaagccccttttgtctcgccgccgttgtacgacaccacctgcgcaaatacgactccaacttcgcggaggaactcattcgggacacatacgtggataa

SEQ ID NO: 70068 - DNA, 1830 bp, Heterodera glycines
atgcgacgggcactcgaggatgaagaagaagcaatcgcgcggtctcgattgagcgggtcattcgggaccaacaacagccatccggtgggggacgacccacctccactggaaaatcggaacatggaagaatgggagagatccttccaagtggcggccaaacgatggaaaaacgacggacaaggtgtaccgcaacacaacagaagaccaatgggacgagtcgcgacacccgtcatgtcgtatttggacgggatttttcagcggcgtgccaaagtgccgtccgtcgccagcatgagagtgacgaacacagcgcgagaatggatcaatcgaaatcgagacgagatgggggcgttccccccagcaacagcccatcggctggcactgatgcaaccaaaaatcgaaaagcatcaggctcacgtgaacgacgactatcgggagcgtcagacataccccattcgacggcatgctcgagacgagggagaacatgatcggaagcacgggagggacgaaatcacgggaatgacaacattcgaaactgttcggctgcaaccggcgattttttccggaaagcccgaggattggacgacattttgggcctatttcaagcgagctgtggacgacaaacccattcccgggttcgagaagcagcttcatctcctgcgctgcttaaaggagggatcgccagcccggcgggctgtcgaagtctaccctccctccgacggcaactacccggtggtcgtgcaacttttgaaagagcgattcggcgacacggacgatttacagcgggcaattcgggcccggcttcttcatttggcaccggcaaaggacaatgtgaacagcctgacgacgatgatcgacgagtttgagcggtgcgtgtgccaactcgagcagctcggagcgaacgtggacgacgactcatttggcccattgctggaggcaaaattgccggtgcgactgctcacggaattgcggatcagagaaagcatgatgggctcgaaatggtcagtgcgcgatttcaggagagcggtgtcggcacaagtgcggtgcatgcgatcagctgagtcagcactggcggcaatgaaagacccggaagtacgcactgatcaccgaaccgaacgtgatcatacgggacgaggaggcaaagcaggtcgagaacctttcaaagagcatttatggtacgggacagccaacaaaacccgtgcgcagcccaacggaacacgaaaagaagagcagtgcgggacgagtgcccgtttcaccgggcgaacagtggcacgcggcaacgagaacggacacacgggcgggggcgggaatggaccccgcttcgcgcaaaatgggctccctccaagcttcgggagggggaattgttcgttttgtctggagagcggacatcggccgagtgaatgccgcgcctatccgacgccgcaggaacggaggaagcgactaattgagcaaaagcgatgcctgcgttgcctgggctctgatcacacattcgaacagtgccaacgaacggtccgatgtgacgcatgccgaaaggacgatcatcattggcttatgtgctggaagaaccaaccgggaaaccaatcccggctctccggagaacctgaacggaaggagaacaaccacgcgatgctgatcagtgggatggaccaacccactcacgtcactacagcacgagacgagccgaacagtcgagacatatccgagacgaatgccggggagcaacgggctttcacagcttttggaagccgagtcccggcccagcaaatgatccgaagagtgaccgcagcagcagaagaaggcgaagaacgagtgccaaacaacattgctgtttga

SEQ ID NO: 70069 - DNA, 354 bp, Heterodera glycines
gggagcaaaaatcccacgcagaattaaagtacaggctatagggaagctgttccggaaggattcggtctccccataaatctgggtgcatcggttcggggggtctgccccgataacaaaaaaatcgattttttcaagtgtccgtttggtgtactcaaacaattatggggagcaaaaatccaacgcagaattaaagtacaggctatagggaacctattccggaaggattcggtctccccataaatctgggcgcatcggttcagggggtctgccccgaaatccccaaaaaaattttttggataaaaattatttaaatgaactgactagataatatttataataggctattcctcttcc

SEQ ID NO: 70070 - DNA, 1112 bp, Heterodera glycines
atggctttggcaaagtgtcctgcttcgacagttcaaattttgggggctgagaaagcgctcttccgagcactcaaaactaaaaaggatacgccaaaatatggaataatttatcacgcgcaattggtcactcaagccggacaaaagtcaaagggaaaggtgagacgaaaatgtgacaaacataaaacggctaaaaacgcaatacccttaacaagaaatcaaacaaatcattattgtctttaaagatagcacgaaaattggcagcaaaagtttcacttgcgacgcgagtggacgcactttgcgacgaatcattgggcaacggacagggaattgaggcgagggtgtacatagagcaggcgataaaagaggcggacgcgcggggaggggcgaaaaagcaacgcttttctggcgtgaaacaggcaccgaagggcgcgtacactttcaaaaagtgagtcaatcgaggagaaattgatccccggttttcggttatgcttaaaatttcgcgaaatggggaaaatgctccctttgttagttttttactgaaactttatcttgtttctctaaatacaattgatttcgtttttaaatttcaatttttcttcatctgaaaactcaccatcaccaattggacttaatgttaaattagtcttcatataaaaagtaacatttttaaggggggaggtgcatcattatgacgcaaagttcgacatgacgctaaaaaagggaactgaacaggccgaagaaccgcaacaggaagaacaacagagtggaaaagcaaaaaaagggacgaaacgaatgcgaagcgaaggagaaactgagggaggggaggaagaaacggaagaacaccagcaaaaggagaaggagcaaaagaaggtcaaattggaagagacggaaggggaggagggggaagcgactcggaagaaggcaagggaagagacggaggagcccagcggaggagagcagcagaagggtcagaagaaaaagaagaagagcaaaggctgatcggagagtggccttaagaaagatggaaaggctggacaatttggagattcattttatcttttaaatttgtccattttgttgaattttttgttatcattgttttctttaataaa

SEQ ID NO: 70071 - DNA, 348 bp, Heterodera glycines
atgggactcaacccaccagcattccaatcactgggactcaacccaccagcatttcaatcactgggactcaacccaccagcatttcaatcactgggactcaacccaccagcattccaatcactgggactcaacccaccagcattccaatcactgggactcaacccaccagcatttcaatcactgggactcaacccatgggactcaaccccccagcatttcaatcactgggactctcacccccagaatttcaatcactgggactctcacccccagcatttcaatcactgtgactctcacccacagcatttcaatcactgggactctcacccccagcatttcaatctctga

SEQ ID NO: 70072 - DNA, 120 bp, Heterodera glycines
atgtgcgaccgtttaacacaaatccaagaccttgtcaatgatttggccaaccacatgtgcaattcggtcggtgttctgcaggcgagtgccgggccgtgcgaatttgggacagctccggag

SEQ ID NO: 70073 - DNA, 906 bp, Heterodera glycines
atgaagcaattttgcctttcactgttctctattggtgtttctgtttggctattgacaatatttttgctgctgatgataatgccatcatccattgatggcattcaaattacagtgaaagctgatgcaatgttaaccaaggaaagcaatcagaccactgttgtggtacaaggctcaaccacagtgaaagagttgaaggagctgatcaaaaaagaggcttggaggattcagtcagaaaagaaaacatttggaatcaaaaacccagatgatggtactgtgactgtgcttcaggacagtgatacaatggctgacaataaaattgaagaaggcgcagtcattttagtgttcgtaaattttgaaattaaagtgactgctgaagaaaatatattcaatgaacagtcgcccataaaaactaagataatcactgttagggtaaatggaacggaaaaggtggaagatttgaagcaaaagataattggaaaaatggaaatggagaccaaaacaaagattggaactgaactcacaaaaatatcactgcaatacggcccagaagatgattatgtttttcttaatgatgaaaaaaaaatttattattatcagtttcaaaaaagtggcattattcgcttgtccattggtgaatttcaaattgttgttcgagaagaaattgagaatgaagtgaaaaattatcctatttgggtaaagagtaatgaaactgtggcaattctgaagaaaaagatcaaaagtttggttgaaattgagcccgaagaacaaacattgtcgtggactttaaacggtcaaacatttgatgacaataaaacattaaaatttaatctcattgaaaatgcattagagtattatggcaccgaaaataacactaccattacattgtccagagaatttaaaattaca

SEQ ID NO: 70074 - DNA, 908 bp, Heterodera glycines
atgcgtccttttgccaaaaatctttgcgcttcaatggccaaagcgttgggcgccgctgctccgtccgcgctgcgtgagctcaaattggccggcgtgcggcttctgtccaatgcgatcactcggctcagttcggtcgcccatttggcggtcaccgcgcgcgaagtgctccaaagcgacgaacaaatggcacaaatgcacgccgacttcgccaggtaaaacgcacagaattccaacattttcaaatttattgcattttcaggttggactttgctgtgctgcacgaacaggtcgaggttcgtttattgccttgggaaatgttcgtttttttgtcctttctttcgagagtctcgacttcgtttcctcccctttctttcactcctttctttcctttctcaatttgcttcagtggtgttgcgattggtcttctggttggcttcgttcgttggaggaacagttcggtgccgggttgtctcagcgccggcgcttggaagaatgggccgattggctggactgtctcgccgcgcgagtgctgcaaacaccggcaccgcttacaccggcgcgttccccgcaggacactccgccgacggcgcccgaggcgcaattcgtccgtggcaaacagttgcttctcgcgtggaccttttggaggtgccaaaggaagcaaagagcggggcgaatcatcgttttttttgcagctctttggtgctgcgcgacttcactctccgctccgccgcctctttcggccaatttcacttggtaaatgccaaagtcggtttgtgtcaatggcatagccttgcagatccgtctgctgttcgacgactatttgtccatttcggttgaacgccgtctcgcgcagctcagcggacagccggcgatcgccttaatggcacccgaggcaaaaagtcgacaaa

SEQ ID NO: 70075 - DNA, 684 bp, Heterodera glycines
atgtttccaatcggagagaaaggacagccgaaaagggcggcttctttcatttcattgaaaggaaatgacgcggaaagagaggaaaagcagcaaaaatgccaaaacggcgaaatggcacagtcgcggaagagaatttcattcaatttgccaattgaggaagagggacaacaacagcagataaagagacgaagtgaaaatgcattgggcatcgtacaacagctgagacgatggtcaacgagagacggagagggtggcaagagaagcaaagagaccgatggaggtaaaaagaggaggggggggggggtgattagacgaagaaagaatgatttgggagtgatcagacggagacaatttctacaaaagctttgatcagatagtgacgcctgctgataaataagcataagggataaactctttcacttacagtgaaaaacgatactatactggagaagggtcaagcgagaagaacgaattcgaatgcgtctctgttgacgatacaaaaacaacagttcaaagggatccgacgacacggaactatcgcccgaattttgtgccgatggaatgggcaaaaacaagcggagagagagacggcgatcgacgacagtgcccagcagaagaagacggatgatcaaaacaaaactgacgatcagactgatcagaacgaaaacggcggatgggcgtact

SEQ ID NO: 70076 - DNA, 336 bp, Heterodera glycines
atgagaatcaaaaaaatagagattgagggcttcaagtcatattcacagcatgaagcagtcagagatttggatcccgaatttaatgccattaccggactcaacggttctgggaaatcgaacattttggatgccatatgcttcctgcttggcatcacaaacctcgcccaggtccgagtgcattccctcaacgagttggtgtacaagcaaggccaggccggcatcagccgagcaactgttacgatcacttttgacaacgacgtcccgcccgataaacagcctgctggctacaacaaatataaggaaattgtcgtgagacggcaggtgattgtaacttaa

SEQ ID NO: 70077 - DNA, 650 bp, Heterodera glycines
atgaacaaactttcggaaaacgctttttcggagtacaacaaattctatctaccgaaaaaagttactgatttcaactatgatgaagcagtgaaaaatttggaaaagctctttgcaaaaccacaatcaattttcatcgacagattcgaatgtctaacagctgaaaagtgggaaaatgaggacttctgtcaattcatcaacatgcacaagcaattgttaaacaatttcaaatttgtaaacctaaaggaagaacaattcaagggtctgatgcttctaactgcacttaagtcgtcaagagacacggtcctacgacagtgcatcctttcaaaacttgcgtcctacggcgaatcagtcaaatatgacgaagttgttgaggattgcataaattttatgaccactataacggaggcgaaaatgattgagtattcaacttcgaaattggtggtcaatgcgatgaagcaaaatgtcaacaaaagggaaaagggcagcaatccaaaattccagcagggccacacatcagctcatactcctaaatgctggagatgtggaaaactatatcacagttacaaagactgtctacacaagtcggcaaagtgccacaaatgtaaccaagttggtcatttggaaagacaatgcgacaaagtgcaagaatg

SEQ ID NO: 70078 - DNA, 1783 bp, Heterodera glycines
atgtgctacaaaagtgtgttgtccggcgaagagaatttcccgtggaaagtgtcgcgtcggtttcgcttcttttcctatttgttggataaaagcggaaaatgtggcaaaaaagttcgtattgcaatgaatggcacgcaattttcaatgggaagagaatgcttcaagtgggtgaccaaatgcttaaaacttattgaatttatttttacatataaaaagtaaagttaaaacggaattaccaaattcagtaaataaataaaaaataaaacaaaaagtgacttttaaatttaaaatttaggaaaatatcttatcttcaaatttcaaattcaaatgaatgaaatactttttttcatttcttttttttaatttactcggttaaacattttcaataaatttggttttataaaaaaaactgctcgttctaattatcatctgttttaattaccattattcactatcaatttcattacattttttagcataacgcctcattcgaaaatcgaaattcaattcgatgccaacaaatgttcggcacaaattaacttaaatgaaagtaataaatggaaagaaaatatataaaataaaaaattgaaaatttagccaataaaccgttgctcgattttggcaaagaattttccgaccaatttaattttggcccatttttggatgattacgccggactttggctgctcgggttggacatactcccaaaatttgggccgaaaacaacggaaatttcaatggaaaagccgaaaaattgccaattggaggtgaaaaataaattaaaatttgaaagtaaaaaataaaaaaaagaatttaatttagtgtgaaaattgtaaatacgcttcttctgcgtgtgttacattctcttcttctgccaaactccacggggttttaggaattcggccgatggtaaaaaaatggaaaaaatatgtaaaagattaattaaataatggataaattttaaaacatataaaaaatcaaaagaaaaacctaagagattttattgaaaatgatttaaaaaaattattatttgactttcaatttttaaaataaatatttttaaattctaaaattatgaaattggctattttttgattttgaaattcaatttccaatttcaaaattggccctacaattaaagaattcattttaaatctctctccctcatattttcagatggttggcggtgtcgaaattgacataaaaactgtgccgtggacagtgctatttcaaggcttagtgaaaagaaatgaacaaaataaaatgaaaatatttcaaaattgcgctagcacatttatttcgccggaatttgtgctgttagccgcgcattgttttgacaaaaccaaagagggaaaatactttcatttgggtaaaaaacaaaaacaatttaaatgctctttaaatgctttgcttataactttgctctaaacaatccaattttaattctcgatatcatacgatagactaaatgttttctattagtctgccaaatttcaaaaaaatttgttaactttcaaaaaagttatggcctcaaaaaccaaggttttttgagttcctctagtcataactagggctccaatttataattgctaaaaactgccaatataattagtttttagtttctaaaaaacccccaaaatagttgctaaaaatgggtaaatatttgctaaaaactttcaaatttaggggagtaaaatcgaaaatttcttcaaaaagcaaaaatattatgccaaatcattaatgagatacataattttcaaaatcaaaaattatcgtcaataaa

SEQ ID NO: 70079 - DNA, 767 bp, Heterodera glycines
tattatttccttttcagctgtccggacggtggcgaagttggcaaaaaaaaaaattgaaaaaatacattattaaaatttaaaaaaaaaaccaggtttggaaagagcccaacggcgctgtgcgcccatgcacaacaaatcggcaatgcccttccacacactactgtacccctgttactgtattttcgggcaccgtataccaaacaaaatcactgtgttgtccatccaaaaattttgtttgctcacaaccaaaggttaaggaaaataacttttttactggaattcttacaaaaattttaggaccaaggtgttagatgtagcagtacccgaatcacacgacattttttcaatgctgacacaaaaacttgtcaaccatttgagtataacggatgcgagggtaaaaaccacacaattcaataattatttttaacgtgaaatttaatcgattaaaaaattaattaataattaaagaaaaattaaaggtaatcggaataattttgccacacaaaagtcgtgtcaaaattactgcttgagtgaagcttgctctccgggtactgttgtggccagagactcagacaggtggattcgggaaccattttttttaaaccgaaatttttgttttataaatttcaacctaaatttttagttttataaatttcgtagagcttttagaaaaaccataaaataaaatttaattaattattaggcttattcaatgcacaaatcctggtggaacaggacgggactgatggatactcatgcttcagcag

SEQ ID NO: 70080 - DNA, 473 bp, Heterodera glycines
gtcagtcctctgctcagagacagtcaatcaaagcatccgccgccttcgctgatggatttggccgtttttaaggcatttaaaaaatatatttttatttaattttaactgtaattaatttccatttaaattattaaaaatgaaataattaattttcagagtgctttgaaaagcccagcggaggaacaaaatgaagaacgacgattattggatgacgaagttgtgcaatttataattaaaaacaaattaaccctaattaacacattaattagtagggttcgaaaaaactatggagataactttcacaaaatttaaaaattctctatttcttatttaattgtcagaataagttgaaatttttcagaagactgttattattttttaattgagatgggcgacgaatggaaaacggccatccggattccgcttccgctcgccttcgtctcgcgctacctttgggcgacggacaagcttag

SEQ ID NO: 70081 - DNA, 60 bp, Heterodera glycines
agagcccatgaacagctgcatcggatgcaagtgccgccgttgctgtacgcctaacagttg

SEQ ID NO: 70082 - DNA, 240 bp, Heterodera glycines
ttaatgcccgcccttcgctgtgtggccgtcgaacgccgcgctctcagccgtccgtttggccgtcgaacggacgaaaacgttcacattggcaccatcgacgcactgcggctgtttcgctgtcccggcaccagcgaggacggccccattctctgcttgagcggcgcgcgcgaccgccaaattacgcttcggaaatgccaatgcggcgaaatgccagcgtcggtatcctcaccaaatgataac

SEQ ID NO: 70083 - DNA, 700 bp, Heterodera glycines
  unsure (1)..(700): unsure at all n locations
aatttggtgcgtttcagagcattttctgaaaaaatatttatganataaaaaaatcgattttttcaagtgtccgtttggggtactcaaacaattatggggagcaaaaatccacgcagaataaagtacaggctatagggaagctattccggaaggattcggtctccccataaatctgggcgcatcggttcggggggactgccccgaaaacaaaaaaatcgattttttcaagtgtccgtttggggtactcaaacaattatggggagcaaaaatccaacgcagaattaaagtacaggctatagggaagctattcccgaaggattcggtctccccataaatctgggcgcatcggttcggggggactgccccgaaaacaaaaaaatcgattttttcaagtgtccgtttggggtactcaaacatttatggggagcaaaaatccaacgcagaattaaagtacagactatagggaagctattcccgaaggattcggtctccccataaatctgggcgcatcggttcggggggactgccccgaaaacaaaaaaatcgattttttcaagtgtccgtttggggtactcaaacaattatggggagcaaaaatccaacgcagaattaaagtacaggctatagggaagctattccggaaggattcggtctccccataaatctgggcgcatcggttcggggggactgccccgaaaac

SEQ ID NO: 70084 - DNA, 323 bp, Heterodera glycines; identical to SEQ ID NO: 69014

SEQ ID NO: 70085 - DNA, 666 bp, Heterodera glycines
atgacaatcaccagcaccaccaagaagaacagcacaaacaacacttctccagcgtgtcaacaagtgaccaaagtgaaaaggacaaaaaaggtacaaaattaaagtgattttttaggcttgtttttggtcacatttttgccaattttttgtgccaataatctctggcgtttgtttaattcgcacatattaaatccattttgttgatagaggtgaaatttgggaaaatgagttttagactttttgttcgaatatgggtttggtttcgaatgtgtcaaaattagattttccatctcaaaatccctaaaagagctttatctcattaaaaaaaataaaagttttgattaatcaccagcacctctcatctatttatgtatcatatttaaaattgaaaagaatattttaaaccatttttaagcataggagcaatttctcggccgcaattgtccggggcgaaatgcctgcagaaatattaccgaagtttctctaattaaaagtattatttctgatggcgtaattggcattttgtttttaggaggaatgcgcgactgggtgatgccgttggactttggccatgccgacgcagaagccaagcatttgattcacattgtggcaaattgtcaccgggaagaatactcacccattacgacacattgtgagcgggaataa

SEQ ID NO: 70086 - DNA, 624 bp, Heterodera glycines
atgcgcacagtcgggattcgtggacaaggacaaatgcccggcggacaagaagcagaagtacaaagaggtgaaccgggcggtcggatgtcatcccaaaaattaaaaaaataattagttactaattggggtcatttcgccctgtacaagcagcagcaaccgcagtgcatctacgacaaggcggtgatggccatcgacgcggcgcatgcgcacgcaaatgccgcacagcgtgcgcgccatgttgctgccggtgttcctgaacacgggcgagcagccgcaggtgcgcatcactgcgttcgccaacattttgggcgcccaaccaacggccgaggtggtggaccagctgatgtacgcgattggcaaggagccgaaccgggaagtgcaggcgtactgctacagaacgatgaagaccatgtccaactcgcagaagccgggcgagacgcaaatgtgggaaaatttaaaatttggcactcacaattggccgaatttagtgccaaacacgtcaaatcgtcactgaaactgttggaaaatgccgtggacgagcagcaattgcgcaccagcggaaagtggcagttcgagcagttgtacaacaatgcgcaacgcgagggcgtgtgctttgcaaagtga

SEQ ID NO: 70087 - DNA, 80 bp, Heterodera glycines; identical to SEQ ID NO: 51817

SEQ ID NO: 70088 - DNA, 300 bp, Heterodera glycines
atgacattctatgcttctcttgttggatacacgggaagaaataatagttagtccttttgttgaatttttagaaattctatccgtcaaatcggcttttggaattttaatgagtaaatcagtaaccataaatgacattctatgcttctcttgttggatacacgggaagaaataatagttagtccttttgttgaatttttagaaattctatccgtcaaatcggcttttggaattttaatgagtaaatcaggaaccgtaaatgaaattctctgcttctcttgttggatacacgggaagaaataa

SEQ ID NO: 70089 - DNA, 300 bp, Heterodera glycines
atgacattctatgcttctcttgttggatacaggggaagaaataatagttagtccttttgttgaatttttagaaattctatccgtcatatcggcttttggaattttaatgagtaaatcagtaaccgtaaatgaaattctctgcttctcttgttggatacacgggaagaaataatagttagtccttttgttgaatttttagaaattctatccgtcaaatcggcttttggaattttaatgagtaaatcaggaaccgtaaatgaaattctctgcttctcttgttggatacacgggaagaaataa

SEQ ID NO: 70090 - DNA, 556 bp, Heterodera glycines
atgaaattctatgcttctcttgttggatacacgggaagaaataatagttagtccttttgttgaatttttagaaattctatccgtcaaatcggcttttggaattttaatgagtaaatcagtaaccgtaaatgaaattctatgattctcttgttggatacacgggaagaaataatagttagtccttttgttgaatttttagaaattctatccgtccaatcggcttttggaattttaatgagtaaatcaggaaccgtaaatgaaattctatgcttctcttgttggatacacgggaagaaataatagttagtccttttgttgaatttttagaaattctatccgtcatatcggcttttggaattttaatgagtaaatcagtaaccgtaaatgacattctctgcttctcttgttggatacacgggaagaaataatagttagtccttttgttgaatttttagaaattctatccgtcatatcggcttttggaattttaatgagtaaatcagtaaccgtaaatgacattctatgcttctcttgttggatacacgggaagaaataa

SEQ ID NO: 70091 - DNA, 3361 bp, Heterodera glycines
atgtctggttttatcaggagcaaaatccctctcctcaatcgagtgctaagaaaagaaatccagtcgaccaaaacaaaaatcgaggaaaacaaatttgaatttgaccaaaataatctggacgaatgcacacgggtgttcaataaaacaaaggaaatcatacaaaaaattgagccaaactttgagaaattaaaaactttacacaaaaaatggcaaaatttaatgagaagaatggacaaagaagaatggaacacagaatggaaaatccagaaaatttttcgcgaaaaacatgattatttaaagacaattaaggaaacagacgaaatcctcgacactctgaaagacataaatttggaggtaaaaagaagactcaaagtaatcaaagcaaaaccctcttcagacactgaccaagaggatgaatcaaatgatgatgaagaagaaaacgaagacgaagaaattgaagaagaagatgaagaagaaaaagaatacgacagtgaccaggaagacgattcaccggaattgacctcaaatgaccaaacaaaccgtaaacaaacaccttttgtcaattatcgatcgagaataaaacttccaccccaaactctgacacacttctccggaaaattctcccaatggcccagcttttgggacgatttcaaatcatcagtccacaatgacccaaacttagagaacatacaaaaactgaaatacttgcgaggactcttacatgacgaaccataccgaattgtgtccccttaccccctcacaaacaaaaattatcccataatcatcaaattactcaaatcccgatacggtaatccacaattgatcagagaaaatctgcacagcgaattaagaaatttaagaaaaccaaatgaatccacaagcgaactgagacgatttatcctattcattgaccgaattatcctacaattacaatcccaaggcgaagaaataaaccatccccaaatcaagcaatccattgagactaaactccccttcaatatccgactaaaactgagagaaaaattcaaactttactcgacaaaagaattaatgaattttctcaattcacacactcaagctcgtgaagacatagaacgaatggaagattcaaacagacaaataagaaatttcacccctcaccggccacctcaaaacagaccacaaaggcaatcctacccaaactattcccaaccccagctaaaagcaaaccaccgaaaccatcaaaatatgcctctctcgccatatcccatcacttctgcattaacaaccaaatcaaaacctgtccgtttggcagaatttaaaccaaaaccatcgcaacccaaaccacaaacaaaaataaaattttgtcgattctgtgaaagagacaatcacttgagcaaagaatgcaaaatttattcaaccacggaaaaaagaagtaatcgagcgcgcgaattaaaactttgtctaaactgtctgaaaaaaggacatcatttgaaggaatgcaaatcacctttttcatgtttcaattgcaaaagcaaacacaataccctcctatgtacccgaaaaacaaatcaatttaatcaaagagaacaatttacaaacgtaaacgtcacgcaaaaccccgaagaattcgaagaaacccaaaattttatgtctctagattgcgatcaaactgatgaaattttacaaaatgacgaagaagaattgcttatgaccacggaagcaccagtattaaatcccgaccaaaacagaacacaaaacgaagtaattttctttgacaatgggtcacaaaaaagttatataacagacgaatgtgctgattcccttcaattaccaacaattgacgaaaaattattggcaatatccacctttaaccaaaataaacccaaaatcatttcatcgagactagtcaaaattggaatcaaaacactaaacggtgaaatcgagtacgtaacattacagactgtggaaaaaattactgatgttacaaaaatggtcaacagagagactgttgatatacgcaagagaaaaataccaattaaccatgcctgtccacaaattctgattggtatagaccactattggcactttatgctaccaaactcacaaattcaaatactcccctccggattttactcaatcgatacaaaattaggaaaaatattatccggaaaaggtactattgaagacacaaatattaatcttgtgaaagaaaagcgaaaaaaggatgagacaaacgaaatccttcaaaaattctgggaattagaaaatattggaattaccgactctccacatttgacggacgaagatacagctctcatacactttgacaaaaatgtcatttttgaagaaaatagatactacatccgatggccatacaaaagagaaacaccgaatttacccacaaattttggattatgtttgggaagattaagaaatgtagtcaaacaattgattaaaaacaaacagttggaaaattataataaaatactgcaagagcaaatggacactgacgttaatgaaattgctgatttcaaatccaaaaatttaattcactatctcccacatcaccccgttataaaagagagttcaaacaccacaaaaattcgaccagtttttgatgcttcggcaaaattaagaggaagcaattccctcaatgacgaaattcaccaaggaccaaaattattacctgatttgtgtggaatgattctccgattcagactcaaaaatttcgtcttaataggcgacttggaaaaagcttttctaagagttggattaaatgaaatagacagagacacaacacgctttctatgggtaaatcagtcatatttggacgaaataaaccaaaaatatcgagaaatcgaaatgagagacgtagaattaagacgtttcacacgaatacccttcggagtcaatgcttctccgtttttattaactgctgttgtgaatcttcatttatcaaaaacagatgaaatgtttgaaaagtttaaaacattacaaatagatgaagaattatgtcttagtggaaaagagaaacaattcaaagagctatgcacagaacttaaagaaaatgcatacgtcgataattttgtaatgatgtgtgacgacgaaaaggaaataaaattcaaacattactggagcaaagaaatattcaaattagcatccatgaatttgagagaattcgtgtctaatcacgaacaaagcaacaaagagattcaaaaaatggaaggatcagagataccaaaaattacaaaaatgttgggtataaaatggaatgtcgacacagacgaactcgaactacaaataaaaataccactaatgagtagagacacgacaaaaagacaaattttgacaatgatcgcaaaaaatttcgacccaatgg

SEQ ID NO: 70092 - DNA, 1346 bp, Heterodera glycines
atgaacgcttttctgtctctgttcggcattttgctaggccttcaatttcacgcacaaatcgtttcggccaccgttacggcctcgctaaaaactgcgaccacttggaatggtggtggccaatacatggtgaacttcaagaacaatgatggctccaaaacagtgtgctctgtcaaattctctctgactccaaaatcaggggtacggtacctactgatactattgattaccaaagtttaataatacttcaataaatatattaggactggttaataacactaatcactagggtcataatttgtatgcattaaaaatgccaagtatgcgcataaaatatgcactaaaaattcgccaaatataccctaaaaacacgaaaaatgcccaaatatgcactaaaatatgccttaaaaaactgccaaaagtggtttttaaccttcaaaatgccaaaaattgtgtgtataaattaagaattgacttttaaaacaccaaaacatgagctaaggagcattttttagacaattgcaaaaatattgaatttccaaatttgtaaatttttattatatgtaaaacaaaattacattttatatacataaattttttttcaaaagttcttacaaaaattgaaaattttttcgatttttaagggtgtattttttaaaaaaatccaaaaagtcgatctttagggtgtatttttcgcttttttcgcatttttcttattgccaaaagtgaccgaattatgctctaaaaatggaaaaatgtcaaaatatgcatttattctcaaaaacctctcaaaatatgcttttatatgcactaaaaacctttaccaaatcaaaaaattttaacgtagaaatgctattttacagcctctttcttagcatatgcgcagaaaaaatatgcaaaatcatacaatttataaccctactaatcacaagtggggcaacaaattattatatctttgattaattacccccgccattccctaatagacgtccatctcgtccaagtggggctttgaagcggtcagtggcgcttccaaccagttcactctgtccaacaatgccgacatagcaccgggtgcgacaaatggaaatggtggactgaacattcaaggcaacggcgcaccgactctcaaactgattgaagcaaaatattacagcggcggtaatggtgcaaatattaaaaaaaaattcgaaattaattaattttataattaaaacgcggcatttttaatcttttaatttttctcgataaaaaaagaattaattttacattttctgcaggagtgtgcggtggatcatcttcttctggcggtagcagcagcgattcttcttcatgtaccattagcataa

SEQ ID NO: 70093 - DNA, 111 bp, Heterodera glycines
ataaaagtcaacatagaagcctcaaaccaagtggaaaatgtgttatttatgcttaatatatcgaaacaagtgcgcagaaaaaaaggcatatgcctcaaaatgcggtctcta

SEQ ID NO: 70094 - DNA, 68 bp, Heterodera glycines
atgaattggtccaacggacggtggcaagcagtatggctggttgtctccgaggagggcaaggagctaag

SEQ ID NO: 70095 - DNA, 1396 bp, Heterodera glycines
atgcatccctggtaggtaggcttcgtttttaaggcacaaaaaaccgagaaataggcaaccaaaaggctgaaaaaaggcaaataaaaaattttattatcacatttaggtaggaatacacttataaacttaatcaaaaaacttaattcgattatttttcaatttcaaaatgaaattattgaatattttaaagctttattttcgaataatgacaaatttttaaagcaaaaactttagcaagaaaaaaaaatattttaagtaataaatttctgggaaaatgtttcatttcttaggagttgtttttttcgttatattgaatttttaaaggatatttcctaaaattctgaaatagatgttaaaaatggtgaaaaatgcacaaaaatagcgcataggcaggcattaagcgaaaaaccccgaaataggcaacaataggcattataaaagttatggtgctatgacgttactccaaataataaaaaaaaattttatataactgctcaaagcaaaaatttatttagcaataatgattatttttgtgggttctttggtcgaaataattttttgattaattatctaattttattccataaattgttaacatttttcttgaatccttaaaaaatgacaaactaaggatcaactgatcagtaaatctcaataaatcatgaaacttcagcaacagcaatcaaattctctgttgccggctctcattcttttgtttttgtgatccgcaatttcgagaagcgctttttgggtggcagtgtatcaatttgattgtcaacggttgggtttaaatcagccgttaatgacgaccataattgggagtctgctttatccgctggattgattttgttttcatttttttgttcggaattggcattgatattgtgcagcttgcttggttggaaatgggctgataaagttgacgatgaagcggatgaaaatgagtcaactcgctcaaatggcacttttgcttgtaaatggggcggtgaggcgggcgatgatgaggaggaagatgaatcggagaatgagtgtatccgatttaatgatgattgattctcggggctttgttcgggaatgacaccggattcattttgatcatctttggccacaggcatagaagtgaaagaaatttcagttttgcgtaaagggtcgcttcacaagtcgtagtgagcgcaccgatcagcaaataggcaaccattgccacaacagcaaatcgccgcttcattttaatgtttttattttattttggcaatttgcgatggattataagggtgatataacgtttgttattaatgtctacatataatggcacattcattgtaattgatttattggctaattgattttcccatgccaaaatggccaaaattttcgtttggcgatgaaaaaaaataaa

SEQ ID NO: 70096 - DNA, 138 bp, Heterodera glycines; identical to SEQ ID NO: 50950

SEQ ID NO: 70097 - DNA, 597 bp, Heterodera glycines
tgaaaaaaatatttatgaaacaaaaaaatcgattttttcaagtgtccgtttggggtactcaaacatttatggggagcaaaaatccaacgcagaattaaagtacaggctatagggaagctattcccgaaggattcggtctccccataaatctgggcgcatcggttcggggggactgccccgaaaacaaaaaaatcgattttttcaagtgtccgtttggggtactcaaacaattatggggagcaaaaatccaacgcagaattaaagtacaggctatagggaagctattccggaaggattcggtctccccataaatctgggcgcatcggttcggggggactgccccgaaaacaaaaaaatcgattttttcaagtgtccgtttggggtactcaaacaattatggggagcaaaaatccaacgcagaattaaagtacaggctatagggaagctattccggaaggattcggtctccccataaatctgggcgcatcggctcggggggactgccccgaaaacaaaagaatcgattttttcaagtgtccgtttggggtactcaaacaatgaggggagcaaaaatccaacgcagaattaaagtacagg

SEQ ID NO: 70098 - DNA, 67 bp, Heterodera glycines
agaagagatagaaaaatcaattgttagctcccgttggcaaaccgaagggtacattggggcaatggat

SEQ ID NO: 70099 - DNA, 68 bp, Heterodera glycines
tatggcacggaaagacttccgatttccgacatttttggggtcggaattccgacttcccaaaatttttg

SEQ ID NO: 70100 - DNA, 352 bp, Heterodera glycines
atggatctttcggatttggctgtggagttggaggattcactaaatttgcgacatgatggagcagtgagtgaggaggattggctgttcggcccggaagatggcatcgatacatcagcagctgtaaaaacgacggaagaaaaacagaacttggacaaatggttgaggggggcggtggaaaaggtggacttccgaacgcgttcagcactcagccgaagattggagaagaaaagtgagcatttgttgtagcgagcaaagaaataacaccattttactgtcagaaagaaaggcggacaaagagaaaaggctgaaatgcagcaataacgcggagaattccctgtccatgattgaagag

SEQ ID NO: 70101 - DNA, 629 bp, Heterodera glycines
atggttttttagcctaaaaaaatttaacaaaaattttttaaagctttttactaatttttcagctggttttttaaaattttttgaaaatttaagtgttttaaaaagtttttctaggctaaaaaatccatttaaattttcttttatctaaaaattctaagtttaagttgaaaattcttagaaatttttttttgtacgagttgccattgaccctttgttttgttgatttgtgctgtttgattcgtccaagtggctattttattcgtcaatttgacatgttttaggtcgatcagtggcgccgtcgcaatgtgcggccatacaaagaggaatttgaggaagccaaacgtcattcaatccacacaatgagtgggttcattcgctttcaaaccttggaaaagtcaaaactttcgatatatcccactaattttctaaaatcagttgcccaaaagcatattggcgatgatgtggtgaacaaccgaactattgaaactgtggtcggtgcactcgtcgacttggccgccttgcaaagcaaccattccctggtcaaatggatgccccatttccaatgtcccatcccttgtgaacaccgctacaccgtttggcgaaatttgtaggcatttttattaattaaa

SEQ ID NO: 70102 - DNA, 704 bp, Heterodera glycines
  unsure (1)..(704): unsure at all n locations
atgtttcgttttttattgcaattttttgcctttttaagcgtaacaattgcacaaaattttgagactggtgataattcgactgttcacggctgctcgtgagttttatcgtttttattttgttttcttatggatttaactgtgccagaaatcattgctcgtacggcgaccgcgacttgggatgttggaataggagtctgttgttctttgagaaaatactccttggacagatgagaaattacgttgctgttcaaatgaatgtttgttttggtgtcatggcaactcgtacaataggcaactcgtacaaaaaaaaatttctaagaattttcaattaaaacttagaatttttagataaaaaatcttaatggattttctagcctagaaaaactttttaaaacacttacctaaattttcaaaaaatttaagaaactaaaaaatcagctgaaaagaattagtaaaaaaacttagagaatttttttaaagtttnttctagggccgggaaaaccgattctgacatctattttaacgcaattcgagccccaaacccgaattcgaacaaaaaaatacttagacatttttccgaatgttctcattgtatacacgaactaagttcacatataaaccttaaagtactaaccgattgaaacaaaagaatacaaaagcaaagtcaaagacaaaaccttgaatcactagccgattgaaataaa

SEQ ID NO: 70103 - DNA, 663 bp, Heterodera glycines
atgcgcacccgtccgatctggcaagttaagcaacgattgctgactagccaaaaggtttggtgccgtgatgaaacgaaccagcactgcttaccccgcggcacccggcacggtcccccgaaggaatggatttaattaaattctctccttcggggatttttttccattaggtcgtccgttagcgttcgattgctctagtcaatttttcaaaatttttgttgaaatatttgtcgtgctctgaagggcgtgggaggggggggggggggcgaaggcccaccacgaggccgcgaagaggccgagtgagtaccttcggtgcaggaaaattattaaattttaaaaattttttaattgctttttaaatatgccaaaaaatgtaggcttaacttttttagtgaaaattcgatcactcatattttttgctaattgagcagaagcgtaccaaactttgcagggatactccccggtaaaggactaacttacactgaaatgagcgccgagctagctggctcaaaaaaattttcgaaaatctgagtctttcgtttttatttgttttttgcataattaattcataaatatttttttcagaaaatgctctgaaacgcaccaaattttatttacatgctagtttaggcactctgatgctttttctatcaaaaagggagatga

SEQ ID NO: 70104 - DNA, 213 bp, Heterodera glycines
  unsure (1)..(213): unsure at all n locations
gaaaccaaaaaaatcgatttttcaagtgtccgtttggggtactcaaacatttatggggagcaaaaatccacngcagaattaaagtacaggctatagggaagctattcccgaaggattcggtctccccataaatctgggcgcatcggttcggggggactgccccgaaaacaaaaaaatcgattttttcaagtgtccgtttggggtactcaaaca

SEQ ID NO: 70105 - DNA, 80 bp, Heterodera glycines; identical to SEQ ID NO: 51817

SEQ ID NO: 70106 - DNA, 93 bp, Heterodera glycines
gaaagaaagtcgtcgacggagggcattgtcaattaaaaacgtgctgagtcgatgcacaaaaaaactcagtgtgggcgatccacaaaaaactca

SEQ ID NO: 70107 - DNA, 1061 bp, Heterodera glycines
atgtctagcaaaaaggttaaaaacatatattttttaaagttgttttaatttgtctttagttgtcaccaaccgaagaacttgaaaaacaataccgcgattacaaagcgcaattcgaagaatggaaggaaaaaaatcggtaatttaacttgtcgcaatttaaatattctattttatgaaattagcgattccgttggcaccgaggcgtacatcaattacgtaaagcaattcgaactatgggagaaagacgtggagaagaggagggccgctttgcggcaaaaaactgaaaatgaacgattggcaacggctgaacgcgaagcggcgaaattgaaacgcgaagctgaggaaaagaagaaagctgaaggtgcctaaagatggattcatatcacatttatgttcctaaaattcagaggccgccgcccgcgcttatgccgaggaacaagcgcaatacatggcgatgcaccaacgagcacttcaagacgaacagctgcagaagcagcgagtgcggcagcaacaaagcgtacccgcacaacagcaccagtcgccgatgaaacagtcgctgtccacgacacagttggaccttttgtcatcgcctgtcagtgactgcaaagcgtcgccgacccaacaaccgcagcagaaaacaataccaaccaatgggaagccggacgaagacacttctggtgcaggtcagcgacatttggatggaggggcggtgccaaatttcgattagaaaatgacagaaccattcggatgacagtattttttattgtgttgaaagtgtgttactgtcctcttttattagtgactaatttgtgtcatctctttccacttcagatatgctttccgcgatgcaacaaatgttcagcattgtgatgggaacaaacatggcaccatcgaccaatgagaagacagtgtttgagaacagctccgaaatggaggaaaacgcggcagcagcgcaggggacgagcccacaaaaactgcagcaaacgcaactcgagcagacacagcctccgcaactttggggcaccgatgggactacctttaccaattcggtaggccattaa

SEQ ID NO: 70108 - DNA, 191 bp, Heterodera glycines
atgtcgcttgcccaagaattgctagccgatttggaggaggatggcgatgaggagatgcaagacttggaagtgaagaaggaggaggagcaggacgaagattatatagacgaagtcaccgaagagaaatcgttccccaatttgtcaaaatatgatcggataacggatgtggccaagttgaccagttcagctta

SEQ ID NO: 70109 - DNA, 1132 bp, Heterodera glycines
gcaaaacgatataacaaaaatataaggaaaaattttttaaaaaattttttctgcatcttcctttttgatactaaagcatcagagtgctaaaattaagttgtaaataaaatttggtgcgctttagagcactttctgaaaaaaatatttatgaaacaaaaaaatcgattttttcaagtgtccgtttggggtactcaaacatttatggggagcaaaaatccaacgcagaattaaagtacaggctatagggaagctattcccgaaggattcggtctccccataaatctgggcgcatcggttcggggggactgccccgaaaacaaaaaaatcgattttttcaagtgtccgtttggggtactcaaacaattatggggagcaaaaatccaacgcagaattaaagtacaggctatagggaagctattccggaaggattcggtctccccataaatctgggcgcatcggttcggggggactgccccgaaaacaaaaaaatcgattttttcaagtgtccgtttggggtactcaaacaattatggggagcaaaaatccaacgcagaattaaagtacaggctatagggaagctattccggaaggattcggtctccccataaatctgggcgcatcggttcggggggactgccccgaaaacaaaaaaatcgattttttcaagtgtccgtttgggatactcaaacatttatggggagcaaaactccaacgcagaattaaagtacagactatagggaagctattcccgaaggattcggtctccccataaatctgggcgcatcggttcagggggactgccccgaaaacccaaaaaaaaattttttggataaaaattatttaaatgaactgactagataatatttaaaataggttatttctcttcctttcagtatccctgcaaagtttggtgcgcttctgatcagtttctgaaaaaaaagttaagcctaaactttttggcctgtttaaaaaggaattaaaaatttttaaaaattttattcatctccctttttgatagaaaaagcatcagagtgcctaaactaacatgtaaataaaatctggtgcgtttcagaaccctttctgaaaaatatttaagaattaattttgcaaaaataaataaaaacgaaagact

SEQ ID NO: 70110 - DNA, 600 bp, Heterodera glycines
atgacacaagatactgctaacgatttaggcatagatataagaagtaataaaaatatttaataaaaaatatctaataaaaaaataggaaaaaaaatctttatttatgatataactaaatttattcgttacaaaataattcaaaacattttattaaaaaattataggtcgctcaaatctacggcgaaagaaagatggaacaattgaaacgagcgatttatgctgcttagcgccaaaatgcaaaaataacgtgtccaaagaaatggggtattccatccttaactgtggacataaatgtcactgggaagaagaatatgctaaatggtaaaaatataaattatataattaaagaatagagtaattttgacaatgataaaccaaaaatattaaaaatattaaattattatttacaatatatttaaattcagggtttctggtggacagtttaaacgatgccccaaccaaagatgcaaaaaaaatactataattaaatgctcatgctgtaaaaaaaatattggttatggattatttgagtgtggctgttattgcacaaaaactgcacaagacatggacatgcatgctgacaaacttgaaaaaatgtaa

SEQ ID NO: 70111 - DNA, 875 bp, Heterodera glycines
atggttgaaccgtttgcggtaaatgatcctgttgaacaaatacgagagcgtctggtagaagagtttcttgaccgtttgaagcctaatattaattgtgtcatacatcaatctaaaaagatagaaaaatttaattatattttcaaaatgatgtacaagtattttatataatgaagaaattagtaaaatagtttgactattatgtttgaaataataagttaagaacaaaagacaaaaaaacatttaacatttatttaaaagatttgacaaaataaagctcaaagaattgactgcaaaagttaaattacataaatgtttgactcttttaaataaaaacctacgaaaaatgctttattaaaatgataattttgaaacgatttcaaatgagcacttaaactaaagaaataattaaattgtacatatctattcttttattaaaatgtctaataaagaatttaaattcaaagtcaaacaaaaaaactaaaataataaaattttatcaatcaatgaatatataaaaaccagttggtaaatgtagcaaaacattattttcatcaaaaaacttaaatcaaataaaaagttgacgaaagtaatttaaaaataaattaccacaaaatagaagctaagatatggcaaaaataattgcgtatcagttcaagggaagtaagtaattcagaagaaattttcaaaactctcaagaagaaatacgcaaaaagaaattctggtatttcttttccttatgctaatttttatgcaaaattagaagcagttcttataacaatgaacagagttacaaaccacacaacataatacaaattttttttctatttattcatagagataacttgattaagtttaaaaagtatatttttatcata

SEQ ID NO: 70112 - DNA, 921 bp, Heterodera glycines
atgtttttgagtggaaaggatgatgagtcctcgatttcggctattgataggaaactttggcaaggaaagaccacgataaaaatctctgatttagagaaagctcaaaatgatatagggaaattagaagatggagtgaacagagcttttcgctacatgaatcgttccttgaaccaaaaagtcaattgggtgaaagatgtcgtggccaatacaaatgccaattttgagacactgaaagtccaatacgaaaccttaaccgaaagagtcgagatgttggaacaagacagtgatgggacgaattcaggtgggactgttagtattactaatcagaatagagcgtcgcgtgcgccgtttgtgacaccaatgggcaatgcacagcccaatcaagttgtaccgaaccaagtgccaattcatcaattattaagcgaagacgaagatgacgggccgactctttttggcctgaacatgctctcgagcggacccacagtggggtcaggtttggaaatgttttgtgaggagtctgtttttgcatttgacgattgggctgaacgtttcaaggattacctgtccgtgtcaggcaaggcttacactgaacaagaaaaagtcacaagactcaaattggctctgagggacactcctcgggcactgtttaaggagttattgccagcacaaacggacactcttgactcagcattgagtgaacttcgacagaaattggactcccctcagcgtcgggaaattgcgaaacgaactttatcgctgtgcaaacaaagggaggatgagacagtggcgcaatttctgagacgcctaactcctgtggtggatgcgacaaattcgtcattaaccggtgacattcgtaaagagaaaatctgcgaggaatttttggatagatggaagccaaacattagttttctgatccgtctg

SEQ ID NO: 70113 - DNA, 247 bp, Heterodera glycines
atggctaggttggtgaatcaattcgaaaaaggagcaaagtgccaaaaggtaattaacggtgccacagaaagacctaattaaggcaaatttaacaatttaaatgcactaaattaatttctaatcactttgtcctaatggtcacataaattacagaagaatttaaaattattccaagtaaagcgattaatccaagtactgaagagcatccaatgagcgaccagcttgcattggcatctttgaaagtcaa

SEQ ID NO: 70114 - DNA, 1344 bp, Heterodera glycines
atgaatcattttggcttatcacagttcagcattgtcacaatgcttacgctgatgatgcctttatccgctgataacatgattattgaagtgctatatgatatatatacttaccctgttttggtgaacaagaaggatactgtggcaactttgaaggcgaagatccaagaaattgacaaatttgggaacattccgattcaaaatcaagtattgttcagtggtattagtgataatgtgcttgcagacgataaaacaatggacgaatatggcatcggcgaagaaaccatttatatggaggttgtcgcctacgctggttcgaattttcatattcacgtgaactaccgtagaaatcggatctccgttttggcgaagagcacggacactgtgaaagatttaaagaagaaaatagcaaacattgatgaacttgggaatattccgattcaaaaacaaacattgtcaaaaaaaattacttgtacattttggattgaacttgcagatgatgagacaatcgataaatatggcattggagaaggcaaagaactgtttctgtcgtcggacgaatttcaatttttggtggaatacaaagagaagatgaactccattaaggtgaaggccatgaccaccttaaaagaagtgaaggagaaaatgacagaaatcactggaattccgtccgaaaaacaaacattataccatttcaaattcggacaatgtaatgacaaggctagggtgatagatttcgtgaaagaagatatgccctttttaacaatgtcggatggatctggaattaccgtgcggtggcaagatcattgggaattttttgtgattaatgtgaacagcacagacactgtggcaacagtgaagcggaagatcagggcgatcaataaacagaggcataaatccaagttaaacggagtgatcaaactaagcaaatgcgatttcgattgtaaatatgctaaagcacttaggggcgggaaaacaatggacgaatatggcatcagagaaggaaacaccatttttatggaggttgtcacttgtgacgaaagctcacgacagtggtcatttgctgctttcgaagatggttctaattttcatattcacgttgaatacggtagccggcgggtaatcgtttgggtgacgggcacggacactgtgaaagatttgaaggataaagtacggccattcatggaggcggattggaacaaaaagttcggcgacatttccctgagcaaacaacacccatcacgagctgacattgaccaacttgtggacaatgcgaaaacgatggatgaatacggcattaaagagggagacaccattgaatcattggatgccgaagaactgggctaa

SEQ ID NO: 70115 - DNA, 1027 bp, Heterodera glycines
atgtcagctggtgaacggagaagaattttgattttagtgttacttaaattaggttttgattcccgaaattcatattcatacttaataatttgtaaaatggcaacaattttttcattgaataaatcggtaaatattctaaagaattaaaaaaaatgatgtaaattaacaaagtttaaaaaaataaaaataaaaactttttttgccatctttaacgttaaattgatattgagaaattattacaaattccactcaacacctggcatgcgtattttatttaattgcatttgtcaaaatgtaattagtgaatttagttaacgcattcattttcaattagattttgacagagttttaataaaagtgcggacaataagtttggtttttaccatttttaaacattttctgaacttttttttaatacattttttctttttagtggcaaaacataatattaaaaacataaacgaagtttcagcatatcaatttattctcgaaaaccaccaaaaatattatcgtttttgtaaaattggattttgttcgagttcgggtcagggcatcggaattgggcgaaatggatctcaaaaaatattttaaaaaattttaattaattttttatgggattgcctttttgtacctgtctttttgtccataattaaaattgtaattaccgttcacgcactgcaaattatccattcgtttgaaaaatttctaattaacaaacttaaatgcaaaatttcatcgtcaaaattggcaggtgcattttcgaagggtaaataagcaaattgccacattggcatcattaactgaattcgtagaaacatggcatatcgtcgaaatgttaatgttcaaatttttcactaaatttttacagaggattttacaattttttaaaatacttcctgaaatttttttaaatttttgataaaattttttcatcaatacataaatatgaaaaatattttcgcgtttcaacatatgaattttcgactttaataagagtttctttctcaaaattgctaccataaataaa

SEQ ID NO: 70116 - DNA, 438 bp, Heterodera glycines
aaaatctataaaaaatttaaaaatgagaattcatgcgagattttctggaaataagcttaattgggcctagttaagctgtaaaaaaaatttggggcgatttgaaagagaatagaaagaaccaggttcgatgaagttttgttaagccaaaaaaaatccaaacatttaaaaatctataaaaaatttaaaaatgagaattcatgcgagattttctggaaataagcttaattgggcctagttaagctgtaaaaaaaatttggagcgatttgaatgagaatagaaagagccaggttcgatgaagttttggtaagccaaaaaaaatccaaatatttaaaaatctataaaaaatttaaaaatgagaattcatgcgagattttctggaaataagcttaattgggcctagttaagctgtaaaaaaaatttggggcgatttgaaagaga

SEQ ID NO: 70117 - DNA, 81 bp, Heterodera glycines
ttacagcttaacaaggcccaattaagattatttccagaaaatctcgcatgaattctcatttttaaattttttacagatttt

SEQ ID NO: 70118 - DNA, 657 bp, Heterodera glycines
catttcaatcactgggacttaatccaccaacattccaatcaacgggactcaacccaacagcattccaatcactgggactcaattctcctgcatttcaatcactgggactcaattctcctgcatttcaatcactgggactcaattctcctgcatttcaatcactggcactcaacccaacagcatttcaatcactgggactcaacccaacagcattccaatcactgggactcaattctcctgcatttcaatcactgggactcaattctcctgcatttcaatcactggcactcaacccaacagcatttcaatcactgggactcaacccaccaacattccaatcaacgggactcaattcttctgcatttcaatcactgggactcaattcttctgtatttcaatcactgggactcaacccaccaacattccaatcaacgggactcaattcaccagaattttaatcactgggactcaaccctccagcatttcaatcactgggactcaacccaccaaaattccaatcaacgggactcaattcaccagaattttaatcactgggactcaattctcccgaattcatatcatatatttaaatttattattaatctgcgtcaatatgtgagataaatatcgaatcacaaaaatacattttaaattaaa

SEQ ID NO: 70119 - DNA, 480 bp, Heterodera glycines
atggccggaacattggacaacaagctgtactcgtggggaatgcacaaatgggcggctgagggccagcagcccaaggaaaatgatggcggtgccgatcagagcgcaaaggcggcggaggacggcgccggcggcaccagcgattgctcctatctgtcctccaccgccacctcattgaccaacagcgacgggaatatggtagggagggcatccattcaatcgagcttatgcgaattttaaaattaaaaaaaacacaattagatactgtacttacggaataaaactcgggactctatttttcaacctccctcaaaatgggggcttttctgggggggggggggcttctaattcaggggtgggttctatttcagtaaatatgataaaacaaaaaaagtgaatttgcctcaggcaacacccgtcgaacaaccaaaacagcagaaggagaggaagaagaggaagaagagtaagagcacaaaaacgacg

SEQ ID NO: 70120 - DNA, 633 bp, Heterodera glycines
atggacgcggtcgcattggtcgacgcgaattgtcacgcgatagtccaaatggtggaacagggagaggccaaaagcgaggccgaagatggcgaggatcagcagcagcagacgctggtcacgaagctgaaaacgctaaaccaagcacagagagaaatgatttatgacaaggagaatttcaaaaagattttcaaaacggaaaatttcgaaaaaaatttacgaattttatagacgaaagattttaaacaaaaattcaaaaagaatttttaggcatttcttctctcactgtgtgcatcggatggcgaacgccgctgaagcgttctaatgacacggccaaaacgaagctaaaaacatttaattgaatttgaattaaattttgatatatggcacaatgtcgctgcggttgagaagcaattggccaatgccacccaatgaattttggtgaagctaaaattaaaatttaaaaaatggaaatttaatttcaaatttaatgaacatgtaaaagtaggcgaatcgaatgcttttgtagaagacggagaaggaggccaaagagtggggcaacatgcagaagaggaaggccaagtcggcgaatgccatggccgagaggagagtgttggccttggggaaacccgaaaa

SEQ ID NO: 70121 - DNA, 517 bp, Heterodera glycines
atgccaacaaaaaccaacctgattcttcatgccggaggacaaaaggacgcacaaattgatggaattgccaacgacgcccaggcaaaattggacggggaaaacgtaatgctgaaaagtgacggaaaattaattggctaagaaatgccgaaatggaacacggaaaataggtgttacctgaatgtaatagtcgacctgataaggaatggtttaaattttggcataaaaatattcacttgccatgccaacggtcagtgccattccctggacggaagtgccgttgccgacggcgctgcaattcattttttaaatatttttccaaaaaaataaattgacttttttatttttttaacatttttagctgaaaatatttgctctttagattcattgaagcgttagaatttttctcaaagcctgggaatgaattgaaacggaacaaaaatagggccatttttttgagggggagacaaaaaaaaacaaaaattaaaattaaaatgagatttaaattttaaaattaaaa

SEQ ID NO: 70122 - DNA, 1021 bp, Heterodera glycines
gatgctcggaaggcgtacgaaacgcgtttgaaaaatgccacaaatggcaacaatcaggtggccagagagagagagtttcaaacaaattcagacgcattttgacacattttaaggatgaatcattgttattttaggccgattgtcgcataaagaatttggaaaaagagctgaaggtgcttaagcgacagctgagtgcgttgggcgaccttctcgaccagtttttggacacttcgttggccatgcgcgaacggacgcggcgaatggaggacgaattggggcgacgattggaacgattggatgcgcagatgagggcaaatttggaggcgatggggcgacagacgcacaaaaacggtgggaaattggggagaaataaatgttaggacgtctaattcgaataattcctgttttcagggaacaacgaacagaggaatgaagcggagcaaaccattgaaacgatacatttgggttggtgtgaaagagggtcggaccaggattaggatttcgactttcggtgcaattttattttatttctttgaaattttcggacgggaccgtccctggtctctaaactaaagtcttcctcagtttaaaaaatctgtgaccgctcaaaaacttttaaatttattttttggcaaaatgtttgtcattatgggcataattgtttcaaattgctatttcatgttaatcccatctttgaaaaattaaaattaagacgaactttcaattgccgacgaagttccgcttgaacaaaatatccaacagcagccgcaaccatcgaatgtcagcaattgccctgcaaatgacgagggcggcggcggggacggaattggcgacgaattggcccattttttggccggccttacgcccgtggacgaaatgggccaattggtgctgaacaagttcaaatactcgtgcgaatttgctcaacttctctacaccggcggaggccatgtcgactcggtgttctgcaacattttcagcggatatccacccactttcttcgaagaattggtcgaggcga

SEQ ID NO: 70123 - DNA, 228 bp, Heterodera glycines
atgggctttgacctgtggaggaaggcccagcccgagtccgcgaagaggccgagtgagtaccttcggtgcaggaaaattattaaggaagagagttcattatttatttgttttttgcataattaattcataaatatttttttcagaaagggttctgaaacgcaccaaatttatttacaagttgaataaggctctctgatgcttttactatcaaaaagggagatgaataaa

SEQ ID NO: 70124 - DNA, 830 bp, Heterodera glycines
atggctgaggttaaaaatgatttcaaaacccaaaaaatctgggcatcagtagacgagactactgattctaaaggtagatatgtcgcaaatttgatcattggcattttggatggaaaattgcacaacccgcatttggttgccgtcaaatttctggacaaaactaaccatgaaacagtcgctcgatttgtcaacgacaatctgagggagttgattttggctgatgacctttggttgcttgtcactgacgctgcgcgttacatggttaaggcagcacaggttaaataaaaaatttacagaaaagtggtacaaaaaacatttttaagggcctaaaaattttctacccaaacctcattcatctaacatgcctatttcacgggctcaatcgtgtgtgcgaggaaattcgtggcctctatccgagtgttgacaaattggttgcgagtaccaagaaaactttttcaaaagcgccgtcgcgtgtggccaaattccgcgaactttgtgatctccccctcccaccgcgtccaatcatcacgcgttgggggacttggctcaacgcagcggattattactgccaaaattttaaccaagtcggagcgattattcgagacttcaacccatccgattctgatgcaatacggcaatcacaaattgccttcgactctcctggtattcgcggagatttggccttcataaaatcacattttgatattttgcctggagcgattggaaaattggaataacgcaacctcacactcattgaaagttaataaaaaaaaactcgaaaattttttattcttattttctaggtttggacatagtaagcgatgtcggaa

SEQ ID NO: 70125 - DNA, 49 bp, Heterodera glycines; identical to SEQ ID NO: 51181

SEQ ID NO: 70126 - DNA, 67 bp, Heterodera glycines
atgacacccgcactgattgcgctggtgctctatgccttgctgccgctggtgcgcggcgtggtagtcg

SEQ ID NO: 70127 - DNA, 900 bp, Heterodera glycines
aggtgcgatcatccgctgcttgtccaacattgtgtttgagcatcgtgtgctcggtgagcacaaggacttgagcaaggattgcaagaagcagctgcgggtcgcctatttgcaacaagaacaggtcgatgtgagtttcactgtcttttccttcgcttaagcgctttcaacaaaaaaaaacacaatcaaaaaaccgattggaggagatgggtgtggcgctgaatttttttgataaaagctgatcaggaagcgcaaaagccatttttggattaaagattactaaaagtcgataaggtcaaacccgagaattcccaagactcgagaatctaactaaaagacgcaccctcagcatacgagaccaagaccccaaaaaagtgagacttttcctcaaggccggcactctcgagaatctctagcagcaggcccgtaaccattggaccgaagagaaaaaaaagggcaattttccatgaaaaatctgcaaaattgaaaattccaattttttttaacaaatattacttttgaatacggtgttttagttttctgatcagaatttcattgaccaatcccactgaaagttattcgcatcggccttatcagtgatcagtgattatatatttttcctaagcaagaacagcgcacatccatctcattttttaaataatgtccatatttttttcaatttgttttgttttcctgcttccgctttcggtgtgctttctaccgtatacctcgttcataaattttttgattgtttactgtagtttgatgacaagcagcacatggacgacgcggacccacaactgatgaagaagtgtgcagctgatctgcaacgctacaactgtatggcccaacaacgatttgaggacgttgtggagtgtctacgggtcaactttgacaacctgg

SEQ ID NO: 70128 - DNA, 682 bp, Heterodera glycines
atggataagtttacgacgggattgggtcgggagaaagtagggcaatgtacattatgcacaaaatatgaaatttgaatgctacggatacagcaaaactcaatttcccaaacaattttagaactcatgcaaatacgacattggcaaatattgcgggaatcagaagggcgacaaagtgctcgactgtttaatggtgggaaaaaaattaattaaaattcataaaaaaattgtaattaatatttaatttatatgaaaattatataaaattcaaaatttaatatttttatttcccaatttcagaatacaaaaattgttcgactgcttcaaaagcgctgtcttaaagtgagttgtttttattcagtagcgcccaaaattaatattaatttatatataattttttttttggaagggttcgaaatttttcaatttttattaaattaaagtgcataatttttaaatttatcttttttggatcgtccccaaaaatgataacttatttttttacagtataattttaatttcattttaaattttcatttttttgccacaacctccactaaaaactgcatgttggtttcaggttgtgaaggagcgtatgcttgaacgggtgaaggacgaccggctgaacccgtcactgttggaaacgtgccaaaaagaagcggaacaatagtacggcactcataca

SEQ ID NO: 70129 - DNA, 2567 bp, Heterodera glycines
gttgtgaaggagcgtatgcttgaacgggtgaaggacgaccggctgaacccgtcactgttggaaacgtgccaaaaagaagcggaacaatagtacggcacttttgccaaatatatttatgaagaccggacatgattggccaaaaaccgattatttaacaaactttaataaaaatgatattaatatttataaatcaattacaatgctaattagtgaaaattgaattttgtcccaatttaagttgtgccgacgattacaagaagatcaacaacccgcagtattcacagcagcaacttggcccaatcattgccacttgcctgaggacacaatttgccaaattcggcagcggcgttcacttgtcaatgggatgcaaagatgaggtaaattaaatttgaaaatttatttgcttattttttctgatccattagtaaagaaactatattttggtcaagacataaacgagagaaattgactacattttgaggaagggcggtggatggattttgaacaaaaaattttcgatgggggatttaagtgaactactgagttcaaactggtaaaaatgcttaaaatggccaacagttattattcaaaaaatgctgaatgttttggtaatcctctaactcattattgacttattaatctcaaggcttaattatttgagtggtataacaaaaagaaaactgttcacttttaattattatgtgttgccgtattatactaatttaccgattaatgtataccaattactctaattttattaattgacatgccttaattgagtatttttaattagaaaattgcttgtcaaaattttacggtagtctgcttatctgtattctatctatacatgcttttcagttgtccaagctgatcctggagagtgagttcgacattcagctggaccccgcgctgtacaaggcatgccgtagtacaatcaacaagcattgtgccaacgcaatcattgcccggggcggcaactatgacaccgtgctggagtgcctgaaagccgatttctacgctaatcaaattccggacagagattgtgcacaacaggtgggtggtggcgatcagggatgtatcggaatgccgaattccgattgtcgattttcgacatttttgggcttggaatttcgttgccgaaatttttgtgggcctcgccacacatcctctgctgctgtgatatggccattagttaattactctgtctccaaaatgagtgttgcgattaaggatatgatttctggctagaaataaacatcttaggactctgtgttctttattagcctaccaagttttaaaaatttctttatctttcaaaaaatttatggccaaaagcactcaaaaagtttcctttggcacggtaaaaccgctaaaaattataaaaaacttaattttcattgtcaaattttgctgatcatttttggtcatggaccaaaaaagcaaaaaaatttacaatagcaaatgactatgttaattggcaacacattcagttggctcgtcgaacacaagaatcgctgatcgacatccatcttgacccgggtctccacgaggcgtgcagcgtggacatccaaagagtgtgcagagatgtgccaccggggcagagtagaagtgggcaaaatattaaaagattattttaaaaatttaatatctttttttattttaaaacaaatttaaatattacaatttaaataaacaaattttattgcgattttttaaaaatagaataattattcctaatcacttaatatatcgttttatttaattttgatgttgtctgcgaatttatcagatcttacaatttattgtttatctctaaattcattaaaaatcaatttccaatcaataaatcaatttcgcaatgcttttttccctttctcagttatcatgtgccttgtggacgcggcacggaacggccaagtgcatttgtccgccgcatgtcaaacaaaactgacggatcgaaacaaactttggcaaatggcacacgacgagtaccgaatggcattgccggagacatggtctgaggtaaagacgtaaagacaattgtggcaaaaaatgtcaaaaaaccatttggagtcattttactcataacattctatatagtttttttttctaaaaattatttagcctcaattaattcgttcaagcatttaaaacataaaaaattgttcaaaattataaatattttggtttttaattaaaaaaaaattcattagcttttaaatatgggtcaattatgataagctgtgattgaaaaaaaagattccgccattttaaatattttgcgtcgtttatttatttttttaaaataatataaaggaattttttgccgacaagcgcagctgggtttttttggcttttagtaatattttgctaaaattttaatcaataatttttgaaatataattaaaaaattgaaattaatttaggcatattccatcattgtgaaccacccgaaacggaccagcattctgtcataccttggcattggtctgctggtgcttttgctgttgggctgctgcttgggacgcctcagcaaacggacgtacaacgagctgaagaacagatga

SEQ ID NO: 70130 - DNA, 253 bp, Heterodera glycines
atggagaaggcctgcaaaatttggagagattatatcgattttagtgcgctaggttcgatgaaactttttaaaatataagcctaaactttttggcctgtttaaaaaggaattaaaaatttttagattttttattcatctccctttttgatagtgaaagcatcagagagccttatttaacttttaattaacatttggtgcgtttcagagcactttctgaaaaaatatttatgaattaattttgcaaaataataaa

SEQ ID NO: 70131 - DNA, 757 bp, Heterodera glycines
ttgaattgaacgtcgaagccgacgacccacttcaaagttacaaagagcgatttgagcggtcgtacatcgaagggactgaacaattttacaaatgtcgcacagcgcaacttttggagcacgacggtgttctgaattacatggtttacgtggacgggaaactggccgaagaggaggaaagggccaaaagatatttggactcttcgtcgccggaatccatcgcaaaggcaaacattggtcattttgtcgactcatttaaacgtttagttggtggaccaatgcgttcaagtgctggtgatcgaatatcaagaccaacttttggccgttggtccgactctgatcaaaaacaacgaggtaaacaggctgaagacgctctaccgactgatcaatcggacacccgacggaattcccaatttgctcaacgtcttgcacaaacacatcacggcagaaggactcgccgccatgcatgaacacgcggcggaaattgtgacggtacatttttggaattcgatttagaaaaaatattagaaaaaatcatcgaaatttgaatttaggacagcgaaaggtacgtggaacagttgctcaacattgtactcagtgttctccgaactcgtccgagatgctttttacaacgactcgcgctttttgaccgtcagagacaaagcatttcaagaagtggtgaacaacacggaagtgttcagattggagttggacccaaaccgaacgaaaaggttgaaaatgcgcaaaagcaattttaaaa

SEQ ID NO: 70132 - DNA, 304 bp, Heterodera glycines
ctttttttggagccaattgttgcggcacaagactttgacgtgtttgtgccgatgatgatgcgtaaaaacattgaattgcaattacaagcactgaaaatgattgaggtagtaattcattaaatttaatcgttgattaattaaatgatactaattaattaattattgaagcatttgaacggacttttgcccaattcgctgaagcttggtcaggaggaagcggatatgtggaattcgttgactgatgaggatgatagtgaacgattcatcatgatctcagtgctcaagtaaaagatttattttaaaa

SEQ ID NO: 70133 - DNA, 554 bp, Heterodera glycines
gagcctgcggcttaatttgactcaacacggggaaacctcaccgtgtcttggacaccgtaaggattgacagattgatagctttttcatgattcggtggatggtggtgcatggccgttcttagttcgtggagcgatttgtctggtttattccgataacgagcgagactctagcctactaaatagttggctcattgcttctgtgggcacaacttcttagagggattttcggtgttcagccgcacgaaattgagcaataacaggtctgtgatgcccttagatgtccggggctgcacgcgcgctacactggcaaaatcagcgtgcttgtccttccccgaaaggggttggtaaaccggtgaaaatttgccgtgattgggatcggacattgcaattattgtccgtgaacgaggaattccttgtaggggcgagtcatcaactcgctctgaatacgtccctgccctttgtacacaccgcccgtcgctgcccgggactgagccatttcgagaaattcggggacggttagtgttccggcttcggtcggtatgcagactggaaccg

SEQ ID NO: 70134 - DNA, 1041 bp, Heterodera glycines
atggaaagtgggaaatgcgtacgccgtttccgtacacacaccgatttcgtcaacggctgtcaccccgcccggcgtggtccatcgcttgtcgtctccggctgtgacggcggcaaaattattgtgcctttgccctgggcatccattacttatgcgtttgttcaggtgcacgatgttcgtcgtcggggccctgtggccacttttgaaagtgtgaacaattaccaagtgacctctgtgacattcaacgacacagccgaacaaattatcagtgggggcattgacaatgtgcttaaggtgatgcgttggatcttaaggggcgtaaattttatgtgttttctgtcggattacataaagccaacaaaatttaaaagggctattcactttcttacaatcaaccaaatgtttgtttgatttatcaattccgttattttttgtagagttaacaaccgcgagaatggaatattattcagtgttaaatgttggggccatgacctaatataaacatttgtttagatttgggatatccgtcggcttggtttgcttcatattttgcccggtcacactgacacagtcaccggtctcagtctgagtccggatggtaaccacgtgttgtccaattccatggattgtactgctcgcatttgggacattcgaccttatgcaagctcacaacgatgtgtgaagacattgactggacatcagcacaactttgaaaaggtccaattgacagtcaaaatggttcatagatgatcatatacgacgcgagttcaaaatacgtttttcaagaaattaccttcaaatttaagagaccttctccgttgttctttggtcaccagacggacaccgagtttcatgtggtgagtagtatcaagaatttcattgcttttgtttatcgtaaaatcatttgttcatttactaattttcaaggatcgagtgaccgtttcgtgtacatttgggacgttggttccagaaacattgcttacaagttgcccggccatcatggctcagttaatgcaacagattttcaccctaaggaaccaattg

SEQ ID NO: 70135 - DNA, 648 bp, Heterodera glycines
tccgtgtacttcggcaatggccaattcgccgaagccctcacgtgccccatcggccaatggtggactgtccaacaaacaacaggttgttgttgctgttgttttttagttattgcttgttgattttctaatgtaactttgcttatgttttgtgatttgggcattttgcacacatcttgacaattcaattaattttccagtccaaactgaccatccgtcgtcggcccgtccctttccgagatgccctcgtcgttcggagtgcagccaagaaaatggtggtcaatgtgagcggtgtttcgttcactgtcactgagtttaaaccgcgcacatcgccgcgagggcgcaagaaattgccggtcaatcaaaacaatggcaaacacaacgtgacattgtgtcatagccaagcggaatgaacgaaggacgagcaacggactgtgtcattttgtctctttttccacttgattttgtttttttgttaattatcttaaaactgtacagaattaattgtctttaacttacttttgtttaatcatttgtttaaccgatatttatacttgtgactttatgctttgtcttgttacatgtttttaagctggatttctcagatgactgaagtattcaaacgacctgcactcccactcgttcctgcga

SEQ ID NO: 70136 - DNA, 91 bp, Heterodera glycines
tgagaccccccttttgttgactaactcacagaccactaagacgaaaaaaccaacttaattgtacttggagcccaaaattgaatcgccgtgt

SEQ ID NO: 70137 - DNA, 1110 bp, Heterodera glycines
  unsure (1)..(1110): unsure at all n locations
ttatgtgagagaggagcgaatttattgcatcgaatgctttcttgaagtgagccacaaaagcaatatcaaatgactaattatgcaaatgctttaaactccccccaaaaagcaatttcgtcaaaatttattgtgcgacgtgcgaccggcgcattgatccgttcgtttgggtacggcgcgcccgcgagtttttctaccatttggcatgttttaaggtgggcaaaatgatcacagaaaagcgagggttctcattgcattatttcgttttgcattaattttatgaatggcatttccttttgacactttataccgtacccaccgtattaccgtaaccctcgtcgtttcgattacacagtgtgagcattgcaagcgccaattggggacgggggaccaatattcgctggacgatttgacccgacctccgcccgccatcccacgacttttgtgccaaatgcattacactgagcttgtgttgggcgaacaaagtgagagggagggaaaagcagaaactgactttttaatggcattgttttcgcaaaatttggttggaataatcaaatggcaattgggtaaaatggcattcatcagtgaatggcattttatatcatatccattgaaaaggacaatgaagacatttccaataacatttcagcagttttgaattgctattgtgaattgaaatggctaccgtacactttaggcagttcaaagcaaaagacgaaaagagtacggacgacttttggggaagatcagttgaatatcctccagcaatatttcaaagtgggcaagcaaaagaccaactcagaaaaaggaagaaaacattgttcagagtgacagtaacccggacggcgccgacttggaacgaattgcccatttgaccggccttagcaagcgggtcacccaagtgtggtttcaggtggacttgttaagggaccctaaagcaactaaaagggtcaatggcaacgcgtacaaaagacaactcatattttacaaaataaacttgtttagtcaaagcctaggcctaacctaagcaattgtacgagttctcatgacacccaactanaaaagggatccatttttgaaataatttcgaccatttgatttatganttat

SEQ ID NO: 70138 - DNA, 1056 bp, Heterodera glycines
atgtacttccctgaggacgtggacttcactgctcgcattcgttccattgttggctcgctgcccaaggaaattggtgacttcaaagcgatcactctcaaagagtgggagggcggctctgacccgcaggtaaagaaaaaaaaattcaaaactttcgtataaaacaggcccccatcatccagaaaaaactgaaaaatttaatggctgtaactatgatgcaaatttttgcattgccaaaaatggcgccaatttgtgcattttttagtcgcatttttaaacgacgtccattttgcaggcaaaaatcgaactgttgcgcagcattgaggcggacctgaaggcggagcgcaagctgcgcgaggagcgcaatgaaataaaaaagaaatcaaaggggaaatgatcttttcgggttgaatattttttttgtcaaaaattgcaaaaacaaaatacctacggtttcgctttcctgaaacaaatccattcctaaatccctactagcccaaaattcgaaaaaaaaaatttgatctgttccttaaggttatgatgacaggtcaaacaaacacggccatgaatggcttaaaaaatgaaattttttttatttgccttacggtttgcccttcatttacagtatttgctttaattatccccagtctacgaggcgtttgaaaaataatccataatccctctgtcttaatcccccagtctacgaggaggttgaaaaataatcccccatggggaataattagagctaatacggtaggtatactaatttttataaattttaatcaacaaaaattgttaaaaaaaagttttgcataaaaccgcaacaataattcgtcatcattttgttgttgccgcctttcccggcctcttccatttgttgtttcctgcaccggtctttgttctttttgccattccgacacctttctttttcgtccttttctgcttcggctgatcattgttttcgtccaattgagcgggaaagaatggcggcaaattctgttgctgatcacttcgctgttggctgcacacaatgagaaattgtttaccgtatttattgaa

SEQ ID NO: 70139 - DNA, 698 bp, Heterodera glycines; identical to SEQ ID NO: 42187
  unsure (1)..(698): unsure at all n locations

SEQ ID NO: 70140 - DNA, 392 bp, Heterodera glycines
atgcgagaagcaaagccggctgagttggaggatgttgtgagcgaaatgggcatttacggctcactgatcggtgaccagtcgaacggccgaattttgcacaacgcattcgatgggcacacaattcgaagcaaagtcagttgaatagagttagttatattattattagggctccaatttttaggcaaaaggctattttttcctgagctccccgtggccttaaacgtacgaaaaacatgcttttttgggctgttgttaagctacttttcgagttattagtgcctattttctaggcttttatttttagcgcctaaaaagcctaaaaaattttgaaaaagcctatttttgcctattttggcgttttgccgaaaatttgttaacaaaaatgcaataaa

SEQ ID NO: 70141 - DNA, 899 bp, Heterodera glycines
atggcgagcgatgcaatgaccagacgacggaccatttcgggtctcgaatacgaggatttttcgcagaacgaggggaaaatgctcctggaagaggaggacgagggtggtgaaggaggaggcgaactgcttggaggagtagtgggccgaagaaatgtggtccaagtcgaacacgagcatcatctgctcgaagggtcggcccgtctgaagggacagagaaaagggaaaagcgacggacggagcaccgatggccaatggcaccgattgccaattcgttacctgcagggcgcgttccctgcacaatgtgatgcctttctcaattgccgcgagcgaaaatttgatgtaatccttcgattggacagatcgcaacatcccttgacaaagtcgggatgatcactcagccattgttctcccgtggtgcatcgatttgtctctaatgcacttttaagcccaaacatcgctacgttctaaaagcatcccatcattgccctccccaaccattcgcttttccatcaaagtttttgtgctttgcggatagaagtgaagaagagagtggggggggggggagaagccaaaggaaaagcgaatccatcgcaatgcccaaaaagcaatgataaagaaagcattgatttggaataatgggaccaattaagcatgttaggcttccttttcggcattgtgcaccttctacgtcagtatttccgagcagagacatcagaatgggattgccgtcgtggtcagagaggaagccgtagccgcagtatttttccaaaatctgcgtaagattgtccaaatgcattttgactgagtgtgtatcggcactcacttccggcgcttcccaatttacaattttgtccagtccccatgcttttcggaacaccaaatccttccgaatgccctga

SEQ ID NO: 70142 - DNA, 1064 bp, Heterodera glycines
caacatcagataaacgacttacgccaaattttggacatcagcttctgaagcaagaggtggacgaagcttatcttctcagatggctgaggtcaaaggaaggcaaatttgacgaggcggccgatgtgagggcttaggggggaaaacgcttaaaagatctttattcagggcattcggaaggatttggtgttccgaaaagcatggggactggacaaaattgtaaattgggaagcgccggaagtgagtgccgatacacactcagtcaaaatgcatttggacaatcttacgcagattttggaaaaatactgcggctacggcttcctctctgaccacgacggcaatcccattctgatgtctctgctcggaaatactgacgtagaaggtgcacaatgccgaaaaggaagcctaacatgcttaattggtcccattattccaaatcaatgctttctttatcattgctttttgggcattgcgatggattcgcttttcctttggcttctccccccccccccactctcttcttcacttctatccgcaaagcacaaaaactttgatggaaaagcgaatggttggggagggcaatgatgggatgcttttagaacgtagcgatgtttgggcttaaaagtgcattagagacaaatcgatgcaccacgggagaacaatggctgagtgatcatcccgactttgtcaagggatgttgcgatctgtccaatcgaaggattacatcaaattttcgctcgcggcaattgagaaaggcatcacattgtgcagggaacgcgccctgcaggtaacgaattggcaatcggtgccattggccatcggtgctccgtccgtcgcttttcccttttctctgtcccttcagacgggccgacccttcgagcagatgatgctcgtgttcgacttggaccacatttcttcggcccactactcctccaagcagttcgcctcctccttcaccaccctcgtcctcctcttccaggagcattttcccctcgttctgcgaaaaatcctcgtattcgagacccgaaatggtccgtcgtctggtcattgcatcgctcgccattttt

SEQ ID NO: 70143 - DNA, 1020 bp, Heterodera glycines
atggaccaaaaatcgcgaaatatggcaataaaatatggaccaaaaatcgcaaaatatggacataaaatggcaaaaatttcaaaatatggacataaatggcaaaaatgtcaaaatatggacataaatttttcaaaattgagtgcaaaatttcttcaaatttattggttgaaattgcatatgagatacatttccaaattttttgactcggtaaggcgctctgacaaagacggctttcgttttgcaattagtcggtcaacattcggaaattggtctcgaattttttcggcaattacactgtgttgcattagaatagggacgtttttttttagttttttttaaaaaaccttgaccgcttcccatgaaccaatcgatctgaaattttaactgtacgtagcaattctgaaaatattaagattttctaataaaagtttttttgaaaaatgccaaaatatggacataaaatatggacaaaatgccaaaatatggaaaaatatggaaatatggacataaatcgctaaatatggaaaaatatggaaaatatggatatagaaatccttcctagaagcttcaaaccaagctaaaaacatgtttttcgtgcgtttcaggcctcccacagtccaggaaaaaaatatggatttccatgtaattctattccctatctatgacttctttaattatattctcatctctttgtaagtgagttcaactttgttaaaggaaaagttcaacatttttgaccgacttgaaaagattcgaaacttgcacaagaagaaaataatctttgaattattaattattagagaatcgtcatctcaagtagataagagatacaattttaatttatcgaaaaactttcggctaaaaaaggtttactattcttggcaaatacaattattaaaatttaatctttgatgctaaagtaagaatcgaaaactattttatttaaagggttctaacaaaaattttattatagcaaattaaattattaagtataattcaatttaaataagatgaaataaa

SEQ ID NO: 70144 - DNA, 145 bp, Heterodera glycines
gtaattgccgaaaaaattcgagaccaatttccgaatgttgaccgactaattgcaaaacgaaagccgtctttgtcagagcgccttaccgagtcaaaaaatttggaaatgtatctcatatgcaatttcaaccaataaatttgaagaa

SEQ ID NO: 70145 - DNA, 735 bp, Heterodera glycines
atgttttggttttttaaggttcttgtaacattttcttgacaatacacatttggatgaaaattatgaaattttttataagaatttaataaaaattatcaaaaaattaacttaaaatcttttaacaatgttgcaattgttaggttattttaattagtcgttgtttcaatattatttatattcttttctttattggtttttagttttctttacatttttttaatctcttgaaccaataggtgataatatgtccagtttcatgaacacaattgtgtatttaatcaagttataaattaaattcttttatttactatttttaaaagtgaatttatttaatctataataaaattcatttcttgagaataaacaattcctttgcaatataactttttgaaaatattatgaatttaaattaaaatccgtaattttttaattatcaatttcttaattttgtatattttatttttaaattaatgttaattaattaatttggcgaattttgttttaaattattttcataagaaaaactttttatttttatagaatgataatgtttatactatatttataaattatgataatttatgatttaattgaatcaaaattaatttgtatcattaatcatatttagaagtatttctttttagtttattctattttgttttagtttttttactcgttgttgcattatcattgaaagaaatataataatacaaaaaaagtgttatggataaaata

SEQ ID NO: 70146 - DNA, 696 bp, Heterodera glycines
  unsure (1)..(696): unsure at all n locations
ataaatctgggcacatcgattgggggggcctgcccagaaaaaaaaaaaatcgattttttcaagtgtctgttgggggtactcaaacaattagggggagcaaaaatccaacgcagaattaaagtacagtatatagggaagattctccggaaggattcggtctccccataaatcggggcgcatcggttcggggggtctgccccgaaagacaaaaaaatcgattttttcaagtgtccgtttggggtactcaaacaattatggggagcaaaaatccaacgcagaattaaagtacaggctatagggaagctattcccgaaggattcggtctccccataaatctgggcgcatcggttcagggggactgccccgaaaacaaaaataaatcgattttttcaagtgtccgtttggggtactcaaacaattatggggagcaaaaatccaacccagaattatagttcagaatagagggaagctattgcggaaggattcgacaaaaacagagagaagaaaacatagggggggggtttctgttttggggggaaagaaaaaaaaaaaaaaaaaccttaaggggaaaaaaaaaaaaagtttggggggcgaaaatttttcccaangaattaaagtacaggctatagggaagctattcccgaaggattcggtctccccataaatctgggcgcatcggttcggggggactgcccc

SEQ ID NO: 70147 - DNA, 67 bp, Heterodera glycines
atggtagcggaatggacggggtcggaggtattctcgacggaagagtctgtccaactgtgcccaaaag

SEQ ID NO: 70148 - DNA, 47 bp, Heterodera glycines
  unsure (1)..(47): unsure at all n locations
atgactgcaaatttggcatggncattggacgaatcatcaaaacccag

SEQ ID NO: 70149 - DNA, 176 bp, Heterodera glycines
ttattttgctgacgaattcactgagcacaaccattgcagaaacattgacctgaccatttacacgccgaacccgaagctgtccaacgcaagtgcgcacctttttcttggctacgacgagcaaattgcgaaggggccgtggtgctatgtggagaaggtatacggtagcaatttattcg

SEQ ID NO: 70150 - DNA, 416 bp, Heterodera glycines
atggtttttgaacgaacttttcagggtgaaatcgtcgtcaaatgccaacgccggttcgaaggtgaacgattgtttgccctcgtaagtgttgtttcgcttaaaatgatatttctattaatttattgtttcgtggtagggttgtgaaaatccgacatttttagcctttttcgggatatccccgaccacgcgccactttcaaccccctccccaacatgaaatcctgcgactcgggggagggtgttatgtcgttgctaaaagtgcaaaaatgggcgattcctagaaacgtgcaaaaatcaaaaatcaagtttttcctataatttttatcaaatttttaaaattataatatattaaaatttaattatgtatattaatgctcaaatgaacattcttctattagtttttatatctcgaataaa

SEQ ID NO: 70151 - DNA, 563 bp, Heterodera glycines
  unsure (1)..(563): unsure at all n locations
atgcgccgggacgtcgcatctgtgggcccgggggagactgatcagaattgggggccgattcttgaatggacgggggcatgtgagaagaagggatttgatttaaatttggcgttccgtctgatgttcattgtccattcatatcccatttatcgatttaacctttgacccagtcaacatattcccccgcccgtttcccatattcattcgtaattgttttattattttctccatgttctctcctttcccaatccgtccctcctccaaataaatatatattatttcctacttgttcccaaataaataattattctccaagtccatcgccaattgactaagtgaaccaaaccctgcaaaaacccaaacccgagccccaacggccctccctcttccctcattttcctcactccttaccaacttatttatttcatttccttaccaaaaattttctaaaaatctttctaatatatttcnacaatacaaaaaatattttcaataattcnatacttatcatcaattanaantcactttattttatntttaatnttacanataataaaatntaa

SEQ ID NO: 70152 - DNA, 312 bp, Heterodera glycines
atgcatttggcacttggactttcacgcacgaataacagccttgaaggctggcatgcaatttggaatgcccatcttaaaggaaatcagcgactcagcggttttgtccggaaaatgattgaagaagatgatatgtggtcccagcgaattattgattatcagattgcgcctgctgatggaataagggggccacacgcagcaagaaaggggaaatatgtcagacaagacaacaatttaaatgctcttttacaggacattggaaaccgtgatccgcttgaatatcttcgggcctgtgcataccatttgcacttttga

SEQ ID NO: 70153 - DNA, 782 bp, Heterodera glycines
gtcttgttggcggctttgttctgtctctgcttgcccagtggaccgctccgacaatgggcagcacatcgatcggactgcttttcagtctctcgaggtggattctctatcggtttttccgtccgaatcccgagagtcccgacattttttaacgtccgagtctaaaccccaagagttatgaatggatggacatttttaacattttcaaacaatttttgttttagaaaaaaataaagcaattttattgtctgtttttgaatgccttgcggatttcagctaaataccattttcggcatcttaattttcagtaatttctttctcttccatttacgtccctttttccaagggcatttccttgaaaattttatattacatggaataagtataacccttttttattgtcttcataaagtatcttttttttagtttcataattttttcctttgtccttgaaagtcattttatctgtccttgaaaaccagttttctgatgctcatgttcctccccccatgttcaaacaacaattctgccttttttactgaccacttgtctcctattcttttcagtttttcgtgccactttttagtgcaatttcgcacaatatgccaatctcagaaatctgtaaacaaaatttctcggcacttttagccacgccgccgttttggtcggtgccgtctgttcggccatcgaactgtacgaaggggtgaagctgaagaatcgctgattactgactaatcgatcagaaacaggcaaaaaggacaaaaaggaagaagaagaagcttctc

SEQ ID NO: 70154 - DNA, 550 bp, Heterodera glycines
atgcttagcaactttttttgcggcgaaattaaaaagttacctgttccgactgccgccagtctgattctgctccttgtccttctttccgtcattgcattagttgtcatcgtcacactggtgatttgttttatacaagaaaatgaattgcgtttcgccccttttagggagtgcttttctacaaaaaatataaacagacgcgccgcacaaaggctgtctcttcaaacaaaagtgaaactccggaagtgccttcggacttggctgacgaagcggcggagtcttcggactctgatgaaggccgtggtggagtttcgacggcccctcccgacatggaatcagtagtggctgacgaagcggcggagtttttggactttgatgagggccgtggtggagtttcgacggcccctcccgacttggaatcaggacgcaaataatgccatgatggaatttaggcagtcaatattgtattgttgtatatattaagtggaagtggaaactatctataactgtctgtgactgttcctagcatcataattctgactgtatcgcccga

SEQ ID NO: 70155 - DNA, 296 bp, Heterodera glycines
atgtctgccaacaacggaacattatttgacaatcagctgaccattcaaaaggtggtaatggaaaaataaaaatattattttaaattaatttattttcctaaaatttagaacgattcctccgcctccacgtttgtaagcacattaaataatataaatttttatattttaaatttccataaatttcacagctgattattggactctccgtggttggcattgtgatattgattgccattgccgttttattatgctggctgattttgatcattcgccggaaatgtaggatattaaattaa

SEQ ID NO: 70156 - DNA, 861 bp, Heterodera glycines
aacactgggactcaaatgtgcggcattctaaacactgggactcaaatctgcggcattccaaacactgggactcaaatctccggcattccaaacactgggactcaaatctgcggcattctaaacactgggactcaaatctgcggcattccaaacactgggactcaaatctccggcattccaaacactgggactcaaatctccggcattccaaacactgggactcaaatctccggcattccaaacactgggactcaaatctgcggcattctaaacactgggactcaaatctgcggcattccaaacactgggactcaaatctccggcattccaaacactgggactcaaatctgcggcattctaaacactgggactcaaatctgcggcattccaaacactgggactcaaatctccggcattccaaacactgggactcaaatctccggcattccaaacactgggactcaaatctccggcattccaaacactgggactcaaatctgcggcattctaaacactgggactcaaatctgcggcattccaaacactgggactcaaatctccggcattccaaacactgggactcaaatctgcggcattctaaacattgggactcaacccaccagcatttcaatctctgggactcaattctccggcattccaaacactgggactcaaatctccggcattccaatcactgggactcaaatctccggcattccaaacactgcgactcaaatctccggcattccaaacactgggactcaaatctgcggcattctaaacactgggactcaacccccaacttttcatgacattcaatctctaggactcaacccaccagcatttcaatctctgggactc

SEQ ID NO: 70157 - DNA, 1417 bp, Heterodera glycines
atgctcagcttcatttacgcggacgatgtcagcggactgaacggagacaacgcaatggcagtgctttacgcgggtgaaaaatttagagtatggacccgaattcgtaaaatgtcgaaattataaaattgggtttggtttttgttagaattcagggtttggaattggctaaactaacgtcaaattcgtgttcaacggccccgaaaacaaaccatagaaacaccttttcagtgacttttgaaagttgaaattttcagaaatcatcgacagtattacccaaaacagattaaatgcatgaaaaaaaactaatattgtattatgcatatgggtggtatcatttttttgaaatttactttaaaattttttgtccttttttaatcaccgaatatttttagccagaaaatacaacattttggggggggggggggctgatccgtcgatgtatgcaaattccaattccaaatttgtccaatgttttcttggcccttgttcagacgcgtcttttcgactttgaggtgggaaaacgatgatttatcttcttaatttatgcagagttcccaagttttttgaattaagcataaacagaacaaatcatttttaaaagtgagcctgtaggctttacaagagaaaaatttcaatttttaatgaaatttgattcctttaaaaaatttctagccctcaaaattcagaaaatcatcaaacttgggaggaataaattctgaatatgagtattatataacacattgtagaattttgcccatcaatgtttgcgttacatttgtcaaaatgccggccaattgtttgaatctgaggaatttttgcaaattgatcagaatttgctgtgcgaattattcgagaatgatcagttggtggtcagaaatgaatttgaactttggcaagctgtaatttttaattttttggtattttaatttatttgtttgtttttcgtttaggcactccgttgggccgacgaaaaatgtcgtcaaaatgccatcgaatgttctgctggaaaccaacgttgtcagcttggcccggcactgttcaaaattcgtttcccgctaattccagcaattgattttaccacaagcattggtaacaaacaatttttaaaattgataaaaagaaatttatttattttgcagttccttctggcgttttgacaaacgatgaattggtctccgtttatcagttccattcccacccgaatctccgcgatgttcccgggcttcgaccattggaatttccatggcatgaacgaattgaaggcaacagagggatcctggcgatggaaattgagaaattttctaaatttgcacgagagagagtggggagtagccgattcagtgatgctgtacaaacgaagggatttgaatggaaaatattggcaatgctaatttgtaagcgcaacgaaaagcaatga

SEQ ID NO: 70158 - DNA, 1423 bp, Heterodera glycines
atggaaattggagttgcaaatgttctatcacttatcgaattgtttcccaaaagatcggaacggaggatttgtcgcagcaaaaatgtgaccatgtttttaacaaggaagagaacgactggggctttgcaactttcattctttttacggtgagtgacagcaaaatcagagttgcgatcgaagtattgaaaaaactcagtttagtacagaaaactcattcgttaaatcaccataatttgcatccaaatcctaaaacgaaacgttaaaaatcgcgcagtcgcggaaaaatacggtggtcacgctccatccctgttttgcaccaattttcaaaaaaaaattagtaaaaaccccaaaatgaggtgcaaatatcgtaactctagccaaactccttttctcatgaaatatatgggtcggggtcggggggggggggtcacttcggcgcggaccatttcggcgccgcaaattttgaaatgctataacttttttatttgtcagttaactttagccaatctggcatcatttgaaagctctatgtgtgctctatattcacatgtaaaatagaaataaatgattcaaaaataaaaaagttatggcacacggcgccgaaaaagccaagaaaaagtcaatttttgaggttttttggccataacttttttgtaaactgactacattttttgaaattttgcaatctaatagagaatctcaagagctatcgaatattaacaaaaatatttaatttggttgataatgaaaaaagttgttagcaacggcgccgaaaaggccggcgccgaagtgggcggttcccaaataaattgagaattaaggaattgatggagccgagcaaaggattttacaacaaaaatgaagacaaagtgaagctggccattgattttacggtggaataagaagggaaaaagcggaaattggccgacggataagcccatccatccaatcactcattttctgttgattactttgattaccatttacaaaacaaaataatatgtacaataaatggatattggttttttccaattgttattttttgtgtttttttataaaagtttctccaatgaataagcatttcttcccaatgtcaacaatagacaatttgttcattcattttaatttaaacgaaaaactgtattttttttgacatttaaaatcaggtgtaccacttcaatttttaaaccatgttttatatgtaaaatcattgcaaattcaaaatttaaatttattacttttttggcaaaactgccgattgttcgttccctccctctcctttttggcataagaatttttgtattaaaaagtctgattttttagctgtttttgggtcactgattacgaatatggaattcattttgttatatttaagaaattgtggaaaagaattcaaacaggaagcgaaaatgcaaaattttaa

SEQ ID NO: 70159 - DNA, 590 bp, Heterodera glycines
atgacaaaagctgtaatccgcgtttcatttgccttttattttgctaatattttggaatttttcttccctcaaaatttcattcggtggcattttgacggcacttttcatcggcctaaaggtgtgtcaaatgaaaaataaacaataataattacaacaaaataaatgttaaaattacagctttccaaattgaaaattcattgctgatcaccaaaggagtacgatcaaataatatacagagcaaatctaatcaatttgcaaaaattcctcagattcgaataattggccggcattttgacaatgtgactcaaacatttataggccaaatctctttagttgcccattttttgtgcctatttaatgcctttgcgattttttctgcctttttaggtgccaatttcgcgcttttttgttctaaagaacgaaaccttaatcattaagcctatagatttcttaattattcagttaaatttccagaaatttttttattaaaaaacttagcgacaaaaatagtttttgatttttaaaattatgtatctcattcccatttttagcacctattttggtagtttttagaatcaggggcaaataaa

SEQ ID NO: 70160 - DNA, 410 bp, Heterodera glycines
atgcaaagcctgaaagtgagaaaactgaataatataaattgttattatttgttattatatttcttgattaaggatcaaaaattaatccgatcggttttcttggtaatattttcttactaaaccttttatattattaaatttaggcaatcaaacaaatccacaggccaatagtacggaaaattgtaaaattaatattaatcggatttattttaaaaaagttcagtttctcaaccgatgaaaaatgcaaagcccaaaagtgagaaacacaaaaatgtggaaattacattaataatatgtattgctttaggatcaaaaattaatccgatcggttttcttggtaacattgttttttttattaaagattttatattattaaatttaggcaatcatacaaatccacaggccaatag

SEQ ID NO: 70161 - DNA, 391 bp, Heterodera glycines
atgaaaaatgcaaagcccaaaagtgagaaacacaaaaatgtggaaattacattaataatatgtattgctttaggatcaaaaattaatccgatcggttttcttggtaacattgttttttttattaaagattttatattattaaatttaggcaatcatacaaatccacaggccaatagtacggaaaattgtaaaattaatattttaatcggattaattaaaaaaacagtttctcaaccgatgaaaaatgcaaagcccaaaaatgagaaaaatgaaaaattattattatattttaagaaaacggatatgttccacctccaccgcttccggtcggctggtagggtcttccgccagtttttgtgtaatttttattttgactgaaatttattggaaa

SEQ ID NO: 70162 - DNA, 1469 bp, Heterodera glycines
  unsure (1)..(1469): unsure at all n locations
atgcaattggcgtcggagttggtgccaaaanagccaaaagataaaacaggaaaaaactaccaaaaattaaaaagtcttatagtgaagttcaaaaaaagtaaaagtgaaaattttaatcaaaacaatcagcaagaaaattttgaaggtttgtgacaatattaatgggttaattaagacgtaaacgatgccctaattatttaaagaagcgaatttaatgaacaaagcgacaaacgatgttatttctgaaaatgatacaaacaccggacgagaacgaatttcaaaacagcagcaggtaaatgaattaaaatattatggagagaaaaattggaaatatttttgttagcgaatggaacaacagcaaacattagcaacaaacagcagaatcggacagcaaataaattttaacttgcgcaagttttcatcactcaatggcatgcattacggtccaattaagtcactttctttatcaaaaaaaaatatttttttgttcataaaaaatgtcaaaataggttttttcaaaattattgataaaaattaatggtactttcgggttttgtgtcaacaaaatttttctctttgttaaattgattttaaattaataaaaagtcgtttctatgggctttcggggtcgtagaacccgaatattatgtccgttttggcccatttcgaactccgaacccggattcgaacaattatcaaaattcaatttttttttcaaaaatgctttcccacttcattgccgactaatttccttatcagcaaattgcttcctacctacacccacacccttttccctcatttataatgcagagaaaataaaaacagaaatatttgaaggacgaaagagcaacaatcaaacgcaacaggaaaatacaaaatttaatttaaaatcgccaattgaaagcaaaaaaacaaattttaataaagatgttcataacggggaagtatcgcaaattggaaatataaacgttcataaaagggaagagaaaaaaaccggaaacataaatgttgcgcaacaaaacgacgatgttggtcaaaacacaggaagacaaaacactaatacgcaaccaaacgacgatgttggtcaaaacacaggaagacaaaacacaaatgttcataacgtggaacaaacaaaaaatgacacaggaagacaaaacacttatgttcataacgtggaacaaacaaaaaatgaaaacacaaaccttgcgcaaccaaacgacgatgttggtcacaacacagaaagccaaatcactaatacacaaccaaacgacgatgttggtcaaaacacagaaagccaaatcactaatacgcaaccaaacgacgatgttggtcaaaacacaggaagacaaaacacaaatgttcataacgtggaacaaacaaaaaatgacacaggaagacaaaacacttatgttcataacgtggaacaaacaaaaaatgaaaacacaaaccttgcgcaaccaaacgacgat

SEQ ID NO: 70163 - DNA, 159 bp, Heterodera glycines
cctcccgacaacaaaaatagcgtgcaaactctgcagcagctgatcgcctcgcaaaaggacccaaatgcctttgtttttggcacaaatatggcgggccgagtgggccaatggctgacgaagcgttcctttgagaaaacgatggacaccgaactgcgcagt

SEQ ID NO: 70164 - DNA, 424 bp, Heterodera glycines
gatggtcatgccgatgctgacattttggccaatgctgatgttgtcatcatgaacaacgtgttcacattctttgctgaccacgctgaacaggtgggatatttttaaaaaaaaatttgcgggatttttttttttgatttttcctctctcattcagtgtgactaatgataaatttttttttattttctcactaccaatttttcaatccttaatttttctcccttcgttagaattctttagttttttttaaatgttgttggatgaaaatttctacccccccctctctaaaaaggtttcgtgttggcaacatttgcgtgcccatttgcgtcctggcactctgttgttgcactcgccatcgctggagttggtcactgcccatctctgtccgtcggcacttggctttgccttcgacgattggttacaagcg

SEQ ID NO: 70165 - DNA, 282 bp, Heterodera glycines
atgaacgacgctaatggcaaattggaggcggcacagaaacaatttgaggcaattttggccagcttttctcccaccgccgatggcaatgaacaatcgcagcagcagaaggagcagtttttgcgatgggttcgccaacggttgcgccgtgaaaatgcgatgccaacaaaagacacactgcagcacagtgacaaacggcatccaacggatttgtcggtgcgcaagcaacttggacgtatcgcaaaacgcctgcgcgaattggtacacatgtcaatgtgcctgtag

SEQ ID NO: 70166 - DNA, 558 bp, Heterodera glycines
atggttaacgtgaagaagggcaccgtcattcgttgtgacccggcaatgcgacagttcctgaagcatttggacgagacacgggctctgggcaggccgttcatcgtcaaggtggttgagagatcgtttttcgtgaaatatttcattctccattttattaaaattttcccatttttttttttttttttttttgaggcaattgtattgtaggtgttcaatccagtttctttagccatcaattttttcttcataaaggcccacatttgtaccaaacaaaagctttgtctaaaattttttttctttaattcaattctgagccattcttgaaaagctttcgttcggttgatgccaagaaagctgtcattgaccaaataagaaaaaattggaggcctaaaagtcgaattttgaaaaagggtttgagtttttgtcattttttaatttatcccgttttgacaggaccttgacgagttttgtttgttcgtggagcgtgacattgtgccaatgttggagcagagaatggatgcccttatggatgctttaacacccgacactcaaacataa

SEQ ID NO: 70167 - DNA, 776 bp, Heterodera glycines
atgtgccgtgcaatgttgcgcaacgtgcaaattgttgtgctggacgaggccaccgccaacgtggacatgtaagagatgtagtggctttgttaactggaataaaagatttcttgtcaggagcagcccgtacctccccccccccctgacactcgaaaaatctttaaaaattttcctgacagaatttttctaaaatttttttttttggaaattatgaatttctaaaaattccccaaaattttctgttttttttatttggtgatatggagcggaaaatggtggtgggatgtaagttaccttatccatgtctaaaatccgggggtttttgaacttgaccaagataaagttttttttttgacccatccggttaaatttttctattttccgtcatggttctattatttattactagaaaaaaaaattccagtcaaacggacgaacgcattcaacagtcgattcgcaaagaatttgctgatcgcacagtgttggtgatcacacatcggctgaccaacgtggtcactggccttggccgtgtgttgagcatggctgacggaaaggtgaaaaatttatacgcaacgaattttgaaaaaatcgaattgccaacccctcagtttttccaattattttttttagaaaatcacaaaaaaaaaattttgtttttatagctttccgatgacaacatcaccaccaccaccaaccatcgtccaacttcaacgacatcaacggaattgccgaaaattgtggtggacgaagcgccaccgccaccctcctcaccatcg

SEQ ID NO: 70168 - DNA, 663 bp, Heterodera glycines
atgttttattttattgccacatatatttatttaatttttttttcttcatttgataaatcaattcgaaaaatcgaaaatttcgtgattattctggtttgtccggatagagaggtaaaataaaaactgaaaatcattagaatttaatattttaaatctaattctatcgaatatttagataatttcttatttcacatatgaatttgtcaatttttaataccattaattaggttttaattgtgctattataatgctttactaatctaattaattcataaattttctttaacaaaatttaaaaataaatttaaatatatattaataagtatttaaatatgaatttattaaattagttcattaattacgacttttgcccatccatttattatcattatttaaattctttgcctaattactccaatttttagttgggtgccggtcgtgttggccattcaggcactgctgttttggctgcccaattggctatggaatatgctgcacaagcagacggcgatcaatgcgcgaagtgttgtgcaggaggcgggcaaaagtcgcgtactgatcggcgctgaacgggacaaagaaattgaagcgttggctggctacatcagcgattccgtaaatgatcgggggaaaatgccaaaaattgaaaatgtttcaaataaa

SEQ ID NO: 70169 - DNA, 1237 bp, Heterodera glycines
  unsure (1)..(1237): unsure at all n locations
atggatttgtggcttttaatatttattatattttgcttattttatggaagtaaattcggcaaaatccgatcaaattttgacgaaatattcggcaacggatgggagaaaaatgaaaatgaaaaaaaaatgattaaaatggaacaaattgatcataatgaaagctcagcagctgatcaaataggtggagaaaatttaaatggtcgaattgatcaacaaaaaagagaaacaattcaaaaatttgaagcaattaaagaaaggttgaagcaaaaaggaaaatatgaatggaaaaagaataacaaaattgagcaaaaaattgcaaaattattaggcacaaatcgcgacaaaatatacaaatggaaaaaagaattaaatntaaataaaaataaaattttttatgaacaaaaaaagaaagaattcattgaacgaattgatgaatttaagtatttatatggccaaggcaaacagaaagaatttgtgaaggaattgggcatttctaatatgacatttcgtaaatggaaaaaagaattaatgccaaattgtcataaaagtaagtgaatttttggtttttattttaattttatatttaagcaaaaaacaaatattccaatgatgacaaattgaaaaagatgaagcaatatttcaaaattaaagaaggaaatccaaaaattagtgacgaaataattgctaagaaattgggaattgaaagagcaacactgatcagatggaaaaagaaatttgcttgaattcaatgacatgtgaagtgaattttgctcttgacatcagggctgcacgcaattacggattgcggattacggaaattacggggttttgggagttacggattacgggttacggatttttgggatttttccgtaattttgatccgtaatttgacttttggattattttttcgagacgatttcttgtacgattatttttataaaaaacaaagttttctattttttatttaaagggctacccgtatttcgatttatttaagaattaaaatagatttataattttttatttgttgttgttaaggctatttgggtagttcgcctagaaaatagaggcatcacttttttgtcacacctatttttcacgcattttatgaaaattcataaaaccttagccaggtgaggggaggaattccccccttcccccgcccgaaatgaaaaattaaaaatttttacaggaaaaattgggacttttaaattttttttgtcgatttttctta

SEQ ID NO: 70170 - DNA, 81 bp, Heterodera glycines; identical to SEQ ID NO: 58971

SEQ ID NO: 70171 - DNA, 657 bp, Heterodera glycines
  unsure (1)..(657): unsure at all n locations
gttttcggggcagtccccccgaanccgatgcgcccagatttatggggagaccgaatcctttcggangtagcttccctatagcctgtactttaattctgcgttggatttttgctgcccataattgtntgagtaccccaaacggacacttgaaaaaatcgatttttttgttttcggggcagtccccccgaaccgatgcgcccagatttatggggagaccgaatccttccggaatagcttccctatagcctgtactttaattctgcgttggatttttgctccccataattgtttgagtaccccaaacggacacttgaaaaaatcgatttttttgttttcggggcagtccccccgaaccgatgcgcccagatttatggggagaccgaatccttcgggagtagcttccctatagcctgtactttaattctgcgttggatttttgttccccataaatgtttgagtaccccaaacggacacttgaaaaaatcgatttttttgttttaggggcagtccccccgaaccgatgcgcccagatttatggggagaccgaatccttcgggaatagcttccctatagcctgtactttaattctgcgttggatttttgctccccataattgtttgagtaccccaaacggacacttgaaaaaatcgatttttt

SEQ ID NO: 70172 - DNA, 470 bp, Heterodera glycines
atggcttttgtcggtttttttcggctacttattggtcatgtgcttatcattgaacgatttattgcaacaatgcgctcaaattcatacgaaacagttccaaaatgcgtattcatttgtacatggttgagtattacggtaatggaactctaattgataaataaatacagtacgtactaattagcctaaaattttttaattatcaatcgctttgacaaacacaataataaagcagtggtcggggacatttacgcaatttaatttgatcagctcatcaatttcgacaattttaagcttgttggaatatttggtaaaaaaatatattagacaatttcaaatcgaatttttagatgattgtcataattggttattataatcggagaatatataatcatcaaattgagaaagcagcggcaaacaattatcacattggacagcgatatcaagaaaatataaaatgtcttaagaattaa

SEQ ID NO: 70173 - DNA, 661 bp, Heterodera glycines
  unsure (1)..(661): unsure at all n locations
atgccacncaccagggatgttgcaagtctcgcttatcgcttacttgctattttttttggacttctcgttcttgcattctggttcttgtattttaatttggtagcgttttaaatgcttttatcgaatttggtatttgattatgctctagcaacacccctgccatccatccctctctctattagtgccatcaaaaattttaattgctttttttaaccaaatttattttttaattcaaattgtaggtataattcaaagaaattaataaattgtgaaaatcttttaacagattttgttcaaatgacattcccatccgtcacagtcgacgtttttgcttatatattttccttttttgaactgttcacctatggcattgtgttggccattgcttttttgaatttggcagttatttgtccaaccaaaattttacatatcaacatgaaaagcattctgatcagtcatagtgttgcgcttatcgtttacctctttggccgagcaggaattattgccgaaaaattcctatcaaataatcaatttgtatcgacaaatgtcgtccttaaggtctgaaaaattattgttgttttttatgtcaaaaaaagtaattttattttaaatttctcataaaaaatcattaaaattaaattttgtttatttaactaataaa

SEQ ID NO: 70174 - DNA, 117 bp, Heterodera glycines
  unsure (1)..(117): unsure at all n locations
tgtccgtttggggtactcaacattnnatgggagcaaaaatccaacgcagaattaagtacaggctatagggaagctattcccgaaggattcggtctccccataaatctgggcgcatcg

SEQ ID NO: 70175 - DNA, 227 bp, Heterodera glycines
atgccgtcatcccccggggtgtcgacacgctgctgcacatcccggccaagctgcccgaccggctgttccccaccctctacgtgggcgagtcggcacagaccgggctgtacgcgttgcccgcctttgtggacgaacggaccagcacattggcacccaaatatctgggtcccccgctgctggaggaagcaaagccggcgaccgacggcacagcggaagtgcggcgacag

SEQ ID NO: 70176 - DNA, 98 bp, Heterodera glycines
gttccatccaatgcgacaaacgatgcctttctgtgcctagaccagccgtcgtcattgttgaccgacttggacgacgtttcgtgcgaccctcagcagca

SEQ ID NO: 70177 - DNA, 327 bp, Heterodera glycines
atgatcagaagaagtgcaacagtgattaaaagaggtgcaacaatgatcagaagaagtgcaacagtgattaaaagaggtacaacagtgatcagaagaggtacaactgtgattaaaagaggtacaacagtgatcagaagaggtacaactgtgatcaaaagaggtacaactgtgatcagaagaggtacaactgtgattaaaagaggtacaacagtgatcagaagaggtgcaacaatgattagaagaagtgcaacagtgattaaaagaggtactacagtgatcagaagaggtacaactgtgattaaaagaggtacaactgtgattgaagag

SEQ ID NO: 70178 - DNA, 2207 bp, Heterodera glycines
gaaagacacatgtataactttcatgcttgacaccaacaaaacggcggaagaaggcattgaagtgattgttgacggtcgtaaaagttggtccaaaattgggaaaactttggcaaaatggcaggaactttcgctgggctggaacagtgtttgtgtatataataaataattggttaattaataatttattttttaaataaaagcccctcggggctctattaatccatttccatttattttacagaatggcacggccgcccatgaacttttacatgcactcgctatttaccatgaacatcagcgtgacgacgcattttactttatcaaagtcaatccaatttgcagaatggacggtgttggtgtacatatacatataattaatttataattatggatgacatttactaattagtttatttaatattttttatttttcataatattgaagaattatcaaccgttcaataaaaccgacaattttggcttcccctacgactttgactctgtgatgcaatacccggctcatattgataaacaagggtaattaatatagtgtcacgggatcgggaccaaaacacggacaactgagtaccgaagtcctggttttgaccagttatgaccgggaccgggaaattcccggggtttttcccgctttacccagccaaaaagtcccggttttgccaaagttcccggtcccgtgacgctctagtaattaatttattatctatgagagaatgcattaaattatacaaaaaaacattttttcattttaatgggttttttaataaaaaataacaataagcaatgttccaaggatacaacaaaattccaagttcctgacctgtattttcgcgcttcaaaaataactgaaaattctttacattgtgagcactgatttaaaacttagagaattaaaaaatctgagctgtcttaaatcgaatttctttggtttccagctattattacctcatcacaatgggccgtttttatcaacgaacaattggccaagataaaaggctttcattcaaagattcagcaataatcaatcacatgtactgtaaaggtgtggttactgtaaggctgaaatttaaaatatatatttttttgtttttatttgggtacagattactgtaatggaacgaaaaacgagtgccaaaatggaggctacccaagtccaaaacaatgcaatgaatgcctttgtccagaaggttatgctggtgcacattgcgaccagttggcacagagttagtgcaaaaatataaatgaaaaattaggaaactcatgaaattttaaaaatttgttttctcgatagaacaataaaatatgtctttgttttttttattatgaatttttgcgttaacaattaattttttggactagtatgatgataaagacagagaattgaagattgttgtgacaaactaagacaaaattttgaatcattattgttttttgttgaatttctaaaataaatttttatgaaaaaatttttggtgcaaaacttatgaaagatttcatattggcaattgtatagatcagaattgcgttgatctgagcggcacgcccaaccatttggaggcggattggaaaattcgtgaactgaagcccaaattaaagtgtacgagtgccgaaatgtgcagctgccattggcaaattaaggcaaaaaatcggagaaatgattaattttataaaaacaataattttaagccaaaaaagggtgaaaaagcgatcatcaaactcatcaatttggatgagaaggcactcagttgcgccgggatttgcggcacgaaccatgtcgagatcaactaccgtaaagacaaacgagcacgcggtactgtaatcattcggccagcaaacaaaatttggtggcggaaaaatccgaaacaaacagactttttaaaaccaacaaaaaaccataacattctataccgtagaaaacggtgcagtcgcccaattttctcccaccggtccggcttacaattagccccccccccccccaaaaaaaaatcggaaattttcatgcatgcagaaaatgcctaaaagttcgtttccaatttcaggtgccctgctttgctgtgccaatggcatccttcagcaaaatatttcgcgcaattggatcgaggcggaggaagcggacgtggacataatcatttctgctcgtttcgccaccactgatgctacggaattatttgcgctcacctatgagactg

SEQ ID NO: 70179 - DNA, 290 bp, Heterodera glycines
gctaatagagaaaaagctgggatattgaatggtatcaagaatgtaaaatttgattgccaattaagcaatgttatgccatgttttgtggaaaaattcgttaaaattggcggattttatgaaacgacctagcacccttttttacacttaatttgtctaaaaattaggtaaaaaaagttttaaaaaattatatcatcatcgggattcaaatcccgattttatggggattccaatcctgaaaagtattttctcacacgtaaatatcgggatgttaaatattaattctttgcgaa

SEQ ID NO: 70180 - DNA, 304 bp, Heterodera glycines; identical to SEQ ID NO: 51570

SEQ ID NO: 70181 - DNA, 590 bp, Heterodera glycines
atgaagaagtattgtgaaatgtgtgaaggaaatacagtaggtgtaagtgattaagttaaaggctacctgaattgaaaatctgtgcctttttggctttgaaagtattgggtggatgtactgtaattgttcgataagaaatacggtaagaatattgcctttctctcccctcctatttgatcggcttttctggcattgtttcatagtcgatcatgttagtgtacttcacatttggttctgtttcgagattttcaccggcaaaaaatcccgaaattttgttgcgatctttgtcctttggttatcagtttttctttcgaaatttcgtttgggcactaaaatgccacacagtgacaaaattcacgtttcataagaaaaaaaaattaattaaaatatttcgatcatttttatggcattttgtgcctagttcaccctcttccgaagaatttttttccaaaaaaataaccattaaatacatattttgagcactttttgtacatatttttgatatccctacacataactcgtccactttaacaccttcaattttgatttgattttaattcatttgtataatatctttctaaattaataaa

SEQ ID NO: 70182 - DNA, 730 bp, Heterodera glycines
atgaacaacggatataaccagtacagtaatggatacaacccctacagcaatggatataacggtggatacaatccaatgaacaacgcatataaccagtacagtaatggctacaacccctacagtaatggatacctgaacaacaacggatacaatcaaaacagcaacggtataaaaataaatgctaatatatttcaattaatatgtttttcaaattgatgacttctcctggttaacaaagcaattaagcttatattggattttcagattgcttcaccgcgtcaatggtacaggaccaaagagcatgcagcgcaatgcaaggacaatgctcaaacccggtgggtaattaattaattaacgaaacacaaaaaattgggttcattttcactatttttgcattttattaacacatttatatttgcacttttatggccgaaaaacaacgaagaattttgactttttgtgatagtttttggcgccgcgcgccataactttttacaattggagataaaaaaatatttaaaaaaagagattattacatttttaaatttggtggctctaaatgtcccattgtataattatatcgacccatttagtaattagcgcaaatttagaagacaataattgtcaaatttatattcgcaatttccagttgatcgcccaaacatgtcgccaaacgtgctgcaacatgcaattcgcgagtggtgttgcttttcctcaattcggcggctga

SEQ ID NO: 70183 - DNA, 462 bp, Heterodera glycines
atgcgcacccgtccgatctggcaagttaagcaacgattgctgactagccaaaaggttcggtgccgtgatgaaacgaaccagcactgcttaccccgcggcacccggcacggtcccccgaaggaatggatttaattaaattctctccttcggggatttttttccattaggtcgtccgttagcgttcgattgctctagtcaatttttcaaaatttttgttgaaatatttgtagtgctctgaagggcgtggggggggggggcgggggcccaccacgaggccgcgaagcggccgagtgagtaccttcggtgcaggaaaattattaaggaagagagttcattatttattttttttttgcataattaattcataaatatttttttcagaaaatgctctgaaacgcaccaaattttatttacatgttagtttaggcactctgatgctttttctatcaaaaagggagatga

SEQ ID NO: 70184 - DNA, 440 bp, Heterodera glycines
aatcgaacgctaacggacgacctaatggaaaaaaatccccgaaggagagaatttaattaaatccattccttcgggggaccgtgccgggtgccgcggggtaagcagtgctggttcgtttcatcacggcaccgaaccttttggctagtcagcaatcgttgcttaacttgccagatcggacgggtgcgcatgattccactgttccaagcaccccaccaaaagcaaaacgatataaccaaaatataaggaaaaatttttaaaaaaatttttctccatcttcctttttgatactaaagcatcagagtgctaaaattaacttgtaaataaaatttggtgcgctttagagcactttctgaaaaaatatttatgaaataaaaaaatcgatttattcaagtgtccgtttggggtactcacgcaattatggggagcaaaaatccaacgca

SEQ ID NO: 70185 - DNA, 322 bp, Heterodera glycines
atttataagcatttgtagggttctcagcagtttccctgcaaaatttggtgagcttctgatcagtctagaacgttgggtgataaaatgaaaaaaataattaaaaaaaaataatgctggtgtgctaagtgtgaagaactgtgttcttccaggcaaaaaattctaagaaaatttataagcatttgtagggttctcagcagtttccctgcaaaatttggtgagcttctgatcagtctagaacgttgggtgataaaatgaaaaaaataattaaaaaaaataatgctggtgtgctaagtgtgaagaactgtgttcttccaggcaaaaa

SEQ ID NO: 70186 - DNA, 49 bp, Heterodera glycines; identical to SEQ ID NO: 51181

SEQ ID NO: 70187 - DNA, 355 bp, Heterodera glycines
atgttctattcgaattattttcaatctgttcataatttgaacaacatttatcatcaaatattccgtataatttacaggaaaatgtttaaatggtaatttttatttatattttaaatttaattccacatttttaaatcgtaaataataataattattattattttaggacaaggaaaacaaaatataatgttattttcttgttggcattgttttttatcatttttcaatttatgtccaacaatttgcctccacatggaaacgattttgcaccagaacaaacaaaatcaaaactacagtatgtactcattacagcaatttataatcggaaaagcagactgtaagcaaaaataataaa

SEQ ID NO: 70188 - DNA, 518 bp, Heterodera glycines
atggctaagaaaaagaatggagagagtgagagagagaagattaatgaaaataaatattttttgatcagtcccatatttttgtaaaaggcttttaattagataaaaaaaaattttcccaacattaaaaatctaaaaataaataaattttggtccaaattacaattaaaaaatttaaaaaaataaataaattattcagtcaaaaagttaatcacacgaattcacgtgtttttaatcaaatttttcttatttttaaataaataaattaaaattttattgatttttaaaaggcctttctgggccctaaaagttcaatttaaccccatttaatggctggctaaatgtgtgcaatggaagttggaacggggcgcttcatttgttcggcgaaccgatgaagatcaaacggttaaattggatggaagaagaggaggaagaagaagaaagacgagtgaaagtggaaggagcggggaagacataaaagaatcggggacggggatttggggcgggggccgacaaataaa

SEQ ID NO: 70189 - DNA, 991 bp, Heterodera glycines
ctcaaattgatcacccatccccaaatgtacaaagcaattttattgtgaaaatgcttgatccatacaaacaacagcccaatttctttttgccccatcccaatcattatgatcatcctgatcagcatcgccagcgcaatcatcggcaacacggatcagccgcagttgctggacgacatgcagtcggaccaccgatgccaccaccgccgccccaacgggtgccgtccccaaattgttgctcatcatccgccgcaacatcgtcggttgtgtcggagccgatcagccttgatctggccactgaacagtattttggtgggtagtcaattaaactaatgaatcgaactattttgtcgctaattaaaagcagggctgatgaccggatcattatcacattttctaattagtattattttttgctatacggttcatatttttcttttgatcatttttttgtggagtcacaaattttaattaattaatttcggtttttatgaaccaatttttgatatggccaattaatcagtccgtatttagatggggtatacataatttattagcctcgtttaagacacatacttttaaatgataagggttctttttactgatcagtattttttttttaaaatttctatacaaaattataccaataatttaaacttttttgtcttttctgtaaatttcataaatatttttaatgagcctttaataatttaattagttaattaattaattgattgattgaatttgcccctaattagtgaaagagaaggagaattgggccgccggtcgcttttcacgtcgcgttccgccccgtccgttgaggcgcacagcatgcgctgaacagcatgggcttgtaattccgttggaccgtttccggacgaaaaatttttcggtaaaattttgagttttttttgttgaaaatttatttatttttttcagcgccgcccaaataatgatgcgtttgacagttccgatgatgaatattacgatgaag

SEQ ID NO: 70190 - DNA, 344 bp, Heterodera glycines
atgatccggtcatcagccctgcttttaattagcgacaaaatagttcgattcattagtttaattgactacccaccaaaatactgttcagtggccagatcaaggctgatcggctccgacacaaccgacgatgttgcggcggatgatgagcaacaatttggggacggcacccgttggggcggcggtggtggcatcggtggtccgactgcatgtcgtccagcaactgcggctgatccgtgttgccgatgattgcgctggcgatgctgatcaggatgatcataatgattgggatggggcaaaaagaaattgggctgttgtttgtatggatcaagcattttcacaataaa

SEQ ID NO: 70191 - DNA, 669 bp, Heterodera glycines
atgcatttggcacaactcattactctgcttatatttggtggtaaattcaaaaattaaaatatttttcatttaataattttcattatttttcagttattttcacgagttccgtcgttcgcccatcacaaaaattggttcggcaatgttctttcacggatgaaatgtccaatttttacgcaagttggcacacaaattgcaggtgaacgaatgccatgcactttggcattttgggttgaacgatggcattcattaaatttgaaatttggcattttaattaggggtcatcccaattttccgagatggagctgaaattactagaaagtgattagggcaaagtccagtcctaattgttttatcatttttttaaattctaatttttaaattcgtcttataaattgaaaattgaaaatttttagttttttaaaatcgaacattaattttttaaacttttctctgaagcggtctcgtcagttttgtgatcaatgccttcaattttccacgcccaaaagttccatttgccaatgggctttccgacttttcaccttactcacgcttttggattggtaaaaaaataattaaataaaaataattcaaatttaaaatttattttaggcattggcattcgcctcgtcgtaagccaaaatttaatttgacttaaaattaaataaa

SEQ ID NO: 70192 - DNA, 290 bp, Heterodera glycines
atcggaatgtccgtttgcgctcggttggattttccaacagctgttgagtcgctttatgcccagtacgcttgtgccatggactggtgcaccgtcgtgctgtccagttggcttctgctgtgggcgagcagttcatttcggcaacatttggttgacgattttgtgccaaaatgggccaaaaaatggctgctgaccaacagcacaattgctaatgataatcgcattgtggcagcaaatggggcgacaatcattttggtgaggccgaagaatgcaaaagtggtgccaacggccgg

SEQ ID NO: 70193 - DNA, 133 bp, Heterodera glycines
atgcagccggaatcagtacgaatgccgaaagaaggagcggacaatgtgacgaagcaaattgccattttggagcaatgcctaaagggcaccaaagaggcggagggactgaagcggaaatgggagaaaagtgacg

SEQ ID NO: 70194 - DNA, 219 bp, Heterodera glycines
atggcctcgggtgccgctccgtgcagtgaccagcgaaattcggcaaaagcggcggacaaagcgccgccgccctcgcagggccaccgaagtcgcaaatgggcgacggacggaggggcagcagcgcactgcgaaaatgtgggcatttcgggaacatttcgacagttaatttgcgattttcagtgcgtcgtttgcggtgatcgggcgtgcaatcaccagtaa

SEQ ID NO: 70195 - DNA, 965 bp, Heterodera glycines
atggtcgtaccgttggagcagtacacggacaaagtgttgcgcccgttgccattggaattggccaacgaatttgtggacaaatgctcggatgacaacttccataaccggtgggtttttcaatattcagcggattagggggggggattagaaatttcaaaaaattttgaaaaatcagttagctttagggggcagggctattttatgttatcgaaaataaataaataattttaaattgcacttgtcaaaaattagccattaattatgacttttctttaattttttagtctttagacgattgatgttaataaattttaaaaaattgaataaaattttgcggaataaaatcctgaaaagcataaataaaagcggcacaaaatgccataaacaaaataaattacgataaatactgtaaattatgaaattttttttttaattaataaaaatgatttggttttttctttttaaaaaaatttcttacaaaaaatcacatccaaaacggcgaaacatcagtccattagcctccgaatcgacgaactttttttttcaccgctttttcaaaaaaaatttttttttcagtttttggggtgggctctatatagcccaatatggttaagaaaaagcaaaacaaaaattgaattgaaacatttttttcagaaattatttataaaataaaaaaaatttcaaaatttttagcccttcgaacaccagcaattattgtcgtcaaaaaattttttcactgaccactgatttcaatgctgctgcattggcatgcgactgcaacactcagggtatttttttttataaaaaaaatattgaattttaattttaaaatttctaaaatttttaaggaagtttggacttcgcttgtgccgaatatggtggacaatgcaaatgcaagccgaatgtgattggacgaaaatgtgatcggtgcgcggccggctattacaattttccgaagggcatca

SEQ ID NO: 70196 - DNA, 388 bp, Heterodera glycines; identical to SEQ ID NO: 51536

SEQ ID NO: 70197 - DNA, 906 bp, Heterodera glycines
atgggcaacgaggtgaactgcttctactcgacggaccaagcgcagcagcaattcgccggctttgacccattggcacaacagcagcagcactaccagcaaaatcagcaacaacacttttattttggtggccaaactcagcagcaaccgcaacaacaacagttctattttggagggggagacaatgagacgggtgagcaaaacagaaacatttaatttttgtccggtgccaaatcctcttgttttcgaatgccaatgactcgctcattgggtgggcttacggatcagcgctaaaattgttaattagggttcccaataacatattaatgtcatttcgattccgccgtttaccgtatgcttttagcccacagtttccccccgctttccatgcgtccgtccgccgcttcttccgcgccgcggcatttccccgacggcgacgccgcggccgtcgctccgttatatgcttcggaccgccccctctcagagggaattcattcgcccgcgccgcctcagaaccaaaagagtgtaattaaccagtggaaggaactccgactttagcaaagcatttaactaattattactttattttatttaatcgacccaacactttttgaattttgacacaaattgtatttgcttttctcttctaattattaaaaataaagtacattttatagaattaattggactcaaaagcacatttcaatgaataacaataagacaaattgggggggggggggtttgtggattaaaataagtaaaaagcgggggatacggtaaataagacgcaatcgcaattacttatccaacaataagccgcggaaaatgcataccaggcagaatttgatttataattatgttggaatcatacctttattcaacttttcacctttggccatttgaaacaaa

SEQ ID NO: 70198 - DNA, 1191 bp, Heterodera glycines
gcagtgattgagaaattgaaattggatacgcactcaatcatcgtctttttcgtggaccctctccgacttggccgtgtgctcagctcgagtaataaggtaacaccagtgtttatggtaaaattaatttcggtattcgcttgtgttcaggtaaatgttgcgatcaattgctcggcgtttgtgtacagatcgcaacttcgttcgattgagtacatggcgagttcaaaacatggccgggacatgtcccaactcgtttttccgaaactcactttcagcgaggcaataacctaaagttacgaagattcaaatattttttagagttttgagcaatttgaagagaaaaggagtaaagagattagtgggatgacattccgagaagaacaaaatcacaattacaacgcggaacaggtcaacaaagtgtcgaagaggaaaggaatttaatcggagtatcaatttgtttcagaagaatgctatttattccattctgtccaaggctcataatccatggccattcattctgtttgggccacctggtgggtagtgaaaatattttttggcagtaatattattagacaagtttcctgtggacgcatacaatcagcacctattttatattttttaaatgctttcattacaattaggcaccggtaaaaccatcactttaatcgaatctattcgacatttggtcctccaatctgatcaaaacagaattttggtatgcactccgtccaaaatggcggctgacaattttgccgaggctttattggaccacgactttttggagcccaaatacgtctttcgtatgcacagtctctgtgagttataattaatatttttgattggtcgtactttactttaattttttttccctttgactcccattttagccacgatggcatataatcggaacaaaagattggattgcatttcttatttggcgtaaattttttaaaatttaatgttcaattttattgtttttacaggaaagaggctaaaaatcgttttttcggcatcccggatcgacataatttgaagatgtttcgtgtgatcatttccacactttctacgtcttcttatttggtttcggccggtggattgcgtggctttttcacccatctgattgtggacgaagcgagccaagcaacggaggcggacacttggattcccatcggttggagaaatagcgatacttaa

SEQ ID NO: 70199 - DNA, 1298 bp, Heterodera glycines
atgcacgagtctcgaagggtaggcaatttgaagaaaaagaggttttaatacttgtttttaggagtttaatttctcggactccgaattgcttagtatgatggccatattgcatgtcggcccaaaagtggacacgaaagggctgcgcaatgctttcttcattgtctgtttcttttgctgttcacttgactaaaaatattatttcagcaaattaaagagcaccactcagacaaaggtggaactgtacagaaatctcaggttttaaccaaatccgtccgaagacatcgcagttttcgactattaattttaggaaataactcgtgcctatcgcattctcaagcagtacatcgatgcggctattctgcttccaggctcaaaaaacgaaaacacattcggcaaaaaagacaaagggcagaacgctggcccttccacgtcgcggagtgggtgccgtccaacggcgcaaggggcacaacgtccgccagacgaatttgaagattttggtgattttgaggtctatctcggatttttcatgtagttcaatttgacattaggtgatccgatatttttcaaaaattattataaaaggcagagaaataaattactattctttggggttttcggggtcgctgatcttgacactcatagtcaattatcattaattttaggatgcaggcggaaagcgaagacggagacgcggtggtggctcccgttacaataataatggtcacagagatgagcaagcgaacgacagaggaaacggagaaccatccgatgaaacgaatgacgcaaatgcaacggggaaagcaagcccagcccaaaagtttatcaacaattatacatatgcgccggaggactttagcacgtacaacgacccaatggagcgaagagaccgtcaaaaggacggcgtcagaaagtacgcattctcgacaatacttccttttaaatcttcttaaggttacgcggcggtcttcttctttacaaagactttcaaaggggacagacattgccaccagaattccaagaaatgggcaccgtttattcggaagacgacctggtggacaaccccattttcgagcatattctagtcaaattgcaaattccactggcgaatgccaattcaatgcatgcatttgttgaaaaaatgcgaacttttgtccacatctgctgggctttcgacggggtatgaaaggcttatttttttgaacattacgttatctaagggagcctcccaagacgcgagaattgtgcttcaaaaagcccagattgtccaagtttcacaagatgatgattccatttacgag

SEQ ID NO: 70200 - DNA, 479 bp, Heterodera glycines
  unsure (1)..(479): unsure at all n locations
atgtgcaacaattgggaatntggaggtaatatttttcacatataaaattatcaatattttactttttttattgccacctttattttttaaattattttttaattaattttcactttttttctatttttataacttattaataaaataaatgaatgttgaaaaatattattatttataattttatttaaaaaaattcaaatgtaaaagaatggtttttatagtcatttagtatatttttatttaattatagaataaatttatttatattttaattaattttaattttagattttcatcccaacgctgccaatgtgttggaagcagctgttgccatcgttttcctgggctccggcattggactattagctgctttaatgatcggcattgcttatcatttccaatcattgtttttcatcaccctgaggggatggcttttaaagcggattcagttcagcaaacaacaaaagtgatcaatcaaa

SEQ ID NO: 70201 - DNA, 140 bp, Heterodera glycines
aaaaagcgctcgtcggcaaatgatggcacttctcctcagctgaaaaacattgttggacccgcggcggcggagaagggcaccgatgggcagaaggagccgtgcatttgcgagagggaccaggcattggttgtgtgccgaag

SEQ ID NO: 70202 - DNA, 217 bp, Heterodera glycines
atgaaaagattcacttcacttgtgccaaaatggtttccaaaacgcaatggaatgtccactctttggaagaaggttcttatcttctgtctctgtgtttaaaatttattaaaaaaaaaatatttttttaatattttcccggggttttcggggtcgctgaccacgaatataaaattaatttcagtcagcagctcgatattatgtatgatattacattaaa

SEQ ID NO: 70203 - DNA, 484 bp, Heterodera glycines
attttttgcctatcaaatattcgcaataaatgcccatctatttaaaaaatattctattctattaaaatgttctgtattttgctatatattaagaatagccgtacatctaaaggcgtcagtaattgaacaaatttctcaaatttcaagaaaggttcaggcagtcgccgtaaaaattgtctatataaaaacaatggcgatacgcatttctgcactaggtcctttttcaaaattgatgtgcttttattgaaaaaacatgtttaacgggccacaaattaatagacaaattcaggcacattcttaaaaaattctgcttttaattagttcatttaatagattatgcttttgctttgtttgtttaaattctacgcccgcgattatctgataggacaataatatcaataaattttcttctgaagaagcgaagagttagcccaaacgttttcgttcctttctatttaatgatctatcatttcagatataacag

SEQ ID NO: 70204 - DNA, 484 bp, Heterodera glycines
attttttgcctatcaaatattcgcaataaatgcccatctatttaaaaaatattctattctattaaaatgttctgtattttgctatatattaagaatagccgtacatctaaaggagtcagtaattgaacaaatttctcaaatttcaagaaaggttcaggcagtcgccgtaaaaattgtctatataaaaacaatggcgatacgcatttctgcactaggtcctttttcaaaattgatgtgcttttattgaaaaaacatgtttaacgggccacaaattaatagacaaattcaggcacattcttaaaaaattctgcttttaattagttcatttaatagattatgcttttgctttgtttttttaaattctacgcccgcgattatctgataggacaatgatatcaataaattttcttctgaagaagcgaagagttagcccaaacgttttccttcctttctatttaatgatctatcatttcagatataacag

SEQ ID NO: 70205 - DNA, 601 bp, Heterodera glycines
atgaagcagcagcagtcaaaagagcaacctctccgccatcaacaagtgccccctgttttcgagcatccgttctcaatgtgtgtgtccgggtgtccgggcagtggcaagacgaaatgggtattgcgaatgttgtccaacctggacaccctcgctggccccgcacacctttcgggtgtgctctactgttatggggaagtgaatgaagacgtgctgcgactacaacaactggaaactgagacgggggaggaggaggaggaggagtacaaggggggtcaaccgcggcggcgctgggtccgcccctgccacgcgcttcccgatgaggaggcggtgaagcgggcagccaaagcgtgcggcggcagactgctattggtgttggatgacctgatggtcggcatgcgtaacaaaatccttgatctgttgttccaccgtggctccctacacttggggcgtcatgtcgttgtgttgatcacacagcatctgttcacacgagatctgaacatccaaaacaacgtcgcccagtctttggtgttgctgaggatcccggcagcgactctacatggttccgaaaatccacaaatctattcatttttcatcaaatgcc

SEQ ID NO: 70206 - DNA, 1036 bp, Heterodera glycines
  unsure (1)..(1036): unsure at all n locations
caagtaagccaaagaaagggtcacaaagggaacattcgtgnacagaaagggaccggcaaatggacgggcattgctgcactcgaatacggcattcccgtcacactaattggttggcgtgatcattttctcgcaattgacaaatgtccaatttagcggaggccgtcttcgcccggtgtttgtcggcactgaaaaaacagagaatggacgcgtcgaaactgctgccgaagccatcgaaaaaagcgagcgatttggtgaaagacagcaagaaatttctaaacagcattggcagtgtgagtttggggagaattggaaaatgattaatttacaaagggtacgacggtgccggaaaaaatttaaattctcatttttgtaaacagattttcactcagaaattgttaatttgtgggtttttgggaaaattttgcaaacttgaaaattttcaagcgatttttgaaaattttttgaaaaacctcttaaaaattttcaaaaccaatgtttttgtaggcgttgtacgcctccaaggtggtcagctacgcccagggcttcatgctaatggctgaagctagccgcgagttcgactggaatttgaattacggtgccattgctttgatgtggcgcggcggttgcatcatccgttctcgattcttggaccgtattcaaaatgcttttgaaaagaatccgtcgctggtcaatcttttgctggacgactttttcatgaaagccattggagacgctcaggcaattcaaatgcaattttagcgaaacgaactctcaaaacaccgaattgtccccgcaggactcgtggcgtgaagtcatttcgaccgctgttcagcttggcatcccaatgccagcgtttagcagtgccttggcatttttcgatggctatcgtactgaagctctcccggccaatctcatccaggcccagcgcgattatttcggtgctcacacttacgaactgctcgcccagcccggcgttgctgtgcacacgaattggacgggcagaggagggaaagtgacgtcaaatgcgtactccgcc

SEQ ID NO: 70207 - DNA, 568 bp, Heterodera glycines
atgcaaaaaggaagtaaattaatagcttattttaacttttttaaagaatacccaaatgctccaaaattcaaatacattgaaatgccaacattttgcacttatgataacaaaaccaaaaaatggaaatggccaaggaaaaaaacacataaagttatcggaagaatttatacagtaaatccaaaaaacagagaattatgttatcttcgttatttattgttacataaacaagcaacaagttttgatgatttaaaaattgttaatggaattaaatatacgaattatgctgaagcctgcttagctttaggattaacaagagatgattcagaatgggataagtgcttaaacgaagccagtcagtttaaatttccaagaggtctccgaaatctttttgtaaatattttaattaattgtgaaccaaaatatccgagtttgttatggaatgagtacaaggatgctttaagtgatgacctaaagaaaaactatcccaaagatattgcctaccaaatggttttatctcttttgaaccaaggccttttaaaatttgaaaaaagtttaaaagattttgaag

SEQ ID NO: 70208 - DNA, 1658 bp, Heterodera glycines; identical to SEQ ID NO: 42281
  unsure (1)..(1658): unsure at all n locations

SEQ ID NO: 70209 - DNA, 220 bp, Heterodera glycines
atgcaaagcattgtgctggagcgaatggaagcggagcagcgccagcggtccgtcgccgcagcggcggctgcccatcaccacggcatgcaccagcagacgccgccccatcagccgatgggctgcaccagtgtgccaccgccgtcccaccacccattggccgctgccgcgatgatgcaggcgggcggtgccggtggaggaatgccaccgccgcagggcatgg

SEQ ID NO: 70210 - DNA, 2527 bp, Heterodera glycines
atggagctgaactcggtgcccggcatggccatgtgcactgcgtcggcgggtggcgctatggacgctggccaaatgctcggcatgcacccgcaccaccatcacatgggcggcggcggtggtggtggcgggttgcccaacgggacgccgtgcaacgccggcccgggcccgccgccccatcagcagggcatgatcatggatgacggcggcggcggtggaccgtccgcgggcatggcaccgccctacggacagccgggcgcaccgcaccaggtcagtggcattaattagtgcggcgtcggttttaataattggcatagatttttttggttacgtcacatttgcgcctcgaaatgaatgatgtttaaaacaatatgcataaaatcataattattcctcaattttaacaaaaggtaaaattgtttcttggaattttttttatcaaagaattacatacctaataaagttttaaaacggaaaattttcattggtctcaaaaaattatcaatccatagcctaaaaagcccgataatgagttcaacgggcgtgtacactaatgataaatttgcaatttctatacttactctcgtaaaaatggttttttccaaaaatttaattttgaattcccagggtccgccccccgacttcttctaccagcagggccctcccggaggcgctggaccgccgatgggtcccaattttgggcctccaatgttcggcggtggaccgcctccgatgtctgcgcatcaccaacagcagcagcagatgttgatgcagcatcaacagcccggcacggcgggcttgggcggtccgcaaatggttggcggaggcggcggaccaccggcacagtaccaacaacagcaaaacgatgcggatcagcaacaacaacaacagcaccaggtactgcagatgggggtgagtcggtcggggcgtgaactgctccagcttgataaacatgtgtctgggaaaagtcaaataaatttgttgctgagttgaattgggtgtgacattgtccttgtgtgtttggtacgagtcagagctgtcacgggctccgtaaatttcatgaaatgtcgaattatggattttcaaattacggattcccgattacgattacgtccgtgtgagtaccaatctgtttaaacgatgagggccataaatgatcctcacgatcgatgtacagctttaactcgttggttcaaaaaagggggggggtatttaattgatggtttactgctcgaacttgttggccctcccgagaatttgtttttcccatttacctcaacaatttttaatgtgttgcatcctcatcacagatgatgccgcccatgcaccacccgcaccaccatccggcagcgctcgtccaacagcagggcggcggcgtcccgctagggccggcttcctcagcgcatcatcacaatgccatgggtgggccaccgcccggcgcagggcccgtgggaccgcccgtcggccatatggctccccatcatccgcaaatggcgggcggcgccggaccaggaccgctacaccaccagacgacgccgttgcccataccaccgccgcccggctccgcggcagcggcggccgccgcggcggctgctgcagcgatgttccccccgggcgctttccccaggcaaccgccgggcccctttctgatgttcccgcccaccattccgcaaccgccctttctggagtacaggctgcaagagatgaaccggcgactgttccagttccacagccaattccaccaggtgaagggagtaaagaatgtaaaatgtaaatggaggaaaattgtgaggggtaaaacaaatttggaacgtatatccgaacctcttttaatgcccttttacccaaaaatattttctttcccggatcgatttactaaacgacggtagcggatggcgccgcccggaaagaaatagaaaatttgacagatttttaagcaattttgccagcggggagattttttttgcattttatttgtgtaaaattttccagttcttataaaattttttgctttttctatttaatgacggaaattaaaaattgaaagggcgaaacaaaagaaacatttttacaaaaagtgatgcctaagcaattgatcgcagcacaaatgtatttatttatagttattgtttaacatttcctacaaattccgggtctttcatacgcttttctccccatttttttgctcaaaaaatatttagtaaatggacgagaaattcgatggtttaactcaaattgtatgcatctataattaaatttggagcagctcgttgactcccccgataattttttcaaatctaaaaaaaatcttcgaaaattattaaattttgaaaaaatcactagaaatttttcaaaatgtacccaattaaatcacattaactgatctacttcaaattgcagagttctcccgaaagtcatgagcaatggtgggaggcgtttgcgcaagaattttttgacgagagcggccgaatgagcatcacattgcccgagttctcgccggagcaaggcggacacatccgaagggatttca

SEQ ID NO: 70211 - DNA, 216 bp, Heterodera glycines
atgccaacgaagaaaacgatcgaaacggaggaaaagaggccaaagttgggcacgaattggaggaaaaagcagtcgaaattgctgatcatgttgcgaccaaccaacgaaatggcaaaagggacagaaaatgaaagcaaaaagacaaagtcaacggatgagccaatggccaaaagggtggcacaagtgccatggactctcctaaaagcacagaaacag

SEQ ID NO: 70212 - DNA, 60 bp, Heterodera glycines; identical to SEQ ID NO: 52045

SEQ ID NO: 70213 - DNA, 968 bp, Heterodera glycines
atgcaattgatcaccaccagcacggccatttgcatgacgacggacatggccatcaccacgactgtggagggcaccagcacagccatggggaacggcacgagacggacggaaagagagcggcgagcactctccccaaaatcggaagggcaacagacagtgacaaaccgtacgacaaagacaggttcaaatgatgagtaatagccaagacaagctcatcacatcatatcattccatctctttcagctatttggcctttctgaatgaccccaaaattcgcctttggacgtacgccgttggctccaccgttttgatcagtgccgtcccctgctttttgcttcttttgattccgatcaaagtctgtcccttcgtccgtttgcggttattcctcctttaggaaaacactgccgaggattcgcctttgttgcgcactttgctcgctttcggtgccggtggacttcttggcgatgcgtttctccatttgattccccacgccacgccttccggccattcccattcgcactcgcacaatgctggcgaaggccatgcgcacggaccgcacgacctttcagtggggtcgtgggtactcgtcggttggttctttctcgtgctttgacttggtcagattataaacattagtttggagttggcttttacataggaaaactgcaatacattgataaaatttgttgaggatcaaacaacaatctttttgacccaatcgtttttttacccaattcatttcttatttgaaacccaaaaataggtcgagtcgtgtttcagtccaaaaaacgatttgaaatacgtttcagttattgttttaccagttattccttccattttcatacaggttttatgacattttttatcgtggaaaaatctgtccgaattattcgcggaaatgacccaccgggccacggacattcgcacggagatgagaaaaggaagaaaaagcaggcaaagttttctga

SEQ ID NO: 70214 - DNA, 104 bp, Heterodera glycines
gaggacatttcctgtcgactcaaatgggataaaaatgtgaacagtttggacgagttggattttgattacaacacggggacacaagtgattcggtgggagagcaa

SEQ ID NO: 70215 - DNA, 811 bp, Heterodera glycines
atggacgcacaaatagccgccgttttggccagatttgacgccgagctgtgcgccactgcttccggcactttgtgtcggaatgctctcaaaccgacccttctcggcttcgatatgatcgcctacaaatgcgtccgcgtgggcagcccttcactctctttgcattatgtgcccgaggaaagtaaggaaaatgaacgacccctcagggcatttggcattatgaaacctttccagcgacagatgccaagcaaatgttcaacaaattaatgttcatggacgatttggacactgaagatggaccgtctcatgacatcaatggggaggaaattgatggccaaaatgccgaggaaatcacttttgcacggacttgtgaaggcgaattgctgattagggtgagggaaaagtcgttcaacttcctcaaaaaggaatgggtaccctcaccaaatggagataatgccgaattgtaatttcactaatttggtcgtttagctctgcaacccaaacaacataagcacttcttcaacatgtttcaacgactcttcccgtccgtcccaaactgttcaagcttgtgtgccatttgctctcccttcgtctctgcttgccgcactggcggccccactcacttcacgcttaggcaaagtgtcccgggactttttgtctggacagagtgccaactcttcgcctgcttcgtaccattgcactgtgctcttttcccaacatacaaacacttctctcgctattcgtcaaacgagcgcattaatcaccgcacttagaacagaaatggaaaaaagccttgtgcctaactttaattaaa

SEQ ID NO: 70216 - DNA, 362 bp, Heterodera glycines
cgcatttggcatatgcttttgtcccccatcgccacccgcgcttccgtgagaattggcgctccttcctcggcctccaacgcaacagtcgccgctctctttggcgtcacattttactgccctcctcccacgccacgccctattcactgaacgcggcctcggcctttgacgaggagcagcagcgactggtgacagttaaaactgacattggaaacggacacagcacaacacagcaacaggaagggacgccgctgattgccgactctccccaaagttcgaccgaaacgaataattccgccgatggcaacattttaatgatttgatgattattacccttgtctttcctcatcgattccttcatttta

SEQ ID NO: 70217 - DNA, 570 bp, Heterodera glycines
atgttgtgcaaatgcggcgaatgcttcgaatgcgaagatgaaaagcgccgcctcaagcgcaatcgggagctcaatacccgcaaagagcaaattaagaactgcacaggcaatcatctagcaccggctatgatggaactcaaacgccggaatatggaactgtttaaaaaggcttataggccggtgaagggcgtcatcaataaaataaccgggggtgagtttaaaaaagaaattgaaaaaaaaaaaaattttttttaggcccttggaatgtagaatgtgaggtctgccatgagaccttcacatacttcatggtggagtgggaaaactcccggaccgacttctcgtggggtcccgggaggaccatggtcgaagcggataacatagtaaaaatttttgaatttttttttccagttaaaaaataattttagaatcagaaagaaattttggctcactatgtaggccaaaatgatctactccagaatgaagtggactattatcagaatcttggtaataatcctccattgaatgtgtccccaatgggggaggatgctataatgttgaccagggacgatg

SEQ ID NO: 70218 - DNA, 1252 bp, Heterodera glycines
atgagtgagtgtactgtggtgacttttcttatgtaagttttgggtacttttaaaagtgccaacttttatctgggcggaaaaccgggtttaacgggttttaacagcgtttatttaagcgcacttttggcaatcatttgttatgccaatttttgtgccgctgtgtcaaagcaatggacattgttggatcttgacgatatggagggcatgagaaaagacacgcagcatggtaaatgaaaaaatactcttgagaattttgttattttccactattttgccacaaataatttctctatagtgccctcaaaaaaaataaataaattcgatacaacaatctggtcttgatttgtttcttgaatacacagatccagatccacacatagtttctgggcaccgtacactcagctaaaaattttaaaaaattttaaatttaaatttttaatttgttcccaacaaaaatgcattctaacttagctctgaagcaaggaaattttaactcgataattctagacttagaaaattttttgctagctatattttttatgcgctaatagcagttatgaatatttcctctcttaaagggaagtggagaaacaaacgtgacggcacagcggtcaaagaatataatgccaaaaacatcaactataccgaattttatgctcgcgttgtcgccaataaatgcctactgaccgtgaacaaaacccaagaagaagtggagagggcggaggaggaggaggaagagaacgtggcaaatggaaaagttggcattttgtcactgacaaatgagaaaaaataaattaatggaaatttcatagaaatttgctaaatctttaatcaggaggatggtaaagaaatcggccccatatcaaggaggcggaatggggaggcacgtacccccccccccccggccgccccgaaatgaaaaactttaagaaaaaattgcaatttttttgaaaatttacacgatttaatcaaaagtttgaaagaaaattttcccgttgatgccgatcgctactgccggaccccattctatcattgtttattaagaatttgacctaaacaacacaaaatatttcattctttggagcaaaactgctacaaattccttcttttttggccccggcgcgctaatagaaaaaatttttggcccgaagagcaaagagctcatcgggtgcccccacagataattttttatggatacgggccagaaagaaatacatagtatatttttgaattaaatatttgaatttatata

SEQ ID NO: 70219 - DNA, 1236 bp, Heterodera glycines
cgttgagcggttgttgtggcaggcacataacacactgcctggggatggtggtttcgttcccggtcttacgtgccgtaactagcggtgtgtttgtgcttgctgctacgtccgtggccgtgatgagacgacgtggtagggcccgtgcttggcctagcacgtggcttaagactcaatgagtgtcagctcgggcaccgccagctttttcttttttttcattatttttttttacacttctgttgaagaatgaattctagtcttatcggtggatcactcggctcgtggatcgatgaagaacgcagccaactgcgataattagtgcgaactgcagaaaccttgaacacaaaacattcgaatgcacattgcgccattggagttacatccattggcacgcctggttcagggtcgttaccataaaatgcactgcttgtgcgttgcttcgtgggatcatgtacttgtacgtgttcttacgttacttgcttagctcggctgtggggttttggtgtgctggcgcgaacttgtggttctaattcgcgttttacggaccgtaactcgggcgcaccaatgctttgcatgctgtggcggagtgcctggattactggcattcctgctttgatttttcgacctgaaactcagacgtgaacaccccctgaacttaagcatatcagtaagcggagggaaagaaactaacgaggattcccgtagtaacggcgagtgaactgtgaagagtccagcgctgaatcgcagctcctctggggttgcgaggtgtagcgtatagaccgtgagcttgggttggcccgcttgttcaagtttcccttgaccggggctccagagaaggtgcaagacctgtccaactggcggtgcctacccatctttacgtgtcttggagtcgggttgtttgggatcgcagcccaaatcaggtggtaaacttcatctaagactaaatacggccacgagtccgatagcgaacaagtaccgtgagggaaagttgcaaagcactttgaagagagagttaaagaggacgtgaaaccgatgaggtggaaacggacagagctggcgtatctggtctgcattcacccgtttgttgctgtacgttgggctgctagcctccagactggggtttgctgtccttctttctgttcagtggcgaatggggcatttgcaggcggagtgcgctgagatgctcggagtagctgcgtgagctcggtcttgaggccagcctttcggggtctggtaccc

SEQ ID NO: 70220 - DNA, 186 bp, Heterodera glycines
cactcttcccaaatttgagtccgtccgaagaattgcgcctgttgagagcacgaattcagcaattggagaaaatggagcaacagcagcagcagaacatggaaatggaatcgtcgtcaaatggcaattccaatgaatttgtgcagagtgggaacggtaaaaaaatgagatacggtagaaaattaaaaa

SEQ ID NO: 70221 - DNA, 729 bp, Heterodera glycines
atggacgcaaataaatgcccaacagcaaacatgccgataatacggggaacttattacggcaccagaagtaattcaattagataaacaatattttaaccccggggcggcggcactcatttcgcgtcaccaatggcacaaaaatagaaaaatatacttaaaaattataaaaaaaaatgttgggctatctttggcagtgtcggcacgaaaagatacaaaaaaacggaaagcgaatcatatgatgtcacgaaatatatgcttgaaaactacggtaacaaaaaaaaatgaaaaattagttcagcagattataagctggccgcgcgaaagtcgaaattttcagagacccaaatatatgtgccattttcatcaaatttgtgggccctcggttttttttaaatttcaaaaattttcaattttagttagggtctattcccgaccctggtcatctgtggcatatcaaaatcagatgagagtgccaattaaatgaatgagtttctgtttctatgattttttaaaaatctattgtctttttctctttcctgacgagcgtatttctcgccgacattttttaaatcggaaggaacaaaaacagcttcgtacaccaacatactctttaactaaaaggcaaaaaatgccaacaaaggcactcgtaataggcaatacaaatgccacttaatttaagtctcgtaaaggattagtgctgtcccgtgcactctgttaatttccaggtca

SEQ ID NO: 70222 - DNA, 630 bp, Heterodera glycines
gtgagcgatcagtggaaaagcgctttcttcgagattatggcgacattttggttttttacccctcactaatgaccaatccgaaatcaatacactcgattatcacaaaatcccgaaaaagctgattgatggatccatccaaaatccgataatggctccacttgcctgattctgtgcttcgtcaaaagtgtgcgcagatggactgaccatattctggggaattgaatccaaagtattaattgctaattagttaattaattaattattaattctaattagtctcacccggttgataatttcgcgcacccgcgagtccaaagacacctccttgggtgacagaatggagatgaaatcctcgtagataatacgtgccttaaattggacaaaacattattatcggttcatcaatcaatcaatgatcggtgccataattgggccaaaagcattatttatgaccatcatttctaggatttattaactaattgatcatttctagggtagtccggggagaaccggtcccgagtgggtcaagtaattcaatttggcgtagaattataaaatcctgaatctcaagccccgatcgatcccggctttccttgtcccgatttttgatgaaaatcccggcacacggct

SEQ ID NO: 70223 - DNA, 1255 bp, Heterodera glycines
tgccatttattccgcatcatttgcctccaacccggcaccatggccacggccttgttgtgccattgataattattccaccgttttttcagggcctcttttgaggaggtcgccgcgtggggcgtcaacttcgatcggctgatgaaaaacaaaaatggccaaaagtattttgcggaatttttgaagagcgaatacagtgacgagaacatcctgttctggtcagtgttttatggggaaaatttacggaaattttttaaaattttcatgttcaggcaagcctgcgaagagctgaagagggagcggaacacggagaaaattgaggagaaggtaaattcgcgcaaaattttgggctgatcaatttaaattggtctaagattggcatttcgtaaattttttgagcgaccgaagggtatctgttttgaattgctgatcagggttgaatatgatcagcagttggataatattgctcgagagtctcggtcttgaggtcattgactcgagaaaagtatcacttttttttgggtggcttcggtcccggaccgattccccggttttctatataagtttcgagtctcgggctaactgatcatctcgtaaatgttcggtcttcagcagcactgctgatcaaaagactgcttcgatcaatcacttataatctaacttggtataagccgtgtgccgggattttcatcaaaaatcgggacaaggaaagccgggatcgatcggggcttgagattcaggattttataattctacgccaaattgaattacttgacccactcgggaccggttctccccggactaccctagaaatgatcaattagttaataaatcctagaaatgatggtcataaataatgcttttggcccaattatggcaccgatcattgattgattgatgaaccgataataatgttttgtccaatttaaggcacgtattatctacgaggatttcatctccattctgtcacccaaggaggtgtctttggactcgcgggtgcgcgaaattatcaaccgggtgagactaattagaattaataattaattaattaactaattagcaattaatactttggattcaattccccagaatatggtcagtccatctgcgcacacttttgacgaagcacagaatcaggcaagtggagccattatcggattttggatggatccatcaatcagctttttcgggattttgtgataatcgagtgtattgatttcggattggtcattagtgaggggtaaaaaaccaaaatgtc

SEQ ID NO: 70224 - DNA, 595 bp, Heterodera glycines
aaatttttgagattttgcaaattaataataaacacacatatatatcgaacaacaccaacaattcttaatttgattgacagtgaacaaagttatggttcaaaaagtcttccgacgacgtttcggccgacgacgttttggggtgcaccgtttttaaatttctccagccattcccgacaaaattttggtcggggaatttcctttccgattcccgactcttctccatccatggggccggcacggcgaccaaccctaattttaattccttttaattggacaacaacaccaaacaaggggagacctttctcaagtggaggagtcgagactctcgaatagactgtacttcttcccccccccacccgactgacccgccacttccgatggacgaacagttgcagggcaacagtttcagcagcatttggcccaccgatttgtgctgctgctgttggtgttgtattgcggccgtgggttgctccgtttgttgcacttcggctgctgttgttgttgttgctgttactgcttgtgacggttgtgcggttgctgtcgccgctggttgttctacagctactgcttgcgcttgggctgccgctccgtttgc

SEQ ID NO: 70225 - DNA, 210 bp, Heterodera glycines
gttctccacgacgcctcttttcgtgccaatgccaaactcatccaaaagaaaattgctttgtcgccattcggtgcaaaagagcaattggtgcgttgggtggaattcgcagccgaatttccgcatctgaacgagcttaacatgccaaccgatgccgaattgggatgggtcgcttattattcaatcgatgccattctgttcaccatcagtgcg

SEQ ID NO: 70226 - DNA, 76 bp, Heterodera glycines; identical to SEQ ID NO: 51235

SEQ ID NO: 70227 - DNA, 81 bp, Heterodera glycines; identical to SEQ ID NO: 58971

SEQ ID NO: 70228 - DNA, 226 bp, Heterodera glycines
  unsure (1)..(226): unsure at all n locations
atgtgcgaaaaccggcttggcctcagcttccaccgatgtaaaggtgagaacaatgattgtttttttaaataaaataattgggaatttaaaaactaattaattattttttatataatttagaatttatttttattttattaattctggtcataaaaatgtttcttaaattgaacggctctcccgatttaattgaatgtaaaaagccanaatttgagtgaaaattaaa

SEQ ID NO: 70229 - DNA, 849 bp, Heterodera glycines
atgaaccgacggtaaaaggattttaaaagtcacacaaattcgtcatttatttagctaaactgttttcccatttcagttggatttgcaacgacgtttggatggacattttcccctcttttgaccgtcctcaactcggcctcaaattggcacttctttcgccacgtttcaatgcgttggtggacaaacatttcgatggcaaaagcgaattgacaatttggagaccaatcgaaattagcaaggacaaaggacctgaaccgaaactatctgtgcggatggatgacaaatttgtgccatttccattgccggaccgtccgctgcccagcaaaatccgttttaaatggcttcggattgagtaattcaaaagcagagctatgacaataaaagcatttatttcattttcagttacatcgatcactccgtcatcgcttttcttcgttcaaatcagcaaattttcgacaaaagaggcaccaatttatatttgtggattccatcatcacactctacgaatggccagccgattttggacatttttggtcgtgaaatttggccaattttttcggcaaatattcgccatttgtgctttccccatggtgatcatttggacaatttgcttcgtcgtatttcgccaacaattctcactgatctcaaccaattgaattcaatccattcatttgatctgttgcccgctgcgattggtgatggttttgatgggccaaattcaacaacttctgctggccaagcattgtccaaatggttgcactctccgagaaaagatggacaacccaagcgattgcgttgcgataattacaacgcacaagcgaacactgattggatcaacatttcaaggag

SEQ ID NO: 70230 - DNA, 477 bp, Heterodera glycines
atgaaaatagcattggggaaggaggagagacggaagagaaagagaggaaaaggaaaaattcgaagcaaggagggggagaaagaagaggaaaaggatgaaatagcagtggggaaggaggagagacggaagagaaagagaggaaaaggaaaaattcgacggaagaaggagggggagaaagaggaggaaaaggatgaaaatagcattggggaaggaggagagacggaagagaaagagaggaaaaggaaaaattcgaagcaagaaggaggggagaaagaggaggaaaaggatgaaaatagcagtggggaaggaggagagacggaagagaaagagaggaaaaggaaaaattcgaagaaggagggggagaaagaagaggaaaaggatgaaaatagcagtggggaaggaggagagacggaagagaaagagaggaaaaggaaaaattcgaagcaaggagggggagaaagaagaggaaaaggatga

SEQ ID NO: 70231 - DNA, 499 bp, Heterodera glycines
atggtcaattttttttttttttttttactgttatatattatttttaatcattaccagtgatttcgatgattcacatattattgtaataaagtaggtactgacatctactaggaattttatattttttatgaaaatttttaatcgttttttagttcgtctatttatcatgcatgggtccagcacagatatatttccttgggaaattggaagcattaacaggaatatttgaaaaaatgttaaattttaaatataaatttaagaatcccatgagtgaataatacaataattttgccttactcattattccaaaattttcattggccaaaataaattgacaaaatttcttaccatgaataaattgtcatgaaaaattttttgcaaaaaaaaattctaggacatgaccaaattgacaactgcaattgaaaaagctgaaggatgcaagtgcaatcttgttgaaaaaattgagaaggaattggatgatgttgagggtattaaatga

SEQ ID NO: 70232 - DNA, 864 bp, Heterodera glycines
  unsure (1)..(864): unsure at all n locations
atgctgtacaatgcttttaagccccgccgtgaggcgggacagttccaaaattttgtaccacattttactgtggaaagtccaagtaccttattggacaactacgtgtcaatgagcacagtcgcctttggccagttgtggaacggaaaaatggaaatatcagatggggtgcgctcttttctaaaaattcctcttttcgtctaaccatccctcccttttgtgcactatttcgtttcaaaattgaatcatttttttggtcttttgaaataaattgtgaaaaatatacgaaaattattttagcttttaattatgctgtacaatgcttttaagccccgccgtgaggcgggacagttccaaaattttgtaccacattttactgtggaaagtccaagtaccttattggacaactacgtgtcaatgagcacagtcgcctttggccagttgtggaacggaaaaatgggaatatcagatggggtgcgctcttttctaaaaattcctcttttcgtctaaccatccctcccttttgtgcactatttcgtttcaaaattgaatcattttttttgtcttttgaaataaattgtgaaaaatatacgaaaattattttcgcttttaattatgctgtacaatgcttttaagccccgccgtgcggcggctccccttttgtgcactattttagtttttaaaattggttccggactttttggctttttgaaataaattgtgaaaaatatacgaaaattattttagctnttaattattcagtacaatgcttttaagccccgccgtgaggcgggacagttccaaattttgtaccacattttactgtggaaagtccaagtaccttattnggacactacgtgtcaatga

SEQ ID NO: 70233 - DNA, 389 bp, Heterodera glycines
gcttaaaagcattgtacagcataattaaaagctaaaataattttcgtatatttttcacaatttatttcaaaagaccaaaaaaatgattcaattttgaaacgaaatagtgcacaaaagggagggatggttagacgaaaagaggaatttttagaaaagagcgcaccccatctgatatttccatttttccgttccacaactggccaaaggcgactgtgctcattgacacgtagttgtccaataaggtacttggactttccacagtaaaatgtggtacaaaattttggaactgtcccgcctcacggcggggcttaaaagcattgtacagcataattaaaagctaaaataattttcgtatatttttcacaatttatttcaaaagacaaaaaaaa

SEQ ID NO: 70234 - DNA, 347 bp, Heterodera glycines
  unsure (1)..(347): unsure at all n locations
tttccgttccacactgccccaaaggcgactgtgctcattgacacgtagtgtccnaataaggtacttggactttccacagtaaaatgtggtacaaaatttggaactgtcccgcctcacggcggggcttaaaagcattgtactgaataattaanagctaaaataattttcgtatatttttcacaatttatttcaaaaagccaaaaagtccggaaccaattttaaaaactaaaatagtgcacaaaaggggagccgccgcacggcggggcttaaaagcattgtacagcataattaaaagcgaaaataattttcgtatatttttcacaatttatttcaaaagacaaaaaaaa

SEQ ID NO: 70235 - DNA, 522 bp, Heterodera glycines
atgtcaatttcaaccgattcaactaacagtgtagaattttcatctgatgattgtggtgaatcatttattgaccagcaaaagttaaaggttaacaaaaacaattaggaaaaatatacatataattttttattaaaaatttaattcattttttattgagaaaaattttagcaaattggtgaaaagtttgccaaaatggaattggtattgaaaaacaccaaacttgagctcaaaaatgtgagttttacataaagaataattttgacaattaaatctaaattgctaattaatttataaataattaattaaatttagaagggacttcaagaaaagttgaagcagcaggaaacgaaagcactgctggcaaagatcgaagcggagaatggaaaaatgaaaagagaaattgagaaaatgccggaaaaaatggacgagaaggaggagcagtacatggacaagttggaggagttacagaaaaacgtaatttttgcaatttttttatttctgccctttgaaatcgaactttaa

SEQ ID NO: 70236 - DNA, 90 bp, Heterodera glycines
atgaagcagcagcagcgcttgtgcggcctgaagctgaccaaccggaccaagcagttatgcggcgactgtgtgccggtcaacatgagccaa

SEQ ID NO: 70237 - DNA, 1349 bp, Heterodera glycines
atgcaaattccgcaaaatccgttgcccaagaaagtcgtcggattcgaagacattacaaaaagggaagcgaatgatttttgggtgttccctctgtgtaaaacgattccttcctctttttacagatacatcaatgacaatgtgatcacttttcttcactgttttcgtccacttttcgccgcctgccaaattaattttgccatcgacgatacccttacgatctttaacagcactttggagccgattttgcgcaacatttgggctgtgatcgcgacgaacgtttgtgccatccaattgtctgccgaagttttccgccgtttgcgtcaattcgtcccctcaattctcgacgactgtccatcgcttcgcgttttcaatgcgtattactttggtttcttcacccaatttccatgcgatgacagtgccacggcatcgaatggacaagcggtggccaaatggcttttcactccccgtccggacaatgtgccgaaggtgttcaaatgctggttgcaatgggatgatgggcatttggcgtcgagcattgaagacttcaaaagggtgattattgtttgactgatttggcacttttacgggctttgagggtcgctgacaaaaatattttggacggcattcaatttgaatttttcagtttttaattgttttcctcattttaggaatttaccatgcttcatctcccgtcaatttcatcgctgtcattcgctttccgccgacttttgctgactccgttttgctcttcgatctgaccaatggatttacgcatgaacaattgacgttgacatggatgaacgatatcggccgttttctgctgatccgtcgtccaattgtgcgcgacgaaaacaaatgggcgaaatgggaaaaggaagcgattggctggcaattttatgatcaatggaacagaatcgacattcgttcttcgtgatgcaatcaatgatcgggcccaagtgatcagcagaagaagtgaatgattgttaataagtgatcgattaatgcccatttgacttttataaaattgttatttttgttgcggtgatcacaaattgtattatatatatgtgtgggtatatgcctttaggataaattaagagatttcctgaaataccaggctcattcttttgatctaatgataaagtcggtagtcactgttccttcggtttttattttattttttgttatggtaatttttggcgctgaaaacgaatctgagattattttaagctaatatccattttatgttgagttacatgaaagtttacgtattagcgataacgggagaagcggctcaaaatcggtggcattttactaaaaatgaaaaacaatgtcatgtcgacagtaaa

SEQ ID NO: 70238 - DNA, 1138 bp, Heterodera glycines
atgtttgtcatttgttgtgccattcttttgaagtattgggaccgcttcaagaaaccaccaaaacaacaacgaggccatcgcaaaattgaaaaagtgccggaaactgtcttgacaattgaaaaagtgccggaaactgtcttgacaattgaaaaagtgccggaaactgtcttgacaatttgcctcgacgaaatgtcatcagacaaccaaaatgaagcggaggaaaagatgacaaaagcgatgtgaaactaaaattaaaaattgccaaatttcaattttaaattttattttcttttttaagcttcatctccgccgattgttggctttgtgtgttccatttgttgccgcctcgtcaacttggccttggcatttcaatgatcagtcaccgattcgacttttacgtcgatgaacacttcaagactcgcaaatggacattggattttgttcgaatttggcgcaaatttgaagcggatggcacacaggaaatggaaattctcaattgccgttggaaatcgatgcaaattccgcaaaatccgttgccaaagaaagtcgtcggattcgaagacattacaataaggtgaagcgaatgattttttggtgtttcctctgtgtaaaacgattccttcctcttttttacagatacatcaatgacaatgtgatcacttttcttcactgttttcgtccacttttcgccgcctgccaaattaattttgccatcgacgatacccttacgatctttaacagcactttggagccgattttgcgcaacatttggccaatgatcgcgacgaacgtttgtgccatccaattgtccgccgaagttttccgccgtttgcgacatttcgagccgtcaattctcaacgactgtccatcgcttcgcgttttcaatgcgtattactttggtttcttcacccaatttccatgcgatgacagtgccgcggcatcggatggacaatcggtggccaaatggcttttcactcctcgtccggacgatgtgccaaaggtgttcaaatgctggttgcaatgggatgatggacatttggcgtcgagcattgaagacttcaaaagggtgattattgtttgactgatttggcacttttacgggctttgagggtcgctgacaaaaatattttggacggca

SEQ ID NO: 70239 - DNA, 378 bp, Heterodera glycines
atgctcggaaaaaacattcatggcattgaattgactgccacatttttctcccttttgcgtcaatttgctccatcaattctcaatgattgtccatcgcttcgcgttttcaatgcgtattactttggtttcttcacccaatttccatgcgatgacaatgccgcggcatcggatggacaatcggtggccaaatggcttttcactccacgtcaagacaatgtgccaaaggtgttcaactgctacttgggcaaggatgatgaagcgaatttgacgttcaaagttgaagttttgattgatttggcacttttatgggcgttgggattttctgacaaaaactttgggatgccgttgaacggcgacgttttcctttatatactgtaa

SEQ ID NO: 70240 - DNA, 390 bp, Heterodera glycines
atgaatcaacaattgtatgagaatgccccgggtaatactgaacggtaccgacctctccgagtcgaaagaccagttgttgccgaaaaccagcatcatttggttcgacaaaacccgccacctcatgcctacgctcacaatgacgattattatgctcagcgatttaaggcacaaaattcccaacaagctccccagttccaaaatcacaaccaaaatgtgccaattagagaaaatcatccgaatcagttcgaacaatatcagcagcctgtccaccccggactggtatttgacggcatgatggcacaggccattagaagcctagacagcttctcgtacacaatgactctgaactctattccgaatttggacggcccagcggatcagacgcagtga

SEQ ID NO: 70241 - DNA, 58 bp, Heterodera glycines; identical to SEQ ID NO: 50987

SEQ ID NO: 70242 - DNA, 312 bp, Heterodera glycines
atggaactcagcgcaaatgatgagcagttggagtatgaggaaatggacgcggacaacgaacaaaatgctaatggtgtggttctacaacaaaatttgagggaaaatatgggaagtcaagtttggggtgaacaaattggtggagtggtagaagttggaacagtaaatgcaaatgcgaatgatgggccaatattttctacaccgcatgactcgcgcgattttggacttttacagcgcgatcttagactgcatttttctgaaaacttgagtttaattctcgaccgaaatcaaaggcgtgacatgaatgtcaagtaa

SEQ ID NO: 70243 - DNA, 451 bp, Heterodera glycines
atggccttaaatgggacctatcttttaaacctggcttgtactgctccaactccatgcatgaagttcgagctgtacaggtttgttgcgatcccagagaccaaatctaagaccatattcgaactcaacatacccgattttccaaaaccacttttaaaacattagttacttggtggtcttgaaaaatgccgtttttggagaccactttcagtctcggctctccaataattcaatttttgtaattaaaattttatatttttgtgttcttatagtcctaactttgctctatttaatcactatttctctggctctgtatctcttttatttttctttaaatcagccatcaaaaatacctacctctaaaatgaccatttttacttacttaactctaactccctaaatacttttccattggtattgatctcttgccagaataatggcaacatcttatata

SEQ ID NO: 70244 - DNA, 1059 bp, Heterodera glycines
atgttaagctgttttgaggacataatcgcgatcccatgtgggactctgttagcgtaagttattttgtttttaaaaattaattggttgttatgtaatttgaatttttaagatctgccactggtgttattactaaagtgatggaatcggagaaaaaagtcagcgttgtcttggtgtgcggatctggagaaaattttgttgttactgaatttaaacaaaattctgcgaacgctcttcaaaagtacctttcagttggaaatgtaaattgttgtcataattttaaattattttgtatgtttaaggtgctgaagcttcaatctgtcaaagcccaacgcttcaatgagaaatttgatggtcaaaagttttttcagactccatttccgtttgagtttgttgtgacaaagcactcgaaaatttgtttggtcaagactgaagttttggcggccgagaaatttacgcagcttgtggcgggccgtttttatagtaatgcattaaataaaaatcttttaaattttatttttagaaattaagtgtgttttaacgactccgttttcattaattggagaaatgttcgctgctgttgttggcgatctctgtgggaagcgcgcggatttatttatttcgggcgaaaaactcccagaaatgtttgggcaattggacagcaaggaccagcttgaactaaaacgttgttttgtcaaaattgaaggtttttgcctaattgattttttgtttatctatgatttaattattttgtagatgagtgtatgcagcttaatgttttggcttctgatgttaatgtgtgtggatgtaaagtgacgattggtgataagttggtcactccggtcaagagaaagagtgatgaagcaattttgagtccgcaatcggctaagaaatagtgtgtttttttgtttttgcttttttctttttatctacatataaataagtgcatgtttatgtttgtatgtttattgtgaatttattttggatggtgttagctagatttttgtatgaatttaaaagtgttgtcagttctatgtttgtatttgtgtgatgttttggata

SEQ ID NO: 70245 - DNA, 554 bp, Heterodera glycines
gactgaaccaccagcattttaatcactgggactcaacccaccagcattccaatcactgggactcaattctcctgcatttcaatcactggcactcaacgcaccaacatttcaatcactggaactcactcaacccaccagcattccaatcactgggactcaattctgcatttcaatcactggcactcaacccaacagcattccaatcactgggactcaattctcctgcatttcaatcactggcactcaacccaccaacatttcaatcactggaactcaacccaccagcattccaatcactgggactcaattctgcatttcaatcactggcactcaacccaccagcattccaatcactgggactcaattctcctgcatttcaatcactgggactcaacccaccagcattccaatcgccaggactcaacccaccagaatcaatcaccgagactcaattctctggcatttcaagcaacgcgactcaaattaagcaattctccgatattcttccggtctctcaatcaccagacaaaaaattgtgccaaattcatcactga

SEQ ID NO: 70246 - DNA, 760 bp, Heterodera glycines
cggtcaccggtcgttctccgatggttcgccgccatcaaactcaaaatcagcatattccgccgcccaatcaccagaaagtcatctctgcactcgcctcttcccgtcttcaatgtcagaatcagcaacctttgtcaaattctacgcagcaacaaacgatgccaaaaagcaatgccagtggaagccgtcccgggtcgcttaaggtgtcatatagagttagttagcgatgtgactccgtcctcttcgagactcgcttcgaatgcttttctttttagggtgaacgtccctatgggtcggctgctgataaaattcacaggcatgggaatcaggcgacgacttcaacattctctccggctgatgttgatacagttccgtcttcggctgttggtcctccagtggaaccatttctgcgtcgagtcggttcgaccaaacaccgaatccaacgacccccgccagtgccggacgaagatggattcgttaggatgagtccacgaagcatcaagcacaagcaacctcaagaaaaaccacagaaaaatgttgaagacgagggtacatcatatgcttaataaattcaaaaatttatttattttaagccattcattcccggctagaacagagcaattccctctcagtcacagcacaacaacaacaaccgcaacaatcaaaacggatagcatctggtaagaaagatcttcatgctttttcatttctgatattctgtaatattagtgataaaagacagtgccatcaatcgcaatggtag

SEQ ID NO: 70247 - DNA, 1090 bp, Heterodera glycines; identical to SEQ ID NO: 9099

SEQ ID NO: 70248 - DNA, 1168 bp, Heterodera glycines
  unsure (1)..(1168): unsure at all n locations
tggtttaacacttcggccagcgcgagagttgtatcatcggcagacgaagcgttcactccgtccttcgaacaaagtgcacttagcccaccgctcagccaaactcatatgaattcgattaggtatttttgttcgtttatttctgttttatggttgtttaagcagccaaggactcgccgaaccatctgtgatgaacaattccaacaccaatctgcaaacatttcgcgaagtgttgttcaatgaaactgtgctgaagttgctgaggcgttacgaatttgttggggtgagaacaaacgaacggattcgtcatgcgaaaatatcattaattacttaaaccaatttagtccatagggtcgggggcacaaggattggttatgtgagtgaatgttcaaaataaaacgcaaatatagacagagtttcagttgctgcaaggatttgctgacgaatcaacgtgtggcaatcaaaaggctgacgaggcctttcgccaatgttatccatgcaaaaaggggtcggtccaagcttcgcttatgcttttcaatcgttgttcatctcatccatttagcttatcgtgagttcgaaatcatgaacctggtgaaccatcgcaacgtacgttttttgttttgtttttcctgtcttccgtcctgcctaaatttagatcatcaaattacttaacgcgtacactccccaatcgtccttggatgagttcagcgacatttacttggtaatggagtgcatggacgccaacctttgctcggtggtccaaatgggcttagaccacgaaaggctgtcctttttgctttaccaggtaaaagaggcgaaatgagcctaatttgtagatacatttttattttaagatgctttgcggaataaatcatttgcacaaagccggaatcattcatagggtaatcagtcctttaattatgccattcttttcaattatttgtgttaatgttctgtatgtattttgctgctccaggatctcaagcccagcaacattgtggtcgatatgaattgccaactcaaaatccttgattttggacttgcgagaaacagcggcgagagcatgctgatgacgccatatgtgagaagggagaggccgtacgcaccgaaggggtcggcctccataggaatattcatgatgcgaagcaagggcgtagccangggggcgcgg

SEQ ID NO: 70249 - DNA, 369 bp, Heterodera glycines
atgaatgatttaacagatttattcaatgcacagtcttcaagtcaagatattttaagagaaagacaaaggaaaaatatggaaaattggcgtaaacggaaaaatgagttgcctgaagcagaacttaatgcgtttaaagaaaaggaaagaaaaaatgttgaaaatttccgtaaaagacaaagaaataaagaaactaggctttatttggcagctaacaatccaaacaaagcagttttttatgcgcttagcccatttgagataaagtgtaaagaatgtaaagctgtgcatttcattgaagaaaattcaatcaatagttgccaaaaaaacaagatttttacagttgttgtaaaaatggaaaacttacgtcattaa

SEQ ID NO: 70250 - DNA, 307 bp, Heterodera glycines
aaaaatggtgtaagtaaaaatcgtaattacgctcaaaaagctcctcaaacaattttagcgcttccaattccttctacaatcgctttatacatcccattatgaacgctaaaattatcagagtgccgaaaatcgcatgtgatctacgcctagaaaaaaatggtgtaagtaaaaatcgtaactacgctcaaaaagcttctcaaccaattttagcgcatccaattccttctacaatcgcctttatacatcccattatgaacgctaaaattatcagagtgccgaaaatcgcatgtgatctaagcctagcaaa

SEQ ID NO: 70251 - DNA, 184 bp, Heterodera glycines
gaaaacgtgttttttttactgacatttttttcagaagaaggatatgaacaatcacttataaggctcatgctgggagataaaggaatcggaaaaaaaaatatctcaacaatcagtcgtgaaacagttcaataattcggaagcagtgccatattgggaaaagatgcacaagtagagtaggctcgaa

SEQ ID NO: 70252 - DNA, 565 bp, Heterodera glycines
atggttgtcgtttcaattgaagcgcaaaacggagaacaacaacgaacgctgacgataatgccgcacagaaagcaatgcttcgtggaggtgtactgtaacattgccaacacagacggtacgagtacagtactcgcctttggcaccggacaaaaagaagccggcactgcccaaattcacttgtcactttttgacggagaaaaggcaaacaaatgttttgaacaaaacattcacgtaaaaattttcgacgaaaacaaagaggtaaaagaatttaattgaaataaaaaaatatataaaaaagaaaattacagcaaaattttatttttaattcttcggaatttttcaatgtatcaaaacaaatcacaattgatttaacgaaacccaactgaacaatgagagatgaattttggcttaatcataagttagttcattttaaatgatatggtcgactttttttcattctttcgaatattttttcataaatcctttccaaagaagataattgttaaatttatttttatctttttttttgagtatttcattttgcttctttgctatttattagcaa

SEQ ID NO: 70253 - DNA, 601 bp, Heterodera glycines
ttggatttgcaacgacgtttggatggacattttcccctcttttgaccgtcctcaacttggcctcaaattggcacttctttcgccacgtttcaatgcgttggtggacaaacatttcaatggcaaaagcgaattgacaatttggagaacaatcgaaattcgtcgcaaggacaaaggaccagaaccgaaactgtctgtgctgatggatgacaaaattgtggaatttccattgcccgattatccgttgccctggaaaatccgttttaagcgccttcagatgtggtaattataaatcagagctatcgcaataaaagcattcatcccatttttaggtacatcgatcactccgtcatcgcttttcttcgttcaaatcatcaaattttcgacaaaagaggcaccaatttatatttgtggattccatcatcacactctacgaatggccagccgatttgggacatttttgttcgtgaaatttggcccattttttctgaaaacattcgccacttgcgcttttacgatggtgatcatttggacaatttgcttcgtcgcacttcgccgacaattctcactgatctcaaccaattgacttcaatctattcctgtg

SEQ ID NO: 70254 - DNA, 591 bp, Heterodera glycines
atgctgcttgatcggaaggaattggaacggccaaagacaaggattgtaagtttttcaagttttgttcgctattttatagggctgggctatcaaggtaaattctcgttctcggtttccgcgtctcggacaattttggatctcgagcagccctaattttgtatctaatatttcttaatagattttaaaacatttaaattatatttattaatatattaaataattaagagtcaacaatgccaagacttgatcaaatatctctcaagtcaaaccgacagcccaaatgatttcgccaaaaaattggaaagtgcgcctcctgtaaaggaattgggtgatgtaagtttgttaataaaaatattttaataatttacactttggattaataaaaatattaatatttgccttcggcaaatgtcaactttcagcatttttttagatttttttggaggctttttatgatttaaagcaggcgtgcaattattcaggatcatagaaattacgggatttttagacccgtaattacggattatgaattatgtgatttttccgtaattttggtccataaaatggttttatagctgaatttctaattaa

SEQ ID NO: 70255 - DNA, 176 bp, Heterodera glycines
atgaaattattggctgcacaagttggttttccagatatttaaaattttaattgtcaaagattgtgcatttgaaactccaaagtgctgttttggtcgcaagtcgcccattcttcgctttagggataatactcagtattggtattgagtttcggaaaaattgtcaatctcgagagtga

SEQ ID NO: 70256 - DNA, 1141 bp, Heterodera glycines
ggacctaccgacattgagcatgtgcagagaatggaagcggttttctccaggcttcagcagaatgatctgcgcatcaaaaaagagaagtgctcatttttgaaggataaattgatctatttggggcatgtgatcgacaaaacaggaataagtccatcaccggaaaaggttaaggcaataaaagaaatgccggaaccaaagaccatcagagttcgaatcattcctgggaatggtcaattattacagtaaattcgtcaaagatttggcagagtgtgttgaaccattgacagacttcgccggaaggatgtcgaatgggattggagtgatgagcagacaaaagcatttaatttggtcaaggaaaagctgacctcagacaaagtgctcgtgcattatgacccaaaaaacaatttgtttttggctacggatgcttctgattacggaattggaattcaattattttcggaattgaaaaattcaagcagtacctatatggccgaaaattcgttttacaaacggatcatgagcctctgaagaaatttacggccaataggcgaaatgccagtggtggcagcaagaagactacaccgatggggcctaattctgatagagacccaaaaagacaccttgctcaaattagtcaaaaaatttgtcaaggagggttggccaaataaagtggacaaggaatttcgaccattttacattgctcggaattcgttggaaattcagtccggatgtttgatgctcggaataagaaccgtgattccagctacatttcggcccgaaatttttcaactgatacattcagcacatccatgaatcgtcagaatgaaatccttggcacgacaaaaagtttggtggccaggattggacaaagcgattgaagaaatccgaaagtcgtgccggccatgtcaaattaatgcttctgaagaacgaaaagttccgttgcatccatgggaagaacccgaacggccttggcagcgattacatgtcgatttttgtggtcctttttggggatttatgtggtttgtaatggtcgatgccaaaacaaaatggcctgaggtcattaaaatgaaaaccacgaacacaaacacgacaatttatgaaatgcgacggatttttgccatacatggactcccaaaacggg

SEQ ID NO: 70257 - DNA, 407 bp, Heterodera glycines
atggtatgtggtaagagcgaaatatcttttaaaaatttaatataattttgcagtttttcgagatttgaagcaaaaaacatttttcgatgttcaaatttaatggatgttaaataacatttgaaactaaaatcattttttataaaaaataattaacaagataacgacgacagtaatacttgtaacaaaaaagtgtttatgtttatttatcaaaaaaattttgaaactcgaaaaattttccaatttttctcctattgaattttcacattaaagtttgatacattttattcttaaatttttatataacgtatgtttaaagttcagttataaaactttaaatgatatattgcgtataaaaaaaaataatatattctattaaatcgttacttaattatattatcaacaataaa

SEQ ID NO: 70258 - DNA, 381 bp, Heterodera glycines; identical to SEQ ID NO: 64831

SEQ ID NO: 70259 - DNA, 388 bp, Heterodera glycines
atgccaaaacaaaacgaaatcgttttaaaatattcctttctggacttgacttggtttcttgatatcgaagctgttttctacgctatttctaaaacggttataccaaaccccagatttttgaatccggttttcagaaaaaatgccttgtggtgaaaacaatatttcacatttcactccataactttgtgagttcagcacggatcgagaccgggataagaccattggaaagagcagctcgagctctacaagaaggtatggaaagaaaaaatagttatttctgggactttttcagaaatcagaattaattctccaatgtggcccaaattttaggcccccagccacagccccttgcttctcccagttttaagtcttggatttgtcaaataaa

SEQ ID NO: 70260 - DNA, 58 bp, Heterodera glycines; identical to SEQ ID NO: 58553

SEQ ID NO: 70261 - DNA, 80 bp, Heterodera glycines
cagcatttattcccggatcaatcaataaattcccatggacatggacgtcaagtgttacttcgtcgacaacgtcaatttag

SEQ ID NO: 70262 - DNA, 135 bp, Heterodera glycines
aatgtgtcgaaaaaggattggcatgacatgttcacaaccaacaatcgaattgcctcgtgggtggtcaatggttgtgagaaattactgttggaattgggacttgaactgcttgaccacgtgacggacgcggccaat

SEQ ID NO: 70263 - DNA, 1575 bp, Heterodera glycines
ttgaaattttgtcgttaatttactatgagcaacatattaacagtcagtcaatacctaatgcccaattgtttcgtcatcggcgttgccggaggcactgcgtcgggaaaggtgtgtgggtgggaattgtaaaatgtggtcctagttccggttttttctcaggccgggttccgcgattatgatgaaattttgtaattttgctttgataatgaaaaatcagtgactttaatataaaaaattgttgaattttagtaatacctaaaaaaaatttgtgtcccccggtgaaattatgcggcaaaaaaaaataaaattccgacttccatagcttgttggggcctgaattccagaaattttcggagccgttcccgttgtttagccgaatgaatacacaattttccgctcaatgtttgcccgttcatttagtcgtccgtctgcggccgtatcatggagcggctggagttgcacggcagtcacaaacgcgtggtgattgttgcgcaggactctttctaccgcgatttgacctcggcggacgaaattgcgaaggcccggcgaggcgactttaattttgaccatccgaacgcatttgagcaccaactgatgctgaacacactgcgacagctgcgccagggcaaatcggtggtcatccccaaatacgacttgaaggagcagcgacggtgcgttttccatcgaaaaaccattcaaaaaaatttttttttaaaatatttctcattttttcgcagatttttggatctgttaattaatatggggagggcttaatgactggcgcaaagttccagatttagttcccttctttctggatacatgttcaattttgaattaaaattcaccaattgaagtccagcgggccatagtcaccgccgaggaaaattgattcaaaacaaaaatttattcatattcccataaattttttgctattctaatttaattgaaagcattttgaatcgtattccgatactgaaaatccttccccctttcagcctcatcgatgcgtcgcaccgtttggaagcggccgatgtcatttttggtggagggcattgttctccgattaaaggtttttgagtggtaccaaaattcaacaaaaacatgaaaacattttacgaaaaaaacaaacaaaatgccaatatatggagcggatttgaaaatgcttttttaaccattttctcttgtccagttgagcgtgacacgaccgagcttggccgtccgttggaccaagtgttgcatcagtacctttcgttggtgaaaccggtcagtctattatctgctgatgaagaaaaacaactaaataaaaattcccaaattccaagttttttccatcaaaattctttaataatttatttaaaaaaaattccctaattgctacttaaattttaaaaactcattaatttttgtttaaaaatcatttgaaatttttcgatgaaacgacctgtgcccctcccctttaaggcgtacgaagacttttgcctgcccaccaaaaagtacgccgacgtaatcattccgcgaggagcagaaaatgacgtggccattgatctgattgtgcagcacattcaggaaatcttg

SEQ ID NO: 70264 - DNA, 304 bp, Heterodera glycines; identical to SEQ ID NO: 53844

SEQ ID NO: 70265 - DNA, 352 bp, Heterodera glycines
gtgctttgcgttggttggttggcgtgggtgactgtggtggttgggccgtttttgcgatattatggctggaaaaaagatgcgatttcgctatggggagcgcggccgtctgggttcaagtgcttgcttgcgcttgtgctcggcattgaacggtgatggctgctgctggggtgccacctttgtcgtggcctcagtttctccagcgattggcagctgtcgaaatgaataaacatgcagctcgtctgtgtgttaaagaaatttggcgagttaattgacttgtgtaaatgtggcctaaggcacaaatgctgtggggaactcagcactggggatgctgaacctaaagttggtggtggtg

SEQ ID NO: 70266 - DNA, 1551 bp, Heterodera glycines
atgatgcggttgtcgcgcgactacgattgcatcaaggaaggcaccgaattgaacggcttcaaacagaggggaccagatgtgtaagtgtgccgtctttttacatcaatgccagtcaaattttaccaagacaaatgatcactcccattttcagttatttcgcgaaacgtgacattgctggatcgcctgatgctgctcaaccaattctgctgatgaagcctgaaggacacaaagtcatgttcatgattgcccatccggatgtcgacacaaattgcgatctcttgcgtattaacaatggcacatgttcgtcgacaggcaatcagaaaggggtgagcgaaagcggacatttcgttatgtgtatacatcacatcaatcactcttttcttccacagtcttccggctttccgttcatgcctaactgtggcacccattgcatatcctactacatgtattgcgctatcgaactgaaaaaagttcacgaattgccggatgctcgtcacactgtagtcaacatcggcacaaaacagatagcaaccaactgtcgctgggaagtgctcattgtgagtggtggcggcggcggcgcactttttgaacgttttgccaaacttatgttcgtgttcatcaccaattttttgttaccgttcagaaagatgcgcgtctgttggtcaagcatggtacacctgcgcacaatttgatgaaatgtgttgcgggcagcggtggtcttccgggctgggcatgggcgctgattgtaactgcaatgtgtgtgtttttgttgtgatcgcttttttggcactactgactctggcacattcatttttaaacaacatttcatcattttcccccaatttttcagtctgctgcttatcgccctgctcttggccatcacatgcttcatggtactcaaacgacgcaagaaccaactgcgacaaccgccacgctcgtactggtcaaatccatcggcgggacgcggaggaggacagtcattgtgggcgcgcaccacggggaacatatcacgcctgttgatcatccgtggacgaggacgaaaggcagcggcggcaccggctgttgctggaggaagaggaggaggaggcattgaagcattatcaaagaagcggagcgactggtttggcggcagtacggcaagaagcggctacgcagcagaacatggcattgaaacgccacagtcaactcaagagtcgttatcgaatggcaaggacaagcgggcgtctcgtggatcgtccaaaccgacgtctcgtggatcggcaccgacatcgcatggatcatccaaaccaacgtctcgtggatcggcaccgacatctcatggctcttccaaaccaacatcgcatggatcggcaccgacatctcatggctcagcacctggcgcatccaaaccgacatctcatggatcatccaaaccaacgtctcgtggatcggcaccgacatctcatggctcttccaaaccgacatcgcatggatcggcaccgatgactacaccttctggcggcttcaaagggatgatggctcgcctcatgggacaaaagactggcacaagcg

SEQ ID NO: 70267 - DNA, 863 bp, Heterodera glycines
atgaactcgcacattctccatttggtcttcactttggccggaactgtcgacgacgggtcggctgagcaggtgctgatcccggacctgctcaccttcgaggatttgctctgcgatttggacgtatggcggaaggcgtcgcgcgacgtgtggaaattgttgttggaacacttttttgagctgctcactgagtgagcctttttttgcttttcaaaaatgcgcaaattccgttggcactttcaacaggacaagtgccaccgaaaatctgagtctcattcgccgttcgccgcttctctgccgccttttggtccatctgatcgaaaatcggagcattttccccatccaaaatgacattcccttccgtctgatcgatgccattgtccaacctccgtgcgatgccaattctctgctgtttttgggccaaactatcgccgcaacggtcgcttttgacgtggacgagacggagtacccattcagcacggcacagttggaaaagcgattattggaggagacaacggagagggataaagaagaagaagaagacgaaattaagggtgaaattgggggaaggagagagtgtaaagggaagagaggaaagagagagagagagggggggggaaataaaggaagagataaaggaaaatagagacaactagaaagagacaaaaaaagagagggcgtgagaaggagagagaaagtaaactccgaaagagaggaaaaaggaaaagaggacaataaattaaaaaatataggaaataatttataattttcacagatttgcatctgtattctgtgcatatgaggaaccgattgctgaacattctttgcacaatgttaagccactcaaactcgcaaatgaacaatca

SEQ ID NO: 70268 - DNA, 439 bp, Heterodera glycines
aaaatggtctaagtaaaaatcgtaattacgctcaaaaagcttctcaaacaattttaacgcttccaattccttctacaatcgcctttatacatcccattatgagcgctaaaattatcagagtgccgaaaatcgcatgtgatctaagcctagaaaaaaatggtctaagtaaaaatcgtaattacgctcaaaaagcttctcaaacaattttagcgcttccaattccttctacaatcgcctttatacatcccattatgagcgctaaaattatcagagtgccgaaaatcgcatgtgatctaagcctagaaaaaaatggtctaagtaaaaatcgtaattacgctcaaaaagcttctcaaacaattttagcgcttccaattccttctacaatcgcctttatacatcccattatgagcgctaaaattatcagagtgccgaaaatcgc

SEQ ID NO: 70269 - DNA, 137 bp, Heterodera glycines
atggtttttccaaaaaactatgatttttataatacccccttggcggatttaagaaactcgctggcatttccaacaactaaaaatattaaaagtgccttaactttgataacaaaaaatgtccaacaaattttcttatg

SEQ ID NO: 70270 - DNA, 591 bp, Heterodera glycines
ctcggttatttgtcaaaagagaaccgggtgttcgcttgtgacaaggaccacaacattgtctcgttcaaacttttgttgtctgtcttggagtaccaaacggcggtgatgtgcaaggattttgacacggccgatcaaattttaaaaatcattcccgaaaatctacacacacgggtggcacaatttcttgagaagcaggtagaaatagaaaggttactaataattttaagcattgtttttttcatagggatttaaaaaacaagcactggcgattagcaaagatcctcagcatcggtttgagttagccttgtcacttggtgatttgcccgccgcttatgaaatggtattgaatttaaatgagaaaaggaagggttttagggatttgttgaatttaggccaagcaagcggacagtgaggaaaaatggaaacaattggcacatgcggcggtgattcccttttaaactttgatcaaattcttttacaccatttaagacaatcaaatctgagctccgtttggcaggtgaatgccttgctaaggccaacgatttcgggggccttcttctgctcgcttcctgcgccggttcgaatcgtttg

SEQ ID NO: 70271 - DNA, 387 bp, Heterodera glycines
gcttaaaagcattgtacagcataattaaaaccgaaaataattttcgtatatttttcacaatttatttcaaaaagccaaaaaaaatgattcaattttgaaacgaaatagtgcacaaaagggagggatggttagacgaaaagaggaatttttagaaaagagcgcccccatctgatatttccatttttccgttccacaactggccaaaggcgactgtgctcattgacacgtagttgtccaataaggtacttggactttccacagtaaaatgtggtacaaaattttggaactgtcccgcctcacggcggggcttaaaagcattgtacagcgtaattaaaagctaaaataattttcgtatatttttcacaatttatttcaaaaagccaaaaa

SEQ ID NO: 70272 - DNA, 667 bp, Heterodera glycines
atgatattgatatctgatcgctctggcgaatggtcagtaagtgaaagtgagtgatttcatttacctgctgtaaggacaaaacttgatcagaataagccacacctgttgacaaatctcataaaaagcaaagcttaaattaggatagacaaaaagattaaacagatctattgcgtttgctcgatggttttaatgatcagagcaatcaatgttttccaactttttagcaaatatttctatcaaattgacatgcccaaaacggcctccgaccatccgatcactggatatccgtctgacagtttttgatccgatcagaggacaaaatttcgcatttgaaaagcaaatttacggatttgaactgccaacggtgggagagaatggacgagaacaatcggttgagattggacggatcaaagcaaaaaacgcggggacacggggaaatggcacggcacgagaagaagcggatcagctgatcacttatgcgttgttaagcggaaatgagtgcgcttttcaatatttaaatggattcagaaaattaggcaccaaattttaaaaattattttagattttatttattctttaaattcatattatccattgagacatttaaatacaaaataagttaccgtatgtcaaatccgtctgactctcagctgactctaataataaa

SEQ ID NO: 70273 - DNA, 2373 bp, Heterodera glycines
atggatctgcggatcagcactccaaaaaatctgctgcagtatttggtcaaccaatacaacaggcagcaagcacggcaaaaccccaatgcccaacagaaaactgttgatgacattggcagtgttgttcggctttccgaacacaacgtaaattctctccaatattggaagaaaatgtatgaagattgcaacaccgtttttgcacggtgccatgacgcgaagaaagcgcgtctcttcattactttcacgaacaacagggaatggcctgagttcaaagagaatttacacaaaaacggtcaagtatttactgaccgttttgacatgtggatgcgtgtctggagcagcaaaatcgctgagttccgagaagaactttatgacaaaaagttcttcggaacaatccttggttacggtgaatcaatggagttccaaggccgaggaggcccacatgcccacattgtggcgcaaacagacctggacgcagttccatatgtcattcaggaatacatatgggcgcacattccatctttgcctgataaagatgacgacacgcccattgcaaaaatgcatcgcgaaatccgcgaaacaatgcatatgcaactgcacagatgcagtgacagttggtgtggtcctagcgacccaatttacgggcggtgcaagaaggggttcccagccccttactcaaaatgtacgattttgcgcccggacaggcccgcgatgtatttccggccttcaccaactgatggtggtgcccaattagaggtaaacggcctaatatacgacaactcacatgtcgtgccgtataatccttatattctgctacgttaccgagtacaccataatgtactgtttgcatatggtaacaaagcaaatattaaatacgcactcaagtacccttttaaagggccaggacattgttatgtcgagtgcaaagaagagtccggcaataaaatcaaaattgacgagccggctcaatatgccaagatgaactttcgtggtgcaacggaagcatatgccattgttcattcaatgccatttgcccgtctttcgcatcatgttgtcaaattggcaattcatttgccaaaccaacagcccattgtatatagggctttccagctggtgagcaaagctcaacaaatccagcaaggcgaactgccagaaacgcagtgttcagcctattggaaacaatggcaaaatgagtggaagaatgatccaaagtttaaggacattcttttcgaaaaagtcccagagcggttccgatgggcaaaggacaaatgggtcctgtacaaaaggcagcaaattaaaaggccacctatcggccgaattgttcctgtacccccatcggacccggaaaggttcgcgctctattcacttatgcgtcactttcctggagacccagaccatcttaagatggttaatgggttgctttgtacctcattcactgaggctgcaataatgcatggtcttcttgaagacgacaaaatttgggacaaaactctggcggaggcagctctgtcgcgctggccagatcagatgagatggctttttgtgagcatcctggtctatggccagccgagtaatgccatagaattgtggaacaagtacaaagaccaaatgtacaatccgcaaggcattattactctggcacagcataaagtagcagagcttgaagccctagccgacattgattggcggctgcacagctgctttaacttaagctgtgtgcattttagcctgccagacccgccaacttcaattgccaaaaatactgacgcggcaattgaagagtttttctttggcgatgatgatttgaatttgcctccagggcaaccaaatcctcgtccacagccaaatacccctccgccacttaacagcgaccaacagaaggtctttgatgctgttttgttggcaatacagtcgaaccctagggattcgactgtcccccgccgtttcttcatatacggcgatggaggcacaggaaagacattcctgtttggccaaattattaggcgcttgcgaaaggccccatacacctacaaagtgcttgctacggcatccactgggtgtgcagccattttgctgccatatgggaaaacagcccattccacgtttcgtctgggtagagaagtgtcattagacaaactcccaagcattccgctggagagcttctttgcccgtcggattcgtgaggcccaactcatcatcattgatgagatcaccatgcttcacaacacggtgattgaggtcatcgaccgagtgtgcaaagagatggcaattcgccagcacaaggatctcctcttcggaggaaaaacggtcattttcagcggtgacttcaaacagtcgctgccggtcgtgcctcatgaaggcttaaccgctcag

SEQ ID NO: 70274 - DNA, 64 bp, Heterodera glycines
atgaaaccgttgcgcagagaatgcgcaacaatcgcagcttcatgcccttgcgggtatggaggct

SEQ ID NO: 70275 - DNA, 672 bp, Heterodera glycines
atggacgccatcaagaagaagatgcaggcgatgaagatcgagaaggtcattcgattgagcatttaaaaaggaacaaaaaaagacaacggaatgccaacaaactttggcattttaaggacaatgccatcgaccgggcggacgccgcggaggaaaagtgccgtcaaacgcaggaacggttggagcgtgttgaggaggaattgcgggacacgcagaagaaaatgatggtgagaggaggaggcaaatttgaatttaaaacattggcaaaatgttcaattgcaggcgacggagaacgaattggacaaggcgcaggaggacctgacggctgccaacaatttgttggaggagaaggagaagaaagtgcaggaggtgggccttttgccgattttggcatttccaatgcctttggggaggggcggcaacggcacaaacccaaaaataaattcttattttgtacctatttgatttggccaattcacttttcctccgtgtgttatccgaattcccaaaacggtgacgaaagcgagaattgcccgggcgaagaagcaaagaagcaaagactggattttcgatttgcgattgcttttccttcgctttgctttccctcggattttccccaccttcgccaggggacggaggcgaagaaaggcagcggaaaaagtgcataatttgctt

SEQ ID NO: 70276 - DNA, 114 bp, Heterodera glycines
tgccgaatgttccccacaaaattaaaaaacgggcgcgaagcgcccgtcctgaggccgcgaagcggcccaatgtctcaacaaaattaaaaaacgggcgcgaagcgcccgtcttga

SEQ ID NO: 70277 - DNA, 1749 bp, Heterodera glycines
atggaatggaaatgtgacggctctggcgactgtcgaaatggcgaagatgaaaaagattgccgtaagtgcatttattaattaactaataagttaattagcattattttaaaatggagaaaattgttgcttttgacaaaaaattggtcgaaaaatacatatttaaaaaatattttttataaaaagttaaaaaatccttttcccaagttaaacaggagaaagagaataatttttaaatctcaattaaattaatttagaagcatacagaatttgatttttaagtcgaacaaaatcgatgaaacactgaaattgttgtaaatgagcagtattctgtacaaatttacagttttctgaaccgtatcccatcaaaatgttcatcaaaatgcaaaaaagcaataaaataatgaggaaaaatatttgtattaatttaaaaaaaatatattttaatatttttagcccatcccggatgcaaagccgaccaatggcaatgtgacaagtacgaatggcattccgtctcctgtattgtaagggaaaaaaacaaaatgccaaatacatttacataattcaatttttttaaagcatgaataccaacgctgcgacaacatcacagactgttccgatggaagtgatgagcgcgattgtcgtaagtttagatttaaatttttgttagacattgtttaaataatgataaaattggaaatttttacagttaaataagcccctagttacggtaaaattattttaatttttagggtaaaacaaataattttcaaaattcagaatttttcaaatttcttgcaaaaattcttgaaaatttggaaaggatggagaagggggcgggcggggacgatttggacgcaataaaaataaaattttaatataaaaaacaattcaaatttgaaatcagccaagggttcaaattttatgaaaaaacaaaattcagccgcaagtccggtgaactgtgaggtgaatgatgggtcggtgttcagctgcgcggacggccgccaatgcttcccaattgcacggaaatgtgacggcaactacgactgtcgtgacctcagcgatgaaaaggattcatgcgcaacaaatcatacggtaggagatcggttcagagggtgctgggacgttagtcaaaaaccatcaaatggaaattttttgacagaaaattattcataacttcacccaaaatgaatcaaattttattatcttggtatttttagctaaccctaagtgttttctattatcctgcgaaatttcaaaaaaattcattaagtttcaaaaaagttatcacctgagaagttcaaaaaaccaagtttttttcaatatttttggtcataacttttttaaatcttagcgcatttttttgaaattttgtaggctaatagaaagcacttagggctatcgaatgacatcaaaaattaaaaatttagttgttttggaacaaagttatatcaaaaaatattttcatttgatggtttttgactaacgtcatagcaccgttcagagtacctttggtgtacggtgctattttcccctttggtattcagtatgaaaaatcctaaaaataattaattttaaaagaattgcggggacattgaaaaaatgaagaaaattaaaactttaaaaaagagaaaaatctaaatcctcaaaatcttaaataattatttctgcatctcctttaagcctttcttttcgtctccctattatccctttaaaatttattgtgtgttttgatgtgcttttagaagagta

SEQ ID NO: 70278 - DNA, 3951 bp, Heterodera glycines
gaaataacctttggtccacgcttggttgccaatctggctgtgttgcgtcgccgggcggcggtgtttgcacatgtccccagggatacaaattggacgaacgttttcaacgcacatgctcaggtgggtgtttgaaaaatagaatttttcgaaaaatttggaaaaatgcaaattttttaaattcaattttaagactaagaatttaagttttctactaattttctgtaaaataccttagagtaagtttcagttcttgcattttcttttattttttataattatcaaaataaaataatttcaaagagtccgcatttcaacaacaaaaaaaattattattttttagatttttactcaaacataaattaaatatatattttttttaaatacgaaaatttcttgtggttgaaaaaaagttttttttttttttgctaattgctgtccaccggttcccgcacagacatcaacgagtgtgccgagttcggctactgtgatcaaacgtgccaaaaccatcgtccgtcattcacctgtggctgtttgggctcctgttttcggctccaaatggtccaaagcatttcgtccgggcccggcaccggtggccactccaacatgtcactgcgcggctactgtgtgtccaatgaggcggaaaaaatgcgactgtttgtggcacggcgtgagggactgtaccgggtgaacccggccaacaaagtacgggttcgggttggcgccggcattgaattttcaactggaactggtcctgaatcctgcggcatttggatactggcccagactccccccgcccgaactccccaacttatactggtcccggaacttttttggcacccgaatgaaaaatgaatttcaatccgttcacgattgaaaatgccatccctttttttatttcatctataaaaagacatattttgtggctttttcaataacaaatcaaatgtgtccactttttttcgtatctgttttttgcacctttttgtgaaaattttgtaagaaaaatgccataaatcgatcgtgctctctaggattaatctttctaatataattaattcagctcacaataaaaataagatcaatttttttttaataataatatattatttttcttattttggcaaaatttaattgccaaattttttttttgcaaactaatagtttttgaataaatattttctttcaattattcatataaatcagaaaatattaaaatagtcatatccaactttatttttaacggcatttgggtattatttttttaaatatttttggtgttttaaatgtttaaattcatttttaaaggatgaacaggcggtgaaaattgcgtccggcgagttcatctatggcgtcgattttgactatgagcagaagaaaatgttctggacagatcgcatggcacattcactgttccgtgccgacatcactccgacgggagacattgaaaagattaaaaaattggacttaaaatcgtgagcattaaaatttttatccatgaaaaaaaaaactattttgtgggtttaaaagtcaatttttcttcattttttacaattttaatgggatgattttcaattttcatatatttttggtattttatttctattttggaattttcagaggaatttttatacaaattaatgacaaaaaaatatcatggaagatttctaaaaatttctttaaagaaagcaataattgttcattttctcaggctgatctatccacgcaatttggctgtcgattggatcacgaaaaatgtgacaataaaactaaattaaatatttaaataaatcgttaaaattaaaaaacaggttttcaaaaaattcaattaaaaatatgagaattataactggaaaatgaattaaataaaaataaaattgtaataccaaaattaaattaactaaaatgtcaggtctacgtgatcgagagtggctctcgacgcatcgatgtggtcacttatgaaggggacaagcggacggtgctgcttgcggacgcattaactttaccgttggacatcgcgttggacccgctccggggggacatgttcttctcaaatcaactccgattagagacaggtaaaattttaggattttaaatttaaatttaaaaatgaatttaatttattaactaaaaaataatttataatagtaattgaaaattaatttaaaaataaatatatttaattaaaaatattctttgaattaaatttgtgttcaatatcttatatttttatttattttgacattgaaaatggaaatatttgtatttaaaattttatattttttttattttgacattaaaaaagtatatatttgtaattcagagcatatttaaatttaaaattattattacattaggataaaattaaatattaaaaaaatgaaatttaattttaattcattcacaaaaatatgcctttaataaaaaataataattttcatttattttattttttttttgcaatgacctttttttagctcatatggacggaacaaatcgacgcgtgctaattgagtcccacactcaccaaggcaatttagttttttaacatgaaaaaatttaggcacccaaaaagttaaggatgcctctttttgagtacggtattaagaatacagtagtcaaatcatgagacggaaaaattgacagtacacagtctaattgccaaacaaacaaaagaaatttaagtgagcggtgtcgtagttgacattgcggccaaacgtgtgtattggagtgatccgaaagttgatcgggtggagtccattgactactcgggcaatgatcggcgccaaattgccagcggaaggtgaaaagttcaaaaaaataatattttaaatttataaaatatttcagcttttttaacttttattttgttgcaccccctcgatataatactaatgaaattctaaaataaaaatataatttttaaatttatatctcacgaattttgtatttcatttcttctgcagagattttgccccgcatccctttggactcgcaatgttcgaccagtttctgtactggacagactggacacggtaaataatatggtttcaaaattgtaatgtacaaaaaaaaattattttaatatataaatggtaaaaacaaattattttttttttcatttataataattatattaaaatttaatattattatatacaggatttcgtagaatttaatctttttttatgaaaattggtcaatttacagaacttctagaaataagacggaaaaatgatcacgaaaatctatgaagcatactttcatctaaaatttcatttgccaagaaatataattaattattctccaaatatttttttttttgaaaattttcttcaaaaattgtaagaaaaaaatatattaaaagatttatttttattagaaaataaaaattttaaattaaaagctatgttccataaaaataaaaaaaataaaatccactgtcctaattcagacttggcataatgcgcgttgagaagtttggcgcactgtcggaagtgatttggtttgttaaaaattaaaaaaaattaataaaaattaaaattttttgcctttgctaggtccatgaaggacagcaacgtgttcccgatgggcattgctgcttaccatccaaatgcccaaccaggccccaagcaaagcgagtgcttccagcagaccattgagaatccgtgtgccaagtccgactgcgagggcatgtgcctgctgagcaaggacagtgtcgggttcggagtcggcttccgctgcgcgtgcccaattggacaggtaaaatttatagtgccaagatggccaagagggagaggcatggacacttgggcaagcaatagtaccaaatagccaagtcggaagaggggatgatcaattggacaagtaaaatagtgccgagatggcaaatcggggggattgcggtatggccaatggacagacaggtagtagtgccatagatgaatggacaga

SEQ ID NO: 70279 - DNA, 425 bp, Heterodera glycines
atgtaaaaattaacagaaattcacgggttcattcgatagttgtgagaaattccccggagaaactccaaaaataatgtgaaattgattttttgaactcgcatctccaaaattttgtcatcccatcagaactcattttagcgaaggtgtaaaggtggccttcgtaagacaattttactttttgttttttggttgcaattgggttagccatttctgaaaaatgtccaaatcagaatgtacatcaaattggttaactattaaaaaataataggatttggaataagtaaaattgtaaaaaatgagcgaatgttaattaaacctaacttatgccaagtggcgagggatccctcaggcttagtttttagaatcttaatttttaaaaaaacacatttttctatttttgggttggggcccaaacgaccccgggg

SEQ ID NO: 70280 - DNA, 210 bp, Heterodera glycines
atgggggaaggcccaccacgaggccgcgaagcggccgagtgagtaccttcggtgcaggaaaattattaaggaagagagttcattatttatttgttttttgcataattaattcataaatatttttttcagaaagggttctgaaacgcaccaaattttatttacatgttagtttaggcactctgatgctttttctatcaaaaagggagatga

SEQ ID NO: 70281 - DNA, 704 bp, Heterodera glycines
gtctccccataaatctgggcgcatcggttcggggggactgccccgaaaacaaaaataaatcgattttttcaagtgtccgtttggggtactcaaacaattatggggagcaaaaatccaacgcagaattaaagtacaggctatagggaagctattccggaaggattcggtctccccataaatctgggcgcatcggttcggggggactgccccgaaaacaaaaaaatcgattttttcaagtgtccgtttggggtactcaaacatttatggggagcaaaaatccaacgcagaattaaagtacagactatagggaagctattcccgaaggattcggtctccccataaatctgggcgcatcggttcagggggactgccccgaaaacccaaaaaaaaattttttggataaaaattatttaaatgaactgactagataatatttaaaataggttatttctcttcctttcagtatccctgcaaagtttggtgcgcttctgatcagtttctgaaaaaaaagttaagcctaaactttttggcctgtttaaaaaggaattaaaaatttttaaaaattttattcatctccctttttgatagaaaaagcatcagagtgcctaaactaacatgtaaataaaatttggtgcgtttcagaaccctttctgaaaaaatatttaagaattaattttgcaaaaaataaataaaaacgaaagact

SEQ ID NO: 70282 - DNA, 1240 bp, Heterodera glycines
  unsure (1)..(1240): unsure at all n locations
atgagtttgctccagctgaagcacaaagagttggacctgaatgtgaggaacaaagccgggctttacnccngttacatcagtttcgtgatgcgtgaagaccttggtaaggccggactagataaatgtgctctttaaaattggcattcaaaaaaaaaattttttttcgaaagttttaatattatttactttcattttttgagaaaaaatttgttttttttcttcaatagcatggtgaagaatgaaaaatttcttaccccttcctaactttcaaaacatttctaacaatttttgagccaaaaattttaaaagcaaatcatttgctaacgttccattttaactccgatttcgatagtttaacaaagaaaaaaaaacagaaaaatgttctcaatagcgaaatgactttccaaatctcaaaaaagcatagagaattttgatttttcttataagaattttttttttaaatcttccagaatttttgagttccaggaacatacataaataagttaattaaaatgctgaatccaatttgctcaacttttgcgcccatttaaaaacaaaaaaaagttttccccattatccagggatggtgatgtgcctgctctcctacggtgccggccttgacgagcaggcggacagtggcaaaatgacggcactgcattttgcggtttcgaagcgcaatctgcagatcacgcgcttgctgctctgcctgggcgctgacccgaacgtggccaatgcgcacggggactcgccacggcatttggccgccaaattgaacgagtaattaattgattttttgggggttaattcatttttggggctacattgttcgttattctttacccatattttggaccgcgacgttttgaccaccttgccctttcgccccgccccgtggaaaaatttaacaattttataaattaaatgattaaaaaaatgccgcgcgttcgagcgaactcgaactttcattgtatttaatcggctccatcagcgtaccgactgcgctttgtgcgctgtgccatttcttttcaattattcactaatgctcgatagtctcccattttcaatttataaaaaatttaattgactcattcggttagagtccgttcaatgagattttataatgagaaatgacgtggaaaatttcactaggaaattagtgaatttgacgtagttctgccattctttttgggcgggtcctacccaaaaaatgtcacactgtctcaaaatgccacttaataaa

SEQ ID NO: 70283 - DNA, 1015 bp, Heterodera glycines
atgagcaaaagaaggtgaattatgttaaaagaataaaaaataaaattcagtcaaaatttatttgaaactctcagcaaattttcaaacgaattaattatgatgaaaaacgccaatttatttctctcccactttcggttgttcagcagcgactcagcacattaattacattaatttcaaagcacaggttgataaaacaaaattaaatttttaaatttttcaaactaattttaagagactattttttatcaaaatgtttttattttatttttaagacgctaaaataaatatccttaaattaaatcagtgttatttaaataattcattttaattttagtagtttaattggtgcaaccaacaattttcgaattgctgagactattgatttagtgaaaacgcttcaaaattttacaccaaaggatgaacttaaagcactcatgaaaataaagattttggatttgaacgagaaggtgaaattccacttgcttctcacatttgcaatacgattgtgtgtacaaattgaaccaaaatattttaatgtcgaacattttgttgagaaattattaaaaagaaatgaagtagaaattccaagttttattgagaaaaaaaaaagaattatgtacaaacaaaaggtgatatttaaatgaaaatgagattttaattagcgtaaaaggccaaaaatcattatctaaaataatatgacaaaatagtgtaataaatatttaaaaaaatccaaattaatttaaaattgatcatttatgttttatttaagcctggcaaatgatatagccatattttggagaaaagcttgagaattttgccaatgcagttcaacttaattacaattctcttcatggtaaaattaaaaattatatataaattatgagcgattaatgtcaataaaattgaaaatttttctcgattttgactctcgtgctctttttatgatttcgttacaataaaattaaaaataaaatttatttttcagatatacagcaaattgttggtgaattattag

SEQ ID NO: 70284 - DNA, 1606 bp, Heterodera glycines
atgagcagaaaacaacccaacaattttgcaaatttcgctgaactttcctcactatgtgaaagacttcgttctgaacgtttactaattgattgcgagcaaattgttttgcggaaccttaactcgaaggtattcacactggtattttccctcctttaaacattgctaaaacaggttaaaagtcaattttcggagatatgcagattggcttggatgtgccgtcatgagcaggtacaggcaccaacaacaaattacacaaaatgttttgtcatttgttgtttcaggggattttacgacaattgatcaactccgatttaagtgtatctccggacaactgttgtcaattgatcagcaatttgaattcttccaattttgttgaagcgcataaaatccttaaccaacatgccgccgagcttagtcatgtttttaaactcttaatgggtgccccccgtgcagttgcggcatttattaacgccgctgaaaagattcctacgcaggtaatacgagaatatttacactatataaaaaataaacgtacaattagtattcgagtgaagagcttggttttgcattgttcaacgtaatgtacggctcatgcgtttttcctgagaatgagaaaaatgtgctcgaactattgggccatttaataacgctgcaacttgtacaaagctcagacccaagaaaattgctgcgtaaaggcaattcggcattttcacgcatttacaaatcattttccgaggagcttttctccaacaaagtgggcatttttctaatacgatacatatcccggattattattaccaaggattccttttttggcacaaaaaatcgcaaaataggcacaaaatcctcgaataggcaaaaaaaaaaaaatatatatatatatattaccgctttttagatgggtaaataaaaaaaactttcttttgattatatttcaattgtaaatgaaattagtaaataattaaaaaaattgcttttttttgttttattgtatttttgttaaaaaaattttcgaaagtcctgaaaaaagctccaaaaatgacgaaataacaacaaaataggcattataaaagtcatcgtagacatcccaaaccaagcagaaaacgcttttttcgtgctttatctgtagcgtatcaagtgcgcaaaaaatttaggcatttgcctaaaaaaggaatccctaaccctaattatcggggggggggcgaaggcccaccacgaggccgcgaagaggccgagtgagtaccttcggtgcaggaaaattattaaattttaaaaattttttaattgctttttaaatatgccaaaaaatgtaggcttaacttttttagtgaaaattcgatcactcatattttttgctaattgagcagaagcgtaccaaactttgcagggatactccccggtaaaggactaacttacactgaaatgagcgccgagctagctggctcaaaaaaattttcgaaaatctgagtctttcgtttttatttattttttgcaaaattaattcttaaatattttttcagaaagggttctgaaacgcaccagattttatttacatgttagtttaggcactctgatgctttttctatcaaaaagggagatgaataaa

SEQ ID NO: 70285 - DNA, 203 bp, Heterodera glycines
atgatctttctattcgactacgtcaaaggtgcgttttcccattttattatcatttctgaatattttgcttaagccttggctttgaacccctaagaaaaaaaaaattaatgaaattggcaacattttttcagctcacgattttgtcaaccttttttttttgtctttgatcactgatcaatggctgtgatcatcgattgatcaga

SEQ ID NO: 70286 - DNA, 450 bp, Heterodera glycines
atgcacgaactaatggctaccgacaatccgagtgactatctggtggaacagtttgagtcgaagaagaaaagtgccaaaggtgagcatttggaagatccggataaaaaaagtggtgccaagaaagggtcaaagaagaataaaagtgccaatgagcaacgcaaagacaactacaacaagatcatgaagctgttgatgcagcagaagttgcacccgttcgactttttggccggcactgctcaaactgagcaaggggcggaacaatttcaaattggcggcatacagtatataattagtggacagatcgcgaacaaaaaaaaatgggagaaaaaggtgaagggaaaactgaagacacaaagtgaaatggacaaagcgaatgatacatgtggtcgattggccaaattggtggcaaacacgctgtacgacaacaacacggacccgcaggtgctttag

SEQ ID NO: 70287 - DNA, 59 bp, Heterodera glycines; identical to SEQ ID NO: 52421

SEQ ID NO: 70288 - DNA, 59 bp, Heterodera glycines; identical to SEQ ID NO: 52422

SEQ ID NO: 70289 - DNA, 59 bp, Heterodera glycines; identical to SEQ ID NO: 52421

SEQ ID NO: 70290 - DNA, 59 bp, Heterodera glycines; identical to SEQ ID NO: 52421

SEQ ID NO: 70291 - DNA, 1428 bp, Heterodera glycines
atgacatcatccgaaaaaggaaatcattatgccatccctgaaccaaaaacaacgagaacaacaacaacaacttctgttggcggcaacaattcgaatgccaccgattattatgaaggtggtccttaattacctaattagttaacaattatataaataagtgcgcatattcgtggattaataatcaaatgatcaactgtattggtggtttttaattgattggactttttttaattttaaaaaacgggctcgggtcagtcgagcgcattcaattcgattcggaaggactggtgcggtcagtcttgaaatttgacggatggtgctgaactgatcgctctggaaaagtctgcgccgagttggacgcgttccatacaaaagcagacaaataattcattcattatctgatgataccaacgcatactttgggttaattacccactcactaaaagttgtcaaaaaagttcagcacgtggcagaagcagcagcagtgccatgccaacaatcggtgcacttttggccgagtttgatgacgaattggccaaacgggcacaaatggcactgccatcgccatcacaagcagcaaatgccatcgaatatgaagcccttttgttggacaaattggccaaaaagggtccgctgcaaagtgagcgtgaaattcggcgaagtccgcgcatcaacgacagaggcggcggcggagatcaaaaaagcttttggccactccaaaatgccaagatgttgatggaaatggatgaacaacaacagtttaacgaaatgattgtgtcggagaaggagggacgacagcacatggcaatggccaagggggaggacaacgacagcgagcagtccataaccgctggaggaggtgggatggacggacgggcggaaggctgctgaatgaatgatcagtggggggggggggattagggctggaaaaggccaaaaatggcgcggattggccatgcccgggattatacctaaaataatcttaaaattacgagatttcttagttttgccatgccatcaggtaccgggggaagagacccaaattgattcgcgatgagacaattgctaaaaaagttatccatgaaaattgcgaaaagacgaaatttttgaagtttttccttcttaaattttttccaggtttgaaaatctttaatattagtccttttttggctaaaaggctacaaattcctgttttttgctctccgccagcgttgaaaccaaaagaattgtaaaattcatttcgtatacattctgaaaacgtattgtcaaattgcagaaaacccttgtgacaacaattcggagatgacccatcgcatttggttggcggtggaaaacgcgcgactcgccagcgccgccggcaccgaacgaatgccgcagaaggcggccaagacgccgcgcgagtgtgtgcgcgtgtgcacaaatttattg

SEQ ID NO: 70292 - DNA, 149 bp, Heterodera glycines
atggttgcgtcgaatcggccggagaaatcgcagaaggttttggcataaaacaacaattttgcaaaaaattaattagaaatttatttgctcaaattaagagacaagtcaaatgggctccgtgcgaaggatgagaaagaaaatatgagaga

SEQ ID NO: 70293 - DNA, 249 bp, Heterodera glycines
  unsure (1)..(249): unsure at all n locations
atgaaaagnangaaattttatttatatgttagtttaggnagtatgatgttttttttattaaaaagggagatgaataaaatttttaaaaatttttaatttgtttttaaaaaggaaaaaaagtttaggtttaacttttttttcagaaacttatcagaagcgcaccaaactttgcagggatactgaaaggaagagaaataacctattttaaatattatctagtcagttcatttaaataatttattcaataaa

SEQ ID NO: 70294 - DNA, 896 bp, Heterodera glycines
atgcccattcttgttggacttatttactatgccaatgtgaacccatttcggactgatcagaataattatttttggtgatcattccagcaatggtagaaactgatcaattattgacatgaatttcctagttgggttcacactggcaattacagtgaacagtacccaacagtaccgtataactcactctcactgcatctcgtccgacttagttccacattaccatgctttttgtttgttttcattaccgtattttgttctgctgctgctagtcgctacattaccgtacatttgtagtctctttgttgctctttttctctgctgtccttcaattttgtgctctctctctctctctcactctgtatatcgctgttgtatcgattatttttgattgattatttcttttatttgttctgtcttttttgttcgtctccaaactttgcgttgcgtcgtgtgctgttgcagtcctactatttgattgaggttggtcaaccaatgcgtgtccacttttgttttttttaaatatttaaaaaaaaatttttagacaaattaaaattaaaatttaacaacaaaaaaaaaaaattaatttccagaacctattgatgttgccgcccatcagccgatcgctattcggagcgaactgtgctgaatttgttcacacatttacaccacataatttgttgttccgatcagtcaggaatttcaatattttctaattcgaaaattttaattttattatggaatttattttcttaaaagtagtcaattgtgcaaatattaacaaaatgtcagacgagacaaaattgtcgagaatgtaaagaatgcctatgtttatataaaaatttttgagtgatcaaagcacttttagtgggtaattgatcagtttattggaaattaaa

SEQ ID NO: 70295 - DNA, 72 bp, Heterodera glycines
atgggcaaagacggagcggaacaacgaccaaacgaccaaccgttaggttgtcaagtaccgaaattgcggtcg

SEQ ID NO: 70296 - DNA, 506 bp, Heterodera glycines
tttggcaccaattaccaccgtttttccatgtgaacgaatttcatttccttttagaaaaggagttaccaggggtaaaatgtaattttcacccatccaccattcttgtggacttgtgattttggccaaattaaggtaaaggagttgattaagcataattcgacctggactgatttcggttaattgccgggcatagatggtttgggggcgaagcatttgcgcagaaatgacggtggctgatctgaaatccccacctctgtatcgttttaagtcggttacaaaaccgggttgaaatgaaccaataaccaattttatcacctccacctttatggcaacagcttgaacgttgatcctgccttgtacgaaccacgagcgcaacgaatcgaccgggtttaagtcataggacaatctttcaaatccctccttccactcaaacttactgaccacaactgtgtctcccatttgaaggcgtctctcggcacttaccaaagtatcaggaattcccataa

SEQ ID NO: 70297 - DNA, 1074 bp, Heterodera glycines
atggaaacggcgttagccgtcgagaaagtaattgaaaccgataaaactcgtggtatttccgcaggtcttgaagaagaatttgaacgaggcatggaattgggagaaggtcagtctgtggaaagaaacacagaaaatattgaaatcgaaactattcaagacttcactgcgactcaattctccaatgtctcgtggtcagagccacgtgccatcgcttcgcctgtgccaatgtcttcaaatgaagaacatggcgcggaaggcggtgttttgaagtatttggtgtgtcaaaccgacgtgaaaagtgtcgtgggtgggaaaatgagtggacaaggtccattttttatgggaattcctgatactttggtaagtgccgagagacgccttcaaatgggagacacagttgtggtcagtaagtttgagtggaaggagggatttgaaagattgtcctatgacttaaacccggtcgattcgttgcgctcgtggttcgtacaaggcaggatcaacgttcaagctgttgccataaaggtggaggtgataaaattggttattggttcatttcaacccggttttgtaaccgacttaaaacgatacagaggtggggatttcagatcagccaccgtcatttctgcgcaaatgcttcgcccccaaaccatctatgcccggcaattaaccgaaatcagtccaggtcgaattatgcttaatcaactcctttaccttaatttggccaaaatcacaagtccacaagaatggtggatgggtgaaaattacattttacccctggtaactccttttctaaaaggaaatgaaattcgttcacatggaaaaacggtggtaattggtgccaaagaaagtctggactctttctgttttccccttaaccagttttcagtgcgattgatgggagctgcggccgctgtccaacgttcattcgaaatggagaaattggcgaagcaaactgtcaatgtccaactcgtctggcagagaccagaagtacgaccggatgaagtgcaaacaaatttgaaaaaggcacaacgcgtctctttcgaatggttgatcaacaacaaatcggcgggctaa

SEQ ID NO: 70298 - DNA, 688 bp, Heterodera glycines
atgaaaggtagaaagtttatccaccacaccacatgtgcatgtgtgtaatcacatgactaaatgaaataaataatttaatttttttttctcaaaaaatttctccttcttcaccaatttcctactcttttcttgaccagacccccattcttaccagtgcaaatttttaccggcggtaccggtactagacaaaccggtaacggtaatttcatttttgaaaaaaccggtaccggtaacggtaccggtaccaaaaaacccggtaattaccggccagtaccggtaccggtaccggtaccgctcaaccctagttttgaccgaaaaattcggggtcttatctccgaatagttaatcaattattttgcccaaatttattgcccaaaaattatcggaatatcatttccgatttcaatttaatttgtccaaacccatattctctaaaatttcagaatttcatttccgagtcacattttttcgtccaattctcaaaaaatcttggattcttattccgttttacatttatttgggtccaaattcattttgtcctcggaatctcatttccgagtttcacgtttattttctgtcccttcccatttgtcccaaaattatcggaatctcatttccgagtttcacatttcttttgtccaatccaattttgtcaagaaatttcggagtctcatttccgagtgcctaa

SEQ ID NO: 70299 - DNA, 773 bp, Heterodera glycines
atgctattaattactacatttgttggccagcaattttttattaatttaaagtaaaaataaatgttacgccaaattattggcgaatttcgtggggaaaattggagacaaagaacctctttcttcaccaaagttttggcccacttcaatcagcacttttatgtacacatttattggccagtaattttttactgctaaaagaacattaaatatttgcgtggaattatttgcgtttaatgaggaaaaatcacagtaaaaataattaaaaaacaatgacaaaggcaagaggaggcaattggtttgtatttaagcaacgatatggccaagagaaatgccaataaagcactcactcatttgctttggaggtactcattgacatttcattaattttattgcttaattttaggcattaattttccaaccgtttcttctcatcaatcccactcttcaaatcaacgattttcaacatgaacgtttggctcgcactttggtatgttaattgaggcaactcacacaaattaacccttgaaaattgaaatcaaaaaattttgatcacgaaaaaatgatttaatcggtttcaaatagcccaaaaaaagagcgaattttaatcagggaaaacttggtcaaataatgaattttgattttggccatatttagtctgttggcagctctcattagcgcatttgactgtggacgcagcgatggccctgacgcaaaactggactcggtaaatttttagtggattttttgaaattaattaattttattaaaataaa

SEQ ID NO: 70300 - DNA, 355 bp, Heterodera glycines
atgtcggaaccaatcagaacggctttagggataatggtcgagaatttaatcggtagactgaatgaacttctaccaattgtcagagcacagcagaggaacgaagagggattaaataaattgagagaagatagaatatttttaacagatttattagaaagaattgagcaaaaaaaccgtgaatgggatacatatataagagaaataggagaagaagctcagaatgaggaaaatgaaagataccgcttatttacccataatgggcgacatttttatgaatgggcagaaaggggaagagaaatggtcagcagaattaatattattctagctaatgaagatggagaaagtttagcagaga

SEQ ID NO: 70301 - DNA, 2002 bp, Heterodera glycines
atgcatcaaaagatgcatatgcgacctgtgtttatctgagaagcgaagagaaagaaacagaaattcaacttttatattcacgcagcagattaaggccacggaaaatgaaaatttcaattccaagaatggaacttttgggagtgctaattggaacaagggcgatcaaatttgtgaaaacagaaattgggataacgatagatggaatgtatttatggtgtgattctaaaccagtacttagttgggtcaattcaaactgtgaccagcctcgatttgttgccaacagacttagtgaaatcaaattaaattatgggttggaatttgggtatgtctcaactgaacaaaatccagcagatgtggcaagcaggggttgtacaccaaaggaattaaagacacacccgttatggtggacaggaccagaatggctaaaaaaggcacagttacattggccaaatgaaatgaattttaaaattatacagtcaggagaccctcaagacaattgtcaaggatgccaaaagtcatttggcgtcattgaagacagagaaccggaaatggaacttattaattttaagaattataaagaatggcataaattagtgaaaatttttgcaagaatgcttaaaattgtaaataaatgggtacagttaattaaaaaacaaacaaatttaaaagtatcggaaggagaatacatcacgccaatggattacgaaatttctgaaaagatactcttaaaattgggtcaaaaaggatggaaagaatatgtcggaaaaaacaaccaaataaggtgggaaaaggacatcgatggattaattcgattaaaaacgaggattgagaggagtgcaacaccaaagtcatttcataatccaattgtatttccaaaagggtccaaaatcctggaaatccttattttaagagcgcataaaaatgtgatgcatgaaagagttgacgcaactttaaataattttttgagtgaattttgggcgcctggagttagaaatgcaattaaacaggttctgaaaaattgtgtgatttgtagaaagaatcgaggacctccttttgctctaccacccatgccacctcatccaaaatatagagtcagaagatccaacccgtttgagtttgtgtcattagattatttgggtccgtcagtaatcaaatcaaaaaataaaggtgaaccaagtggaaaatattggattgttttaataacttgtcttacaacaagagccgtatatttagaaccagtgtttgatttaacagcagaaacatttttacatgtgttaagaagattcgcaagcagacgagggaaaccaaaaagtataatgtcagataatgctcaaacatttaaattagccgcaaaggctggagaaatgtacgaaccaaaaaacacaaatataaaaaatgaagaaattagataattatttaactaaaaataaaattctttggaaatttattccggctttatccccctgggaaaatggatgtgcagaaaggctggttaaaatttgtaaagatgcctttaagtctgcattgggacgaattattttaaataaagaagaactgtgtacttttacggcagaagtcgaaacgattctaaattcgagaccaataacacatgtgtcaattgaacctgacggagaaagagctcttcgaccaattgactttattaatcccggagcggaattgggtatatttttgtcaaaaaacgggaatgagaatgaccaagattatagaactggtcaggcatcattagaagagagactaaaagaaaggtggaaacgtacaattagagcgttagacatattttgggacaggtggaaataaagaaaatttaattatgttgagaaatcggaaccaatgggattcacaaggtcccaaaatcacaaagatcatcgggaaacaaaattgggcgaagtggggatggttgaagatgatttatatccaaggaatacttggccgatgggacgaaatgcttaaatcgaatggaataccaggggtgattagaagt

SEQ ID NO: 70302 - DNA, 60 bp, Heterodera glycines
atgaatcaaattaaagtagatcaggaagaaagcaccaaactttgggattggccattgcaa

SEQ ID NO: 70303 - DNA, 561 bp, Heterodera glycines
atgacagtggtaatgaatacgctcaactggaaactcacatttttattttttatactttcaaaaagtaattgtgaacagccgcagaatgtgccaaaagcggaagaatggcacggaagtgtttaaaaatattaaaacgaattaaaaaagatattttaagatttatttgtgtatgtctatggattattagactcggtctcatggcataatggaataaattcggcaatatttgaaggtcaaatgtcaaatgaacgggctgaaaaacaggcatttggcattatgtgcagcatgaaatatgagaagaaaatacctgccaaatttgaaaaattgcgtcaaaatttttgcgagcaaatcgaaaatggcataagtattgaacgaacattagaaaatgtgcatgaaatggtgacaaatttgctacaaaatgttgccattaatcaactaattagcgaaaatggccaacaattaacaaaaaacgaatttctgactgataaaaaccaagcaaatgtcgacaaaatttatgaacacttcaaattggaaatggtccaattttttggcgctctaatg

SEQ ID NO: 70304 - DNA, 65 bp, Heterodera glycines; identical to SEQ ID NO: 56492

SEQ ID NO: 70305 - DNA, 59 bp, Heterodera glycines
accactttccttctctagtctggctctaccaaacactcacacgatatttgaaatgctaa

SEQ ID NO: 70306 - DNA, 59 bp, Heterodera glycines; identical to SEQ ID NO: 52421

SEQ ID NO: 70307 - DNA, 59 bp, Heterodera glycines; identical to SEQ ID NO: 52421

SEQ ID NO: 70308 - DNA, 828 bp, Heterodera glycines
atgaccgctaaaattatcagagtgccgaaaatcgcatgtgatctacgcctagaaaaaaatggtgtaagtaaaaatcgtaactacgctcaaaaagctcctcaaccaattttagcgcatccaattccttctacaatcgcctttatacatcccattatgaacgctaaaattatcagagtgccaaaaatcgcatgtgatctaagcctagaaaaaaatggtgtaagtaaaaatcgtaattacgctcaaaaagcttctcaaacaattttaacgcttccaattccatctacaatcgcctttatacatcccattatgagcgctaaaattatcagagtgccgaaaatcgcatgtgatctaagcctagcaaaaaatggtgtaagtaaaaatcgtaattacgctcaaaaagcttctcaaacaattttagcgcatccaattccttctacaatcgcctttatacatcccattatgaacgctaaaattatcagagtgccgaaaatcgcatgtgatctaagcctagcaaaaaatggtgtaagtaaaaatcgtaattacgctcaaaaagctcctcaaacaattttagcgcttccaattccttctacaatcgcctttatacatcccattatgaacgctaaaattatcagagtgccgaaaatcgcatgtgatctacgcctagaaaaaaatggtgtaagtaaaaatcgtaactacgctcaaaaagcttctcaaccaattttagcgcatccaattccttctacaatcgcctttatacatcccattatgaacgctaaaattatcagagtgccgaaaatcgcatgtgatctaagcctagcaaaaaatggt

SEQ ID NO: 70309 - DNA, 202 bp, Heterodera glycines
atggattttcatcagcaacaacagcagcaacaacaacttttgttggctgccgccttatggcccccgcaacgggctgctgcacttgcgacaatgttgcgcagcaacaacggcacaacagaacacaataatggcaccaacggcatcacgagcaacaacaacaatggcacagacggagtgacggcaaatgttgccgactcgtcgg

SEQ ID NO: 70310 - DNA, 667 bp, Heterodera glycines
  unsure (1)..(667): unsure at all n locations
tcaaaattatgcaaaattgcgacaacaaactcagctgcaacagaagcaaaatgaaagcaaattgcacagcaattggctggcaagagaccaacaaattttgggccaattattgcgcaattacgacagacgcgtccgaccgccaatcgaagcgggagcaaacgaaacgggtggggatttggtcaattagcatgctaattaattaaataaatatgggaaatttattcaattaggatgtttaatagcttattaccactatagcttgttaaaaaatatttaattttgtcatttgtttgaaaattgtcgctgcgggggaaggaattaaattttaaaaatatattttcaaatagagattaagtaatttattgatgttgtttttctttgtttgagctgtccgtgtcagtgtgaacattctggtgcgcatgttaagcaacatcgacgtggtggacatggagtacagcttgcaaatcactttccgcgaacaatgggtggaccgacggcttgcatatgcacaattgggcccacaaatggcattttgaaaattaattaattacactaattaactctttttcagagtccatctcccccaaaatttctgactgttccccatgtngaagcgcgaatttggctacccgatacatttttccccactgaaaaggacgcgcaccga

SEQ ID NO: 70311 - DNA, 344 bp, Heterodera glycines
atgacaattggacaatggcacaaagtgccaacgggtaaacaacatccattatttttaattaatattttatttttttttactctctgtttcgaatggcatttcgttcattttgtctatttgatggttgtccaagatttagttgatgagcatctgtcggcagcacttctattctgctgatctgcggcataaattgctgaataaaaattcgaaattaatttaaaaatttaaatgaattaaaattgaaaattcattttgaatgttttattttttaattcatttttagatcaatttatttatttgtttgtgggttgattttgattttgcacataatgtgaatgaataaa

SEQ ID NO: 70312 - DNA, 429 bp, Heterodera glycines
atgaattttggcgttcaattcgtaaaggtatattctctgaatttttttagatcatttcttaggggtgtatttttccgatttttttgaatttttaatggaatttttcgggaaaaaacgccaaaaaaggcaccaaatcgctaaaactaatctttgtggtttttttagaatcaaggagcaaacacatgttttttggctgccttttctatcattttccaaaccgtgattgttgttgctgttgtgccaatttgttgggatgaatgatcattgttgttgctttggcacatggctgtgccgaaaatggcattcgaattggtgggaaacgcggaagcggatgacgacgatgatgaggaggaagatgatggcagattgaatgatgccaatgaatgaacgggcgcagactgttgattgcctatgtgaaatgatgaggaa

SEQ ID NO: 70313 - DNA, 158 bp, Heterodera glycines
gcacccatccaatttcattggtttcgcttcatggaccgacgtattggcaaccccaaaagggagggcccggctggcaaagtgacccttcagacggggctcaagcgggtgctggtggatcagagtctgatcggttggtcaaccgttgggagactatttga

SEQ ID NO: 70314 - DNA, 220 bp, Heterodera glycines
atgggatgccttatcgacgatggactcgatggaagtataactcgaagcgtgtaagagacttgtgcggatactcaacttggagactctacttttgggtacaaaacgactgggggattttaatgaaaaaataaaataaaatataaacagttaagtattcagcccaattctacaaaattactcttaattatggccagagtaattcaactttgtgaaaaataaa

SEQ ID NO: 70315 - DNA, 459 bp, Heterodera glycines
atgaaactcaaatcaatttggatcactgatgagaaaaaggggttggtcaattgttcaaataaattcaaaataacttaattcatcttatttctgagaatttttttagggtttttcgatatttttttgaattttaattcactttaaatccagaaatacaatattaaaaatctcaaatttaaaacaaattttactgcctccgggatgccataaaaaagctattttttagcacccaaataatttttaaaatttttatgtaaatattaccgaacgagttttgagggaacacgtgggcctggccgaggaacggaaatgtgtccgggatgttgtaaatgccattggaagtgcggatgaagcgcaaatgggtggaagaaatggcaaaaatacgccaaacaacgaaaacgagcagcacaaccgcaacgaagaacagaagcatttataataatgataattataatataa

SEQ ID NO: 70316 - DNA, 687 bp, Heterodera glycines
tctgggcgcatcggttcggggggactgccccgaactattaaaatctattttttcaagtgtccgtttggggtactcaaatttttatggggagcaaaaatccaacgcagaattaaagtacagactatagggaagctattcccgaaggattcggtctccccataaatctgggcgcatcggttcggggggactgccccgaaaacaaaaataaatcgattttttcaagtgtccgtttggggtactcaaacaattatggggagcaaaaatccaacgcagaattaaagtacaggctatagggaagctattcccgaaggattcggtctccccataaatctgggcgcatcggttcagggggactgccccgaaaacccaaaaaaaaattttttggataaaaattatttaaatgaactgactagataatatttaaaataggttatttctcttcctttcagtatccctgcaaagtttggtgcgcttctgatcagtttctgaaaaaaaagttaagcctaaactttttggcctgtttaaaaaggaattaaaaatttttaaaaattttattcatctccctttttgatagaaaaagcatcagagtgcctaaactaacatgtaaataaaatttggtgcgtttcagagcattttctggaaaaaatatttatgaattaattatgcaaaaaataaacaaataatgaa

SEQ ID NO: 70317 - DNA, 2477 bp, Heterodera glycines
atgtgccgggcggacggtggtgtttgtccactggcaattttatgccaaaaattggccttcaatgttcgccaagttggcgccaattggaggcggaacaatttattttggtaaaaaacaattttttttgccaatttttcaaattagaagtaatttttgccatcaaattaaggtggcgctcgaggtgggcatccgattgtttgacacgtcattctttggccataatcgtggacaaataagcaaagcaattaaggcatataattttattagtcttttgctaattaatgtgacattttacaaatacataggaaatataatacttaattaattttatttaaagaccgaaaattctttttcggcctgttgttgctatttgggttagggctctgaatagtcaaaattgatgcaatggtttgagattaatgtcatcaaaaatccaccggtaaacaaaatttaatcacttaaatataccaaaaataaattaattaaaaatagcgtttttggttattttcaagaaatttttgccattgtttggtctgctacgaacggatgtgtttattagtgcaaaaatcaacattgttcggcctgaaaacgcccaggatttgttcagatatgggtgggtttggattaattttttattacaaaaagatgagatttgaaaaataaaatattaaaattacaagagatggacacaaaattgcaaaaatatggatttaattctcaagtggagattaaaatttaacaaaaaatccttgaaagtcgcaatattacaaactaaattctcaaaaagcgccaaatatggcattaaaacttagaagaaaaaaatacacaaataaagctaaagttttttagtttttggggaaaaaaagaaaaatatgaaaattttgccaatttgggacttattttgatataaatatttagcaatttttaagaaattattatttttttattgatattttcataaaaatttcccaaaatctttccaaagaccagattttggcattagggattacttaaaagtcagagcgtttgaaattttatgagatgtttcaactgattgcctttatgccaaagtttcaactcattctgaaaagtacgaattgaataaggaaatatgctttttaaacctaaaaaaaataactgcaaattccaaccccctgctttagaccgattaaaaaagaaattgactgcgaccaattcaattcggttttcgattacgcacattttagcgtgaaggagtgcatcgaccaatttgatgggtggcttttttattatttatattttgttatttaggaattttaaattctctaaaattataacttttttgtttttcaaatgtttcctctttttaattaaacattttggtataaaatgcattttttagtaaataaatatttaaatcattttcaacaatttttcagctatattgacttgtgcatggttcactatgcgaaggatgcttttaaaaatgtgtcaaacacttgctcaaataacagaagtgaccgtgaagaagtgtacagtgtgttagaacattacatgggtcagtggggggtcaatggcgcgacatttggggatttataacattggataccagtaatttggggacccaacatttcggggtccggaaaatccgttaatggacaacacgtcagcggacaatccgtcagtaatagacaatctgtcagatgtccttaaaataatttgatgtccccaagtcgcaaatccccaaatgttaggtagccgagtgggtcagcatcattgatttttcgataaattctgaatttttttgttcataaattggagacgagaccagttataaaatacaaaattttaattttataaatatgctttttttattttttaagaaaatgattttagatccgcccaaaaatcttttttggctcggatttcgggattttcatttcgaactagggattagctctaatatcactgcttagtacatacaaatcccctttctcgtcaacagacattggcaccgttcggtccattggcgtggcaaatttcgactcagaccatgtcgaacacttagtcaagaacggcatacattgtgtgccggccgttgtccaatgcgaaatgcatccattcctacagcgtgacgatctgcttgattactgtaaatccgcagggattttcctgcaggtggtcaaatttggaaaaataatctaaaaagtcggaagggtcagtgaaaaatgcaccagggaatcagataattttctaacaaaatttcagacgaattttttcaaattaaattgttaagccaatttgtgttttaaaaatttaccttgcggcacaaatttgcacgaagggcacaaaagccccttaaattttttctaactataacctaaatacttaaaatttcgccaattggatttgaattgtgagtgtctgtttctcatgtttgtggatatggtgctagatggtcctagaaaagtttctcattggggcgagccaggggacaa

SEQ ID NO: 70318 - DNA, 890 bp, Heterodera glycines
atgattggcatgttatgggcatattatggaaccgccccgccccctttaaaagttaagcagttgtcactttgtttcctcatgcaacgcgccccacatgttggagcagtaattgtggaacaaacggatgatttgtttctcacaaaaaatggccgtccacggcgtgtgatgtcatgtcagcagctcaggaaactgctgaacggcctggtggccagcgtgtgcaacaacagcgaccaccttgatgaggctgatgagcactacgattacgacgacattccgccaaaatcccaagaacatcagcagttgagagtaggcactgctttgacaaaaaaaggaggaatgtcacgcaaaatcggggccttcaaaatgtccggggatttccaatctgacactgcgcgcgaatataaaaatgaagacgacgattgagggaagagactgttattcaaaatcaaatcaacggtgctatgtcgatcgacgaaaagtgcaaatttggtgtatcgaaaaaagtgcaaaatctgcaaagtttatttttactaaattaactcataacttcgcaactaaattgcacaatcttggtatcatacgatagcccttgaattgcgttattagcttgtcaaatttcaaaaaattttatttaagttttccaaaagttatgaccattttttcctgttttttggcttggacttttgaaaaaacttaatgagttttttgaaatttagtaagctaataacgcaattcacgcgcaatcgtatgataccaaaattgtgcaatttagttgccgctaagaaaagttatgagttgatttagccaaaagtttagcacttttcgtcgatcgaccaaccacgtaaatcaacatctaatttatttttaagacagaggcgaataatatcaaa

SEQ ID NO: 70319 - DNA, 722 bp, Heterodera glycines
atggaagtaaaatacggaaatgtggacaaaaacctgaaatatggaaaattaaaaactatcaatattcgaatgataccaattttgaagataactgacgaacaaaaaagttatggccattcccatttgaaattgtacgaaacgccattgtacgaactgctatcgacccatttttggtgtcatgtgaaggaatggatggatgataaaatgaagatgatgacggaaaaaaagggacgaagcggaggggaagcggggacaaaggaaggaaaaggggcgacgaataatcgcctccggcactttcccgtggtgaataataaaaacaattttagcattctgagcagcaattcagagatgtgtcctgacttttaacaatcctttttgtattattttgtttaaatttgcaagaaaattggacagttttccaactcaagctaaatttcttgggcctagtttgatgcctaggctttgttttgtaaaatttataggcgtcattgaaaattcaaatatttaaaaaatttaaagtaatctggctttcacagggacccaaaattatatagtatttaaaaaaaattcatcaggaaagtaattataatgaaaatgcattagtaatttatccgtttaaaatttgtgcggtatatttttatttgtttccaagaattcgtttgtccatttttagggtcttcgtgaccagccaatggagtcgagttagttgctaatagttaata

SEQ ID NO: 70320 - DNA, 4521 bp, Heterodera glycines
  unsure (1)..(4521): unsure at all n locations
tttctcgacattcgtctcccatcctccgctgctgctgctgctgatcagcaacgacagcccattttcgggctatcaccagtgtgcgccagcgagcagcacaatttttgcaattgtaaaggtggtaattctgatcaaaaaatgccgaacaaatcacttacaaatcgctgtttttgggtcccaactcggcactgtcccatggcgcacgtcaaaaaacggccgaatgcgaactgtccgtctcgccacagaatggtatgtttcagcaacagttgaggagatcagagcagaaagcaaatccaagaacagatcagggaaattcccaaattcccaaggacattgttgacaaaatgacaaatttcatgtcaatttcaacagcaatcttgtgctatttaagggcaatcccattaattttgggttcgatttgtttttcgctctcaagggctaatacttgtttcaaaattttactaaaaatattcagaaatttctattttttaagtcttaaaattttagcttgcaaaacaaattaaattctattggtaacagaaaaaaagaaattttatagttttgaattaatatccttggcctgttcctgctgatcactcactcactgatcagtgaagattgcaaataaatttgtttcccagcttttcatctgtcgcgtgtcgccgatcgtctcgcctttttcattgtgcccaattttggcccccgttttcccatttcggtgctactgcaaagtgaacaagtatattgttgttctgattttttggcccctcgccttttgcccatatcctttttttttgggccataccccacncgttaggggtttcatttttcttacagggattaagagtctggtgctctggtgagcacttgtcacttttttgagccttaaattatttttcgaagcgattgttttttatgtaatatattcaaaaataagtatttgtttatgtaaatccgggccctgtggttagttgctaaccttgtagcctgcagtgtttgtctcttgggttccattctcgaacggaatagatttttttcatattttctttacattattttaattaataaataaaatttcaagcttttatttttctttcatttttaaacagtctaaaaacccactaattaaccaaatatttggccgtttttttgacaaattcagttaacaaattccactcaaaatttattcccggcttttttcccggttttcccagccaaaaattcccggtttttcaacccgaaaggtcccggttccgggtttgcccaaaattccctgtcccgtggcactctattttaaataataagattaaaaaaaaatttaaaatggtttaaaaaattggaaacattttaataaatgcgcgatccgcgattcgcggcatttttttttgctcgatccgcggccgcggaaattttaatgcgcggccgcgggatttttctatgcgcgctccacccctggggcctgagtgggttccaaaataattttataaaattaaaatttaaaatatttgtttattatttattttaaacatttattccccaattttattttgtatttgttctgttcttaagcttttgcgtgcacacaaattggttatgatgactgcttctgatgtgtttgaagcgatgttccgttttgatgaaaaaaatggaaaaacgaaaaacggtacaaatattattattagggcttccaattatatggaaatccatatttttttcctggactgtgggaggtctgaaacgcacgaaaaacatgttttttgcttggtttgaagcgtctaggatgactttccatatccatatttttccatatttcgccatttatgtccatattttggcttttttccaaaaaacctctaataaaacggcccccatcagctaagtgggatttcgacccttaaagaccagaaaattttccaaaaagtcattttttagcgaaatgttgtcgaaaaaattgattaaatttaaattttcttaaaaattggttaatttatgtcaaaaataagcaaaaatggaaattttcgatttttgggtcgtttttctccagaaattgcttgttttcttctaaaaacgagttcttataccttatttaaccattttagatgtattttactagaatttatgaactttaaaattttttttggaaatttacccataaattcggaaaatttatgtccatattttgcaattttatgtccatattttgatattttggcaattttatgtccatattttgcgatttgttgtccatattttatggccatatttcgcgattttatatccatatttttggacgccctaattattattattattatgtgatgaaagggtaaaattaaaaataataaaaaaactttttaagcatctgccgaaagtgccgttgtgaaagtgcccgacattgaagttggtgcgttcaaagtgatgctcagctttatttatgcggaagattcaaacggactgaatggacacaacgcaatggcagtgctttacgcgggtgaaattttttgaatttgcccttaatatattattatggtacttctgtgttttgctacccctccccataaaaatatcatgatcccgacaaaggaaaacacttttctacgataattttatgcacttatcaagtccgctataaaaagtactaaaatctatgatttgatcagattttcatcctgtaattttgtcggctcaagtccagtttatgcgtcccatcgacttttatgcgtccaatcaatttttttgtctaattttagtgcatttacaattttccgtcattgactaatctatttttacaaaatttcacaatagttcaaactatacggggtaatttatgcgaatataacgatcggtttccgtttcgtagctatattcgttaacacaacgacctttgtcatagatgttgttattgtcaggacaaattccgcaacaatgccaaggttgcgctcttcgatatccgaatttgtcaatgataaagccttgccattccatacacaaaattaaagggcaggtcagcagtaatatagctcgtcgaaacatagcaaccggagtttgaagaatggagaaaaatgccggctggctgttttttgccaacgaacggagagaaaaagcggctagtattggtttttgccgacaaattgtgagaaaaaggccggctgttacttggctattatagtgcattttttgttttaatggatttattttaatgaaaaatttgattggacgcataaaaatttgattggacgcataaaagtcgatgggacgcataaactggacttgagccattttgtcaatgatttaaaaaaagaaccagtcttctcaaatatcaaccgattctcatagtcgagatgaatcgaatggtacttgtttcagggttcttcgatgtttctttcaaaagttctagcccaacaattggcttttttgaaaaatcaccggcaaaatcatatgatgaaagtcatagataaattttatggggaggggtagcaaaacccagaagtaccttattattacatggtttaagccaaaaagtacaacatctccttgctggacaatgcctgcttggtcttcccaatctctcaattgaacaatgtgttcctcgcttatgaccaagcttgccttctcaacgagaatgtatgaaattttaaggcataaatgcttgaaaagcaaaaaaaaaggactagattttcatccccttacaaatgagatgtacccaagtgacgttgggacttccgaaccaaactttcagtttacccccttttgtattataaaattttttttttatatcttgaagagatatgaaacctttccttttgttccgaataattttatgtattttgtttttgtttaacatcaaattaggctctatggaattttcatgatttttttttctgtgaattttcaaaattgatcattaaagttaggcatactttcgcataaactttattttttcatcatctcacttgcattaaatagtatattgaaaatgtttaaaaagctaaacaatttaaattggttcggcaaattttacaaaatttcaccctttttcaaaatttccgtgcgggtgtgttaaacattaactatggctttaataatcgaaataacttagccaaaatttctttctttagaattttgcccttcgctgcttggattacattgatcgaactgcggaaactttgttccgttccgatgcatttttgcaaattgatcagaatttgttgtctaaaattcttgaacgtgaccaattgaacattagcggggaactctcaatttggaatgccgtaagtaaaaatctgagcccagaattttggaaaatggcaaaaggggttggggttagaaacaggggctttgctcaaaaattcctgactttgcaaaaatgttatttcttgcaggcactccgttgggcagacgaaaaatgccgccaaaatggcaccgaatgttccgctgagaatcgtcgtgccgcacttggcccggcactgttcaaaattcgttttccactcttcgcaaaagagcaattttcagagaaaattg

SEQ ID NO: 70321 - DNA, 69 bp, Heterodera glycines
atgtcaatggggccaccctcattcaccatgttcggtgatgcattattgtcactgcacagatcagcaccg

SEQ ID NO: 70322 - DNA, 88 bp, Heterodera glycines
ccaacggatgccatcgaagcgtgggccgaactcgtggaaatgatgttcagcaatgtccgcgatggtctgtcccatttctcatttgacg

SEQ ID NO: 70323 - DNA, 141 bp, Heterodera glycines
atgcaaagataaagaagatgtctcataatcgtgatctgtatttattgatgtattgtacatttgtatgcatatatcatttgctgtgtattatcactttatttccatctgtgttccgaaataaattgaattgatggtcattaa

SEQ ID NO: 70324 - DNA, 87 bp, Heterodera glycines
atgtggcatccgtcagtggacaatccgtcagtgaaggacaatccgtcagtgaaggacaatccgtcagtaatggacaatccgtcagtg

SEQ ID NO: 70325 - DNA, 445 bp, Heterodera glycines
ggccgttcttagttcgtggagcgatttgtctggtttattccgataacgagcgagactctagcctactaaatagttggctcattgcttctgtgggcacaacttcttagagggattttcggtgttcagccgcacgaaattgagcaataacaggtctgtgatgcccttagatgtccggggctgcacgcgcgctacactggcaaaatcagcgtgcttgtccttccccgaaaggggttggtaaaccggtgaaaatttgccgtgattgggatcggacattgcaattattgtccgtgaacgaggaattccttgtaggggcgagtcatcaactcgctctgaatacgtccctgccctttgtacacaccgcccgtcgctgcccgggactgagccatttcgagaaattcggggacggttagtgttccggcttcggtcggtatgcagactggaaccg

SEQ ID NO: 70326 - DNA, 1012 bp, Heterodera glycines
atgagcgctaaaattatcagagtgccgaaaatcgcatgtgatctaagcctagcaaaaaatggtgtaagtaaaaatcgtaattacgctcaaaaagctcctcaaacaattttagcgcttccaattccttctacaatcgcctttatacatcccattatgagcgctaaaattatcagagtgccgaaaatcgcatgtgatctaagcctagcaaaaaatggtgtaagtaaaaatcgtaattacgctcaaaaagcttctcaaacaattttagcgcatccaattccttctacaatcgcctttatacatcccattatgagcgctaaaattatcagagtgccgaaaatcgcatgtgatctaagcctagcaaaaaatggtgtaagtaaaaatcgtaattacgctcaaaaagcttctcaaacaattttagcgcatccaattccttctacaatcgcctttatacatcccattatgagcgctaaaattatcagagtgccgaaaatcgcatgtgatctaagcctagcaaaaaatggtgtaagtaaaaatcgtaattacgctcaaaaagctcctcaaacaattttagcgcttccaattccttctacaatcgcctttatacatcccattatgagcgctaaaattatcagagtgccgaaaatcgcatgtgatctaagcctagaaaaaatggtctaacaagggaacctcgcgaactgtaactcggaaaatgggtataaatttggtaccattcgatagagcagggtcgacttctattgtgaatttttaattttacgtgcctatagcgaaaaataaaaaagttatgaggcctcaaaaaccctaattttcccctgtgttttcccttcagtgctggtggtcaagtggtgcagaatggcgccatggtgactggtggttcgactccgcgtgggttcaacaattcttattgtttttattaatcattttaaagtaccaaaaagtggtcaaaaacaagtttaaagcacgaaataattaattacaacggtgtttggcgaga

SEQ ID NO: 70327 - DNA, 56 bp, Heterodera glycines
tgctggtggtcaagtggtgcagaatggcgccatggtgactggtggttcgactccgc

SEQ ID NO: 70328 - DNA, 358 bp, Heterodera glycines
atggtaccaaatttatacccattttccgagttacagttcgcgaggttcccttgtaagtaaaaatcgtaattacgctcaaaaagcttctcaaacaattttagcacatccaattccttctacaatcgcctttatacatcccattatgaacgctaaaattatcagagtgccgaaaatcgcatgtgatctaagcctagcaaaaaatggtgaaagtaaaaatcgtaattacgctcaaaaagctcctcaaacaattttagcgcttccaattccttctacaatcgcctttatacatcccattatgagcgctaaaattatcagagtgccgaaaatcgcatgtgatctaagcctagcaaaaaatggt

SEQ ID NO: 70329 - DNA, 668 bp, Heterodera glycines
catttcaatcactggcactcaattctcctacatttcaatcactgggactcaacccaccaacatttcaatcactgggactcaacccaccaacatttcaatcactgggactcaacccaccaacatttcaatcactgggactcaacccaccaacatttcaatcactgggactcaacccaacaggatttcaatcactgggactcaacccaccagcattccaatcactgggactcaattctcctacatttcaatcactgggactcaacccaccaacatttcaatcactgggactcaacccaccaacatttcaatcgggactcaacccaccaacatttcaatcactgggactcaacccaccaacatttcaatcactgggactcaacccaacagcatttcaatcactgggactcaacccaccaacatttcaatcactgggactcaacccaccaacatttcaatcactgggactcaacccaacaacatttcaatcactggtactcaacccaccagcattccaatcactgggactcaacccaccaacatttcaatcggactcaacccaccagcatttcaatcactgggactcaacccaccaacatttcaatcactgggactcaacccaccaacatttcaatcactgggactcaacccaccaacatttcaatcactga

SEQ ID NO: 70330 - DNA, 408 bp, Heterodera glycines
atctcccttttcgatagaaaaagcatcagagtgcctaaactaacatgtaaataaaatttggtgcgtttcagagcattttctgaaaaaatatttatgaaataaaaaaatcgattttttcaagtgtccgtttggggtactcaaacaattatggggagcaaaaatccaacgcagaattaaagtacagactatagggaagctattcccgaaggattcggtctccccataaatctgggcgcatcggttcggggggactgccccgaaaacaaaaataaatcgattttttcaagtgtccgtttggggtactcaaacaattatggggagcaaaaatccaacgcagaattaaagtacaggctatagggaagctattcccgaaggattcggtctccccataaatctgggcgcatcggt

SEQ ID NO: 70331 - DNA, 622 bp, Heterodera glycines
actggtcgtatttcgacgtggaggaaaacaatgtgaagccgtacaaaacgccagcaatgagtggaggtgggggagaaagggaaatggtcaaaaaagggggagagggaatgtgaggagacaaagaaatgagaaaaagaaaacactcatcggttacgccaatcactgcacttaaaggccttttggcggtgtctcgcgattatttccgtgagattggcgagtacgacatgggcatggaaatatggggcgcggagaatatcgagttctcaatccgcgtttggctgtgcggtggcgaggtgctggtcgcgccgtgttcccgcgtcggccacgtgtttcgcatgcgccgcccgtaccgcggcaagccgggcgtcgactcgagcctgtacaactcgctgaggacggcccgcgtttggttggacgattttgaggttggcgcgttttttgtcccgccccccacgcagcagcgatttcagaaaaaatacaccgcaattcgaccagcagcaaaaagaaccgatcccggcgatttggcagaacgattgaaactgaaagagaagctgaactgcaagccgttcgaatggttcatcgaaaacgtggaacccaaattaaagccatcccacgacgagct

SEQ ID NO: 70332 - DNA, 436 bp, Heterodera glycines
atgggtgagcgacaaaatcggaccgacgagaaagttggacaaaatggcacatccgaagtgagtaacgaaggacaaacggacgaaacgaatggatatttactcgagaataatcttgaaatatcacaaaaagtacacaacgtttttgaaaaggtgcgctgagattgacttctccaaagtgcactcaaaggtcactgtggtggtcatttaccacaatgaaatgctgtcagtgctcgtcagaatggtaattgcagtggaaagaaaggccgaaaaaacaaatgcattcgaatggggcaattaattatttaattaatgggccaatggatggctaatggacgcacggagaaaacgcaaaaattcaaacggatgttaacaacttgccaattgtttacagatcaactcaatcttcaacgaatcgccggcacatcttttgactgaa

SEQ ID NO: 70333 - DNA, 817 bp, Heterodera glycines
gcccaacccaaggaagtgatgctccccgtccaattgaacaaaacgcgggcagcggctgctcgtaacctttacgggttggcccccgagcagttgcttgcctacgcttcgtatatgccgcggatgccgcctttttacgggccgaccgtgtcttcgcatggccatcaccacgggcttttgaccgcttatccaacagtcaatccaggaagtaaacaaactgatattaatggtccgccatagcaaatccgggctcattttagtgttcggaaacgggttccctcatcctccgcatcagccgggcactataacagggacaaacgcatttggcatggcaacgtcgggacggagcagttcaaacaacaacggcacgacggggctgaatgcgcgcgactttgcagcggcgcaattggtggcacaacagcaagcagtttacgaggcagcaatggtgggaatacatgtgggaagcgaacccaaaataaatccaagttattgtcaggtctacgctaatcagctgagttcgttggctgggggcggtgcgggcggcgaattcggcggtggtccctcaacggcgtcacctttcggaggccgcggcggtcatcaccagcacatgccccagccgcatcagcagacggcctttgtcacgtccgctcctcaacaatcgcacgcccatcaccaccatttcgcttcgctgcctccgtccgtgttggccgccccgcccgtccacttccatcaccaccaacaacagcatctcccgccaccaccccccggcggcactccctccggcggtgtcgtaccactaaactttggcaaatcttcatga

SEQ ID NO: 70334 - DNA, 1259 bp, Heterodera glycines
atgagtgaagacggaggtgaaaagaatggcgaggaggcgaacagacggaaggataatgagaggggggcgaacgaaaacgaagagacggagggggaggagaaggacgaggaaggacgggaggagagcgatcagcaggacgacaacttgacagtgcagcaacggcttcagcaccaggtggacgcacgacgggcaattcgggggaagttgaattttgggggttgggtggaattcagggaaggggtttgaaccacgtcgaattgcatcatttgacagttacatatcccaatattttttaattccgccatgttttgtgaaaataaaactaaccatggcttcaaaatgttaagcccaactcagtgccgaagaaacaatcggcgaaggaatgtttggatgacaaaacaaacaacaagcagaaaacgccgtcagcagaacgaaagctcggcggcggcagttcgagttccgctccattgactgaagcgacggatgcggaatcgcaggcgacgacaacgaatgtggacgaaagtggggagagcgatgcgggagggcagcagaacgagccggggttggtgggagggaggggagagagggcacggcactcgcggcactctgtgatttcaatctttgtgggtttttaaagaaaatctttcagaaaaatcgtttatcggtggcttgagttggcagacctcagccggtaattgaaatcgttttttaaattatttttaccattgctttgcagagggccttcgtgattacttttgcaaatttggagaggtcaacgaatgcatggtgagtcgctccacaataaaagaaaactatttttttaaatctagagtaatcttcaaaaattatcattttttgattttgaatgtccctttttttgcaaaatcctctaagaattttgaaatcaaacaaattacccgggaaacaatgtgaggggaagggggctttaaatacacacaatcaatcagtcagtttagttccattgcttttaggttatgcgcgacccgaccactaaacgggcccgaggctttggttttatcacatttgctgacccaacggcagttgagaaagtgttggccaatgattgtcatgagttggatgggaaaaggatcgatccgaaagtggcatttccaaagaagcagcagccgaaaatggtggtcaaaacgaagaaagtgttcataggcggtctctcctcaaattcgacgctcgacgacatcaaagcgtattttgcgcaatatggaaaggtgacaaaggactaa

SEQ ID NO: 70335 - DNA, 56 bp, Heterodera glycines
actatagagaagctattcccgaaggattcggtctccccataaatctggacgcatcg

SEQ ID NO: 70336 - DNA, 153 bp, Heterodera glycines
atggcgcattataatcgacgggctgccgggaacgccttagtgagttcatggagaagtgcagattgatgtttccatcctcaaattccccaatttttttagcgcgggatgcaaattcacggcactgctccatttcccggcttcgtacccaaatga

SEQ ID NO: 70337 - DNA, 63 bp, Heterodera glycines
atgagaaaaaagatgtttgatagggccagacaagagaaggcaactgttggtaccaagtttgcg

SEQ ID NO: 70338 - DNA, 232 bp, Heterodera glycines
agtgaaagcatctggagtgcctaaaataacttgtaaataatttttggtgcgtttcagagcagtttgtgaaaaaatatttatgaattaattttgctaaaaaaataaaatagtgaagctttaaaaattaataaaaaattttaaattcagaattactggagttagcatcatagcagtgcttttccttgtctttttgatgccctcgcaaaatctggttcgcttctgatcagtttat

SEQ ID NO: 70339 - DNA, 146 bp, Heterodera glycines
gcttgggcatatcacaccgcgcgccatgcgcaaagctttaaatcggccgattgtgtctcagatttgttgtcaaaaatttttcctgattcaaaaattgcggcaaattacggatcaaaacaaaataaatgcgcagcaattattacaag

SEQ ID NO: 70340 - DNA, 1017 bp, Heterodera glycines
atggacagcaaccaaatcaccagaattttaacgtcgtccgaaataacgagccgcaagttccttggatgcttctcatgcgatcaactacctgagccgatggccatacgatttccggcatcattgattgttaatttggaccctcatcagtttcccggctctcattgggttgcaatatttgttaatggattaaataagaaggtcgattactttgatagtctatcgttacccattaatgaattggtagttaaatcctttcttaatgtctttcctggaatttattgtaaccagaagacctatcaatcagtttcatcaaattcatgtggacatttttgtatttgttttggttattttatattacttgcactaactgtcaccctttttctatacagatatttatcatctcataatccagaaatgatcgaaacaaataatatgctgaattttcacgataaaatgacaataatatatttttatatatggcttgaaaacatttagctctctgcctgcaagatctaatgagtggaaaatacatgagtatacaatatattttcagaaagtgtcaacagatttttggaatatatatttgcaatttatcaacaattttgagaagtgagttagaaatgataaacttcacgattcaaaccaattttcgttgctctaattaaccgcgataaaaacattcgaatcaattaaatagcttgtgagataataaggtttatcataaaatttcatttaaaaataaaccctcaattattggtatgaacgatactttccaaacatgcacgcgttttgctttagctatttatcatcgggcttgtcaatccaaagcgaaacaacaaagatgctgttttgaacgaataaagggcataggttattttgaagaagtgtcaaagaacatgcagcaataagcctgcaaaatctaataagtggaaaatacatgagtatagaatttattttcagaaagtgtcaacagacttttggaaaaatatatttgcaatttatcaacaattttgagaa

SEQ ID NO: 70341 - DNA, 1297 bp, Heterodera glycines
atgtttggtaaattcttaccctgtttaaatatttccaaaatttgtaatgttcttgaattatttcccgggttaatagtttcagagtattatgtaagttttataaactcttcccctttatacaattattataaaaatagcaactaatcacaagcttcaatatatatacaaaagccttatttttgaaaatatattaataatcagaaataattaaattagcatggaagccaaaattcaaaaaacagcacacaaaaatcgaaagattaacaaaataaaaaaattaacttttatctaaaatgataaatgcaacagcaggacaaacaatgcaacgaaaatttaagaaaaattattattattgaaatatttatattatattgtaagcaaaaatcagttagactaatttataatccactaaaattttatgaaaaaaataaatcttaataattattatgaacacgaagaaaaaatgtattttatcaatgcactaaaattaaaaaagaataattaatttaattgaaaaaatgacaattgtttaatattcaattgaaaattaaatttgcaaagctaaaaattcataattttattcataaggtttttcttaattttcatcaaattaattgaattagatttgatattagatgagggagaaagttggaaagcagttatttcttacaatatatgaccaataaataataaaaaaaattcgtaagtggatattttacgccttctcattaatgtcattaaaataatataaaaagataaaatattacaaccttgaatcaataaatataaataagttgtttgtgtgtaaatataatgaatttaaaaaacaattaaataaaaaagacaaagaagctcgaactatttaagttatgtggcatgctttggaacgagattctgagcataataatgaaaacaaataaatgcggaatagtatcagcgaatcatagaccatgactgtttaataaaacttttttcaaacgtaaactaaaaaacctttaataaaattttttaaatcaaattagaaaaaaactagactaaaaaaacaaaaaagaaaaaaaccataaataacaaaaaaaatgattgattcaatattgttgtttttgaattaataaagattaatcgatttgtaaagttttcttaaatcatatttttatagctaattcaataaaataacaattaattattaacaaactttttagttgttatttattacagatttattcctaaagtgaaactttgaagccaaaaccagtattgagattaataatttttaaaatctgaaattcttaccaataaa

SEQ ID NO: 70342 - DNA, 78 bp, Heterodera glycines
atgagttcaattagtcaaaacatttcgcccgaagagatggacaaaatccaaactcttcgtgaaatggtcaaagatcag

SEQ ID NO: 70343 - DNA, 449 bp, Heterodera glycines
  unsure (1)..(449): unsure at all n locations
ctccctttttgatagaaaaagcatcatagtgcctaaactaacatgtaaataaaatntggtgcgtttcagaacccttctgaaaaaatattgaagaattaattttgcaaaaaataaataattaatgaaaaagtcagaatttcgaaaaattttaaaaacaacaagcgttggcattttttcaggttaagttagtcctttacaatggagaaggcctgcaaaattaggagagattatatcgattttagtgcgctaggttcgatgaaactttttaaaatataagcctaaactttttcgcctgtttaaaaaggaattaaaaatttttaaaaattttattcatctcccttttgatagaaaaagcatcagagagccttatttaacttttaattaacatttggtgcgtttcagagcacgttctaaaaaatatttatgaattaattttgcaaaataataaa

SEQ ID NO: 70344 - DNA, 54 bp, Heterodera glycines; identical to SEQ ID NO: 53113

SEQ ID NO: 70345 - DNA, 174 bp, Heterodera glycines
ccaacgcagaattaaagtacaggctatagggaagctattcccgaaggattcggtctccccataaatctgggcgcatcggttcggggggactgccgcgaaaacaaaaataaatcgattttttcaagtgtccttaaagggactcaaacaattatggggagcaaaaatccaacgcag

SEQ ID NO: 70346 - DNA, 657 bp, Heterodera glycines
gcggaaggaacgaaatgttttctgcgaaaagcatttcccaacaaatgcgaatgccgttttcgctgtggctgacaatgaaccgcttgaaacacatcccaaaactccaacagcggcccccgggggaatgaccccccagccgaatgggagagtatcgccggtggcctgtaatatcatacaaaaggggtaagaccatcaaaaggctaggaatctgtttcgttaagtattatgtaacaaagttaccttttaaggtcggtaaaggcgaaggattgggacagaatagtgaaaatcacacaaacgccgttgtctctgcgaaaaagtatgggcgacagcagcaaatgcccactcagacaacaacgctcttttgaacgagctcggactattttgtttccttgtgaaacgacaccgcaaaccacgggcaaaaaaattgttacgcgttcagttacgaaaaaattggacagaaaaaaagaggacgagggacaaacgacgccaacacgaaaaaagacggacgaagacagaccaaatgagaagtgcacgccaccaacaacaaatgtggacagacccaccgcacttccattgtccattctgaagtcggacaggaagagatcgcgtctccccacggactcattatgtatttctggaccaaggacaattcgtatc

SEQ ID NO: 70347 - DNA, 903 bp, Heterodera glycines
atggaacatcagagtttcccgtctaaaaaacttccgagtgaattagtctcagagctgatcatgtgcctcccaatgatgcgattgtttgacggaatagcgggtattaatgactttttattttattttttgtaattaattatatagaaaaaaatcgatggtcctcgaagattgacccagttaattggaaatttgagattttgcgtcagtcaagagaaaaggagtacaataaattcaagaatcgactggttggtcattagtttccatacatttttgaaaaaaattttaagtctgtcattaatgcgaaattcaattctgcttgtgaagtgaggaaactgaactttgagcaagactatttggattcggcgtatttccctgtcaatgagcaggtattttcggccgaattctttatggaaattctacagtatttatgctttggaaaatacaacaaaaatttggctccaaacgacattttaattcatacgacaaataatgatgtaaggaagagagataaatattattttggaattgaatttttaagtgcgctgcggtctcgaaattatgtgggcgggtgattgagtacgtcgttgggtcatcaaacccattcagcgtccgcaaacgcatcagcttgggcacaatgcagccaaccgatctacccgcatgtctgaagcagccggcgagagtgatggtgcgcggtggaatccatcctcaaatccgttcagatgaaaacgaagtctaccacctctacaattcaaatctcatgaagaaagttggatacatttcgatgttctaccatgtacgaattggtgattgtgtttggctcagtatagacttggtattgtattattaaaagacaaatctctttcaatttatttccgattttattttattttgtcgcctaataaa

SEQ ID NO: 70348 - DNA, 490 bp, Heterodera glycines
atgattggacttgcgaccaaagaaatgccattgtacggaagggttggcacttatcctaacagttacggacaccgaagcgatggccttttttgggtcaacggttcctgccaaattggcagtcaaagtgccaaatttggcatcggagatgtcatcggctgtggcattattttggcaacgcaccaaattttttcacgaaaaacggacaccgtttgggttgacaaatgactaaaacggcatttttaatgggattttttcagattccgtcgattttgtggcactttttccttctgaagatggccctcttttcacttgtgtcactttgcacgattccgaagacaaaattgaggcgaattttgggccggaattcaactttaatcttaacactctctgaagaaacctttaaaaaacataatccatttgtatttttcattttgtaaacaaacggctgactaaactcggcacgcatgccctcagacgcctagttaataaa

SEQ ID NO: 70349 - DNA, 1620 bp, Heterodera glycines
atgtcttcaaatttgatgggttcgccaagctgctttttccatccaacagctgagcagggtaagagaaattatttaaaaaaaaattacgaaaaatggaaaatatttttttaaataaaaataaatttaaaataaacattttatcactacaagcagcagtggcagcagaagaagtggacaaatatgaagtgttcagttggcacggagatttgagcgaccaattggcagcacaatttttggtcactgatcagcagctgttgaaggtgggacaattcaaaacggacaaatgagcaaagagagaagaggacaaatgagcacagagagaagaggacaaatgagcacagagaggggaggaagggggaagagaccgatagattcagtaccgggcaaaaggccgacttattccgagagcaattaggaggcattttgccaaaaatcattcaattaatgagtgaatggaaattggaaattatttagtggattgaaaatattttttaatttaaggaatgccgcgaaaaacttgccaactccgaattgagagagacgaaattgctgtgcaaaaacggggaattgaatgcagagaatgtgagaaaaataaaaaataaaaatgaattatttaaaaaagaaaaatggcaaagaaggggtaaaaaacagaaactttcaaatttttaaataaaattcagaaggcgcttaaagcagagttggagaagcagaagctgatgacggaacacagtcaaattaaggccaaagtggacaaaatggagcaggaaaatcagcagcaattggacaaaaaatacggtaggaaaaatttaaaaaaaaaacaaattatttccattaccgtattcggtcctactgttaaaatgaatatttcaaaatgatttcagtttcattcgatgtgttcaatgcattggtggagcgaatcaaacgtttggagaaccagcagctgaagcagaacaaagaggaggacaaaaagggtaaaaataaattaattaacggaccgaactttacatatattgattagttaccaaattttaaattaacattaattagctaatcagttccaattattttcatgttttgttgttcaattggatactcttttagcagaggaaaagcagcagaaggaaagtgttggtcaacagaaattggatggaaaatatgccgtggtggacaaaaacaatgttttgggtgggcacaattggcaaattattttaaaaattgtcattaataaattggcgctatttaaaaaatgcggtttttgagagggggctaaaccaaggttctgttctgttgaattttaacctgtttcaaaagcgtttattagtcaaaatacactatctaaatctaaatgttaatgagttaatttaactttttgaaaatgttatttgaattgctttagtgacgtcatcgggcgaccaatcgccgccggcggttgtctcagcgaaagttgcaaaggtgggaaggaaacataattatttcacaaatgccattttaatttcaggaagtgcctaattcgaagaaacaaaatgattgggatgccaaagtttgccacaaagacatcgaaatcattggggaaaagcaattgacgatcaattgcaagggcaacagatttggtaattaaaa

SEQ ID NO: 70350 - DNA, 1263 bp, Heterodera glycines
atgaaaaatcactatgacaaacacccaaaagtgacagcagacaaattcaaaatcggcgagagagtaatggtcatatttccgggcgtaaatacccgcgcagcccaccgaaaacttctttggaatcagttcggtccatataaaattttggatatctctgattcgtcagcaaaattggttccagtcgataaaccgaattttgaacctataagtgttccaatcgagcggctagtgaaagttccggaaggtgtaccggatattagtactctccctcggggtaaaaatcccttcaaaaaccaattgaacgcattgctgagtgtagtttgtttggtgtatcgtgaaatggatattgagacgtgtgaagaaaatggacaatttacacaaacaaaaagtgttaaatttggaaatggaaccataaaaatggacgaatttcaaaaaacggaaaatatgggccagctttttattgggcaattgaggacaattgcaaattcagctgacggcgaggtgagagtgaaggacaacgctgaccatcctttggtctgggagatgcaatgtggcggactcggcacggaacatcgaaattgtgtccaattaacggctgccgacctcgacccagtgcttgagaaggccggcctaggccttaaagtgattggaagagaagaaaagatggaaaatgttgaaggaaaagttggttttaaggtgatcggtacgccaatgaaggctctcctcagtaatttcttactgaaatcgggcgcagtttcatcagtcgccggcggccaaaagttgacacaacttgtgatcagtgcgcccgtcggcttcgaactgatcgcttacagtggcggacgcgaagacctggtgaagaatggctttttcccgacggaaaatgacattgagagtgcctttacggcatgggtcgaacgatgtgcggtcacgcgagagaagctgatgaagacgggctacacaccaattgaagtgccaatgccgaacgtcgtcgccgaattgcccgaatcagagaagatgggatggcacgaaatgctgaaaaaagccaacttcattcttgaaaaagtgcgagccacaatcatccaccggaaacagctgttggtcgagacggcgacagtgatcatcggcgattcctcagccaaacaactgatcaaactttggcccaaatcgcaatttatcggtgccgaaaatggaacaatcaccgaagtgatcagggcgtttgacggcgccattctctcctccaaagtgaaggttgccatcgtgatg

SEQ ID NO: 70351 - DNA, 711 bp, Heterodera glycines
cctagttctgaccgtaaacgatgccaactagcgatccgccggcggatttattcgccctggtggggagcttcccggaaacgaaagtcttccggttccgggggaagtatggttgcaaagctgaaacttaaaggaattgacggaagggcaccaccaggagtggagcctgcggcttaatttgactcaacacggggaaactcacccggcccggacaccgtaaggattgacagattgatagctttttcatgattcggtggatggtggtgcatggccgttcttagttcgtggagcaatttgtctggtttattccgataacgagcgagactctagcctactaaatagttggctcattgcttctgtgggcacaacttcttagagggattttcggtgttcagccgcacgaaattgagcaataacaggtctgtgatgcccttagatgtccggggctgcacgcgcgctacactggcaaaatcagcgtgcttgtccttccccgaaaggggttggtaaaccggtgaaaatttgccgtgattgggatcggacattgcaattattgtccgtgaacgaggaattccttgtaggggcgagtcatcaactcgctctgaatacgtccctgccctttgtacacaccgcccgtcgctgcccgggactgagccatttcgagaaattcggggacggttagtgttccggcttcggtcggtatgcagactggaaccg

SEQ ID NO: 70352 - DNA, 103 bp, Heterodera glycines
ctcagcaaacttagaacacattttctaatcagagaacaaatggacggcaccactcaaatgatttttgatttaatttgcaccaatgataaattctacagcaaaa

SEQ ID NO: 70353 - DNA, 135 bp, Heterodera glycines
cagatgatggaattgttggcccatgccaatgttaatgaattgcgtaaaactaacgaagtcactgactttactcattgtggtcaacaaattgaaagccaaactgatgaaagcgaaacagaaagcaacagccaatga

SEQ ID NO: 70354 - DNA, 1078 bp, Heterodera glycines
catttcaatcactgggactcaattctcttgcatttcaatcaccgagactcaaccctccagcatttcaatcactgggactcaattctcttgcatttcaatcactgggactcaaccctccagcatttcaatcactgggactcaattctcttgcatttcaatcaccgggactcaaccctccagcatttcaatcactgggactcaattctcttgcatttcaatcactgggactcaagacaccagcatttcaatcaccgggactcaattctccaggacttcaatcactgggactcaagacacctgcgtttcaatcacccggactcagtttttatgcattccaatcaccgggacctaacctcacctggtccttcggcatcgcaatcatcgagactcaattctgcgaaattccaatcaccggaactcaattctgcgacattccaataactgggactcaaccctccagcatttcaatcactgggactcaattctcttgcatttcaatcactggtcaattctcttgcattccaatcactgggacctaacctcacctggtccttcggcatcgcaatcatcgagactcaattctgcgaaattccaatcaccggaactcaattctgcgacattccaataactgggactcaaccctccagcatttcaatcactgggactcaattctcttgcatttcaatcactgggactcaattctcttgcattccaatcactgggacctaacctcacctggtccttcggcattccaatcactgggactcaattctgcgatattccaatcaccgggactcaattctgcgacattccaataactgggactcaactaaccagcattccaatcactgggactcaattctccatcattcctattcccgggactcaatcccaccagcattccaatcactgggacacaattcttcacttttcacggattcttcggcatcgcaatcaccgagaactcagttctccgacattccaatcactgggactcaattctccgccattccaatcaccgagactcaatccttcactattccaaacaatgaactcaatgttacggattcatcggcat

SEQ ID NO: 70355 - DNA, 917 bp, Heterodera glycines
atggcaatcccagtctctaatgcatttgtggaacgagctttttcactttgtggtgcccaatggactgataaaaggaattcgctcgaagtagaaacagtgaaaagtctggtgcaagtgaaagtgaattttgatcaaaaatgttcggaaatgtttaaatttcttttttcacgtcctgaattgctcaaaaaaattgctggaggtgagaaatatttcgtaaatgctcattttattgaataaaatgcaaaaacaagccccaaaacaacgttttaaaaatgtacttaattttgaccctaaaaacttattttttactactgatttacttatttcggaaaattttcgatgcgacctctggtataaaaatatgtacatatgtaatatgtagaaaaatcccgaaataaaagtcccgatttttgttcgcaaacacaaaaaagaaagtgtttttcccactatttagagcatggagaagccaggaaaaaaatatgtatttacataaaaatggaagccctgtttattacatataatagccggattttttgaattaaatgcacaaatcagtcctttaacttttgcattcctatataataaagtttggtgtccgtatccggtgggggtcggtttagtctggccggtttagtctggccgttttagtctggccagtttagtcagagggtcggtttagtctggccgttttagtcagagggtcgttttagtctggcaagctgtttttgccctacattgattcaattcggatttttttttccgaaaatctttaaaattaacaccataacatatttatcaatgtattaccaacgaaaaaataacaaaacattgaaaaatgaatacgggcatatttcatatttcgagaaataccaacgagaaaattgatgatattatcgggattaacattggcatggtaa

SEQ ID NO: 70356 - DNA, 364 bp, Heterodera glycines
agatgatggaattggcggagttggagaaaatgaaaacgaccatttggttgatgaaatatggcgaagggtattttgcacgaaatcgcagaatttgggaaaactaaaagccacccaaagcgatggaaaggaggcaaaagcaagaaaggtgaaagaggaacagcagcaacccgataatgaagttcaattagggaaaattaaaattgaaccacttgttaaacaggaagacagaatgccacaaacaaatttccaaaaaaaagtgccaaaaactgacgcgcaattttgtgatgacaattttgaaaaccccatgaacaaattgcacataccagtagaatgtgaacagcagaagcagaataatatatgcaaa

SEQ ID NO: 70357 - DNA, 130 bp, Heterodera glycines
atgtgtaccaatgttcatcatccccaaacagaacgatgccatccctttcagtgaagtcgccgcgcacattgccaattctttggtcgtacttcgggcgaaagtcactgctcgaagaggaaggcgacgcatc

SEQ ID NO: 70358 - DNA, 926 bp, Heterodera glycines
atgacaacacccctcaacttcgattctcctgattcgccgccgccgcatcagtcaccgcttttgcgtcagccgcccttagcgccacaacaacaacaggacatgggccgccgcgttgtcgtctacactccatctgaaggcacgccatcgccacagcagcaagatctgcgtcagcaagtgctggcacggaatgcacaagtccttgcagagaaccaaggtttgttggatgtgatttgcttattattttgcatctgtaactaaagcttacacttatagcgggtcttcgagactctcctttggtgcaacaagcgcacgacttggaactgcccaacgagttccacactccgcaaatcgttgttcagactcctgcacccaggcgtcagcttgagcagcagccaatattccgcaacatactgcagctcacgcctcagcgcatggcccagcttatggtgttgcgtcagcgggccgaggacttgcgagacagagaagaagacgaggaggaggagcgagtctcggaggagcaggttgaggaagaagatgaggaggaggagcgtgacgaggaagaagagggggaagagcgtggcgaggaagcagttacaggtaataagatttataaaaactcaactgtaaacaatgcttacagttgagtgtaacgggatcattgctttttgttaataacaattatatttatagacgaatcgtctgacactgaatccaacgccagtgaacagggcgccggtgtggcggtggctaaggcaagaaaccgggtctcctcctccacctcctctgaatcttcggcgtcggcatcaccatcgccacctccgagcaaaagggcgaagacatcgaccgctagcacatcggcagcagcagcatcgaagcagcagccgccaaaaaacaagcgaaaaaagaccgccgtaaaggtactatag

SEQ ID NO: 70359 - DNA, 771 bp, Heterodera glycines
atgccgatctttttcacattggtcatggaagttgaactgttacaaatcgcagaaagcgctgatgacgaagatgaagaggagaataaaaatcacaaagaaaaattggcaaaaattcttaatgatttaactcaaacaaatgacattggccaaatgcttctcgcggcccatattaaaatttacaaaaatgaattggatgcaaaaaaagcacttattgatgaaatttctatcaatttgaaccaaatcaaagcaatagccggcatttttcagcaaaaatttttgaaaatccgagaattgatgagctttgtggaagcagaatctgtcgtatattttttaaattaaattttatagtaatctttttttctatcattttttaggaaattaaacttaagaaattgaatgaattggctgaaaaaacacagaaaatagtaaaacaattgaaaattgtgaaaaagttggctgcggtgctaagtaaaaaaacgacggaagattcactgagcaaaggttagttttcgcgatttacttaaatttaatcgtttttttcaaagaaaaaaaaacattggaacagtttcttccctgaatcggcgatttttttttaacaatacaaaaacggagaacctttcgaaaatattttttgcgcattgaaattaataagaatttctaagacaaaacttttaattcgtatcaccaaaatatagagaaaaaataattattatttttccccctaataaattttctttaaaatttcatgtttaaggtctttggatagtttaa

SEQ ID NO: 70360 - DNA, 713 bp, Heterodera glycines
gaaggattcggtctccccataaatctgggcgcatcggttcggggggactgccccgaaaacaaaaaaaatcgattttttcaagtgtccgtttggggtactcaaacaattatggggagcaaaaatccaacgcagaattaaagtacaggctatagggaagctattccggaaggattcggtctccccataaatctgggcgcatcggttcggggggactgccccgaaaacaaaaaaatcgattttttcaagtgtccgtttggggtactcaaacaattatggggagcaaaaatccaacgcagaattaaagtacaggctatagggaagctattccggaaggattcggtctccccataaatctgggcgcatcggttcagggggactgccccgaaaacccaaaaaaaaattttttggataaaaattatttaaatgaactgactagataatatttaaaataggttatttctcttcctttcagtatccctgcaaagtttggtgcgcttctgatcagtttctgaaaaaaaagttaagcctaaactttttggcctgtttaaaaaggaattaaaaatttttaaaaattttattcatctccctttttgatagaaaaagcatcagagtgcctaaactaacatgtaaataaaatttggtgcgtttcagaaccctttctgaaaaaatatttaaaaattaattttgcaaaaaataaataaaaacgaaagact

SEQ ID NO: 70361 - DNA, 847 bp, Heterodera glycines
cattccaatcactgggactcaatccaccaacattccaacagcatttcaatcactgggactcaatccaccaacattccaatcaacgggactcaatccaccagcatttcaatcactgggactcaatccaccagcatttcaatcactgggactcaatccaccaacattccaatcaacgggactcaatccaccagcatttcaatcagtgggactcaatccaccaacattccaattaacgggactcaatccaccagcatttcaatcactgggactcaatccaccaacattccaatcaacaggactcaatccaccaacatttcaatcactgggactcaatccactaacattccaacagcattccaatcactgggactcaatccaccaacattccaacagcatttcaatcagtgggactcaatccaccaacattccaatcaacgggactcaatccaccagcatttcaatcaatgggactcaatccaccagcattccaatcaacgggactcaatccaccagcatttcaatcagtgggactcaatccaccaacattccaattaacgggactcaatccaccagcatttcaatcactgggactcaatccaccaacattccaatcaacaggactcaatccaccaacattccaacagcattccaatcagtgggactcaatccaccaacattccaatcaccgggactcaatccaccaacattccaacagcattccaatcactgggactcaattcaccaacattccaatcaacaggactcaaccctcctgcattatatcactgggactcaattcttctgcatttcaatcactgtgactcaatccaccaacattcccatcact

SEQ ID NO: 70362 - DNA, 167 bp, Heterodera glycines
atgttcaccgaagtgctgggccaaatcggcttccgtctttccctcgtcttcggcggctccgtcctctcccaaatccttggccaaatggcctatggcattgcgtccgcctcggaggtggcatttttctcctacatttacgctcgtgtggagaaatctcagtacaggag

SEQ ID NO: 70363 - DNA, 499 bp, Heterodera glycines
atggagaaggcctgcaaaatttggagagattatatcgattttagtgcgctaggttcgatgaaactttttaaaatataagcctaaactttttggcctgtttaaaaaagaattaaaaatttttaaaaattttattcatctcccttttgatagaaaaagcatcagagagccttatttaacttttaattaacatttggtgcgtttcagagcagtttctgaaaaaatatttatgaattgattttgctaaaaaaataaaatagtgaagctttaaaaattaataaaaaattttaaattcagaattactggagttagcatcatagcagtgcttttccttgtctttttgatgctctcgcaaaatctggttcgcttctgaccagtttataaaaaaaaagttaagcctaaaatttttcgcatatttaaaaagcaattaaaaatttttagattttttattcatctccctttttgatagtgaaagcatctgagtgcctaaaataacttgcaa

SEQ ID NO: 70364 - DNA, 122 bp, Heterodera glycines
ggatatcttatttggtcggtttgatcgaaggatttttcggtcgaaggtcttcgtttaacttttgtgtgtccaatgcgatgaaaaatgacttggaacgtcgctggggtgtgaatgctatctcc

SEQ ID NO: 70365 - DNA, 614 bp, Heterodera glycines
atgagtcatgaaaaaatttcgctgatttatttgcatgcatgtgcacttagactgaccacagaactcggcattttgatcaacgagttggaggaaattggcacagaatggacgagtgccgacgcaattgacgaggtgttgaagtcggctgctgagcttgaaatgaatcgtcttacaattttaaaaatgtgataattatgcttctcaatttattagggattttcatttttaggattggataattagtacagttcggcctggatccaggtccagttcatttttcggcaacctggctttttcctcgatttttgtccaacaaatccaggacaaatatgaaaaaatcccggtatgggtccaggttatgccacgaaaaacctggatttaaatttcaaaaatccaggcccccaagcctcgaaaagctttgtttttcctggacctggtttttcctgcgtttttgtccggaattcataaaatccaggttcagatttttcaaaatgcccagctctactaatgagttgttaattgaaatgtgttgtgttcaaatttgttgaatcacatttaatacgctagtagattgttatttaattgatttgatttttttttgatttgttgaaaaa

SEQ ID NO: 70366 - DNA, 1168 bp, Heterodera glycines
ccgtgttcacgggttaagtcgacgacgttcacggatcagcaacaccaccaatgttgttgtcaagggcgagttcagcagtggtggtggcagcacaaccgccgccgccgctggggcgttgaaattgtcagaaaaaacaacgcttgttggtggcaaatcaccactaccacaaccgccatcatttgccgccgctcaatgggcaaaacagtgctgtgtgaatgtgaacttggacatattggcccaacgaagtcgcaatgaagtgggacaaaacaaaaaaaaatttttggttgagctctggtcgaatgaattggtcccaagtgtcgagaaaagtctcggtttttttggtttctctaatcttcaaaacaggccgattccgtctgattgtgtgccaaattttcgggcaataattttttgaaaaaaaatcgctttcgaatgatgcaaatttttaaaaaatgactgatttgaaaaatgccgtaatcgccttgaacggaaaatttaactttattgctgttttgtaatttattcgcattaaaaatgcatattttacgcaatttttttttcttacttctaccaaaaaaaaaatcggagagaagttccgatgaactttttttttacttcccttaacaataaaaatctcacaatcagtatcttctccttaatcctgctttcccccgtagaaggtgtctatatcctcaccaacaacagtgttcaagccgattaatagcagtaacaccagtgccagtgccatcaatgctggcagcagtagcaccaatttttatacaaacaaattctgttcaacggttgctgatgtggcaagattggtgaaccaaatgcatgaacaacagctgagaaaccaacgcaaggcggcggaagaggaggaggaggaacgacggagaaaaaacggaattggaaaagctgagcaaaagcatcaacaaaaacagggaagacgaaggagtaccgtgatggaagcatgtgatgatgaagaaaaaaatgaggagaagaaggtggataagaagaaggatgggcacaaaatttgtggccataatgatggtatgccaatacttgaaaaacaacagcaacaacaactgctcgaagaacggcaacaactgccgcagcaacaacagcaaagcattgatgataataagaatatcacaagcaacattgttaatgg

SEQ ID NO: 70367 - DNA, 389 bp, Heterodera glycines
tatgtcgacgatattcgtgtcaccgtccgtttggtttcgcccgcattcacttgcaattcccaaccaaaaaccgcgtcttctcagttcataagttttgcattccatctttttggccattttcagaagcaaatcctactcttttgctgaccgggtgatcgaaacactgagtctttatgttcagtcagttgagattttctttgagtcggacagcggcacggactttgactttggcggctccattagcgtaagaatgctcctttttatttattgtttgcccattgttcgtctttttcaagctgtattcactcgctttggagagcattagccccaattggagtgaggagaaggacgtcgacaccaacttgactcgtcagtcagttccaagaagg

SEQ ID NO: 70368 - DNA, 403 bp, Heterodera glycines
aagatttcatttgtattttatgctttatctctttgtgaaatgacttcgattttgaagaatcaaatcattaagcatctttcggcgtaagttgatagatgccattaattttcaacaaaacatttttttcttgtttaggtttgcgcgaaatttgaaaccggaacaaattacgatggaattgttacgggggaaaggccaactgcgagacttggaactcaatgaggaagtgttggctgaaaaattagagttgcccccgtggctaaaaattgtcagtgctcgttgcgataggtcattttttggcatggatgtattcccattggccatttgcgtttatatttgggtttgtttagagtcagcattaaaattccaagttggaacaaactgaggagtgctcccatccaattgg

SEQ ID NO: 70369 - DNA, 468 bp, Heterodera glycines
gtttcaaatatcgtaagattgtttgatagggccagacaagagaaggcaactgttggtaccaagtttgcggtaaaaaaatgagaaaaaagagatagccattttttggtcaagaattttttttgtttgcgtttcaaatatcgtaagattgtttgatagggccagacaaaagaaggcaactgttggtaccaagtttgcggtaaaaaaatgagaaaaaagagatagctattttttggtcaagaattttttttgttgcgtttcaaatatcgtaagattgtttgatagggccagacaagagaaggcaactgttggtaccaagtttgcggtaaaaaaatgagaaaaaagagatagctattttttggtcaagaattttttttgtttgcgtttcaaatatcgtaagattgtttgatagggccagacaagagaaggcaactgttggtaccaagtttgcggtaaaaaaatgagaaaaaa

SEQ ID NO: 70370 - DNA, 70 bp, Heterodera glycines
gtttcaatatcgtaagattgtttgatagggccagacaagagaaggcaactgttggtaccaattttgcggt

SEQ ID NO: 70371 - DNA, 207 bp, Heterodera glycines
atgtctccagcagaaccctttttggaaagcggcgagtccgaccttttcgccatggccgtcaaattccaaacggacaatgggcaacccattgagctgaaggccgtttaccaagttgccttatctctttttgatggattattcccaacgattcccaggacactgacccatcgccgaaagccattccgacggaagggaaaagccgacaga

SEQ ID NO: 70372 - DNA, 824 bp, Heterodera glycines
  unsure (1)..(824): unsure at all n locations
atgaaaaacccattcaatatgccaaaaccaataattgccaacccgaatgatgtgccaaaacagaaaaatgccaaaaagaaagcatcaaaaaatgatggggggcaaaagaaagaaaaacttgttgttagccgaccatcatcacccaatggagtgccaattgagtttgaattggaaatcaatgaatacactaatggacaattgatcaacaaaaacactatttctggacaatgggacaaaaggaatgagaaaatcattgatgaaatgttaaaaaataaaaaagttggtgtcacacaattggggcccattcagtcaaaagcaggtatattagcacaaagatgaaaatcagaaaagccgcgtatctcaggcaaaaaagccatttttcagaaaaaattatcatataaccagatctaagatggattttgccgcttaaatggcaatctttgaaagttttttataaatttttatttaagccacaaatgagggcaaaacctcttatattggggcaaaggtaattaccgaaaaacaatatttatatttccatgtttcacgggaaaaattattttttaaagtataactgattgataaactttttagacattttgccattaaaaccaggacagttcgaaactgaatcccattttttctctgataaccatgcgaacagtcagcaatcaactgttgcatcaacatcgaaaaatcaagtcagaaatttttaattaattaaaaaataattattttagaaatctaaaaaagtccctgancntctattaaaacattccaagtcaatgnccgaatttaaaagaacncaacactcaaatgantca

SEQ ID NO: 70373 - DNA, 643 bp, Heterodera glycines
atggcctcccaaattcccaaaattctgcccactcttctcttcatcgccgccgcatttctgctcaactttggctgctgtcagcaaaatgagaggtgtgtgaataactctttctgctgctgctgctgtacgtgttcaacatttaatttgttctttttcgctttcagccaaacgacggaaactcttcgcgccagaaatgcttcttcatcaaccgaaactcttccactgaacatcacaaccaccaaaaaagaaacgacggttgccactccttcgactacagaagctggcactgaggcggcgacaactgatgatactaatgacgaacaatcattgctgttttggattttgattgggtccgtgtcattttgttcaacgcttttcacagccattcattcatttttctcctcccatttttagcgtcattgtagcaattgtgctcttcttggtcctgctggtgtgcattgtgtgctgcatgcgaggaggaagccaaaaagatgcgcgcgaaaccgtcaatggcaagagcggaggggctgtgaccaaattaacgatgaatggggacaacgccgacagtacctgtgcttcacaatcagcatccgtgcccgacgaaggatggttcgcgccggaatcattacgggtaatactatag

SEQ ID NO: 70374 - DNA, 741 bp, Heterodera glycines; identical to SEQ ID NO: 42504

SEQ ID NO: 70375 - DNA, 573 bp, Heterodera glycines
atgtgcagcagcagcaatggcgtagcaaccgaggcagaggttcctctgggttttgtctcgtttaaaatgacgctttttaaggagtccgaatcggacaccgccgcgttgcgaaaacgtcgcgaggacgcgtcgacgccacggccgcggaacacggaggaagaaacggacgattgggaagaatgtgagggcgaggccgacaatgaggcgaaggcggcggacaaagcgaacgacgggcaatgaaaggcacaaaaagcggtgaaacgaattttggacgctttcccctcaaaatcaacgtaatttcgtgtaattaaaattctattcaaagttttgagttgaattttcgaaaaataatataatattgattttaatgatttaaaaagtcaacaactcaacatccatccatctatacattaattaataagtccattcctatttttgtgattgaaaactttcaataattgttttaatgaaaattatgtacacgattatttaactgaaaaatgataacattaatttaacttattatacgacaaaaattaaaggaatatttggcaatataaaaagatcaaatga

SEQ ID NO: 70376 - DNA, 361 bp, Heterodera glycines
tcctcggcccattggtcaccagcgaatcttcgacccttttagggtcgctaagtccgaaggagagaattccgctccatcagacgaaattcgccattgaaatgcaagtgccactcctcaaatcatgttcaagtcgtgttttaaaagaacaatttaagcggtgacaaagtgaagtgcctcagttacagcgaagtgcgcaacacttacaaagaggaattgttgcagtatttcgaggaaagggccaaaatcgacgaagagtaaagcggaaggaaaagccacgcaaaagcactcacaaataaattagcatcgctcaactcaactcgaattgaccctcactatcccccgatgtttccgttctctctca

SEQ ID NO: 70377 - DNA, 64 bp, Heterodera glycines
atgcgttttggcatttcagctatgaagccaatgtttcaaagcgatgaaacaaaaccaaagtatg

SEQ ID NO: 70378 - DNA, 239 bp, Heterodera glycines
ccaggactcaaatgtcccgctgaggccaaaatttttttctatttccgggaaaaaatcgaaatttttccgaaaaaaataccagtcgatagagctcgaaaaactatgttttggaagtggtctccgtttctctgagaaaaatcgttaaaaaatcctaaaattcaaaaacccgaaaaccgttttttaggcctaactcgaaaaatttgaaaattttcgaaatttaaaagactctagagatcccc

SEQ ID NO: 70379 - DNA, 255 bp, Heterodera glycines
ttcacaattttttgacctgctcgactgggccgaattggtcaaatcggctccccccgaatctgccaatacggttgcaagccgtgccgcactgctggtgaatgccatgtatgaacagcatggagtcttttatgtgtagatagtgccgcttatcttcttcgattctcattgctcttttgtgtatttgccttttttacctctcagattgtttcataatattcagatgtttattctttctccagtatgtctttcaataaa

SEQ ID NO: 70380 - DNA, 2820 bp, Heterodera glycines; identical to SEQ ID NO: 9144
  unsure (1)..(2820): unsure at all n locations

SEQ ID NO: 70381 - DNA, 582 bp, Heterodera glycines
atgcagggatactccccggtaaaggactaacttacactgaaatgagcgccgagctagctggctcaaaaaaaattttcgaaaatctgagtctttcgtttttatttattttttgcaaaaattaattcataaatatttttcagaaaagggttctgaaccgcaccaaatttttattacaaggtaaataaggctctctgatgctttttctatcattattgggggtaaataaattttaaaaattttttaattgctttttaattatgccaaaaaattaaggcttactttttagtgaaagtttgatcactcatatttttgctaattgagcagaagcataccaaactttgcagggatactccccggtaaaggactaacttacactgaaatgagcgccgagctagcttgctctaaaaaatttttcgaaaatctgagtctttcgtttttatttattttttgcaaaattaattcttaaatattttttcagaaagggttctgaaacgcaccaaattttatttacatgttagtttaggcactctgatgctttttctatcaaaaagggagatgaataaaatttttaaaaatttttaa

SEQ ID NO: 70382 - DNA, 65 bp, Heterodera glycines
atggctgtctcttttttctcttggggatttgaccgcaaacttggtaccaacatttgccttctcta

SEQ ID NO: 70383 - DNA, 59 bp, Heterodera glycines; identical to SEQ ID NO: 52421

SEQ ID NO: 70384 - DNA, 59 bp, Heterodera glycines; identical to SEQ ID NO: 52422

SEQ ID NO: 70385 - DNA, 59 bp, Heterodera glycines; identical to SEQ ID NO: 52421

SEQ ID NO: 70386 - DNA, 935 bp, Heterodera glycines
aattttgaatttagaaaacatgcaatattaaccatgcatccctcccagaaatgaagccattcaaaattaagaacaaagacggcctttccaatgattacacaggcaattttgaaaaaaataattgaacaatcaatgccttctgccaatatttcagatttttgggtggattacgagccgatccgtcactgcacttccgatcgaccaatttgcgagtcgaggttacccaacagaatgccaaaaaagattgaactgacgccaaacttcacgcaccttccctctcacagattccttttctgtgatcggtccgtttggcgctgtcgaagtcgaattgtgttaggcggcaattgtacaggctttgcgggcactgaaatatgctatggatcagtgtgcattcaggcaagacaccaaaagtgaatttagcgtttgatcgaattaaattctcagccgaatcattggcacaccagtgatcagtcagaacttaaacgaaaaaaaggggggggggtgacctgtaaattgattgtaatgatggtatgggttacgtaccgtatccattcatcccaattcgctggctgatactgtagttaatttcctgcttatctccttgggatcagacatcctcctacaatttctgtgctgaatttggtatttttcagaatgtttgccgactgccggcgacggaaggcaatggatttttgaggcgcgaagtttgtttcggcatatcgaaagtgaatgatttgatcgcttctccgttctttcgttgacagcgtcgcccgccgatcagcgaagttgtgtgggcaaagagttggctgttggaggagggcgcacggccgacgagcagcggaattgcgcacgtcgtggtcagagaggagggggcggcaatggaaggggaaagaagcgcttttgtgccccggcacactcagtacccggagttgccg

SEQ ID NO: 70387 - DNA, 498 bp, Heterodera glycines
atggagaacaaaatggcaaaaaatagtaattttttggcgaaaaacgactaaaatttttgtaaaatacactccataattcgggatttcaaaaaacgaaaaatacacccctaaaaacgactgaaaaaagaaaaatatacccctaaaaatcgagtttctgatttcagccccctccgaagccaagggtctggctacgcccttgccctcccccttgtccacctataccgtatcatttcctttattaatattcaaaatctcagaactgtccctactcgactaccgtatcgacaacagtattcgcttatatgatgaaattaaatctttcaaaaataggcaaacatccaagcaacggagaactgatcgaagtgcaattaaattcaattaatttccaaaagaattattcaatgaatcttaaattaaaaaataatactttttaaattaataatttttcttcaattattcatttcgccctaaaaacattttttaccattttataaaata

SEQ ID NO: 70388 - DNA, 647 bp, Heterodera glycines
agtctttcgtttttatttattttttgcaaaattaattcttaaatattttttcagaaagggttctgaaacgcaccaaattttatttacatgttagtttaggcactctgatgctttttctatcaaaaagggagatgaataaaattgttaaaaatttttaattcctttttaaacaggccaaaaagtttaggcttagcttttttttcagaaactgatcagaagcgcaccaaactttgcagggatactgaaaggaagagaaataacctattttaaatattatctagtcagttcatttaaataatttttatccaaaaaatttttttttgggttttcggggcagtccccctgaaccgatgcgcccagatttatggggagaccgaatccttcgggaatagcttccctatagcctgtactttaattctgcgttggatttttgctccccataattgtttgagtaccccaaacggacacttgaaaaaatcgatttttttgttttcggggcagtccccccgaaccgatgcgcccagatttatggggagaccgaatccttcgggaatagcttactatagcctgtactttaattctgcgttggatttttccagtgggataattgtttgagtacccccaacggaccaccttgaaaaaatcga

SEQ ID NO: 70389 - DNA, 1410 bp, Heterodera glycines
atggcaaaattaatgaaaatggtcaagagaataaagtgagcacaaagcgaaaaaaggaccaaaacggaggtaatttaaaaaagaaaatataatttaaagatttaattataataaatatttataagtaaataaataatttttgattattcattcacaaagaaacgcaacaaaatcacaaatttctaaaaacggtcaaagaagaaaatataatcggagaaggaaattcgaataaaaatgaaattgaaattttgccgcacgacccgggcaaaatcgaccgaattattggtgactttgctgagtttcgattgcaacgaatggaactgatgaatcgcatcattcgggcacaatcacagcgtgaaaaggcggaattgcaaacgatttcggaccaaacaatggcaaacgcaaaaattgtgcaatttaggtgaaaaagtgccaaattcccaccccgccccctttttgtgtgatctgttaaaattgagtgccttttttgggtttggctaattgtgtcgcttcaagtttagcctgaaaaaactgagtgttttctccgccgccaaagcattggacacggcacttcttggcatcgaaattgccttttgtccgtttgccaatgtttggcacaatgcgcaaggaaagcacgagggaatggccaattttgtggtgcagaaattcgcttcattggcatttgccattttggaaataaaaaagccggccaaagatttaatcaaagagacaattaaagcgatacgaaaacgatttgaggagtcggacaaaaagcatttgacaatggcaatcgaagtggtggaccaaattgaggtgaaaagtgaaggaaaaggaaaatgcaaacggaaaaacaaaatgttttaatttattaattatttttagaatattattagcaaaatattaatttttccacgccctgaaaatttgcaaaacagtgaaatgcttgtgaatttggatttttacattaattatttctctcaaattatgctcatttgttccccgtcggctgttgcggcacttacggacagtgcgccaatgttcaaaaaattgcacgacaaaattcaatttttttccttttcgctggtcactcagttcaaaggaattgcggagaaactgagaaacggagaaaaaagaggcaattagggacaatcagctgatcaatttgcatttttgtatttgaacggcataaatcaaaaaattgtcattaaaattaaaatttattttttgagaaggcacgtgccgtgccacaaattcttttgggagggagggaaggaatggaattcgatttgtttgtggtcactcaaacaaaatccttcttctcatttttattcgttcacaaaagaaaaacaattcgtgattaaatatttggtgaaaaacaaatttaaacgaaaatatatcagagaaaataaa

SEQ ID NO: 70390 - DNA, 401 bp, Heterodera glycines
gaaatgccaaaacgaagccgaaggacaaaacgggcaatttggacgagaaaaaggaagcgaaggggcggcagagggagaagcagcagaaggagggaaaagctgaccatcggaatgcgcagtttcatgaagctcagaccgtacgcggagcattattgtgcgtttttaaatcaaaaagacaaaatgaaaacaatggaaaagaccccgaggggaaataatttgaggaaacttaattaggacaatagtaattaataataatgacatatggtcaaaattaggacaattagaacccttataatttattttgggaattcgtcataattggaacacaaataattttttggttttgtaaattccgaaagaaaatatgggaatgaatgccatgccaatgtaaagtggtgaca

SEQ ID NO: 70391 - DNA, 1330 bp, Heterodera glycines
atgtcggcctttttcgccatcttttcgcccgcttttattttcgcaattgtcgccactgttgtgctcggactgatcactggtgagtggggccaatggctgatcagcgtgactcattgggcatttgagtattgttgattagacacacaaaaagggcagacgatggcccaatggttgaactgccaatgggaagaatttgccgattgggttcgattcccatccgccgccggtgcctgacacttacatatttaatcaaaatgattaatctctgttcatcaacaaccactaatttctaatgatccttgtcaattatgacttcttctgtttaggagtggtcacaagtgcgtttatgggcaaatgttccgggcccggcacaatgggaggagcatatgccggctattatcaacaaggtcgagcaagttgaaaacattgattagtgccaccaaattcgtatttgttcccgttaggtcacggagtgccctattctgctcacaatcagaatatcgtcggttttagcggcggacacggtgacggctttggcggcggctttaaatttaaaacgcccaaatccaatcacggatattcctccgcttggggaattccttctcagcacggtaattagtggcaatcacaaacggataaaccgattaacaaaattatatcaatttgatttgcctcacttttatgctatcatcacaatgccccaccgcccgaagtgtatttgctggaggaggagtatgagatgaaacgcggacgcggcttctcctcctccgcttcgtattccgcttcttactcagagtccgacgagtacagcggcggaaggtcagtggagcgcagaaaataccgacggggaggaggaaaacagtacaaaagtcacttcagggagaggagttacggtaaggagggagacacatacggtagactaacaaaacaaatgaacaaaaggaagaacatattaataatggaatactatagtgggaaaataacaaattttaaattaaataatgaaaaaataccgtagggtatggggggagggtaaatccaatggttaaatttggcaaaatgccattccaaatattttcagatgattccggcggggcggaaaaacgcgtggaggaaagtgaggaggagaaaaaagttaggcgaagaacggtgaccacttattcacgtgtacagtactgacaaaagagaagagaaacggtgtcacataagcaaatttactacctttagagagttcaaaggcattttcatccattttattcatttttcccattttatcataaatttgttttaaattttaaatcttaaaaattaaaaaggaaaatgcctaaaa

SEQ ID NO: 70392 - DNA, 1042 bp, Heterodera glycines
  unsure (1)..(1042): unsure at all n locations
atgtatatttttgnaaaagtgtntcaggcacttaaaatgtatgcaatcggtacnnccttagtaatataattacggcatttgtttgtaattgttgcatgacgaagttgttttttttaaatttttgagttgaccccgccaattgaattgcagggtccccccggncgttcctggcgaagccggcgagcccggacgccccggcaacgaaggacttccgggagctcagggggcaccaggcgccccgggctcagccggatccccgggccaacccggcgaaagtggccaaccgggacatcaggtgaggacgaccaaagcaattcggaaaacaaatcccaaaaatcctttaggggcctcccggcgaacgcggcatttgccccaaatattgtgccttggatggcggagtgtttttcgaagacggcacccgacgttaaaaacaacgaaaaataaaatttatgcgatttgacaattggaaaaaacaaattttaattcacaatagtaaagaatacacataaaagcataatatccattttggtcatcgaagaattaaatatttgccttttgagattgtctccatattggtaaaaacaattcctgaaaataggaatctaatttagaagcgatttcttaattacatttttaggaatttttgaaaatgaatctacccaaaaaaaacttcttaatataattaaatgaattcaaagaatattggtcataaattcgatataaatttttaaaaaccgaaagatgtttgtatttacctagggagcagcccgtttccctctctccctccgagattttctaagatttgttttttaaatttcctcgggtggaactgagccggggggggggggggtacgtagtgcatgcacccatttacccaatttttgtttgttcgtatttgtgcttattcctcccggtcgcggttttttgagtaaaaaccgggaaaaggactaaaatccctgtcaatttcgcttcaaaattccagtctaaaaatgcttgaacaaagacaaattctctggctttttcggcattcccaagtgtttaa

SEQ ID NO: 70393 - DNA, 635 bp, Heterodera glycines
atggagcgactcggcattcgtttgaattcggtgcgcgaatttgctttcgatttggagcacacattgccaaatcataaaacgcaacaaacctgccttcttcaggtaattaaatttatattttcagctgaatcgtgtaattttacataaatttaataaatttccttgtcacagatttcaacacgtcgcgaagattttatcattgacattctcaacccgcaagtgcgcaacagaatgcatttgctgaaaaaggcttttgagaacgaaggaattatgaaggttaatcatttccacttaatcttagagagcttgaccattcctttatttttgtgaggtctcccggggcgacaatacctaataaaattagtgaaagatttttgtgaaaaagccccgaaagacagttcgtgataattattagcgccgctgatgagagcatttatgattagctttttcaggtggcccatggccaaaatgatgttcattggatgaagcgcgatttcggcattttgactgtgccacttttagacactttcactgtgggccttgccaatggtaacaattcaattaaaaagagcattgctccaacttttattcttaatgccatcgttcttttacagtcgaacatgtcaatggtctga

SEQ ID NO: 70394 - DNA, 1033 bp, Heterodera glycines
atgagcattttgtggaacgtgtcaaagaagagccgaatgtgtggcttaatggggccgatggtcagttgcataatttattcccttttattcaatataaaattcttgacatttaatcctgtttcttgatcatattttcgcaaaataaaaaattataattgccgtttttataatttagttgggctaaagtcctttaaatactcgccaaaataattttgtcaagacattcaatcaagtgtaaaagtgggaacaattttcctcgaccttacagccatctcaaaaaatcataaaaatgaattaattaataattaacctttgagtaaaattaaacagttccaaaactcagattttcccctggccaatgggtcggatggaaaggattcttcgcaatttgtcgctggctgtgagtcgtcctctgtgaagcaaacagtcacggaagactgctatattggcaccgcatatactgagcaggaattggccacactttgccacgaacattgcctccgggcaccgcccaatggcacaattgagggcttaaaggtgggctaaccccccacttttaattcctaatcctccatcattttgtttacgatttagcgtgtccatttggtttgctcgtataactctcggccatggctttgcccgtgtcttgcggaatgggtggcggacacgggggcactttacatgcgcggagaacacaacgaacacccaacagaagccaaacccacgggagaagaggaggagaaagagaaagcagagaacaatgaaaacggaaaggaggaaaaggaacggcaccgaagaggagagggggaaagaaagaaatggggcaaaagaacactgaaaaaagagaggagcagcagcagagaggacgaggaacagacagagggacaatgcacggaggagagagcgcgagggaggagagagaaaaacaaacgacaaaattatggggtgaagaaagagcgggtaaagaaagagaggaatgagggcactgctgacaatgaacagatgggacaacacaatgaccagcagagaaatg

SEQ ID NO: 70395 - DNA, 1126 bp, Heterodera glycines
atggatttgctgcaacttccttcgatttcggatggtaatttaattatggattttttaggggggtttattttgtaaccctttgttagcatatttttaaaactgaaaatatttttgttttcgaaaatatgtctctatgaaataaaactgactagggaaaagggaaatagcaaattggaaactatgcgggaaaacaactagaaatttttattaaataaggataataaataaaaaaaatgtcagcgacccagaaaaacggaaaaaactaacggaaaaacttgctaaaattggtccttttgcttaaacatagtcaatttaatcgcgcacaagttgaagaagtattttaaacaaaacgaaattttcacagacgaactcgattacgacttggatgttccggccgatggtgtcaatgccacgctcaaaacccaaagggcctccaataacaacgaggtaattagcatatcataaagaatgcaagacgattggatacaagcttattttttaaatttggttatttaaaagtcaaaagttgttccaggctggacgactttgcttggtttcctccgttttccaaaattcccataagtttgtccttatttcgatggtgattcgtcggttctttaacttcatctcaaaaccattccgaacgatgatggcaaggcattagcaaaggtcacattttgagaattggggtggtcgaccgaagtttttttagggtgcatttgattcaccataaattcactttttctttaaagttaactaaattttaagtataagcaaaaaacccttggtatcttctatggcgtacattaaatattctcttttcgcctgtaaatctttaaaaacttattttttggttttggctgtctattttgatgcgacaaaattatataaacttattttgcggcgctatattcaccgttcatccttcctaaaaatcggctaccgataagcaaaaaaggtcgtcgcctttggtactcccctccccaaagtttacgtctctgattttttgtattatgtacaattgtgtttacattctgtcatgatgcgttttgagaattgtcttgatagcaatggaacattccgaattatcacggccaaataattttaaaaccacttatactgtaga

SEQ ID NO: 70396 - DNA, 388 bp, Heterodera glycines; identical to SEQ ID NO: 51536

SEQ ID NO: 70397 - DNA, 853 bp, Heterodera glycines
taattaaatccattccttcgggggaccgtgccgggtgccgcggggtaagcagtgctggttcgtttcatcacggcaccgaaccttttggctagtcagcaatcgttgcttaacttgccagatcggacgggtgcgcatgattccactgttccaagcaccccaccaaaagcaaaacgatataaccaaaatataaggaaaaattttttaaaaaattttttctccatcttcctttttgatactaaagcatcagagtgctaaaattaagttgtaaataaaatttggtgcgctttagagcactttctgaaaaaaatatttatgaaacaaaaaaatcgattttttcaagtgtccgtttggggtactcaaacatttatggggagcaaaaatccaacgcagaattaaagtacaggctatagggaagctattcccgaaggattcggtctccccataaatctgggcgcatcggttcggggggactgccccgaaaacaaaaaaatcgattttttcaagtgtccgtttggggtactcaaacaattatggggagcaaaaatccaacgcagaattaaagtacaggctatagggaagctattccggaaggattcggtctccccataaatctgggcgcatcggttcggggggactgccccgaaaacaaaaaaatcgattttttcaagtgtccgtttggggggtactcaaacaattatggggagcaaaaatccaacgcaaaaattaaagacaggctatagggaacctattcccggaaggattcggccttccccataaatctgggcgattcggttcgggggggatggccccaaaaacaaaaaaaatcaattttttcaagtggtccggttggggg

SEQ ID NO: 70398 - DNA, 568 bp, Heterodera glycines
atgatctcctcgtcttattttgaagaatgcaatggcaccgaatgtctttacgcgcttttttccaaaccgaaattgcaaaatgttagtgcatttgcttatagcaatcaatcgcttatgcattaattatgtgataatttttaaatacctaataaatggctcataatttggggggagcgtaaaattaggctcattaaactgacatatcaattaaactttttattatctacttattttctttaattaataagattttccagtgaaaacccatttattttaaattgataaattatttttaattttagttcatttttttgcataattactgaactttcaggaggatgatctgccctataaaataatggaggacaaaaccttttgccaaaaggcatcagaaaaactcaaaaaagtcatcaagataaaatctgagaacgaaaatgcgagagaaatgtttgacaaagtcatgaaagagatgtctgaaaaggcgaaaaagatgtacaaagagcagaagtatatcggtaccacttattttaccaaattcatttggaactcgccttttttgcaaggatag

SEQ ID NO: 70399 - DNA, 386 bp, Heterodera glycines
atgactgtgattgtatttctgattgacaccagcgcatcgatgatgcaaaagcaatatttgggcacaactctgctcgactttgcacggctgacagttgaacaatttttgaaggttaaacaaaaataaatgaatgaaacagttgaaaaaaccaaacctaattgggaaaaaaaattagctgccaattaggagggaaaatgagggcattaaatgcattaatttggaccctttggccgtattttatctgccgctgaatggacttgtggacattttaatttgccttttttcagcagcgccaacgcgaccccgcctcctccggcgaccgttatatgctgatgacattcgaggagtacccgtgcaacatcaaggttatttgttgtcatttttga

SEQ ID NO: 70400 - DNA, 281 bp, Heterodera glycines
atgccatcacttattttttattcactcccttttcttatggtatttttacatttaaaatttttgaattaaatttttattttaccattttcagttagcgaatttggccattttctttggccaagctctgttccgttttataccgcacattttgttcgtttttgtatcaatttttattgtgggaatggtcaacggcgcatgttgcaactttttcggcaaaattcaccaacaagtaaagctttctttgtaaactatttaattagaatgtttaaattaaaaataaa

SEQ ID NO: 70401 - DNA, 571 bp, Heterodera glycines
atgtctgacgataaaaaggtaaaacgaatctgggcgggtgcattcttatggcattgtgccataacattcatttttgtacatttgcttttcagcatcaagcattcaacatggcacgcactttggtgaccagcagaaaagacgtaaagtaaagggggagcaaaatttaaataattttacaatttttagtcgcccaaattctatgcaacagttttggacgacatcggctcgtatttggtccgcgcagtgcctttgtacatcaagaaaatcgcagacgaaccttctcctcctgcggacaatgagaatgacacaattacgaggaaaagagtatgtgtgccaattttggcagctttcccctcccccaaaattgaggcgaaatgagttaacgcgaaaatattttttttcattttcagcggttccgacgagcctgttgtctgatgtatctttagccgaacagaaggtcaaactgcccggcaacactaagaagtgattgaggagcgcgggggcagtatcattgaagactttacggtaaaaaaagcctttttaggataattcaccgcgttatacaaataaa

SEQ ID NO: 70402 - DNA, 439 bp, Heterodera glycines
atgccaattgcgccatttgaattgatgaacgaagtgacaaatgagaagctgacactgattaagggtggagcttttcgttggctgttgaaacggtgcccaattgttggggagacggcggcggtggttcagaaacagcagaagaaagacgagaaattggaccgtttgaacggagtctacttctgtctttacgatgccattttctcgactcccgggcacattgatcagcggaagaaaaagtgatcatttgagaaatcgccgaccattattgatttttgataattgggttgattgatgctaattgtttgctctttgaactcatatcacttttgtggtggacttttcaatgttactataactgaatctctagacaatttctattgatactaaagaaatttcccaacaaaaaaatcaacaatggtttatataattaacgaaagaa

SEQ ID NO: 70403 - DNA, 792 bp, Heterodera glycines
acatttgggatgttttggcccgagaaatttggcctatttttgcgaaaagcattcgtcatttgggctttcgcaattccgatgctttgaacaacttgcgcagtcgcacttcaccaacgattctcactgatcttgatcaattggtttcaatcgattctggtgctctgttacccgatggaattgctgacgatgggccaaatgcaactgctggccaagcgttggccaaatggctgcacactccgacaaaaaatgggcaaccgaagcaattgcatcgcaataattattttggtccaccaaagctggaatgggtcaacaacttcaaggaggtgtgtctagccatattttcgtcaatttgtttttattttaccagtttttttagacatttcgccgtgccaccacttctgtcagttacacaattcaactttatattattgtggaaccaatgccaattgaaccatttgaattggtgaatgaacggacgaatgaaaagctgacactgacgaaggagatcgacgaattcgacgtaaatgtgtgtaattggctgttgcaacggtgcccaattggggagacggcgacggtgccagcaattaaatgggaagaaagcgtaaatccgagtgccaatttgaacaatgtcacttttgatctgtggagtttcgataaatccattgggtgagcagcagcaatagcatttgattttatagaaaaataaaaacaataattaattttaggccattgtcgccaccagcggaagaaaaagaagaagaagcggatcaaagcaatgaaaatgtcgtctga

SEQ ID NO: 70404 - DNA, 1371 bp, Heterodera glycines
cgacgtgtggatggacattctcccatcttttaactatgccaaactcggcctcaaaatggcattgctttccgaccgtttcgatgttttggttgacaaacatttcgatggaaaaagcgaattgacaatttggagacgtatcagaattcgcaaggacaaaggaccaaaagcgaaactgtctgtggcgatcgatggcaaatgcgtggcatttccatttcccgaccatccgttgcccaacaaaatccgttttaaggaccttcagatttagtaaatcaaaaaatatacagaaaaccaatcttcatttttccccttttcagttacgttgaccattctgtgctcgcatttcttcgttccaacaagcaaatttgggacagaagtggcatcaaattggatttgtttctgcctttatatatgaccgacgtcaagctcatttgggatgtttttacccgcgaaatttggccactttttgcgaaaagcattcggcatttgagctttcatgccgataatttggaaaatttgcgtcgccgcatttcaccgacacttctcactgatcttgatcaattgtattcaattgattctggtgctctattccccgatggaattgctgatgatgggccaaatgcaactgctggccaagcgttgtccaaatggttgcacactccgagcaaaaatggccaaccgaagcaattgcatcgcaataattattttggtccaccaaagctggaatgggtcaacaacttcaaagaggtgtgtctagccatattttctataaattcagtttattaaatagtatgcaatacgttccatgttaaaaaaacaaattctgcataaaaaaaacaaaaaaaaatttttccaaaaaaaagtgaaaacattttcaaaatagtgctctttgcaagtagcgccaaaattttgtacttttgagttttttgttcgagtccgggttcgagattcggaaataggccggaatggataccggattcgtggtcagtgacctcgaaaacgcaaggaacttgtttttaagacaataaaattcgctgacgcattttctgctgacgctttttccactgacgcattttccgggcgccatttgatttacgctcccttttttgtttagacatttctccgtgccaccacttctgtcgcttacaatgttcggcttgaacttctagtggctagccaaatgaatattgttgagccatttgagttggtgaacgaaatgacccaagaaaagttgacactgacgaaggacgaagagatttggctgttgaaacggtgtccaattgttggggagacggcgacggttcaatgggaaaaagacgaaaatttggacaatttgaatggagtgatcttccatctttatcatgattgtattgg

SEQ ID NO: 70405 - DNA, 817 bp, Heterodera glycines
atgtcatttgccaaacttttagccgaaagcagttccgacgacgcggaagagacatcacattcgaagagtgcggttaaagctgaacccgatgagtcggacgacgaaatcgacacggaataccacaaaccatccgaagtcgcgaacaaacagagtaaaaagaaagccatggccgacttattgagcaaacgacgcaataaaatacaaggcaattggagagaaagaagagtcggtggatgaattgaaatgtaattgaaactttttaagccgaagaaaagcggaagaaggagacattgaaggcgactctcgacttggacgaaatatttggcaacgaaaacgaaggtggaaaatcggccggcagcagcagttcgtcgacgagttcttcgcgttcctccagccccgacttgaccaagtcacgttctccttctcccgaagtcaaacaagaggtggtccaacgcatttcgaatttatattttggcattcagattaaaacaagggatgaaattatccgttgccaacttttccggcgaaagctcgcgaaatttgttcatgctccgttcttcgctaaaacagtggtcggttgcttcgttcgcatttcaatcggtcccaacaaatcggatgggaagcaagtgtacagagtgcgtcagttatattaaacggaaataatcttagcgaactgtttggaatttaggcggctcaggtagtcgaagttgtggagacagcaaaagtttacgaagtcgagccgaacagtgacatccgtacaaacaaaggctttcgcctcaaggtaatggcaagtgaacacaatttacccaaaaataaa

SEQ ID NO: 70406 - DNA, 75 bp, Heterodera glycines; identical to SEQ ID NO: 54636

SEQ ID NO: 70407 - DNA, 481 bp, Heterodera glycines
atggatcgattagacacagtaattgcttctcttctgaactgtcccgcacgtaacttgtgcgactgcttaaatcacccggatgagattcaaaaagttgaaaaatacctcaaatgaaaaactctacagacaacatacaaaaatcaactagatgaatacaaagattttgagtacggtggaattacaagagaaagtgcccgtaagcaaatggcttacaatggtttcaagaatgtgaccgtcgaccagcatttttatgtacggcaccgcatttgtcttcgctattcaagcaatccttgcgtgatcgaaaaacacaagaatggcaatgaacgtttctacccacttgaacttgtgaaagtgaaggacaatgatataatttatttagggcaaaattttcctaaacctttaattcgtgatgataatatgtttattgatgatcaacaatatttgaattggtaacttaatgcttaaaattacataataatga

SEQ ID NO: 70408 - DNA, 422 bp, Heterodera glycines
tcattattatgtaattttaagcattaagttaccaattcaaatattgttgatcatcaataaacatattatcatcacgaattaaaggtttaggaaaattttgccctaaataaattatatcattgtccttcactttcacaagttcaagtgggtagaaacgttcattgccattcttgtgtttttcgatcacgcaaggattgcttgaatagcgaagacaaatgcggtgccgtacataaaaatgctggtcgacggtcacattcttgaaaccattgtaagccatttgcttacgggcactttctcttgtaattccaccgtactcaaaatctttgtattcatctagttgatttttgtatgttgtctgtagagtttttcatttgaggtatttttcaactttttgaatctcatccgggtgatttaagcagtcg

SEQ ID NO: 70409 - DNA, 860 bp, Heterodera glycines
  unsure (1)..(860): unsure at all n locations
atgtcgggtcctattagaatgcggataaatccgtctttaagaaaattaactgaaagactggtagaaattagaccagtaattgatgcgcaacaaagagaccctgaggggattgatttattaagaaattcgttggtaaaaataaaaagatcagtgacgttcattgatgaaagaattgaacaatggcgcacatatatgacagaaattgaagttgatgaacgagcagcagaagaagcactttttgtaaatatgaacgcaaatcagcgccatgtaactgaatggttagaagatgcaagagaagcaattgatgaaatagaaataattttagtaaatgaagcagatgatggttcggacacattatcagttgaattaggtgcgcaaggcaaccaacaaagaataaatcaaaatgaaaatgaaaggaatgaacaaagaattgtaaatagagaaagagttgaggctcctccagtatattatccgaaactcccatggccaaatttttatggagacacaatgtcttggccagttttttggcaagcatttcaagccaatatgggcgataaaccgattcccgaagcacaaaaatgtacttatttattgttaagcctaaaaggcaaagcagcccgagcaatgagagggtatcaaccaacagcagaaaattataatttagtaataaatgcgctaaagcgactttacggtaatgaaaaagtcataaaagaagcactacagaatgaattattgaatttaccgcaggccaatgaagctgctatttcactaagaatttgtttagaagatgttgnanaagagtgtgcgtcaattaaataatttngggatttcgctgagataaagatnatgtgatgatgaca

SEQ ID NO: 70410 - DNA, 940 bp, Heterodera glycines
atgttaagctttcgaagggtaccaaaattgtttgctttggttggtcgacaaagaaaaaagttatagtgcaaatacatgctaccgtgccggctcaaccgtaacggaccaactgagggaaaccgcattcatttcgtatataaattgaattcaggaagtcacttggccaacaatttcgcgcgcatatgcaaaaaataaaattggtacaacggctattgttgagggtgaagccgagtataaaaaagtagcgcagagggtaaaggaaaagcttgatataataggccaacaaaagtaagtaaaattttagagcggatgtgatgctcgtacgaaaatcattaagaggaatatttttagagtcagaccgggcttctggtactgaacctgtcataattcaaataagtcaacaaataggcaatgaaaaattgaaaaaattgtcaaaattcaattttattacttcagtctgcaaaatttcagaaaaattcatttgatttaagtcaatttcatgatttggccaaagttttcttgaatattttcacttatatgtattttatgctgcccttttgcgttttaatttcaaatttaaacatttacggtttattggatttgaaatattcccaagttattaaaagtgatattattatttttttaataaattgggctttaaatggttcatttttcagtgcctaatttcgtttttttatctttataatttcctaaatttagatattttcacacggtcatcgttttcccaaattggagtaacgcttttcagttggcaatccttgctaaacaaagtcactatttctttttggacggcgaaaatgaaatcaaagaaaataaaatcaatgtgatcgttgttcggtgtgaaaccgaccgttttggaagggctatccaagcggggcagtggtttacccaaacagttgaaaaccaaatgaagacatga

SEQ ID NO: 70411 - DNA, 919 bp, Heterodera glycines
tgcgtgccgagatgcgcgacggggacggcgaactgttgggaggtgccgagcggggggcacaccaatcattgagctgaactcgttgggcaacagcaaacatcagctgctgttcacaccgcccagggccgccaagtacaagctgtacttgtactgttcaggtgggaaataggtttttttaattatttattaatcatgcttaaattcttttagaattggtcgtgccaagtgcttaccctttgttggcaattgctgaaaaaaatggccaaacggcggcggaggagagagacgaactaagcaaagtggggaatacagaagaaaaacgaataaaaatattgaaataattaatacaaaatattatttgccttttttgttcaggtggttttgcgtggtgaaggactgacgacggcacgcgtcaaagagtcggccgaatttatcattgacgcatccgaaatgcatgaacaagtcggcaaaatcaatgcggcattgttgggcgaaagagcggacgtaatttgaacaaaattaataatcaattaattaattaattgcgaataattatttacaaataattaactattaataattttttttaaaagattcccgtcaaagtgtccgccctgaggaatcaagtctacaagagtgtagcagaacaaaaaatcaccgaaactgggtaattaataaattttagggcatttacacgccattgatgggcggcacttatcaattgattgtccaaattgactccaaaaatgtgccgggttcaccgagcacggtgattcacacattttgattttaaattaactaattattttaaacatttttcattattttaggttcaagttcattaccatcaattgcctgctgagttaatctctgtcgacgcgaaaccgctcaaatttggcgtgattaatgaggacattag

SEQ ID NO: 70412 - DNA, 1539 bp, Heterodera glycines
atggtgttcccggtgctcttcctgttcggttgcattttcctcgtcgcgttccctatgtatgtaaaaatttaatttatatttatttagaaaacctcaaaaattgcatttttatgccattttgccacagcgagccatatcaaatttaaaagctaatatatttttttctattactttttacaaaacaatttctgattttgacttttgcttcacaacaaagcaattatgtttctaacttttgctttccacaaaactatttttgttttgtacttaaatattttttgcgaattttgttggcaaagcatttttaaaaaattggttagcctaaacaattttaattacttttaaaaaaacaaatttaaaaattgccccattttttgccagcatttgcctttgccccgtgctgtccgtcacttccatctttggcgtctgcacttttttgtccaaatatgtggcttttgtgtcactgatgtgagttctaaaccaattcacggaatttgggattgttttttaatgccataaaaatgtctttcttcccacaacaaaatttgggtttggcaccgggcgacgctaacattgttaaaaaaggtttccctgccaaccatcaaaaacataataattcccattttttgcttatattttttaaaaaacttttttaattttttatttgtgttccaaaaaactttttctgtttgttttttgtattttttccggaaaactatttccgtattttttgtattcttacacgaaaaataatatctgttttttgttttgaaattttccagaaaactattcctgtttttggtttgtgttatcaggaaatcaaatactgaggcccgacggtgccggtaggcgccgtcaggaaaaaaattttaaaacttgaatgcggtttgttaacatattttgacccaaaattttgaatttcaccaatgcaaccaaaaatgctaccactaaaaatacaaacttcagtggcgagaaacaacaaaaattacgtcaaattttgcccattttttggcttacaatttgcaaacaacaaaaggattaatattattttggcacaattttttgggaaataattttacaaaaaaactggttaaccttaggaatttatattcatcaaaaaaacgatttataaatttgctccattttttgccagcatttgccattgccccgtgctgttcgtcacttccatctttgacgtctgtacaattgcgggccatctcacaaactctttgatgctgatactgccatttttgtgggtgccgttttttggcatttcagaatttgaaaatgttccctttatttgtccaaaatatgtgacattgatggcaatgctgtagttccaaacaaattctcgtctttgaggagatcagcccttccatcaacatcaccacggtagggatttaattaaggctaaaatttagttttacaaactctacatttcttaataatgtaaaacttcttgggtgaacaaatgcttcgaacatagttttggtaatactgtcgatggtagcgccccttttttgaaaaatttttaataaa

SEQ ID NO: 70413 - DNA, 293 bp, Heterodera glycines
gaaatttctcaaattttgccgaggccgttcggtgtgtgcgatgacgtggacattccgccgttgcccaagccgctgaagcaccgcaacaatggcgcacactgtaaacgtcaacactgatgatttccatggcacactgccgaagaacaactcgaatcatttttgccaaaaaatttggtggaacactttttattatttacaaaataattatatatatactttttaattcattattttgcaattcaataatttaaaaaaattgcttttttccacatttttctgcaattattaataaa

SEQ ID NO: 70414 - DNA, 639 bp, Heterodera glycines
atgaacagaaaggcagacacaaaaaatcacaagtattatgtaaattcagaaacatttaatcaaataaatcgtcaggtgagctttcggttttatttatgcaaataattcagcattttgccattcgtggtttttatctcaaaaaattaattaaataaaattaatcaaaatgaatgacaacacaacgtacaatacggtagtcattaattgaaatatttataaattgtttttttttaatttttgcagttttatttggccttcaaagatgtccatcccagctggtcattaattggatgcgcactgatttttggaatcattgcggtaattggcatcattttcaattcttctgtcattggtgtaacctttttaacaaagtgcgtaattagtgtagataaattcttggagtaagcagtattaatgagttataagtgaaccttaattaccttaattaggtcattccgtggcactgttaattacctcttggcactttgttccttttttgaaatcctccatcagattggccattttttgtttgtttatacagaattttctggacaaaattttattgagtatcgtttggcggcaaagattttaatgattcctttgtttgggttaggtaatttactcaaactaataattaaa

SEQ ID NO: 70415 - DNA, 102 bp, Heterodera glycines
taggctaatagagcctgtgaagagctttcgaatgatatcaagattgtttgattcggtcaataacttcaagagttatattgactcaaagttggctcagacgga

SEQ ID NO: 70416 - DNA, 516 bp, Heterodera glycines
atgatttgttcgtcgttccttttgcttgtcgacacagtcgccgacggagaaagcgccaaaatagttcggcacgggtgtgcatcaaagtcacttcagaaagcagtaagtccagctcaatggcatcgatggttgcgttagaattttgctgagtttggaccaaattcgaggaaattggtcgagtgttgtcaatcaaagtgaacaccttcatttacgggttaacaattattgtaaatagttattacaaaatactgcagatattctcgcaattaaaaaaacacctgctgagctttctcctcaaaatgtcttcgttggatgaacgtgttcaacactcggacgcactgtttgtcacattcgggctgaatcagctcaatcagcaacagtaatttttctgggccatagaaattttcgattatcggctgatgcagctcaatgatacgtgcaacgccctcgaaaagcattgtcaaagtgtccgcataaagtacgtttttgcgtttgtcgtcagtcccaccggcctaa

SEQ ID NO: 70417 - DNA, 2018 bp, Heterodera glycines
atgacgatgccttccaacaggcgatttcctccaatgcaaactctcggttgttgcttgtctgtgacttttttgcaaattggtaagtcattaatctgaaaatgtcatttcatctgtttacctaaactctcaataggtgtggaccgtgtagggcaattgcgcctctttttgattcactttccattcgatacgctgaaaaggcagtgtttctgaaaattgacgttgatcgctgtcgaggtgggactaaacagaaaatcacaagggacaaattaatgcttttttttactccatatttaatttttaaaggagaagagttgaaattaaatgatcgaatattttttgtcagctatgtactttcaggttcctgccaacaatacgcagttcgtgccatgccgacttttgtgattctgttaaatggtcaggaaatgggcagagtacagggcgctgatcccgctggacttgaacatttgatcgccagcttagcgaattccccggacattgggaaaggatctaccacaaagaaaactttggaagcgcatgttgccaattcagaagaaaggcgatggttggaaagattggtgtcacaatcgcaaagggtgcgccaaatgatttttaattatttgagtctcgaatttcagatgtcgatttatgaggacgaagtatcccaaacattggcactttcgcttattcccgctgaagaacttcgtgaaaaggcaacaacaaatggggaagtgaaccaatatgatttggccaaagggttgcttggctggttccatggcttcttcagctgggtaaaccatccaaaatgcgaaaagtgtggcgttgaaggaaaacccggtgatcgaggcgtacctatctatttatgtgagtttttaagagggcggcggaataccctcggaggaggagcgaaggaacggggccgatcgagttgagctgtttcgctgtgataaatgtggcgaccaaatccgtttcccacggtataacgacccgctcaaattgttggaaacgcggaaaggtcgttgtggagagtacgcaaactgttttacgctttgctgtcgatcaatgggatttcaaactcggtccagacaattttattttttaaatcgtttaagatttagctggatttctgacaatttggaccatgtttgggttgaagtttattcggaccaacttcagcgctggttgcattgtgatccctgcgaaaatgttattgacactccgttgatgtacgacaaagtcagtaggcaaataaggaaaatatattcgatgataattgtatgtaataaaaattagtaatttatatttctacccgtttaagggatggggaaagaaacatgcttatgtttttgcctttgccattgaccatgtccaagatgtcacatggcgttaccattttgaccaccgagcagcgatgaaaaggcgtaccagcgtgagagaacctgttcttcgcaactttttaaatgtgagcggagattcgatttagtaacatattttgtttgctaaagaagttgaacgcacgattggctcgtcaattgacaaatgatcgaactgccgggctgaaaaagcaaatggcctttgaattggtggagtttctcactgcccaccctcaacttcgtgatggaagcgaagcacagaatcagggccgtcgctcgggagctgaagcatggcgaaaggcccgtggtgaaagcaaataaagaaatttttataggatggacaaaggaagattattccccccccctccatttatgtataatcgtcgcacggtcatactgtatacactactgtacacctaaattagatttatttattgtctgaaaatgttaaaataaaactgaactgttctcttcaaaagcattaatttattttagtagtgacgccgttaaatttcttttgttatataaataatcaaattggaaagcatttcaagaaaccgaaaggaatggaaatcgaagaaaatggcaaagcgacttcatccgaggactccaacatgaaatggaaaactgaagaggataatttgtccg

SEQ ID NO: 70418 - DNA, 463 bp, Heterodera glycines
atgggaatgaacgctcttttgaacgcggccggaataagcggcggacaagcttttcctaacattggcacttttcctgtacatcagcaccaatttgacttacaatctgtgcgtatcccatcccatttcaacaatttatcatgcttttgtttgttcagctcgccgcggctgctcagccacatcatcaccaacagcagcagcagttgtcctccgctttgaacttgcaggcgttggttggggctggagcagtgcaccaaccgccgactcccatcacttccgccgcggcacccaataatattcccggcatttcgcaagaacttttattccaagcgactcttcttgcggcagcaaatttgaagtatcattcaggaaaagaagcaaaaatataataaatgctgaaatattaagcaatcccggactaattacgtcgaacacaacaccacaacagcaacagagaccaaaatga

SEQ ID NO: 70419 - DNA, 380 bp, Heterodera glycines
atgcctaacaatactctcatgggaagtaaaagctatatttatggatttttgaataaaaggccggcgtatgtaatggcagacagtggtaagtatctaaaattgcttaaatgttttttttttgaatataattaacccgaattttgcaggggtgttatttctaaattttagtgtatagctgccttacggacatttgcggacggacatttgcggacaattcctgagaaaaaaattaaatgaaaaaattttttttgttataaaatctctaatggaagagtgggcctcgtcagtgcggctcttccaaaagaaaacaaaaaaagtaaaaaaagtgtgtttcggccctaccgcagacacacaaaactaaagaagcacacatcaataaa

SEQ ID NO: 70420 - DNA, 759 bp, Heterodera glycines
  unsure (1)..(759): unsure at all n locations
ttacatcgatcactccgtcatcgctnttcttcgttcaaatcacaaaatnttcgacaaaagtggcaccaagttgcgtatggggatgctttactcagatatggcggatgaccggcagccgatttgggacgtttttgttcgtgaaatatggccaatttttgcatcaaacattcgccacttggactttatcgatgctgatcatttggacaatttgcgtcgtcgcacttcgcccacaattctcactgatctcaatcagttgagttcaatcgattccgttctattgctgcccgatgcaattggtgataattttgatgggccaaatgcaactgctggccaagccttgtctaaatggttgcactctccgagaaaatatggccaacccaagcgattccgtttcattgatattaatgaacatgtgagcctacatttgatcaacaatttaaaggaggtgcggcccaacattttcggcaaataactgatttttggaattgtttaggaatttatgcgtgccaccaccatttcttccgtcagctacgaaattcatttttctgttcatgtgccgacaaagccaatggtgccgtttgaattggtgaacgaacgaacgcaagaaaagctgacattggccaaatcaaatgaattggacaacatttggataatgaaacgatgcaaaattggggaggccgcggcggttcagcagcagaagaaagatgaaaattggaactatgtgtacttttggctttatagtggaaccaattgcatcgg

SEQ ID NO: 70421 - DNA, 788 bp, Heterodera glycines
agtgtccgttggggtactcaacatttatggggagcaaaaatccaacgcagattaaagtacaggctataggaagctattccgaaggattcggtctccccataaatctgggcgcatcggtcggggggactgccccgaaaacaaaaaaatcgatttttcaagtgtccgtttggggtactcaacaattatgggagcaaaatccaacgcagaattaaagtacaggctatagggaagctatccggaaggattcggtctccccataaatctgggcgcatcggttcggggggactgccccgaaaacaaaaataaatcgattttttcaagtgtccgtttggggtactcaaacaattatggggagcaaaaatccaacgcagaattaaagtacaggctatagtgaagctattccggaaggattcggtctccccataaatctgggcgcatcggttcagggggactgccccgaaaacccaaaaaaaaattttttggataaaaattatttaaatgaactgactagataatatttaaaataggttatttctcttcctttcagtattcctgcaaagtttggtgcgcttctgatcagtttctgaaaaaaaagttaagcctaaactttttggcctgtttaaaaaggaattaaaaatttttaaaaattttattcatctccctttttgatagaaaaagcatcagagtgcctaaactaacatgtaaataaaatttggtgcgtttcagaaccctttctgaaaaaatatttaagaattaattttgcaaaaaataaataaaaacgaaagact

SEQ ID NO: 70422 - DNA, 156 bp, Heterodera glycines
taagcctaaactttttggcctgtttaaaaaggaattaaaaatttttaaaaattttattcatctcccttttgatagaaaaagcatcagagagccttatttaacttttaattaacatttggtgcgtttcagagcagtttctgaaaaaatatttatgaa

SEQ ID NO: 70423 - DNA, 553 bp, Heterodera glycines
atgacggcacaatgggaaaggtgaaaaacattaaaaaaataagaatttaaataaaattcaaataaattatacataaaataataatttaataaattatacataaataatcatttacataaataaattttgcaaaaaaataatcatttgataaattatcgataaaataataattaaataaattatacataattaataatttaaataaattatacataaaaataagaattttaaataaattttgcatgaaataataattaaatacctaaattatatataaaataataattttttataaattttgcataaaataataatttaaataaatttttgcatctaaatttattggattgaaaaaaaaacaaattattttaggaacaaagttacaacaccatcaaatgtgcgcaacgcaaatatttgggtgacgaatcaacggatatttgccgtaagttgtaaatccattaacagttaatttgtagaatataggaaaaatgattttttggagatacgaaatattggttgcctatttttgtacggactaattactttaaataaa

SEQ ID NO: 70424 - DNA, 132 bp, Heterodera glycines
atgcacctgtccattcggctcccggacaatcggacagtggacaattggacagtggacaatcggacagttgggcaatcggacagtgaggacaatcggacagaggtggacaatcggacagaggacaatccgaca

SEQ ID NO: 70425 - DNA, 983 bp, Heterodera glycines
atgagcttgggcttcattattaaagcccttgcgagaaagtaagaagcgagtagcaacattcatgttaatgtgcccccggggaagagaaagacccaggggggttgattgtccaaaaaatagatataaaagacccaaaaaatcaagaattttttttcggcctaagggtcgagagaatgttgattgctctcggaaaaagcgtcagtgatatactgaataactaactataaatatgaatataacccaaccataagaatttttcactgtttgcatttaaattttataaaaaccccaattttgtttttaccatttttcattgaaaattcattataaatattatgggacacaattaattaaaattatgcgcatcattcagtcaaaaatatatattccaactaatgattggctgtgttaattaccataaccccaaatttgactgacccaatgggatttgccggacgacgaagaaggaccttttttgaatttaaaacttattttaattttattttttaaacaacacctcagccaatgcttttgttagcacgggagcgaccgtccgagccaaatagaggccattgtcacttctttaattaattaattcgtgcaattaaaattaatgagttaaatcactcagtatatcaaggtcccgttattctataaacattaaaattgatttttttttcttttgggttttctgatagctttttcttgaaataaatttcgggctaggcaaaaaaagatgtcattccaaaagccttcgtatatatttttaaaaatttacgttggcatgtccaatttttcatgtaacagccgttcaaagcgccgtttctccatgtcctcctcttcatcgtcgccgtcccgtcgtcctgtgtccacgccggaactgtgccaagaaaaatatgtaaaaaggtatacaattcaagagttttgagacagtaatccataatattcaatccatgacttgctgtattacggtaattaataaa

SEQ ID NO: 70426 - DNA, 477 bp, Heterodera glycines
atggttggtccgttacattgaaaccggcgaggactattgaccctcgggggacggcggcggaggcgctgatcggagagactgacagaagcaaaacaaatccatggatcattaacacactttaattggccaacatttcattgtcccgctgactaattagtaaacttattgtattttaattatgtttggatatattcaatttgtaaattattttaaagtaaacaaattcgctatttgccagaattttgtaacatttttaaaattgtaaaatataaattagagaataattaaatcgtaattaattgacctccctcccttcttctgctgcccattattctcaccattgtttcagtgttttattgttcaattaatgtggggtcacgcaaagctcaacaaatgaaaaatctctcaacaaatcataattttttacttaaaaaaatgagagacaatttaaagaaactctaattaattttcatttga

SEQ ID NO: 70427 - DNA, 1672 bp, Heterodera glycines
atgtcggacaaaccttcagcagaagatggagagcatgaacaacagaagaaaatgaaatgggaaatgtaattaatttaaaattttaattttaatttaaaatttattacttttaacagttggtcacaaaattttggggaaaaactttgaatgtaaaatataaaagcaaaaaattgtaaaacccaaacccaaagcccgaaaaatcccgacttttcccgcccgagggcgaaacctcgaatttaattatactggtagaaatatatatcaaatttatattttaatttgaataaaattcattatttgaatttgaattttattaaaaagtgccaaattttagcccaatttgtgccgacgattggctggcggtgtttgctttgctgccgccgcgtcaacttggccttgaaatcgcactgctcagcccgcgctttgaccgcatggtggacgaacacttcaaaacgcgtcgttgggcattgaaatattttcgcattaaaagcaaaattggcgagaatggcacgaaggaaatgcgaatcaaaaatttcaatcgaaaagtggcaccgattgtgccaattccgcgcattccgttgccggacaaagtcgtcgacttctccggcatttcaatacggtaaataaaacaaattgatgggaatattacttaatcacgcgggatattagagaccggataattggggccggaggaatcccgaccgacggaatcccggtccccatcaatcccgatgaattacaaaacggctcgtgacggatcctaaggttgggacccgaatttaatcaaatggatccctaaaaaatcccccggaatcccgattctcgacccgtccgttctctagcagaaatgaaaatgccaaaaatgggaggaccacagaaattatttagaaagggcaaaaagagtaaaataatataataaatttaaaagatattagggaaacaaagttggggtcgtgttttgtcggggacaacaagttcggagttgcccaaattggtccggcgtttatcagagttggaagcttcggggtcggaggcggggtcaggaataagttgaaaatgccaaaaaatgccagagtttttacctgtgataaaaacccaaaattcagccaaatttccccaactcaattttagttacattgacaatgatgtgatcacttttctccaacgttttcaacgccttttcgcctcttgcgcaataaatctgagcatcaaaacaaaaagtggccgcaatttaaaatccattgaacgtttcatttggccaatgatccgacaaaacatttgtggcattattttttgcaaagccaaagattttcgccgtctccgaaagaatgccccgtccattctccgtcacattttccgcatcgatgacgataaaagtccgcggaaaataccactccaatcagtgtactttgataagggcgaattgcccaaattgccaactgccgttgaaagtgcccatgacaatggcaatgccaatgccaaagtgccgttgaacgaaagcgaagcgttgaccaaatggttgttctcctctcgtccggagaacgatttgccgcccaaagtgttgcgatgccgtgtctataactctgatattgagagttggattgcgagaattgaacaatacaaaacggtgatggtcaattttggttttaaatttgtgctgtttgtagtttaa

SEQ ID NO: 70428 - DNA, 440 bp, Heterodera glycines
aaatctgtatgtaagtaaaaatcgtaattacgctaaaaaagcttctcaaacaattttagcgcttccaattccttctacaattgcctttatacatcccattatgagcgctaaaattatcagagtgccgaaaatcgcatgtgatctaagcctagcaaaaaatggtgtaagtaaaaatcgtaattacgctcaaaaagcttctcaaacaattttagcgcttccaattccttctccaatcgcctttatacatcccattatgagcgctaaaattatcagagtgccgaaaatcgcatgtgatttaagcctagaaaaaatggtctaagtaaaaatcgtaattacgctcaaaaagcttctcaaacaattttagcgcttccaattccttctacaatcgcctttatacatcccattatgagcgctaaaattatcagagtgccgaaaatcgc

SEQ ID NO: 70429 - DNA, 138 bp, Heterodera glycines
atggaaaagatttactatttgtcggttttgttcattttctgttttgcattcagtgcattttctgtcataagcttattcatcacggctgaagcattgccttatttgaaaagtagtggctttgaagctgatttatatcag

SEQ ID NO: 70430 - DNA, 265 bp, Heterodera glycines
aacattaaatagcccgacaaatcgtttattggcatttaatgcggccctcgaaattgcgcatcaatcatcgtatttcacatttttgttcctcagtttgaccggccaaacattcattgactataaattggccgttaaaattggcacactttcaatcattggttataatggtgtgtttcctgcaatgctttgtactgcaattgaccgactcttttgcgtcatattcccttatttataaccaattttttaattaattaatataaataaa

SEQ ID NO: 70431 - DNA, 1066 bp, Heterodera glycines
aaagagacgaactgagaaatgagaaggaaactttgagcaatttgcaaacgcagcggaaaaaatcggacgaaaggcaaagccaaacggacgatgaaccgaagcaaagaatgacggagcagcaaattgcggaaatggtcgagcagaatgtgcagctgaagacggaactgaacgagcgagaggaggagctgtacaggctgcgcaacgacaaagtgttggccgaaattacgacgtcggagggacatagcaaagtcagtcagtcggggaaaactacggagaaaaacgggggaaagggaagggggcggggacaaacgcgacatatggaggggacaatgccatcagagatcattcagtccctacttcctgcaaaattcactctaattttaactcaaactcagaggcctcccagtgacacggactcagcgacttcaaacaacgattgggaacggatgggcaaagaggaaatcgaagtcgaaggggtgagcagcagtgccggcagtgaagagaaggaaacggccatggcaaatagacgcaaaaaatcttcggaactgagcgatttttccactcaaacggacgaagtatcattttcaataagaaaaacgagaatagtcaaaaagatatttttgggcatgtttaagacgcaatttggcgaagacaaatccgaagaacgtttgaatttacttgaggaagagttggacaaagcaaatagcaaatgcgaaggaatggcgacggaattggcaaatgcaaatttgagaattggggatgccttcaaaattaaagagcaattggaagcagaagcggacttaattgtattggaccacctctttttcagactccccttagatttgttctcaaaattcgatgattgacaaagacgaggatgcgctgagaaggcgcgaggaggaaattgcattgtaaaacaataaatgaactttgaataaaaggaatcattactatttctaatttcgtatttttcaattttgagggaccgcgagagaatggcgaagttgcaaggcgatttgccaagactccgcgaacacttgctcattatggtggagcattcctctaa

SEQ ID NO: 70432 - DNA, 2490 bp, Heterodera glycines
atgccttctaaagatcgtgagttgaaaagaaggaagcaagaagagcacctgcgacggacggagcaatctgtcattccaggtcgctcacctatcccaaattgccctcctcagggcaattcaaactgtcctattctggacaacccattgagtgcagatgggaatggggcggcatcgccccggggttttaacaccccaaatttaagtgctttgcaattgagcacgccggcttcttccattggaagtaaaagacggggaagacccccgaaaaccggagcggagtctatcacggcttcgcaaaatagtgtgtcatcaattgacacacaaatcactccggccactcaaaatattgggacatcgccgtgcagcaaaaaagggaaggtcgccgaagttaaccgacccaagtttgctactgaagcaattgcttcaacgccagtctccacgcaaaaaagccgtggacgacccagcaaaagaagtggtggtccaggcaggtccaaaacagatgcttcaattagcgaaggctcgtcaatggatcagagctctgaagctggcacaaatgtggcggttttgcctaatgtggctgaaaaaattgatttcaacactgtgcaaatcaatttcgcaaccacgcgaaatttttcctgcaaaatttggaaatgggcagcaattggcctttacgaacgtgatggcgaaacaccgcttgcccctagatctggtccaagatacattgagacctgttggaatgatctgacccagtttctcaatgacggctttgctgccacatacttggcatacttggcaaccatatcacaacgaaaagtggtcgttgttgacccaatggtatggagcaatggcctggacagagtcatgccttacaaaaatatgacatttgggtacgaccctaatgttccggcagaagttatacttttgccagtacatttccctggacattggactctcattgtccatgatgtgcaatttggcactcattttgccgattctttgcctaccacatatggcaggttggatccgcaactgacgaataaaattaaaaatatcatttcggatattttgccgtcaacagttttaaccgggatttttaatgccgtaaatctgacggcccaacacgatggtaatagttgtgggtacttcgtgtgcctgtatgctgagtcatggcttatgaacaatcgcacatttgttctgcctgatttatccatcaattatgaaaagcggcgcatattgtggcacattaacgagctttatggcacagacaatgtgccatatcatccgagggaaggggtaccaactccttgcccaattgtctatcgacatgcggatgaggtgcagtcgacatccaaggccgctgagctaatggaagttgatgaacatgatgatataatgatcatcgaaccacagacaagtggacaggcagttgatgccattctcacccaagcccaagtggccggtgaaaaccaagctgacacgcttggtttggtgtcggagtcttgcatcccgcaagagccaattgcgcaggctgatgatgtaattttcatcagacctaagacgccaccaaggcgatcaatgcgcgttcaaaaaaggcattcagcttctgttagccgttcgccttcaccggcgcctaaacgccccccgccagcaaattcgctgggagtggcaacgccgatcacacggcgttgctctgcatttcacaaggggtggcaatgcgctgcagcagcagccaaacatttcccggaatattgtgactccgggaaactcggtgacaaaaaatgcgccgattgcgctgcacatctcttctcacatgaagacagtagcatttgctgccggaagggaagagttgtactgccaatgcttaacccgcatcctgatgagctcaaacagctgattgtggggaataagcaatcccgtgaagggaaagaatttgttcgacacatgtcgcgttataacaacctgctccaatttgccagcgtttccgctggcaacaaaccaagccctgctggcggtccgatggccgttattcttaacggagaattccatcgccgcataagcagcatgcaggctggtacaactcagattcctggctttggccagttgtacattctggacccagtcgaggctatggaacagcgtcgaaacaaccccaggtttactggggagaaaatcacaaacgaagatgagtttgtgcagggtcaccagctaaatgagcagactcttgagatcttagaacaaatgatccaattgcatcatcctgctgcgcaggcatataagcaggcgcgtgagcagctcactgagcttctccaacaacaaactccggaagagcttcgcttctttcgcatgactttgttgaatgagcgcagggctccagctggtctgaaagacccaaaattgcacccacaccaaataatcaccccttctacgggtgaagggatgttcgctattcatgcggaccccactggtgctcctccgcccaaaggaatttgg

SEQ ID NO: 70433 - DNA, 843 bp, Heterodera glycines
atgggattgtggtcaacaacgacctgccccttatgggattgtggtcaacaacgacctgccccttatgggattgtggtcaacaacgacctgccccttatgggattgtggtcaacaacgacctgccccttatgggattgtggtcaacaacgacctgccccttatgggattgtggtcaacaacgacctgccccttatgggattgtggtcaaaacgacctgccccttatgggattgtggtcaacaacgacctgccccttatgggattgtggttaataacgacctgcccgttatgggattgtggtcaacaaggacctgcccgttatgggattgtggtcaacaaagacctgcccgttatgggattgtggtcaacaacgacctgcctcttatgggattgtggtcaacaacgacctgccccttatgggattgtggtcaacaaggacctgcccctcatgggatagtggtcaacatagagctgtccctcacgggatacatttaaatcgtctttttattatatatcaatgactgcattagggcacttccggtttccattatatttacaatgtaatgtgtcagcttctcaatgaagtgaaaccaagtgcatgtcgggcgacgcaaagaccctaaagaaaataaggacctgcccttcttgggattgtggttcgaggacctgccttttgaggattgtgggccacaacggtttacaatgatgatttccttattgttaccggccaacatccggcgcgaagctggtcccgcactttgccaagaccagtggactggtgagaggtaacataggatatcggagttaaccaaaacttatcaagtaaaaccttggtgacaataaa

SEQ ID NO: 70434 - DNA, 323 bp, Heterodera glycines; identical to SEQ ID NO: 69014

SEQ ID NO: 70435 - DNA, 66 bp, Heterodera glycines
atgcttttcggattgaagcatttgattgatgatgatgattgtggaaggggaggctcaaaacgatgt

SEQ ID NO: 70436 - DNA, 382 bp, Heterodera glycines
taatagggcctagttaagctgtaaaaaaaatttgggggcgatttaaaagagaatagaaagaaccaggttcgatgaagttttggtaagccaaaaaaaatccaaacatttaaaaatctataaaaaatttaaaaatgagaattcatgcgagattttctggaaataagcttaatatcgcctagttaagctgtaaaaaaaatttggggcgatttgaaagagaatagaaagaaccaggttcgatgaagttttggtaagccaaaaaaaatccaaacatttaaaaatctataaaaaatttaaaaatgagaattcatgcgagattttctggaaataagcttaatagggcctagttaagctgtaaaaaaaatttggggcgatttgaaagaga

SEQ ID NO: 70437 - DNA, 285 bp, Heterodera glycines
taaaaagagccaggttcgatgaagttttggtaagccaaaaaaaaatccaaacatttaaaaatctataaaaaatttaaaaatgagaattcatgcgagattttctggaaataagcttaatagggcctagttaagctgtaaaaaaaatttggggcgatttgaaagagaatagaaagaaccaggttcgatgaagttttggtaagccaaaaaaaatccaaacatttaaaaatctataaaaaatttaaaaagtgagaattcatgcgagattttctggaaataagcttaata

SEQ ID NO: 70438 - DNA, 928 bp, Heterodera glycines
atgccaattgagccatttgaattggtgaacgaagtgacaaatgagaagctgacactgacgaaggatggcactggtgaattcaattggctgttggagagatgcccaattattggggagacggcggcggttcagaaacagcagcagaagaaggacgaaaattcggatgccaatttgaacaaagtgttcttccgcctttacgatgacattgggtgagcagaaaggaggccttttttgtatgaaacacggatagggaaacggtatcccatgtacagtactttcccagaatcttggcagggccatgggttctgttaagacagaacttcagtccttagttttgtcttttttgctctggtccatcccgaaaaccctgctggtccgggtttttccaataattacgggctgtactttcgaaaaagttatccgattcaaattgcgcttaatttaggccgctgtctccgccaggtcaaagcaatgaaaaagtgttctctttttccgggtccagtgatcagcggaataagaaaaagtgatcattttgggaaatggccgatcattatcgagttatgatgtattggattgattgatgatgttttgtttgctctttgaattgttcaatttgacgctgacatttttgctattaaaaaaatggaaaatttggcactttttttttactttagataatccgatgttttttctttaggcaactgatttttggtcgtgttttttgtttgtgttcaagtttcaaaaataatttttttagagtaactaaacttgttttgggtctcggttttaaagtctcgggattttatagaggcaagaaaagaacaaataccaagcattcataaaaaaattacaatgagaaaacacgaaattcaactttgttttccgagtgtatttgcgaattattttttccaatagccttaggtaaaaa

SEQ ID NO: 70439 - DNA, 343 bp, Heterodera glycines
ggaaatgtctttgttcaccaaatgccccgatggctttaccaatctgcagctgatcgaactgtttcgactcgactggcgccgcattcgatcagaggaggaccttctcgcccactccgatcatttgcgcgacggtccgttgggccgcggctgtctgatcggcccgaccaactccgccgactgtttgcactgtttcgagcgtctccgacgggcgattgagcaggtggaagccgtccactgggcatttgccaatttgctgaaccgttttgactgtcgtctcgctaaatttggcctcgcttccgcgacacagcccttctcgcccaacacgacgtgccacaattgcgcg

SEQ ID NO: 70440 - DNA, 234 bp, Heterodera glycines
atgaaaaattttacaaaatgcattaatttaaaaacagtaagtaataccgagaatgaaattaatttaaacaaaaataatataaaattttagtcaaaagttatatttttgatctcatcccaaaaagaaatgaacttaattaataaacataaatttttaaataataattctacgatttatcaacttagcgtattcatatggaaaaatttgaaaaataagttatgaaatgataattta

SEQ ID NO: 70441 - DNA, 520 bp, Heterodera glycines
atgaacgctgcgcatgtggaatgtcagcgacttataactggattcaagcgacgtgctgctgagacgtgcgaagcacctgtgactattcgtgctcaagtggtgcaaaacacatgcacacctgtactagcagcttttccgagcaaaatcgccacaaaaagtgggtttatatccaaaaacaattttgttattttttggttttttaggtgatcaaacgataaaagaagtatcgcgaagccgatgcacggattctccgactcttctaccgttataacgacatcaataacaatcacttcccccaaaatgatcacaattatgcaaatgtcaatgtgaatcccgaaaacgctaacaattttctcactggtgtttccctaaactatgaaatgtgcgaccttagtttgttcggaaatttgatattttttgttatactatttatgtgtttttataaaattttaattattttttccgtttgacgcacatccgaccaaactgacaaattattgaagatactagccgcaataaa

SEQ ID NO: 70442 - DNA, 111 bp, Heterodera glycines
atgttagcgaagactgaggagcttgacgagtctttgcggagcattgagaagctgctgcagcagatcaaagacaccaaaagacttctggacaaattcgaagagcacattgtc

SEQ ID NO: 70443 - DNA, 1035 bp, Heterodera glycines
agtatcattggcactgggaatcggctaccctaaccaccagccgaggattggtgatggcattgccgaaactgcaaataaatgaccactggttttaggagctgagcgcgtctgaccaagtgcgagtacgaagacaagcagctggtcagtgcaattgaaaaggcaattaatccgatcaatttgcttttaactttcagctgcttggcaagtcactttggtgtgtcggcatccctttgtccccctccccctatccgccatttccccacttcctccccccctccaaaggtcatgtcccaagtgttccatctgttcatgtgcaccacccgtcgcatttccatcttccaacacggcatcaccaacttagtcagcatatttgccatcatcatcgagattctgttgttgaatttgtttgtctatacggtcagtgatttgggaaagggacgagaataattgatttaaagtaattcttctaatttacagaccaaatttcatatacattttaagaagcatttttagagtaaaaattttgacagaatatgaagctcttgactaaatatttttagccgggaattttcccttacttaaatttacatagcattcctgaaaaacctgaaatgccttatcggtcccaacggcggtcacccgagatttttcgatgccggagaacccaaacccgggctcgggatttaaaaagtcgtccgtatgaattttcagaattttatgtctgaaaaattatgtgtgtgtttgtctcgtaaattagaagagtaccaactccccccccccccccccccctcttgacgatgcatagtcacaatcactgtttagcctgccttccaatatctgatgaatatccaatctccgccgatgttcgtttggcttttcgcccccgtcgtcggcctttaccttctcatttttaacgaaaggttaaatccatcaaatgaaagataaattgttaaggattaattcattcattcatttagccgtaaatatttcattcgcaaccacccaaacaacagaatcgtgcgattattaaagttt

SEQ ID NO: 70444 - DNA, 653 bp, Heterodera glycines
  unsure (1)..(653): unsure at all n locations
atggccgatgccatgcaggacggcgcacgctggaagaaggcgaaaacagcaatcaatgtgctcggcaacctccttttggcggaatcgctggacaccacctccgctactccgctgaaaaatgatgtcgcggacatcaaaaaagaagaagaagcaactgtggcggaagaacacaaagaagatgatgatgaccaacaaaaagaggacctcggagacattgacaaaacgcttgacgatttcttcaacagtattaaagcatccacagcaaacatgtagaccctcattttgtgtaaaaatgttaaacagccaagcattcagcgataaagacatttgctttaaattaccatttggtctaatcatttcggggccttcgtcgtcgggaaaaactcaatttttgctaaaattcattgccgaatcagaccacttaatcacaccaaagcctgtgtccatgctctattgttttggtgaaatgaatgcggcggtgcctgtgcttcaaaaggcaggagttgatgtgtacgcgggagtcccatccgaggaattgattaagcgcctccctaagcctcttttgctcgtccttgacgacttgatgctgtccgttgatgagcgatacttgtccgatttgttcactanaaaggctcaccaccatcagttttgca

SEQ ID NO: 70445 - DNA, 837 bp, Heterodera glycines
atggcctccgtttcaaacgattatcgacaaatgaaaacagtcccaccaccatcaagttcaatcagcagcagaaaacccaatgtttgtgatttgttatttaaataaaaaatttataaatttatagaatatttttttgacaaaattaattcatttataaagacattttattaatttgtaattcattttaatttagcaacataatagtaaatcaatattattttaaattcataaagaaatttcataaaagcagagaactgctaatgttaacttttaattacgaaatttttttgagtttagttgaaaatgatttatttttttagccaaaaaccaaaaaattaatgaaaaattcgatttttatgcgttcttgcttcaatgatctttttaaatgccataacagagtattttttaaaaggacgtccttggcttacaaaaattcaatttttcttatattttattaataatcaatttttaactgttttctatttaaattttaaacccaaaattttgctaaggcagaatatcagccaagcaatcagacgggccaaggcaagcgaattgtggacagtttatgggatttgcgattggattcaattcttggcgatcaacaaatcacagaagcagtgcatcaattaattgtggcaattatcattattgcactcatttcagctgttttggtcagtttctttttttctttttgtttttttggaatattttaaaagttttatttaaataatcattatccaatcaataaaatttacagtatttagaagtctaattttagtctcgagaaaagaatctttattagcttaaaatataattaattttgcaaaaaataaa

SEQ ID NO: 70446 - DNA, 713 bp, Heterodera glycines
  unsure (1)..(713): unsure at all n locations
atgtttgggcnacagcaaacnggtttgataaagtgagcacaaaaaaaataattgcctaattgactgacaatgaacccattcaaattttgcttttattttctggtttgtattaaaaaacaccattggaacggatttttgtaaaaaaaattgtaccaattataaggctaatcgaagaggacgacacggacaaattggcatcatcatcctcatccttcagcaaattgcggcacaatgttgtcgccagtctgctgttggtgctgaactcgttgatgcatgattttcggacaaggtatatttgtttctaaagagtttcggacattaatgaaatcctgaattttcttttccattcttattcattgtcagccaatccgccttccttcgccaattggactcgcggacagcaaatttggacacttttgtgctcaaatcatccacaaatgttgtgccaactgctgcttctgtttgtgccggtgacagtgggaccacggacggtgccatgacaagttgcacgagagacgctgacaagcaacagcaggaagaattgacaatcgaccaaattcagtacatcatgcaaaatgagcacgtgtccaaggagcgcgaacaggaggtgcgaagaacaacaagatccccatcccctgttgtttcccccgatttttttatttctaacttttgttagaattttttcaaaaaaacctatgagcttttggtcacta

SEQ ID NO: 70447 - DNA, 709 bp, Heterodera glycines
atgtggagcttcttctttgcgatgattgttctctctttgctttgttttttgtctctttttggtgccgaagtgaaaattcgcaaatatttgccgatggttgtgcaaaattcgcgcctctttagaagagaagatgtgagcgcaacaaaaagaaaacttattcaaatccgcgaaatcggaaaatcattctgccaacggcacgacagttgccaaagtcgtgccgtgccattcactcccccggcatcattctcattaaaccattgtcccaccttaatcccactaattctctgctcgccactaatccccttcccccgtcgttgctcagcaaagcccattaattatgcagctaataataaattgactggaacaagcatgtcccaggaaggagctgtctgactggctggaaaagctgttgccatttggaatggagggaattaattgcttaatcaaatttgagccccgggggagaaagcactcgctccaatgccctcgagggatgccacgaatggtttatgaatatgggagggggcggggggaagggaagacgcaaatgtatttatttgtgtcattcattcacagccgtaaaattgggggaaattgggaggggggagaacggaagaacagaccccaactcaattaacaccaccacagcttaagaaaagtgtttaatttgtcgtcattgaccgagtgaagcaacattttttttaataaa

SEQ ID NO: 70448 - DNA, 1071 bp, Heterodera glycines
atgaacaatcatttcatagttttggtatactatccaaaaatacaggttatttcttttccaaataaacataagattcctcaataaaggagacgattcctatcatcgagatatcacataaagtccaattaaacaacgccattcaggcagttgcgtaaaagtgtcagtgtttcatctcttaaacataatggcagaaatcggacaagaataaatcggtgagcagatgtcgggggtcatttagtggggggggggaggggaaattgcgcgaaaattggccaattgaacacggcggcaaagcttttgatcactgaaaaacattcccttggggcaacaaaatcattcccacggcctcatgagaaaaaacagcgaaaagggacgaaagatcaaattgcaaagaaaagaacagacagagggacggaacatcattactcaacacaatcaaaacagaagaaaaagaggagggagagcaaagcgaaccgaacggacggagaaagggagacaaaccgagaaaagggaaaagccaatgtcaagaaaagggacaaaggagcaaaaaggggcaaagtcaatgccaagaaaagggacaaacgatcaaaaaggggaaaagccaatgccaagaaaagggacaaaggagcaaaaaggggaaaagccaaggaaaaggaaagggacaaacaatcaaaaagtggaaaagccaatgccaagaaaagggacaaacgatcaaaaaggggaaaagccaatgccaagaaaagggacaaaggagaaaaaagtggaaaagccaaggaaaaggaaagggacaaacaatcaaaaagtggaaaagccaatgccaagaaaagggacaaacgatcaaaaaggggaaaagccaatgccaagaaaagggacaaaggagaaaaaagtggaaaagccaaggaaaaggaaagggacaaaggagcaaaaaggggaaaagccaaggaaaaggaaagggacaaacaatcaaaaagtggaaaagccaatgccaagaaaagggacaaaggagcaaaaaggggaaaagccaaggaaaaggaaagggacaaacaatcaaaaagtggaaaagccctatga

SEQ ID NO: 70449 - DNA, 698 bp, Heterodera glycines
atgccaacatttgcgcgccaatttggaactggcacggaaggaggtcagagaagcggaggagcacgagacagtgctgcgcgcagacatcgacaaattggagagagagttggcggaccagagacgcacgacagtgccaatgcaaacgcaccaattaacggtggacaaattggagagcacagaacggaaggtagagagagagagagaaagagaaagagaagggagagagagagcgggaggaaaagaagagagagaaagataagggggagagagagaagaaagttggcataatggcattggtgccattttgttttttttaattttctgagttttatttttggaaattcagtgaatttttgattttttataatttcttggcgtcagcccaacccttagcttgttagcgctataatttttccataaaattaaactaaatttgagttaaaagtgccaattgaaaattaaacgaaattttagctaaaagtgccaattgaaaattaaaggaaatttcagcaaaaagtgccagtttttaatttcggaatttttttccacaatttttaaattgtttttcttgaaatttatagtctaaaaaaggaaaaaattataaaatggagtcattaaaattaatttttattttagagccaacaattggagcaacgtttcaccgctcagttggacacgttacagcgcgaaaagtttga

SEQ ID NO: 70450 - DNA, 344 bp, Heterodera glycines
cgatttgaaagagaatagaaagaaccaggttcgatgaagttttggtaagccaaaaaaaatccaaacatttaaaaatctataaaaaatttaaaaatgagaattcatgcgagattttctggaaataagcttaatagggcctagttaagctgtaaaaaaaatttggggcgatttgaaagagaatagaaagaaccaggttcgatgaagttttggtaagccaaaaaaaatgcaaacatttaaaaatctataaaaaatttaaaaatgagaattcatgcgagattttctggaaataagcttaatagggcctagttaagctgtaaaaaaaatttggggcgatttgaaagaga

SEQ ID NO: 70451 - DNA, 150 bp, Heterodera glycines; identical to SEQ ID NO: 61611

SEQ ID NO: 70452 - DNA, 156 bp, Heterodera glycines
gagcaaaaatccagcgcagaattaaagtacaggctatagtgaagctattccggaaggattcggtctcctcataaatctgggcgcatcggttcggggggactgccctgaaaacaaaaaaatcgattttttcaagtgtccgtttggggtactcaaaca

SEQ ID NO: 70453 - DNA, 69 bp, Heterodera glycines
ttcacaaatcatgtttcaaatgtgccatttgcgacaaggcgcttgaggttggctcttgttcgcttgagc

SEQ ID NO: 70454 - DNA, 851 bp, Heterodera glycines
atggggccaaagatagtaatctatttgcttggcattggggtactgtggatttttgccgtagtccaatgtttaccggtcaatggaatgtctgcctatggtatgccaaaaatgtttaaatagagaaatatatataataaaaaaaaatgataaaagcatttaaaaaaatgctcaaacaatgcaaaggcaacaaatattcggcgcggttttaaaattttatgaaatagagacgaactgactcccagaaaaaattatcgtaagtttcacccagtaattaatttttgtttcttttgatttatattgtatgaagatttcttgtcccggccatccagaaccggtccggaccgttaaaattcagacccggcccagcctttcagtgcttaatagcatgctgaactaaagcaattatccttaaaatataccgtaattaaatattatctcttttgtttaatttttatgcaaattctattaaataaataattcatttattattattttttaaattttttaattggctgcagttgttgacgaccgtcctgtccatttgtcgctgaagcgtgccattggaatttactggaatgccatccaataccctggaatcgaaaaacgtaccgcctacccctatccaagtccgacggatatcaaatacattggatttgggcgaaaacgtgcaacatttgatggtgccgacaaatgaatttaacaatttttttaaggatgaacaacaaacaagcaaattaatgtgtgaattgtgagattgcgattagaaaaaaaaaagtttttaaaattattttaaaaataatttgatttcattaaaaatttaacaatttttttgacaatgtaattatgactga

SEQ ID NO: 70455 - DNA, 321 bp, Heterodera glycines
tttcaaaagcccgttgtgccaaatatgtgaaaaagatgtgccgccaacagacaaaattgtcgtggacagactaacaagtatgttaattaagtttttatataaaatttaactttattatcggctcccgctcaatagcacttttaataatttttatttctcaaagattggacccaaaaaaaatttaaaaaaagaaaacaaagactttatctatccctgccaaagggagatttttttattcgcatcaatttagtccataaatcgtgcttcaaatgtgctatttgtgacaagccactgcaacagggttcatgcaattggagcgcg

SEQ ID NO: 70456 - DNA, 536 bp, Heterodera glycines
atgagtagtcagcaacaacagttggatgtgcttattgtcatagatggtaccaacattgataagccttgtgtattttttgatcttttcaaatttcaacatttaacttatttaatttaaaggttgatattttttcgagttctggctttgttgcttcttgtctcaattgggtttcaaagcttcattctcctaatgtaattgttgcgttacccaatcaaccgaatgatgtagcagccgaacttttaaagtcggtttatataaatgaaataaaaaatgtttcaataacttacagaaaatgggcttctaaattcaagcagcttcaggtactacttttattttaaatttattaaatgttctaaatgaacttaattttgcaggcatttggtgtttcaaattgccaatctttaaacgatgttcttcgtgaagttgattttcgacaaattcttagaaatgatttcatgctcatacaaaatttagccactttttgtttttcctatctgacgcgacaaatcgaaaaatttcggttatttctgaattaa

SEQ ID NO: 70457 - DNA, 60 bp, Heterodera glycines
aaagtcataagcacccgtccgatctggcaagttaagcaacgattcctcagaaggcaaaag

SEQ ID NO: 70458 - DNA, 659 bp, Heterodera glycines
acaaaaaaatcgattttttcaagtgtccgtttggggtactcaaacaattatggggagcaaaaatccaacgcagaattaaagtacaggctatagggaagctattccggaaggattcggtctccccataaatctgggcgcatcggttcggggggactgccccgaaaacaaaaaaatcgattttttcaagtgtccgtttggggtactcaaacaattatggggagcaaaaatccaacgcagaattaaagtacaggctatagggaagctattcccgaaggattcggtctccccataaatctgggcgcatcggttcggggggactgccccgaaaacaaaaaaatcgattttttcaagtgtccgtttggggtactcaaacaattatggggagcaaaaatccaacgcagaattaaagtacaggctatagggaagctattcccgaaggattcggtctccccataaatctgggcgcatcggttcggggggactgccccgaaaacaaaataaatcgattttttcaagtgtccgtttggggtactcaaacaattatggggagcaaaaatccaacgcagaatttaagtacaggctatagtgaagctattccggaaggattcggtctccccataatctgggcgcatcggttcagggggactgcccccgaaaac

SEQ ID NO: 70459 - DNA, 905 bp, Heterodera glycines
atcactgacgcaatgattgacttcctgccgattgacaatgccgaagcgattgtggcccaactttctgatccggcaatacgaattgtgtcgatgaccgtgacggagggcggctatttcatcaactcggccactggcgaatttgacccaacccatccggcaattgttgctgactcaaaagatccgggtaaattggctttaatttattttgccattattatgtttttaattggatccattaacctgaatttcacgtattttttagaaattttgcaatttttttttagcgcttaaatgttttttgaatttacgtgattttgtcagcataatgaaacacaaaattcttcaaattagccattgcatttctttatatttcatttgacgtcattttcaggaaaaaagaaaaaatgaactaaatattccattatttatcataattttcaaaacttaatgcatgaacattgatgaaaattaaatagaaaatataaaagatatataagaaacttaaaaattttataatgtttcttttaaaaataatatcgaaaatactattaaatatgttatcattttaatatctatttttttaaaaacaagaataattttaattaattttcatagccaatcctcgccctgtgttcggactgattgtccccgcgctgagccgtcggcgtgcaaacggccccgatccattcactgtgctgtcatgtgacaacataaccaaaaatggtgaaatggcacgaaatgcgtgtgttggcatggcacgggcactgggacaacaggtaaataattttaaaatattttaaagaaaatttgaaatttcaaaggaattggccgattggattaacgaaagatgtggcattcccgaacggaatggtcgatcggatcactccgatgaccggggatattga

SEQ ID NO: 70460 - DNA, 807 bp, Heterodera glycines
ttccgacagtggcatcatgagcgacgagggcggcgcgtgcagtcactccaactcgccaaccgaaatgggcacgcgcagtgtgccattgctgcacgcgaacgccgaggcggtggcaccggcacgtgctgcacagttttcggcaaatgttaatcaccaacaaattatgccaaataatcaatccttttaatctttgcagcttttccaattccctcgacccaccgctcaaatgccgacacttgcgcagcaccaccaccgggtccaagcagttcattcgcccgccccaacccccgcgggccatggccacgcgcagagtcagctgagtccgctcgaattagtcctccaaatgcagcaccaacacaaccagcaacaacaactccagcaacagcaacaacaacaccttcatccgttcgcttctctccagcaattttccccaattcccaaatcggattctgttgccgcaggcgttgctgacgaagtgaacagcgcaccggctgctgcttcaacaccgacactgatcatggtgagggagggatgaaaagggaagggaaggtaattttatttaatgtttagccgaacgatgccatcggtggtgccgccgccaataacaacgcttttttaccttgcgaattgcaacaactattggcaattgcggcacttactcagcaacatcaccaaccgcaacagcaacaacccatggttccggtgtctgcggccaacggcaccaacaccaacaacaacagcaacaacaatttgccatcatttcactcactgccaccaccagcggcgccggatcataatacgatgacg

SEQ ID NO: 70461 - DNA, 1614 bp, Heterodera glycines
tctctgagtgattttttcagccgttcaactcacacaaacaattggtcattggttttcgtctttgtctttaaaatttttcatccttccttagggctcttttggtttgctcttcgcgcttttggttcaattatcgccacgttgccaatgtcctttcgctgtaccgttcgttgaaacggcttggcatgcccgacaggtgttgttccctttaattcaattggttataacttaatactgattccctttagcaacatcattttgatgctttccgataacattccatgcaatgcgagaaacccttcccccggttttgcccttttctcttcattcgttaatttttcttttccaatagcgtctattttcaacaatgcctttgcccatcagaatttgtatttggaggacactgaagtggactatcgcgggtacgaagtgactgcggaaagtgtcgtgagaattttaacgggcagaacacatacggacacgcccagaaacaagtgaattttacggtaatactgagatttatatactccaacggttttatgacaactcactatcatctgggcgggagcagcgcgtttcccagccgccttccccccccccctatcagtccccccggcattcctgacttatccgggggatttttaaaacgatcgaaacctgacaaatttggtatcattcgaagctcatgatgagctaacaatgtgagtctaaaaatcagaggatgaatcggtccgacgccaacaaacagggttttaagccgattaaacccacgaaaactgaccctaaattagacaaaaacaagtgaaaataaaaaattttcaacaaaatatgtgtcaatcgacagttctcgacgagacaaatcgaactagctatattaaaagttgatcagatgtcattttgacaataaacaactgagtaccgaagaaaaaaagacgcttcagttaaatacaaaacaaattcatagacttttagtaaaaaaaattttttaatttttcgggggggggggaacgatgcgggagggaactgagcttcggaaaaacgtagtacaccccatctgggcactttttaagaaactatcattaattagtttatggtgtttattttaggcgtttgctcagcgatagccaaagtaatgtgcttatttatttgaccggccacggcggcgatggctttttgaagtttcaagacgcggaagagttgacaaacgttgacttggcagatgccattgaaacgatgcatcagcaaaatcggtgatcactgctggggagtgctctcatttcgcgttcccttcttatcctttccccccaattctgaacagttacaatgagttgctgctaattgccgacacgtgccaaagtgagtcgatgtatcaacgagtgtactcaccgcgggttttggccacttcgtccagcttggcaagcaccaaattcgttttaaaattggcatattgaaataggttggcgaggattcgctctctcaccacgtcgatcgctccattggtgtttacataattgacaggtgacctccaaccaagcggcactttgtattttctaattaggtatgcctatcacatgcagcaattcctcgacactcgcgtcaccggtctaaactccaaca

SEQ ID NO: 70462 - DNA, 1665 bp, Heterodera glycines
atggtggccaacggtctcttggacaaccccgcaatgtttgctggtcattcgtcaactcccaaacaatgcgttcgtgattgggtccgttctttttctgtttcgcatttcaatttttatgtttattaatttagcttaatttggaactttccgaatgcattcccttcgatttgtttcatcaacaactcattttcatgctccgttcctctctcccaaaacagcaacgaaacattttcaacgcattgaaaagttcagcggcggtgagaaatttcctcgtcgatttttatttgaataatgtcgattgattggattgtccttttcgacctcacaatcagccttaacattgcacttcacgttaatatttttcttattaattaatacacgtttacgttgaataccttaaattacaactaacggattccatttttattgctttttgcccacatgatggtgctagttgatcagcttttaagtgcttttaaaagtgctcttcgtgaagtcaatccgagtgcgtctgttcagaaagttgggcttcccacaatcgcggctgatttcgaccaaattgtgcttttaaggctctatccgtccgcgatggaaaactttttgtgcagaatcgcggcttcgaactacataaaaatgtccatttggtcgctttcggaaaggcagcgccggcgatggtacatggggccgaaagagtgttgggcgaacacattcttagaggaatcgcatcagtgccgatgaagatagagtatgagaacgaagccaaaatattttttgaaagattaatttaaaagcattccctccggcctaaaaacggagttttgcacgggtgccgagcacaatttgcccgatgaaagagcattggaaaatacaaaaagaattgaacaatttgtttccgaggccaattcggcgccggaccaactcattctgttcctcgtttcgggtgcccttctttgtcttcatcactccgtcctttccctcaaaatttaaaggtggcggctcagcccttttaacagccccaatttcgggtgtcagtctgaatgacaaagtggctttgatacggcaggtgcagaacagtggtgctggcataaagcaactgaacgtgctcagaacggcactctcgagagtaaagggcggtgggctggccaaacttggccgatcgtcgaaggttttaacagccgatcacagtccgcccatttcccaaatgcacagatgataagcttggtgatctccgatatcgtcggcgaccctttggaattaatttccagcggtccaacaatgtctcagggaggtcatgtgcagaccccaatagccattctgaacgacttggaaattcttgacaaagtgcccattcgattggtcgacgcgctccgatccgcacatttagaaaaggatcagtgtaattttacattcctccccgaatgagactgattttagtcaagcatttagacgacccttctccaactgatgcgcttaatgtgatcattgccagcaattccattttgcttgacaatcttgctaaccaaattaacgattcactttcgatttctcctttcatcgtaaccaatcggttggagggcaacgccacagaattgggaattcgattttccaaactgataaagcaaagcatggtcaatggcaaattggacaggtcaataatgattgcag

SEQ ID NO: 70463 - DNA, 602 bp, Heterodera glycines
atgtcaaaaatgaattctcacccagaacaaggtatttatacaattctgatagtatgatcttttgtacctttctatgacatattttcgactggtgcttttaagtaattttttattcggtaaattataatgtttttgttaaataggtatttatttttaatttctgaggactttgaatttaattgctatttgaatttatgatttcaaataacaatctaaccgtttttgaagctaattttatttttgcatatttaatttaaggaattactattttttgtttcttctaaataacactaattatggcattggtttttaaatggactgaaataaattaaaaggcaaaaataaagtaattgcttttttacctttaaatttttacaaataaatgaaaacaattttaaggaataaaggaaaaacatgaagcaaatagcttaagaaaatttaaatgcgaaattttattttaaaacatttcaaaaaagcaaatgaaaggcgtaataaaaattattttaaaattaaacaaaaaattgaagtgtgtaaaatttaaatataaaaaggttttcagaaagtgttgttaacacatgtaatcttgtttaaagaattaatca

SEQ ID NO: 70464 - DNA, 615 bp, Heterodera glycines
atggaaattcgaggcaaaattggagagaatggcacagaggaaatggaaattgtcaattccgatggaaaagaattgccaacccctcattatccgttgccgaacaaagtcatcggattcaaactcattttgatcaagtgaaggatttgaaaatgatttgtgcccatcaatctactttttttgattttcagcttcatcgaccaaaatgtgctcacttttcctggccattttcaccgttttttcgcgacatccacaacaaaattgttcattcgcactgaaaatattcaaattttggagtttcttatgcgcaacatttggccaatgttcaaggccacaattcgtctgatatattttcactccatcgcttttggtcaaatccggcaatttgccccgttaatgcttaacgattgtccgtcccttcatgttgtcgatttcgatggtggcattttgcccgaatttccgcctgatgacagtgccaatgcgtcggatggccaagcggtggccaaatggctgttcacgcctcgtcccgacaatttgacgaaggtgctctctgtcaaaattacatttgttgaacaattgttggcaacagtggaacacatcaaagcggtgattaattaa

SEQ ID NO: 70465 - DNA, 667 bp, Heterodera glycines
cccggcaaaaagaacataattgctgatgttttgtcacgatcgggaactggcaacgaaattgaagaaggcgaacaaaattccgaagaaatcgcattcatcggtaaaattcggacaacagaaaatgatttggagaattttggtttgatggaagaaagacaagaatgggtcgaacagaccaaaattggcgaaatgaagccaatttacgagtttcttgaacgtaaagttttgccaaatgaccaaagagatcagcaaagagtcattggtaaatgccataaatttgtcgtcttcaaagaccttttgtacctttccgagaaggaaggcaaaatgagactttttgtcccacaaaaattcagaaatgagttggtgaaaaatcgccatgaaggaatttgtgcaggacatatgagtggataacaagaaaaaggtatgagaaacggaggttactttttaatcaatttttttggctcatatttttatttagataataattttttatttgatttactattgtgattagaaaaccttctgaaataattttttatttgatttactattgtgattagaaaaccttctgaatacacgaaaaatttaaattaatgttttgacgatttgtttttatttattattttatcaaaaaatttatattagatttataatcataaaaaaggta

SEQ ID NO: 70466 - DNA, 217 bp, Heterodera glycines
tttaaaaaccctcctcattttcagaggcgagtcggctcggattttcagcgattggctcaacgacgccaaagcgcacttggaagtgcggctgctggttgagctgctctttgcccatgctcaggcgacgggaattaggacgacctattgaaaatggacaaacgaacgaaggaatcaatcattttattttgatgtgttttcaaaataaattacctaatta

SEQ ID NO: 70467 - DNA, 335 bp, Heterodera glycines
gtaagctttttccttttttcacttgtaaattatttaaattttcaattttttagcttttttcgaaaaaatttttgtcttttttcggcaggcactgcctctgacaatgttttttatttatttagaaaaataaattgatttttttctttttgatttattttaattatatttcatccttaaattttttaataaacattttcaaactttcaccttattaatttaaggcgaattttgccttttttaataaattctcttgtgaaaaggcaaaaaaataggctcttttaaatatgcctatttaaattactttcattgctttcctttcgtttacgaccatacca

SEQ ID NO: 70468 - DNA, 354 bp, Heterodera glycines
ggaatcgaaggtgttgtaagctttttttccttttttcacttgtaaatttatttaaattttcaatttttttagctttttttcgaaaaattttttgtctttttttcggcaggcactgcctctgacaatgttttttatttatttagaaaaataaatttttttttctttttgatttattttaattatatttcatccttaaattttttaataaacattttcaaactttcaccttattaatttaaggcgaattttgccttttttaataaattctcttgtgaaaaggcaaaaaaataggctcttttaaatatgcctatttaaattactttcattgctttcctttcgcttacgaccatacca

SEQ ID NO: 70469 - DNA, 1362 bp, Heterodera glycines
atgctcggctacgacatttcatgggcagcatttaacatcattgaagtgatgtcgagcacgcgttacagcgaaaaacgcattggttatttggccgcggtgcaagcattcaatgacgaaaccgatgtctgtgtttagggccctgggtttttccaaaaaattaaaaaaaattttttagaaacatacgacacataatgcaagggggtagccagactttttggtgcaaatccgttcagaatttttaccaaaattatcaaattgtttcctggcagcgtctgccggacccctcctttcttgagtttttttttagaggccgaaaagcaaaaaaaaaaaaaaaaaatcgccacccaggacggcctacctccccctccaaagctagggccaaccccctcctcttttgcttttttcacccttttaatttttttaatacgaaaaacccaaaatttaaaaattatgtagggtgcctaatacatacatatccattgtacctcaccttcacccctggaattttcctttgttggccagctcatttcccctcgtatcgccccccccttctccaaatttttgtttttttaatttcaaaatattattttaataaaaaattttttttgcaatttttcccacaacaattctatcgcagtgtcaacaatgtcaccgccgttttggacgcaatgttacgcatcaaattgtccgttgtgcccggcccgttgctcagcgtgttcgtgcaaaacattgccaagctgtacaccttccaactgtgcaaattggaggcggacgacgattgggacagaattgaaacgttggacaatttgctcacctccaaattgcccgagtagttttgcatgatttttggtgtgtgaccccaaggaaattatcttttgggaggtccatgttttaaaacgaaaatcagtggcctaattaaaaaattactattataattctttcagaacaaaaaacccaacccgtcatgcagaatttgtagcaattgacgaagccgatgaatggtgcaaattgcacaacaaaaatttcactcaagtgagtttttgtagagtaaacaacaaaaattggccttgaatttcgctgtaatttgtgagggtaatttgggagattaaaatcagtggcctaattaaaaaatcattgatttttttcatttggatcatgaggcaagcaactgttttcgtgaatcttgagccgtgtgtcatgtgtgccagcgctttgtatcagcttggaatacagcggttggtgtttggcgcaaaaaacccgcgtttcggtggcatttacagcgtggcaagcaacacggactatggccatgaacaccaaattgatgtgcggatttgcttattttcaaaaaaaaattaacaccca

SEQ ID NO: 70470 - DNA, 221 bp, Heterodera glycines
atgggaaaaagaaaattattacctaaaattcacggcaaaaacggagtgaaagagcgtcaaaagaagcgggaggagaggaaagcgcaaacggccaaggcgacagaagctcgtctggtaaagaaaagtgagtttttctattgctttttcataaaatccataatttttcagtttttagccgctgcccagcccaacaccgaagcagaaatggcacaaccatctga

SEQ ID NO: 70471 - DNA, 1640 bp, Heterodera glycines
atgccattgtcaaatgccgatgccatcaatttatgttttcacccctcttttttcagcgaaaaccgactggccaacatcaaactcgtcatggaatatgtgcaaatgatcaaaagcattttggtgttgcgacaaccggcggcgccattcgaactgaaggtgtggtgaacacagtgtgccgttggtgatggtgatgttgcgtttcatgactcgctgttttttcaggaagtcatctccagccgtaccaatttgttcgctgattcgttccaacatgactgtcaggagttcatccaattcttcgtggacgcactgcacgagacgatgaagggcgttctgcgcaaaaatgacggcgcgggtggtggtgctgctcaacgggacgaccagaattggcgcaatgcaatcgacatgatgcaacagcattggagaagtgaagtgctcgcaccaaagaaaggcagcgtggtaaggaagaggagcaccactcgattctgacggcattttaaacaatggcatttatttttcagattttcaatttgttcgccggacagtccgtctccgagctcagatgcacagagtgtacatattcgtccaagacgttcgagctgttcacaatgctgtcgttgcaaatcccaattccggagaacaccgcaattacattcaacggcatgcaaaaacaaacaaacattggcattttcaaataaaatttctccccctttttcagtcatctcccgagaaggagaccccatcaaatgttcgtcccatgaaatacgccttccactcgccatgaaactgagcaaagtgaagaagatcatctgcagacgagcttacatcagcgtcagcaaagccatgttcatcacgctcaacaagaacaacaaagactacaatgtacagccatcaccaaaccaattcaattttcggcacaaatttttgttgagattttgtccgtttttttgagtccattttgaaggcacagaatttcatgacatcatggccgcaaaatggaaaagtgccgaaatattttgatttgaaaaacgattgctaaaaaagcggggccccaaaatttaattaaattggtggattttttatttttctaattttaataatgattatatgtaattaattcccatcccctttttcaacaggaggaattttcgcaaaaattcaacgacgcaaagacgaaacggtcatccgatgaggacgacgatgatgagccatccgctgaagagagactgcgcgacattccgctcgacaaaattgacatttggcgactgttcaagaacgaagatggacacggcgaccgactgatttgtatcagcctggcccaggtggagttcaagcagtgccaagaggacaacaaaaccccatttgacactttgccgttgtttagcgcttcactgatgagtcgcattacattatgggagcgtcggacgctggtcaactgcccatggatgtgccgaaacagccaacccgtttccgtgctgctccaaaatcggctcgacttctttccgtcaaggcgttgttcaccggatttctttttttggtcaattttgtaaacaaaataatattttacttcatttaaagatgggtacaataatcagctacaaaaactataggactgaatgtgcctttttgcgataagaaataaa

SEQ ID NO: 70472 - DNA, 718 bp, Heterodera glycines
atggttaagatgcaattggtccctgatggcacttttcgcaaagtccgtaacaacattgaccgattgtttgacaaaaatttgaccgatttaatccgcggcattcggaacaacaaggaaaatgaggtgatgattgattgactgaatgcaaaagccatttgtacatttacaatttgggcacttttgctgggcctctgaaaaaaaaaattcaagggctcaaccaattacaaatccttacaaaaaagcccccctttggaattttctctcgtgggcctccaacaacagccaaagtgccataatttatttacccaaaatgttctaggcccgttatattgcggcatgcattgacgaaatcaaagtggagctacgccaagactctatttttgtgaaggcaaatgccatcgaaaagttggcatatgtaagtttttaaatggacttttttatatccattaacacaaaacggagtcgggaggggtggggcagtgaaatttcgagggaggaacgagtgaaattatgaaaaaattttttttttaaatttcctcatttgttagtaaatcaaaaaaaaggtgcatttttttagttgcaaatgctcggctacgacatttcttgggcagcatttaacatcattgaagtgatgtcgagcacgcgttacagcgaaaaacgcattggttatttggcggcggtgcaagcattcaatgacgaaaccgatgtctgtgtttag

SEQ ID NO: 70473 - DNA, 2790 bp, Heterodera glycines
tgcattaacactgtgatcgccattctcataagcatttcatcagaagggcccggtgattatactccaagtattcaggtagatttttgcataattttttcaacccctacgggaattttcaaaaaaaaaatccaagaaatttcccaattactctcaatttctcaaaagtttcccattttccttgaaccgcaaaaaattgcatatagcaaaaacattgtgcagttttaattatgcatcaaggaaaatcaagaaaaaatttttattacccaattaacacaccaaacatttgacaaagtgtgaaatggttggtccaaaattggggcacaaaatgattgaacaaaaattggaattactcctgtttttgttacccttacttgtgagaaaatgttcgaaaagtgattagcaccactccccctaaaaaaaacttgaaaattctaactttcttacaaattagaggttttttcatattgtgagatttttcaaatgaatttcttccaaaaaaaaaaaaaatttctacatttttttataaaaaatcctacagggattttttgaatttgtttttaattgtctctcctttcagctctgtgtgcaaaagcttggcattttgattgacgattcggaccaaaatttggtgaattcatcattccgttttttttaaatttttcctacttttttccagaaatatttgggtctgctggcgatgggcaaaattttgttgacccatccaaaagcggtgcaagcacataaggacattgtgttgcgctgcttggacgacaaggacgagagcatccgtttgcgtgcgcttgacctgctgtacgggatggtgtccaagaaaaacatcatggaaattgtgcgccgtttgatggaccacgtggacgcggccgaggcatggcacggaagggaagggggagagggcccaaattttttggggttttgaaaaaaaaattgcatatttttcccataaaatttgcttttgaatggtggtggcccaaatttttttttttttttttaaattttgtccggcatttttttttcattggacaaatttttttgtaaaaatgaatattctttcggtaaatttcgatttttgattgctaataactcgaattttgggaaaaattgataggttttttttttgggacggggactggtttttattgttatttgctcgattgaattgagcaaaaattatgtaaattttgtgtcgaaaaaaaaaattttttttttcaaaatttacgctttgccatattttaaagggctcattttatcgggacgaactgctccgacggatcatcgcaatttgttcgcatgacaactacaaatacatcacaaattttgaatggtctaacaacaccgttttgaaagaaaatttacccatttccccatctcattttttgtcaggtacatttccgtgttggtcgaactcaccaaggtggagggcaccaaacatggcattctaattgctgaacaggttgaccattcattcacaatttttcattttcgttcaccatatatacatgcacacagatccaagatgtcactgtccgtgtgcagtcaatccggcacttttccgtctcccaaatggcacttttggtggagaatgcccagccgttgttgaagggcaatggcggccagcgcaacaatgtggccgaagtgttgttggccgctgcgtggatttgtggcgaatttgctcaacagttgcgttttgaaattggcaaatttcggggaccggtggtgacagggcggtcccaaaaatttcggtttggacggcggagggaggggggggggggtaccaaccaaaaaattatgcagggagatgcttagcccagggattttccatgtgaaagcagctcgtttcacttgtatcttttattttcaaatattatttaccatatttatggggcgaggaaacgtactgctcccgtcctcggggtgggacgaattaaccggtcaaaattcattttccccacatttctaccccagtgtcaacaatgtcaccgctgttttggacgcaatgttacgcatcaaattgtccgttgtgcccggcccgttgctcagcgtgttcgtgcaaaacattgccaagctgtacaccttccaactgtgcaaattggaggcggacgacgattgggacggaattgaaacgttggacaatttgctcacctccaaattgcccgagtaccaatacactgaccatttggaggcgcaagaacgggtcagcaacaaattaccgactaattactaggcctataattaggcaaacaaaaatggggcaaattagccaattttccgcatttctttcgctttgaataagtgccattgaggaaattttgataaactcatttccagacatgcaatctgattgccatgctcaaatttgcgtccaaaatgcacacgacaaatgtgaaaattggtgaagcgctcaccaaacattttgacggcgaactgaacccggtggcggcaaaagcgcaacggaaagtgccggtgccggacggactcaatttggacgagtgcatcaatgaaattgatgactcatcagtggaggatgagatggatgaggaggaatacgatgaggaggaagaggaacatgaacaaaaaaaacaccatgatggcattatgccaacatcgacggcacaccgtcaaaatgatcatcaacaacagcattatgccattggtaattcgtcttcgtccattggacgtgccaaaggccagcaaatgaagcaccgtgaacagtctccggatgacgcgtaccatggtggtggtggtggtggcgctccgcgagttgcctcagaataa

SEQ ID NO: 70474 - DNA, 1064 bp, Heterodera glycines
atgtcggcccaatttcgtgaggtaagacaagtcaacttaatgttaaaaagccggaatttttggataaagcaaaatcaaatctgccgagaaacccgaaacaaaaacccccgaaattttcgaaaccgaatttcgcccaaatttctggtccaaagcagtttaaaaagccgggattttggggtaaatagagggattctcggaattgatatccacgattatggcatccgtttcgaacccaatttcgaaaactctgtaaaactgattcgaacaaagtttaaaatattcattcattttaaggttgtcaagcaaatgttggccaagcggaaaatgttgttccaccacttttcgtatggaaaattgggttccggcatcgcaatgggaagcggttgtggcggaggcgtccgaccgcgcgtgggaagcggtgcgcgaagaagtgaggaggcggaacggagcagcacgagtatgatggcacggaagacgtcctcctccaccgcaaccatgggcctgattgtacagcagaaacagcaaaaggacaccgtaatatggcggaacggtgtgggcgccggtgccatcggcagcggcggtggaagagatgaaatgacggcaaaactgatcaagaacaacaatggtggtgaaaacaataattatgttggaggagggggatatttggcgagacaaatcacaacagtgacaacaattggggaggaaggaggaaaagaggaggaggaagaggaggaaaaggaagagaaaaatgatgatgtcattgaggaggaggaggaggaggaagaagagactgatgagatggatgaatgcagattatgatgaaaaggaggaggagaaagaggaagagaaatgagtgaaaagggaaaaagcaatggacagaaaagaaaaacgttggaatggacaactgtgataagcctgatatctgataacagagctgcagaaacattactttttttgggtttactccaattcgtcatcaatgatgactcatcattaattcttatctgttttattattattatttttttgtatttatgaatttcaaattatttataattaataaa

SEQ ID NO: 70475 - DNA, 1517 bp, Heterodera glycines
atgctcaacaaaaatttggcacaggagcatttcatcgctgccgccttcccgtccgcgtgcggcaaaactaatttggcaatgcttgagccgacactgcccggctggaaagtgcgctgtgtgggtaagcaaaaaggcacaataattagtggcgctaattagcgtccggtcgagagtctcgaatcaagagttaatcatgatcatttttttgacattttttccatgacataaaattcgacaatatattcaggcgatgacattgcgtggatgaaatttggtgaggacggacgcctttacgcgatcaatccggaggcaaaatttggctgttcaattttttttgaaattttctaaaaattttcatttcaggccggcttcttcggcgtcgctccgggcacctccaaaaagacgagtgagcagcgggggaggcgagaaaacgataaaaacaattccaacaaaaattaaattgaaaattgtcaagctcgagtttttcgtataattttttttgtttattttttatttcctggctcttcgttttcccaggcatcaattttttcgttttttttttgaaatctttggcctccctatttctttgggttttcaaatccaaaatgcctggctttttgaataatttgtatattaatttttctcaaaataaaaaaatatttcatttttctgatcagatccgatggctgttcaaacgttccaaaagaattccatcttcaccaatgttgccgaaacttcggagggcaaagtgtactgggaagggttggaggtgggcattttgtcttgaattgtccttggaattcttgaaaattttgtccaggacgaaatctgcgaccgcaatgacgtcaccataaccgattggatgggcgccccgtggaaattgggcagcccaacgccggccgcccatccgaactcgcgcttctgcgcgccggccaaacagtgcccgatcatccatcccgactgggagtcgccgagtgagtctcgcgtgttggtattttgccagggttttagtggcactttttccacgcctcgagagtggacagcgacaaaaatatttttgaaaatttttttcagatggtgttccgattgatgcgatcattttcgggggacgacgtccgcagggtgtgccgttggtgtttgtaagttgtttttgtgttcctttttggcacaatttttgtcggaatgtttggcttttccgagactcgaaatcgagaattgaccccgggaaaatctcgactgtaacactaccaaattacatttccgctccgtgatgtagcaaattttcggtttttggcatgccaatttaaatgttacccatcatcaaggaatcattctcctgggagcacggcattttcactggcgcatgtttaaagtcggagacaacagctgctgcggagcatcaaggtgaattgttgttctcttttttttgtgatgggattactgtagttacaaattttgtgggattactgtaattaaagcatttcaggaaagacagtgatgcacgacccgatggcaat

SEQ ID NO: 70476 - DNA, 1808 bp, Heterodera glycines
  unsure (1)..(1808): unsure at all n locations
gccacgatggaccccgccaagctgacgccgttcaagcagacgcccggcgtgtcggcctcgctgcgccagatcagcgcggacgctttctacgtggtcaacgaagtggtgatcaaacggcttgggcccatcccaattttgaaggtgtggtggcgtcggctggcagcaattttttaaaattttttgtgacagccgccgttttttacccatttttccccctaaagggtgacttccatctgttgcctttcaaagtgcaacgctttgtggcggagaaggcggaactgtgccggccacgggtaaatgaatgaatgaatgaatggcactttggctggcgctgaattgacattgtgccaaaataaactttgaatttccctccagggcattttcatttgtgacggttccgaacatgaagcggaggagatgactgacctgcttgttgaggtgggcaaaaaatgaagaccgatggaccaatttctggcctcaagactgacacgggcaggcagaagatagagatgcttttattgaaaacctaattcgggaattccgaggacaaaaatctgttcataattttctttttgacccgactaaatgccaaaattagtagcgatttttgagaccgacaattttccgagacagatagagaagtgccgagatccaaaaaactcgagaccaaaaaaaaaaactgcaacccaaaaaacaaactcgagaccgaggacgaaaaaaaccgggatttttctcgagcggccgagactcctcgagaccagggactctcgctaaaaatcattaatagttaattaaaacaaaaatgggaaaagcatggcaaaaatggcattttgtatgtacatggtttatcttgttctgctgacctctgtgtttgtttgtgtagcgtggtgtgctgacaccgttggtggcctacgaaaacaattatttgtgccgaactgacccgcgcgactgtgcccgggtggagagcaaaacgtggatggtcacacgggagaaatatgaggtgaaaaaatgggtgtgatcagatgagatggggggggggcgattggctatatgccaacttttgatgggatttttgaatgcgatcgattgcccattctgatcagaaacggcacggcattcggaactcgtctctgatcatacatttaagagcgaaaattagaaatgcttttccactttttttgtggcgccttttatttcaaaaaacttttataggcgccgacgggaaaattttcgaatttttatggatttaaaaaaaattattaaaattttaaagttttccaatttcaaaaagggggcaaaaaggcatttccctgaccggtacacctgaatctgctgatctcttgaatctgattttgatcagttatttagtatgtcgttcgtttccgatcactcaaatttgttcgacaattctgatcaaattttttattggctctaagttttttaccgttaaaaaatcaattaagtgattgatccctgattacataattaaacattgttgttgcactttttcacggtttttcaaacattcctcccccccccccccgatcaagacggtcacccatacgcccgcgggcgtggagccgatcatgggccattggatgcctccggcacaattcgcggacgaattggacacgcgctttcccggctgtaattaattagaggattcggattaaaaatcattataaatttaatgaaggtatggccggccgtattatgtacgtcatcccattttccatgngaccgttgggcagtccgttgtccaaaattggcattcaggtgcaaaaaatgcaattaattaataaatttta

SEQ ID NO: 70477 - DNA, 360 bp, Heterodera glycines
gaaagagaatagaaagaaccaggttcgatgaagctttggtaagccaaaaaaaataaatatttaaaaatctataaataatttaaaaatgagaattcatgcgagattttctggaaataagcttaatagggcctagttaagctgtaaaaaaaatttggggcgatttgaaagagaaaatttggggcgatttgaaagagaatagaaagaaccaggttcgatgaagttttggtaagccaaaaaaaatgcaaacatttaaaaatctataaaaaatttaaaaatgagaattcatgcgagattttctggaaataagcttaatagggcctagttaagctgtaaaaaaaatttggggcgatttgaaagaga

SEQ ID NO: 70478 - DNA, 795 bp, Heterodera glycines
atgcaaaaactcaaagacttggtcaagaagaagaagttggacaacaaattcaagaagttgggcggtggtcgccagctgggcggcccagcgcaacaacagcgaacggaacaagcggcgggacgtaccacgagcagcacacggtcaccgtcgccagccgctcagcaggttgacatgggttaactgtttttttcaaaagacgaatttttgaaacgagttggagggagagggggatttggcgatggtgcagaattaaaaaaaaaaccgcaataaaaggcgttgtttaaaaaccaccgatatgaaaatttggcaaaaaattattcataactgctccaaaacaagcaaaattttaatttcaacgtatcagtcgatagccaaaagtgatctctatcagaatgtaaaattgaaattaagtttcaaaaaaggtgacaaaagaactcaaaaaactcttgttttccaaatatttttggcaatactttttcgaaagttaacaaaaaaaatttttttgaaattttgcagcctaatagagaatacttagtactaccgaatgattccaaggattaaaagtttgtttttagagcgcccattataatggtttttaattaatgacataatactcttggcgatgggccgaaataaaaattcccatttacggcaaagccaaaaaaaaaatttttctattagcgtcgctctgatgctgaattgattgcggctgcggcggagaagcgaatgcatggcaagcaacagaacgacccaaatgctgggctgacaccgatgcaaaaaatggtccgaatgcag

SEQ ID NO: 70479 - DNA, 1144 bp, Heterodera glycines
atggaggtccgaattttctggcaaagtgttttggcccagtattccaacaatgacttttggcgaagagcttattgttgcggaagcaccgctcgcgcgaacatcgggcgttcaatttttaaactggaggtgggaaaaaatgtgtgaatggaataatcgggaataattggacaagacttgtcaatcaagccaaagatattactgatcagtgttgaacaagaaattgatcagcattattggacttgatcagatgaatcaatgtgtctgatcattgatcacgcaatgacatggttgatcagtctgatcattatttgaattggtcagatcacaccatggcatgatcagtctcattctttgacttgatcaaatgaactaatatgtttgttcataccatgatctaatcagtccttgatcaaattattacatggtctaatcaatcacattttattggacttggtcagaccaaccaatatgtctgaacacaccatggcatgcataatcagtctcaccattatgtattggacttggtaaatgaaccaagacgtctgatcacttatgataggattagtcttgtacaaggaccgggcaaaacaaaatatgtcagttgaacacgttctgatcaaaaaacgatacttatcagtagggccgcaacttttagtgaaaaacttttttttttgctctattgttttgaagaaaggcgctcaaaatacgcatttctgcattaaaattttttgattctgatgtcactatctgtcactagaaatcactattttggggtttcgtcactaaaatagttaaaaatcactattttggggttttgtcactaaaatagttaaaaatcactattttggcgttttgtcactaaattagttaaaaatcactattttggcgttttgtcactattttttcactatttcgacattttttggaaaattccttaacaaaaatgcaataaaaccaaaaaatacacccctaagaatcgagctaaaatttttcaaaatatactcctatgaaatgaaaaaaaattttctcaaaaatttactttcttggcaaaaatttttaattttaaaaatttttttaggtaactattttgggttttttggtcttaaaaatcccagtcctactcatttgcaactgcaatcagtga

SEQ ID NO: 70480 - DNA, 622 bp, Heterodera glycines
atggattggatgcccgcgttagtcaccgacattttgctgtccatggacgaccgttttctgttcctttcgtgttggcttcatggcgacgttcgccagtacgacatttcagacccattcgatgtcaaattggtcggacaggtcgaaaattaattttcgggaaaattcggcaattttttggtattttcagtttttcgtcggcggatcaattcactcaaaaagcggcgtcgaagttttggaggacaaagaactgaaggtgggcgagagcaaagcaaagcgcaagtgtttttttttggccaaaaacgatggaccattcatttgccgttatggtgcattattatgcccttaatcaaatgcaacaatttattttcggcaatttttaatcttttcaaaacctaatgatgatggcttatgcggaacagctttaattgcccctcctccgaagtgtttccattttcaatttgacttttcccaggcccaacccgacccgctaattgtgaagggccgtcgcgtggaggggggcccacaaatgatgcagctgagcctggacgggcgtcggctgtacgtgaccaattcgctgtattccgtgtgggacgcgcaattctatccggaactgatcaagtca

SEQ ID NO: 70481 - DNA, 96 bp, Heterodera glycines
atgcgaaaagcgaaatgcgaaacgccaaaaaatgcgaataatgcgaaaggcgaaatgcgaaaagcgaaacctcggcccatccctgatctaaaccat

SEQ ID NO: 70482 - DNA, 506 bp, Heterodera glycines
atgtctataactcaaaataaagttcatattcatgatcagcgacccaaattacgtaagaaaatatgttttttttaaattttagagcaaaaaaatgtgtccatgaaatttccaaaggggtatccctttggattttggctgcaaaagcagttttaattttataactctttttaaaaaagcgataaaaatgccaaataaaatttatataatagagcaaaaaattgcggattttatcaatatttttgtgtaccttagcacattgtttggagtgagttctgaattttattatgaaaaatcgaatttttcatctttttcaggaataacatttttcattttaataatagaaatgcacaataaaaaccataaaattctcccgatttttctgcattttttgatcatttaatcttcacatttgacccatttcaaagggagttattaatttttgaacattcccccaaattttcactgggcgaaaaatgaaaaattcaaacacacccaaatttggtcaa

SEQ ID NO: 70483 - DNA, 1116 bp, Heterodera glycines
  unsure (1)..(1116): unsure at all n locations
atgcgtaaccgttcaatgtttttgcttaatcctcacggattgntgagaggcgacgactgcaaatggcaaaaacggctgctgctgatgtgcgaggtgcgtttacttgtcgcgtttcacatttttgatcaaatgacgggcaaagcgataaagcatgatttattagcattaaaaagtaacaaaaaagaagccatcttcgctacctaagctcaaatatatttaatagaaataatacaaacataaaaaaggaataaaaaaagaaaataattaattttcaaaaaaataatgaattttaaaaatctatgctgttcaaaagtttgtgttaaaagattcatcggtcaaatcatcattaggatcattttcaagatgttctctcaaaggaaatatttgattaatttccccaaaatttttttattatttttcactattcaaatatgtatttttgtagataaataaataaaaaatataaaaataaaaaatcgcacgatgaaggataaatcaaaaaaaaaagaaattttgtcaaagttacattgggtggaaggaatggaaattattctcctaattaattaaaaaactcaatttctatcgtttatttgacaataaatgttttcacaaatctctttgttcttattcttatgtttagtaatcagaagaaaaattgtttgacaaatctattgaaattcaaaagataattgctttattatgtaaatttataaattttattgattaaaatatccagtaatgattatgtaaattcttaggttttactgaacattaattgtatttatgttacacagcgactgacgaattaaacattgcgttcgtgactaggaaaaaattgaaacaaattagcatcatgtgcattaatcccgaaataattttcaacaattatttatttgctaattgaaaaagcatttttaaaactgagtcagttaaatgcatgcatcctttcagtcttcgatcagttttttgacttcagcagcacttcacactttcgcattttgaagcagtacaagttggaccagtcgactttgcttctccagcaggacaacggacggtgaccacacacttttggtcattgcagctcaaacagacgcaacagcagtcgccactctccgt

SEQ ID NO: 70484 - DNA, 251 bp, Heterodera glycines
agctaacacggagagtggcgactgctgttgcgtctgtttgagctgcaatgaccaaaagtgtgtggtcaccgtccgttgtcctgctggagaagcaaagtcgactggtccaacttgtactgcttcaaaatgcgaaagtgtgaagtgctgctgaagtcaaaaaactgatcgaagactgaaaggatgcatgcatttaactgactcagttttaaaaatgctttttcaattagcaaataaataattgttgaaaatta

SEQ ID NO: 70485 - DNA, 760 bp, Heterodera glycines
atgtacattaactttacatttccgaaaactgtcctacttctgaagatgaataccttggaaattgataaaattttatcgacaagcccattcacaaaacagacttatatcggctgttttgcggctgaccagataccaaatatggaaatggtaaaatttccaaattgtctggtaatgaatattgacccaatcacctctaaaggatcacattgggtttgtgcttacagtccttctccgtcacacattgaatactatgactcgttgggcatttggccaccacctagcatacacattgcaaattatttgtcaagattcaaacaaattcgttatagtataattctacttcaatctcccaattcaagtgtgtgtgtggtcgtcatgtgctcttctttttgtttaatagatgtctgggaactccctttgaaaagattgtaagatttttgcattttggaaaaacaacacctgacacacttgtgagttcttttgttacaagaataataaatataaatagttgaaaaaatatagttttttcacaaaaatgcatgtcgattttgatccccaccaagtggattggtctacattctcgcacgaatttattcaatatggaggttacaatatttttcgtggtgtaccatatcagcgcggtgctggtatcggttcagtatttagaagcttaatgagatttaaaggaccgatagggaaacaaattggatcgtcaattgcatttaaagggcttgaaagcgggaatcgagtgttaacaaat

SEQ ID NO: 70486 - DNA, 860 bp, Heterodera glycines
atgcaaaaaaggaaattggcgcctgtgcccgcatccgaaggaattgcagtggcggtaattgtagtggatgaaaaagcagttgaattagccagaaacggagcatctgcaaaagtaattgtttatttccgaataatttatttacaatttaaaatgcagattaaaaattgcaatagtttgctggggcggtgccaatgtttaattcctaacaataaacctaaaatttgtggccttttttgctctttttcacaaattattttttgcaatattttttaaaattttgtgtagggaatgaaccggcggttgggttggcggtgcgtgttacagaagaaaaaatctaacagttttaatgaaaatattaggaagattggccaaatttccagaactcttccctcccttttttaccaattgctgtgtttggtttcgtcgtcatcgttggtgctcccccaaacagaggggcgttggcgattgaacttgtctccgtcaatgaactggacgcagttctctttccatacggcgaaatgtcatcgactgattgtgcagccgatcgcttacgagatcgaccgttaacttgtggttgtgagcctgaaaaggagggaattggagcaggacgggagtccaatagtaaaaaagtcttacaataccccgagtttatttcgaaaaaagccggtaagcctgaaacaattatgttctattccgcgctctttcgacatggcatcccaggggaattgggtgggggcgtctctctcaccattactcccccattccaaacccacaaatggaggaaaaactatgcaaaagaaccaacttttgtagaaaacgaaggtggtttttttgttgttgttagttttggtatcaaataa

SEQ ID NO: 70487 - DNA, 1233 bp, Heterodera glycines
  unsure (1)..(1233): unsure at all n locations
ttcccccnggcgccaccacaaccaccgcctcggccactctcccgcttctctttggcactcagcagaaaacgacggcacccgccgctgtgccttcctccgtccccgccttctctttcggcaccgccaaattcccttcttttggctcctccgccgccggtggcactctcttcggttcgaccaccgccaacaccctcacgacaagttcgttttttgctaaattataaatacaaatctccgaatgacaaaccacactgtgtgatcattcctttatcaacgaggttttgcagtgggttacaacttggcaatagaccggttttaaggggtataactcatttcataattgaccgaattaaacaaattgttattatttgataccaaaactaacaacaacaaaaaaaccaccttcgttttctacaaaagttggttcttttgcatagtttttcctccatttgtgggtttggaatgggggagtaatggtgagagagacgcccccacccaattcccctgggatgccatgtcgaaagagcgcggaatagaacataattgtttcaggcttaccggcttttttcgaaataaactcggggtattgtaagacttttttactattggactcccgtcctgctccaattccctccttttcaggctcacaaccacaagttaacggtcgatctcgtaagcgatcggctgcacaatcagtcgatgacatttcgccgtatggaaagagaactgcgtccagttcattgacggagacaagttcaatcgccaacgcccctctgtttgggggagcaccaacgatgacgacgaaaccaaacacagcaattggtaaaaaagggagggaagagttctggaaatttggccaatcttcctaatattttcattaaaactgttagattttttcttctgtaacacgcaccgccaacccaaccgccggttcattccctacacaaaattttaaaaaatattgcaaaaaataatttgtgaaaaagagcaaaaaaggccacaaattttaggtttattgttaggaattaaacattggcaccgccccagcaaactattgcaatttttaatctgcattttaaattgtaaataaattattcggaaataaacaattacttttgcagatgctccgtttctggctaattcaactgctttttcatccactacaattaccgccactgcaattccttcggatgcgggcacaggcgccaatttccttttttgcattggggcgtc

SEQ ID NO: 70488 - DNA, 548 bp, Heterodera glycines
ccgaaggatcggtctccccataaatctgggcgcatcggttcggggggactgccccgaaaacaaaaataaatcgattttttcaagtgtccgtttggggtactcaaacaattatggggagcaaaaatccaacgcagaattaaagtacaggctatagggaagctattcccgaaggattcggtctccccataaatctgggcgcatcggttcagggggactgccccgaaaacccaaaaaaaaattttttggataaaaattatttaaatgaactgactagataatatttaaaataggttatttctcttcctttcagtatccctgcaaagtttggtgcgcttctgatcagtttctgaaaaaaaagttaagcctaaactttttggcctgtttaaaaaggaattaaaaatttttaaaaattttattcatctccctttttgatagaaaaagcatcagagtgcctaaactaacatgtaaataaaatttggtgcgtttcagagcattttctggaaaaaatatttatgaattaattatgcaaaaaataaacaaataatgaa

SEQ ID NO: 70489 - DNA, 592 bp, Heterodera glycines
atgtttgcattttttttggcttaccaaaacttcatcgaacctggttctttctattctctttcaaatcgccccaaattttttttacagccacgaggccgcgaagcggccgagtgagtaccttgggcgcaggaaaattattaaggaggagggttcattatttatttatttttgcaaaattaattcataaatttttttcagaaactgctctgaaacgcaccaaaatttatttacaagttgaataaggcactctgactcttatattatcaaaaagggagatgaataaatattttaaaaatttctaattcctttttaaacaggccgaaaaagtttaggcttaactttttcagcgggtttaaaaaatctagaaaaattagtaagcatttgtagtgctccgatacgtatctctgcaaaatttggtgagccgctgatcaattacaaattatttatggacgatcaaattttttgaaatttttattaattttgcaaaattaattcataaattttttttcagaaactgctctgaaacgtaccaaaatttatttacaagttaaataaggcacactgactcttatattatcaaaaagggatatga

SEQ ID NO: 70490 - DNA, 886 bp, Heterodera glycines
atggccatatcccaaattacggaatttttcccaatttcccaaaagacttttgagagcactttacgccgtttccccgactcgttgctgggaaatccggagaagcgcaaggagctgtggaacgaccaattgcatgagattttcctcgaccgaagcagtcaatggtgcggtgtcaatttgccaaattaaaaaaattaaattaaattttcttagtttcgaagcgattctgcacgtgtacagatcgggcggacaagtgatcagacccgtgagttttcttgacgaaattattttcttttaactaataaacggaaagatataaactgattgtttttttaataaaataggtcattaatttcttaatttaaaaattaaaatatttttttatgaaattaagtctaatatttttgaatacttttataaaatatatttcataagtaaattcaaatatttttgtgccaaaatatattttttttaattgctagttaatgaaaaatataatatttttaaattaaaaatacctttttactcccattagaaattttcattaaattttaatttaaatgtttggctttaacctttaatctttcttttgtctttgtcaggcgtccatcccggtggagctgttcatcgacgagttggtgttctacgaattgaaagacgacgtgtgggcaaatttttgcgagagcgaaggctgccgcgttcagtcggcatatcggaagccgagtaacaaattccagcgcaaactttgggatttggtcggcacggcacaaatgccaaattcaaacatttaaatttgaattttttgctaagatggagcaccccgacaatgtccgttggcccgtatcatcgccacactttccgtcggggagaaataatgtgccttattaaa

SEQ ID NO: 70491 - DNA, 1534 bp, Heterodera glycines
atgacaccgatcaacggcacaattactgtttcggttgtctgtccatttctatgtacaattatgactttgctgttccctgaaattgcggtgattctgaacagattacgcgaattagcggaattggcaccaccaaaataattggccgaattttccaatttaaaatttgaaataaacttttaggctgccccctctgctgctgatcagtcctcgcttattatgaagcaattttttgattttgtctacaaaaataaagcggaagagttgcgtgcactgctcaattcgctcccgggcgacgaactcagtcacttactgtacatacagtacgccccaaagggcaccgaaaagcggctgactccgctgctgatcgccacagtgggaaacaagccggaagttgcggcagttttggcatgtcaacagcaaattcgaacattggctcttaaatctcaaaaagacaaaaaatgtcttggcacactaagtcaaagacatggtttatgtccgagtttctgtcaaatcgggcgataagcagcattttgatcaccaatcaaaaaaaacagctgatcatgccatggaacagacagaaaagggacattaggcctgatcagtgactaattgcattatagaagaaattctgttaccctaaaagccgagacttttccaccgttgggcccggaacaaattccaatgattggcactcatttgactatttttctcagttggagaagggagccgacccgcaccaaatgagccttcggaaaatcaacggcgattacaaatattgtgagccaaaatggctttggaccttttcaaaacgaatttttattagatgggactctcctttgggtcgccgcttcgtacggcttttttgggagtgtgccgtgtgctgcttgcgcacggtgccaacgtcgacttgggcctggaagttggcatgactccgctgatgattgcgtgcgatgcgggacacattagcattggttcgttcattcatcggttattattaatgggtatgcgccgcttaatggggattcgatgggttcggttgtgtcagaagagggtgtgctttcttggccatcatttttacaatttccattctttttccattggttttattgtttaaacttctcttgtagtccaccactttactaacctaattaggaataattttatgcttaagtcactttactcgtcgagaatggcgcgagcattgaacaaacgaatagcaacggacacaccgcgctaatgttcgcatcgctcgcggggcatgtgaggcccgccaaattcggacttcccccaaatttttgttcattcacttaggcgcacgttgtgcgctttttgttggacaaaggggcacgaactgatacaaagaataactccggtaaggccaaggcacagtttcttttcttttttggcaaatttgggggaaatggcggagtcgaagtgccgacgatatttggcgatggatggtccatggctttcattttaaccgatgagtcatcccaccactctcaacaggggtttagagcgataaacaaataaa

SEQ ID NO: 70492 - DNA, 116 bp, Heterodera glycines
  unsure (1)..(116): unsure at all n locations
gctgtaaaaaaaatttggggcgatttgaaagagaatagaaagaaccaggttcgatgaagttttggtaagccaaaaaaaatgcaaacatttnaaaatctataaaaaatttaaaaatg

SEQ ID NO: 70493 - DNA, 2199 bp, Heterodera glycines
atgttttcctcaattattttcctatattttgcttgccttttgccggctattgcgtttggtgtgctgaacgatgacaacacaggcggtggcatcaatgttcgcaagggcattttggcacaggtgaaaaattggaggggggggggaattattaaaatttttattttaaaaagctaaatttaattattatttttatttataatttattaaaagaaagtttttttttaatttgttaagaaaactggctaaaattccaataataattcattagcatttcccttctttaaaaaaatattttcattattaaataattttttcaatatttccaatttattctaattaatttacttttttcattaaaccaaaatttggcgtttggaattgttttttaaatattccatgcgaaaaaaacaaaataaattttccacataaatataaaaaaaactaatatttttttttaattaattttcttacgcctaaggcaatcggcggcattttctttgccatctttggcggacaaccgatgatcattctgctaacaaccgtaccactagccatctacatcaaagtaatctacaggatatcggagtcgcttggctacgatttcttcgccatgtacgcatgtgtcgggtaagtttttttttaaactttttagcctataaatttataggaaatgtttaacaacaggctagagaatacagtatgggcgtattgtaaatgtgtattgggtgggaatactgtaaaattctgaaattatcgtaacctctataagtgctatatgggaagcagcataccgtacatttcagtgggggggggggagtactgtaaattctgaaattatctattcccacgaaaagcttgcttgaaggacgggcatacagtaactgtataggagctatgcatacagtaatttcctgaaattaccgaaaatgcttatgactttgctagaatatgggagtacttactgtaaattttgtatgggatctgaatactgtaaattactagaattaccggagatgcttaagaaatatctagaatatgtgaacagggttactgtaaattgtatgaatgaaacacactagcaattctaatttttttttttaattttaatttcgttgaaactataccgaggtttaacttcctcggtttttacgaattttccattttttatgcctaatgccttgtaaattttaaaaaaattcacaggttatggtgccaattcttcctgatactgtacgcggccactgaactgtgctcattgatgaagttagctacacggtcggcagaagaaatgttctccctgttcattgccattgcgttcactgtggaaagcatccgtgccattcatacaagtgaattttcatttaggaacggaaattaaaagaatgtgaaaatttattttcaaaatttcataatttttttcagtaaaaatttaagattttttgaaaaaaaaatcttttattttttctgatattattttgcaattttttaagaagaaatttaaaaaaagaccaaaaattttcgatataaattcaaaaaatattttgtttaacttaaaaactatgaattttttaaaactaaaaaactttcatttttataagtaaaatccaagtttttcgaagaaattccaaaaaatattattttttttaattgaagaaactatgaaattttttaaactaaaaattttcattttttttttaatttttgtcttggaggggggcataaacttgtgtttttttctgataaacaaacgaactgctgagctttaaaatttaggctttatgaacaactacgaagtttgtgaggatgcacaggccgccgctgaacaagccgaacttgcgcatcgacatcaacagcagcaactggtgcagcaccaactgaacctgtcactgctacagaaaatcatcaatccggagttgcatcacaacctcacacaggtgatgatgattggattgggaaataattaatattattttttatattattaatattcggaaattaattaccgtattccaataatacaaaagctctcgtcaccgtgagggctgaaaaatcgaaggcatcctcccccaggggctttattagaagaaatatactgtgtgtattgttttttctgtaatttatttttcattttcaaattttttcataaattttattattgtatttaagtgtatgaccaaatttcagattatttcattttta

SEQ ID NO: 70494 - DNA, 1288 bp, Heterodera glycines
atgcgtccaaatgtgccattgtttcgagtgcccgaattttggcgtctttcttggcaggccattctcgtctgttttctgctcggctttttcctctcctttttgttttacatggaccaaaatatttgttcagcaattgtcaacaacggacaaaacaagtggaaacttttgatcaattatttaatttaaaaaatattatttttttaacacatctatctataaaatgggggttaaatggcaatttggcgcccccacaaagtgtcaaagccacgaaatgtccaaaagagtaaaaacccacgaaatgtccaaaatttttcaaaatttataaaaacaaaatgagtctaatttaggatttttagggttttcggggtcgctgaatacgaatataccctttatattacccgttgcctaaccttaggtccatccgaataataaaaaactcaaattcgagacttggacattttgtgggtcagcgggcaatttatgacaaaaaaattttttttgtttatcccttgtgctatagaagtgccatttttaaagtaaattaagtctttttggccagcgatgccgataagcgggcatcgccggagaaagttttgaaaattgagtataaaccaagattatacaaaacaataatattttgggtcaaattttgaaaaaaaaaattttaggtgaattttaagccaccgggtaaaaattttaagcatttttaatgaattttgttaagaaattggctaatagtgccagcgcataatttttgcattatgttatgaacttaattcaattaatttattttttcgtaaattttatattaatatttcgcaaattttaacatttaaaattttaaattcataaaaattagttgttttttgtttaaaaaagattaaattgacaacccaattgcatcaaattctatttttttcatttttctattttatttcctttattcaatgtaattttcataactattttttcccattaaacctttagactaaaaaaaggctctgcccagcacttggacatattcgtggtggccttgctcaacatgttcctgtccattgttgggctgccgtggatgcatggcgcgctgccccattcgccgctgcatttgcgcgcgctggccgacgtggaggagcgcgtcgcgcagggccacgtgcacgaagtgtaagtgattggctgataagggaatgattgattaatttgagattgattaatgattggcggattttggattaattgattgacttttgattaattaattgcttgctaattgcccgtcttgtactaaata

SEQ ID NO: 70495 - DNA, 129 bp, Heterodera glycines; identical to SEQ ID NO: 58094

SEQ ID NO: 70496 - DNA, 173 bp, Heterodera glycines
ttgaccaacaaggacgacgttggcaagaacactttcgagctggagaagtcgaagcgtgccatggagaaggagatggaggacttgcgcatgcaggtggaagaattggaggaagcagtgcaattggcagaggtccaaagacttcggatggaagtgaacattcaggaaagaggctg

SEQ ID NO: 70497 - DNA, 704 bp, Heterodera glycines
atgaaggaaggctttctgctgacccgagctgttcgcgcaaattacgaggacaagtgcccggcgggccccccgggcgatgccggtcctcccgggcccgcgggtccggccggagagcccggcaaatgcccgccatcgcccggcgatgacggcgatacctatcagccaacagaagacggtggcaaaggcgtaacttatgaggagggcgaagaggagcacgatgaaaagttggaacaggacaagtaccagccccggcaccatctcaaccattaccacaacaacaaacatggaaaaggtggccataggtatgcagggcatggacacggcggacgagggcacaagcatcggcatttgtacggaaataaccgacacgggggagggggagacgaaagtgacgaaagcggcgcacacggcggtcgggacaaagacggaagttacgaaacaagcagcaaaacaggccacaacaacaagaagtacggcagctacgaacacggctcagcggaagagggaaaagcgggacacaagcacgggtacggctatggcgaaagcagcgcttccgtgggcggagacggaagctacgaacgcggaagagcacacaaacacggagggggacacaaacgcggcagctatgagcgcataacggaagcaccgccagcggacggcaatgacgaggagtacgagcgccgtgtgcgcgtggtgcgcgccag

SEQ ID NO: 70498 - DNA, 960 bp, Heterodera glycines
atgagccgtgactattcgacacttcgccgtgacctcttcagcaatgaagaggagtacctacttttcattgcaattcgcgccggccagaggactgccgatttgggtcgacgcatccaacgaatgcgtgatgggcttcctcctccaacactgttcgtaaatgaccgcgatttatggacggtgttagaacataaagaaatcaaatataaaacacgaatgacactggaggtaaaaaattaaaaagaaaaaatataaataaccaatttaaaatttgtcaaaaccattggaatatgtcaatggcaaggataaaataaatttggggctcccaactttgaaccaaactcgaaatcagaaaaaatttgaattttctagtttttgttcgaatgcaggtccgggttcgaactttgtcgaaatggattaaagagtcgatttttccaaccctcaaaactcctaaaaagctacattgtgcaataaatgtgaatttggttattcataaagaagtttatcttgcaaaaaatttaaaatttatttacataaaaaataatgaaaattctgacctttctaattggtgatttcacctaacgaataagcacgactgatgaaggcttatactggtcattattccagggttccattgaaactactagcttccaagggcggctatactatttacaaatttaattatttttatatttaattaattttatttttcggaatatattttttccaatgattttgagtttaaatgcacatttaagatgatccacactatgcataaaaaaatcaaatggtggcaagatcctctaaatgccggcgttttccgagacggaattgctacggtatattatttgaataattttataatagcaagaagaaagtttttaatattttcaatattaaatttataaaaatgctaaatattgataattctacaacacaaatgtaaaattcaatttaaataaa

SEQ ID NO: 70499 - DNA, 959 bp, Heterodera glycines
atgaaattttcaaaaaaattcacatttatgcaacaaaaacggccaaatggacttaaattaaggtacttaacggttctctatgtacagattttcaaaaaattttttaaataaaatatacttattttaggggttttcagagtcgggataacatagaactgctatttttaccccttattcaaagtaaatgcactttatgtggctttgaagttcattttaatgtatagacctagttcgacccaaaaactgaaaaatttaactgtttgggattagaaattggtcgaaatgaatgctacatcagtgatcagtgaccttgaaaacccctgcatacttgttttcaggactagaaaaaaatttgaacaataaccaaaaatgtagacccaaatagggaacacaattttcgttaaaaaatttctttctggtttgttttttaaaatttggtttggcgccgaaacgtgggcgccgaaacgaccccgacccagaaaccttgagggccgaactgagataaaccggaaaaaattaccagtttattttattctcttgagtgataatacccaaaatttcagagaaaattgttaaaattgggcaaaatttctatttttcctcatcagacggcgccgatcggcaccgccgggcccccccaaaacttattttttttataaaaaatggaatagggcaaccgggaaaccagccttttttgtagaaaatctgttaacgaaccacacactaattttcaaaatttcccccggcggcgcctataggcaccgccggacccccttcttccgcaaaagttgtttggaaaaagcgcacagaaaaaaagtgatgttaaaagcaaatctgaatttctattaatattcgatcatttggtccaaaaatgattaattgtttaaaataactgaagtaaattcgatttttgagaattttcattaatttaatttagctttaacttttggattttataa

SEQ ID NO: 70500 - DNA, 249 bp, Heterodera glycines
atggcagttgtcatcgatcattgtgcagttccggcagtttatggtttactgcccagcaaaactctcgccacatacacaagattcttcgaaacaattcgtcagtctgttggcaataattggttcccgtaccgtattatgagcgatttcgaatcgggagcgatcactgcagctggcaacgtctttccaaattccataagaaccggatgcttgtttcactttggacaagcaatttggcgaagaattcagaga

SEQ ID NO: 70501 - DNA, 552 bp, Heterodera glycines
agacttttgtttgcctgaacaagctccgtcccagggcttccgagcagcgggacaattgttcctcgtacagcttcggttggccccctccgccttcggacccattggcggaggagcgactgctcgcccaactgttcctctgcactcgcacgacggcgcgcgttcggcaggactcgctgtacggcgattacacgctggcggccagtcccgcgagcacgcaactgcgcaccactcactcgtcattttggacacaacaacagcagcaactcaaagtgagtgagaacgagcgagcaattgggatgatcaatcattcccattgatcatttattggccaatcaatcaatatttgattggctaattattatttgatttatcggtcaattagtggataattcaatgaccaattcataggcacaacagcagcatcatgcccagcagcgcgacaatccgctgcagcagcaacaattggcaatggaagtcgtcgaaaaggacgaaacgccaaaaagggagccgacactgtcagacagtaagcagcgaacagcagctgaacaataa

SEQ ID NO: 70502 - DNA, 784 bp, Heterodera glycines
atgagcaaatgtaagagttataaaagtcttttttatttcggcatttaattcctctaattcggggattattttcgtgtaatattttttctataaacttaattatctttcatctaaaattgtttgaaatcattaaatcaaaaatcttccaatttgtcataaattcataaaagtattttaatttttattaatagtaatttaaaattaatagagttcgacctggacctggatccaggcctggatttttcctggatccaggtccaggtcattttttgacaacatggatttttcctggaactggatttttgtccaggaaatccaggtccaggtcaatttggaaatccaggtccaggtccaggcttgaaaaacctggatttcctggataaaatttttttccatcttttatggcgaaatgttttaaaatgggtgtaaattcaaaaaatttaatttttttttaaaattttacacatgttaatgaaaattctttttgtttttaggcattaatgaattcttaatttggaatataggcttgttcgaaaaaaataaaattggcaaagttgggatttgcttagtgtgcaaggagcaaaacagacaaaagtctgaattttcaatcaacgacagctcaacgaaaagcctaattgtccatctcaattcgtcgctacacaaaggatcggaatatgacaaaaaattccagcaacttgagacagaatggaaaaacgcaaaacaaaagaaacataaggagcagccaaaaatcgccgacttgatgaacattacttcatcccggtaa

SEQ ID NO: 70503 - DNA, 514 bp, Heterodera glycines
atgaataaattgtgtcatatttttatggtgatacaaaaatgcaatgtcgtttaaatgcatgaaaattgttgaaacttcaattaagtcatatatatcactttttacgatattgatatgatagcccaaagatttctcaattcgtctgttaaatttcaaaattatttattgagtttcaaaaaggtcagggacaaaattattgagtctaaattttaggaatttttttgttacaacacaactttttataaatttttgctaatttttaacctatcgctcaatatcaagattgtttaatttgaataagtttgagctaacttatgatatattattattcagcaaatacacataaaataatgattaaatttaaatattatttccattgatactttttaggttcgacttattgttagcatcatttttatttattttttcattggaccaatttcatcactttttagaaagcgaaacattatcatatcatcaacaatcagcaggtagtaattagtgtaataataaa

SEQ ID NO: 70504 - DNA, 69 bp, Heterodera glycines
atgccgtctaccagtgaaaaggtagcagaagtgcatggaacaaaagagccaatctgtcccatcaaaacg

SEQ ID NO: 70505 - DNA, 939 bp, Heterodera glycines
  unsure (1)..(939): unsure at all n locations
cggccattttggctactctgatcgttgtgcctcagctgtaccaacagatcaacgaggtcaactcgcgagtgttcgacggtgttcaggtggacaattcgtccaaaattcgattggaaaagtttccgtcgtaggctttccgcgtgaacaccgactcggcatggacagagctgatggacgttcaaatcagcgtcacccctccggcccgtccccgtgagaatccgttcaattccatctttctgcgccagaaacgtggcaacggcgggttgccgcctcagtgtgtgtgccagctgcagcagccgcaatgtccgcccggaaccccggggccccctggcccaccaggacccgctggacagcccggcggaccaggacaacccggaaggccctggccagcccggacaacagcccccntccttgccctcaagcttccgccgggtgcccttcgtgccccgccggtccgcctggacaacctggaggccaaggaccgcccggaccccctggaggcgatggacaaccaggacagccgggacaaggcggaggacagggaccgcctggccctcccggacctcctggcccgggaggaaacccgggacagcccggaggacctggccagcccggacagcctggagccccaggaacgaaaaggtaccgacacagaaacaacaaaattatgctgtttgcttcagttcatcagtgcccggcccgcccggacctcccggacagcctggtggacccggacaacccggaggacccggacagcctggacagcccggaggccagggacctcccggacctgctggacagccgggaggacccggacagcctggaggccctggacagcccggagccgcgggccaagctggtcagcctggccacgacggtgcttactgtccttgcccgcctcgcaccagcgttttcgcgcgccgaagccgcgtcaaagtg

SEQ ID NO: 70506 - DNA, 1020 bp, Heterodera glycines
atgcgcattgatgaggcgggaagattcttgaaaggtgtgtttcacaaattttgagatgatttcggctcattttgatctcacatttccaaattttattccctttcattttagtggtcaaagaattttcacagaattttccgactgtccgaggcttattgccatctccatcaaacgagacggtaaacatcagcagaaaacattgtgtaaattaattaattttcaaatttcctttttttagttggacgagcttttgcggtgcgctcgtgaatcggttaaaattttgatcgaatcggacgccgtcacggactatgacatgacgatgcttcgtgggggtgagttcgatgagattaatgtgctttatttaaaaaatacatttcgcacttcgggtcgttaagccggatggcatggaagggtcctgggatttttggttttacctccttttttacttatcacgccaatttttgtgcctttttaagaatttggttaaatttgagtgagtgagtgagatggaggagcggggggggggggtaccaaaaaggaaaaccggaaattttaagcgtaaaataccctctcccccatgggatcttcccaactggctggtagttcatgtcaattggtaccaatgaatttacaaaatttggtacactaataaacttttagcttaattttaaaagttttttgttgtttcagcccttttcggcatctattactacgtcatgtaccactttccgacgcctgcctaatttttgatgagagattttattgtggacgaaaagaaaaacaaattgttgttgatttctctgttgatcctgttaaattttatgcaattgagataaatttctcaaattaatcctatagactaaagtgtgacatcaaaattttcgactgacctgccctcaccccggtagaatgttgttttaaattgtttttttgacaaatgagacaaataagtcagcgatggcattcacatcttaatgaggcaaaatgccatctccgacgaatggctgggaaattctgaca

SEQ ID NO: 70507 - DNA, 766 bp, Heterodera glycines
atgcaggacacaatgtgttcatcggtggagcacagtccacaacagatggcacgcgcgagtgccaacggtggcggcggagacggcggtggtcgcgttgcaatgctcgccgctacgctggcggacgagaggggcgacagtgggccagcaagcgttggcagtggcattggtcgcggtcgtcgtggcgcaccgccgcgccatgatccaccgccgccaccgggcgcaaacgctccgccggcgacaaatatcgcgggtcaacgccagcaacaggcggcgacaatcattggcacaaaaacgcggcggggacgtgatcagtgaatggaatgggatcaggagcagaatgcgatagtgatctggcaaaagatcaatgaatgatatgtacacaatccgatcacacactgatcagagatcaaaaattatcagttggtaatgccggaagaggaattagatcagataaccaaagttggacaaattaaagaggcaattaaaacgcaaatttaattcgggtggaaatcaatgagtaagcaattagaagttttgccaactttgatgctgatctgttccgcagatattaagccaaacttttcccatgaactcgtcagttgagtgcccataccaaaaaatacagtaaataatttttgatccgtttcaaattttgattcgattattgtcacccaaattattggcgctcaacaaattatgcccattttctcggtgttttcagccgataattcacttttttgtcttcatttcagtgcctttgaataaa

SEQ ID NO: 70508 - DNA, 3190 bp, Heterodera glycines
atgccacggtcaagaccacataagcagaaaatgccatgccacgaccacataagcagaaaatgccatgccacgacgataactcgcagcgttatggatgagttgggtatggatgagttgggtctatggatgagttgggtatggatgagttgggtctatggatgagttgggtttggtgagtttgggggtgactctagatttgtcattttaatttttcacaatttgcaaatcctatacactttttcaacagaagcttccaaaatgatgatggcacatctgctggtgatgaattttgtatgaatgtgctggtcaatgacgggcgacacgtcgccaaagcgccacttttagtcagtgatcaatttggaagtttttgatcaaaattccgagtactgtaaaccatcacgggttacgataaccgattttttggtacttactggagtctaacacagacaatggactgcttgtaatcaaaaattgaatgggtacttcaagctctgatcaatgaccagatgggaccaatccccgacgatcattttggcagctgggattacccattttttcaaattttaatcctgacaatgcacccccattttgatcagatatacaaactccagccgggtacaaacattgtgctattggtgatcaatcaaccagctgatcaggtggacgttcttcatgctgttcggtatgtctcgtgttcctcattattttctgatcatcgccgcccgtcaaatattctaatcactatgccgatcaatctcacatccaaatctcaggcacatgaacgcgatgctgcccggcatgggtgcggatgtgctggtcaagcaggtgttcatcggtgaggacgggcaagcggacccacgacgcacccatctgctggtgtacgcggttgactcgcgcacgcgcttgccggttccggcggcaaaactcaaagagtatacacaattttttaatccgtaattacggctatttttcaattaagaaaacataattgtagaaggcccaaaaaggcggtcatttcataatccataattttcaactaaaaaaccctttcttttggaaatccgttaaaatatgaatttacagatattctctttaaatcaaattagaaaaaagcctttgactatttgaaaaaaaatcatgcaagaaattagctcgaaaaattatctaatcttctatttatggaccaaaatatgttaatccgtcatccgtagttatggggtctagaaaacgccataattcccagtaattgcttgcagcactgttcgagagtctcgagacccaatgacatcattatcccccccccctgttcacagactgcttgacggcgcgtttggcgctgctgctgctggtggccgctccgcgtcgtcaacgcctcctgccggggctgagactgtggcggccgactcacccctgcgctatttgaccagcatttatgtgccggaggactacaccggtgccatggagcacaacaacagcacattccgtttgacaacagcggaaattgtaagtttttggtttttctggcattctgatttatccattcaaatttgataagctgaaaatcggattctcaagcactggaaaaaatctgactttatccttggatgcctctctgtgtacacagtccttatggaaatccaagggcaatcaaattaccttcacatgggtcatgattttcgaggatggaaatccaagggcaatcaaatgaccttcacatcctgacatcctggaaaaggtcatgatttcgaggatggaaatcctaggacaatcaccaaatgatcctgacgaaattgcatctaattagtcattggggcaaattgcgcttttccactttcagtatcaaatcgctaattatcataccgatttttttaatttacctttttccttcaaataattcagcgattggcaaatacgaccctcggaagatttatcgccacttaaatgagggggataattatgccataattatctctaatggatttaataattgttcatttctacagactctgttggccatcagtgtactgcttgtgttcggcgtgtgtgccatgcttttcatgctgttacgatgttgcaaaaagtaattaaaaataaaaaaacggcacaaattttgccatttcttttcccatttttttccagcaaacaacagcagaccatcaccaaatcggacgttgaatacatgctggacgcacaacaggctggtccacgcccgtacaacgtggagctgatcacgcgcaaaatggcacagagcgatgccgcggcggtggcccgacgcatgcccaaggcattggagcagtgcaccctgtcgtaagtgcatttcaagcggacgggggaagggaggggggaggggtaaaaacgaaaattctggtaaattcaacggtatacagtacctacagtacagggggttgccgcagggatcacatttttttcttctcaccaattctcgacctgaaaataattttttcgccttcctgaaccgactcctggaactttttcatgtcccgcttaagaaaaaccctggtacagtaccagggattcaactgatggtttaaaatttcttttttttttggggaggggggaagaacgatacgggagggaggaagcgtagtgcacctctcaagtacagaatttttaatttggctcttttattttgaaggcccgaatcgcgtgccacaatggtcgcatcggctggcatttacagtggtggtagcgtcggcggcgatggcagcgcctgcgctcgcacagcagcgacaacaatgccaagcgacacagcggcaacggcgagtggtcagcagcgacgcggcggcggcggtgccggacagcacacggacacggcgactgaggcacgcgcagtcgttggcagccaccacccagtcgctgactcgtccacaaccacgacaaccacaacaacgactacgacatcggcgagcagcgactgttcatcagaggaggctggcgaccgaagcggcagcggtggcgagttttcgccccagcaacagcaatcacagcaacaacaactgaagcgtgctggtggtagtggtgaggacagcagaagcgagctgcagctgctacctacaacctgttgctggtacggagacggaacagccggggcggaaatggcggcggcgctcgcgcggtggacaaacaaaagcagcagcagcagccacaaaagcgacgcgttgtccacccg

SEQ ID NO: 70509 - DNA, 886 bp, Heterodera glycines
  unsure (1)..(886): unsure at all n locations
atggacgaagtaagtaaaaaatattcattgattggtgtagggcttgctcaagaccaaaaattcttgagactcgagaccgaggcctaaaaagacaaacccttctcgagtcgagactcaaggccgagagactcatgaacactaataatgctaatgaatagggatgacattttttggcacaaaagtcgcgaaataggcacctaaaaagcaggaaaaaatcgtaaaataggcaattacataggcagaaaaactctcgaacagtcacaaaaatagttaaagtctttttcgaataaaaataaaatgttaaattaaaaattttaattaagaaaacaaaattgtaggtaatcaatatttgtgaaaatttttaaattgttaggggcgaattttctgaaaaatttcgggtcattattagggtgtaaatcgtttttaatgcttttttgttaaggatttttctaaaatcctttttagtcatttgcctaaaaatgcaaaccaatgctaagtcgttattgacgccccttttggtggtttttattctgtataacggtcccatcaccgtattcagcctagagaaaccgtaaaaaattaatttaaaattgtaaaaagattacatataaacaatcttatgggaattttaatttaatattttattatttttttaatatttcagatagttttgtcaaaaatccgcaatattggattcatattgcggctaatgaacaaaatagaagcgaatttatggtgatatcgctcttacaaaaatacagaagagaagagcgacgggtcaaattgcaaatcggattctctgtttttcgtgtggtaaaatatgtcaggggtccgggtntttaggggaaaatatcaaaaaatagggaccgaaataagggcgaaaata

SEQ ID NO: 70510 - DNA, 936 bp, Heterodera glycines
  unsure (1)..(936): unsure at all n locations
cgattttattggttttgctgacgnagataatggttaccagagacaaaccngggncccctcgtattgtacgtgagagtgaaattctggacncgtagcaagacggactacaagcgaaagcctttggcaagaatgtcttcattaatcaagaacgaaagtcagaggttcgaaggcgatcagataccgccctagttctgaccgtaaacgatgccaactagcgatccgccggcggatttattcgccctggtggggagcttcccggaaacgaaagtcttccggttccgggggaagtatggttgcaaagctgaaacttaaaggaattgaaggaagggcaccaccaggagtggagcctgcggcttaatttgactcaacacggggaaactcacccggcccggacaccgtaaggattgacagattgatagctttttcatgattcggtggatggtggtgcatggccgttcttagttcgtggagcgatttgtctggtttattccgataacgagcgagactctagcctactaaatagttggctcattgcttctgtgggcacaacttcttagagggattttcggtgttcagccgcacgaaattgagcaataacaggtctgtgatgccccttagatgtccggggctgcacgcgcgctacactggcaaaatcagcgtgcttgtccttccccgaaaggggttggtaaaccggtgaaaatttgccgtgattgggatcggacattgcaattattgtccgtgaacgaggaattccttgtaggggcgagtcatcaactcgctctgaatacgtccctgccctttgtacacaccgcccgtcgctgcccgggactgagccatttcgagaaattcggggacggttagtgttccggcttcggtcggtatgcagactggaaccgatttaatcgcagtggcttgaaccgggcaaaagtcgtaaca

SEQ ID NO: 70511 - DNA, 589 bp, Heterodera glycines
atccagcagcaggttcacctacagctaccttgttacgacttttgcccggttcaagccactgcgattaaatcggttccagtctgcataccgaccgaagccggaacactaaccgtccccgaatttctcgaaatggctcagtcccgggcagcgacgggcggtgtgtacaaagggcagggacgtattcagagcgagttgatgactcgcccctacaaggaattcctcgttcacggacaataattgcaatgtccgatcccaatcacggcaaattttcaccggtttaccaacccctttcggggaaggacaagcacgctgattttgccagtgtagcgcgcgtgcagccccggacatctaaggggcatcacagacctgttattgctcaatttcgtgcggctgaacaccgaaaatccctctaagaagttgtgcccacagaagcaatgagccaactatttagtaggctagagtctcgctcgttatcggaataaaccagacaaatcgctccacgaactaagaacggccatgcaccaccatccaccgaatcatgaaaaagctatcaatctgtcaatccttacggtgtccgggccgggtgagt

SEQ ID NO: 70512 - DNA, 75 bp, Heterodera glycines; identical to SEQ ID NO: 65584

SEQ ID NO: 70513 - DNA, 920 bp, Heterodera glycines
cacaattaataaatttatttgacaaatgccactttttcttggcattgacctcggcacaacgtcagtgaaaattgccctaatcgatggagacaaaaagtgttcttaaaagggattattttgagagtaattaaaagttgcaggacatttttggaatgggacagaaaacacaacgcattaattgagagagaggagaaggacaaacacgaacaaagcccaaagaaaatattggacaccgtacagaaattgatgggagagatggaaacggacaaattggcacaagtgaaaggcattggcatttcgggacaaatgcacggagtgatgctgtgggaagccgactcaattgggtcctttaattttaaaatgaaaacggaaaagtgagtgaagtttgggcgtggaccgttgccactgctcccctctgatcacgtggatggactcgcgctgcgacgagcaattcctgcggaaactgccaaagtacgcttttgagggaaactggtcaggtggacccaaaatgcagatggttggacggaaatgacccacaaaaggaaaaaagaattgccacggggtacggaatggcgactttggcatggctaaaagaaaaaggccaattggacggagaaaagtgggacagagcgggcaccatcatggactttttgggtgaccgttgcaaccaaacgattacattctgccgtccgtttaagcatccctcttgactcagtccaaaagtgcgtttatttcctcacaaaatgccgagtcgtgggggtttcgtctccgacttcatttggaccgtccaacagataagctgattgatgccctccctctgtttcccatttcattttgcttttcctcacgcccatttccccactcatttgctgccctccatcgtttcccccggcactttcattggccgcacttcgcttccc

SEQ ID NO: 70514 - DNA, 75 bp, Heterodera glycines
cttaattcctcattttgctatttgagttaaatcccaaaaactcaatggaagctgcttcaagtttgaatgatttaa

SEQ ID NO: 70515 - DNA, 237 bp, Heterodera glycines
atggtcgctcagctggaggcactgcccgagagctggggcgaccggcgcacgctgctttggctgcgccaatacgaacagtttgatcgccgtaccgacaaattctggcgctcacttggcttcgccaagcaccgccaatacagtcccggctatgagaatttggcattttttctcgaccagttgggccatccgccggccatcaaaacggaagaggtcgcgcaaagcgttggtgatgccaag

SEQ ID NO: 70516 - DNA, 577 bp, Heterodera glycines
atggtggcgaaggttttccttttgtatccaaatgcgacggttccaacgctaatcgaaaaattctttgtcacttattcgacatggtaagtcaaaataaatttattttaaaattgtaaaatgccaggaaatggccaatgccaattcaattggcacaaacggacttcactcagaagggcgaatttctgagttggacgccgggccgagaacacttcgtaaagaggcaattttcgccaagaccaatgctcagactgatccgacccgtcctggccatggctatcattaccccaacattccccgagcaaaacttggcacagaatgccaatctttccacccaaaagtgcctaagaaatcatatgacaaaaggtaaattatttgagaaaaaatagttcaattaaatcataaaaaattaattccatttttagctttggcaaaaatacgaaacggaaatgaccaacaaaaggcattgtttgctcctttggagtccaaaacatttctcactatggtggggcgtttgtttgttgttgagatatttgtgggcaaaattatggcgacgccaaaacaaattgggcacttttag

SEQ ID NO: 70517 - DNA, 380 bp, Heterodera glycines
atggatcaaattttgccatttgttccccgctcggatttcggtgggccaatgcaatgggccaaattcgcagaattctcagaaaaagtaaaaagaaatatgtatgataaatataaaatattggataaataaactcaaaaaatagaaaaataatataaaaataaaattaagcggctgtaataaaatttggctgattggaattgaaatgaacgaatcgccaaaggaaatgagcaaatttaagagcaaaataaaggcaaatctaaagaagaaatttgacgagaaaataagcaaagatttcggcggatattctgctcagattgaatcggaatatgtggacgaaaggggaagaattgagcaaatatttgggtaataataagaaaaaa

SEQ ID NO: 70518 - DNA, 376 bp, Heterodera glycines
atgaatattcgttccaatttcgtcctctttttcttcatcgttttaacactttttgcgctctctcgcggagttccgctcgacgaaggcgttgacgaggagggactgtaagagaaaccatttaaaagttcacgagaatatgccactccattaaatagatctgatttaaagcatttaggcaatggtaattatctgttgaacttttatatgcttttgcagtgatttgaagccggtgcctgcctcaaaagtgacggaccgtgccgaacgcatcgcgcgacgatgcgttcgatgtaagcggcacggatggggccgatggagcagctcaaattggggctggggctgatcagcattaacggaaattgagaatgtggaagtgaca

SEQ ID NO: 70519 - DNA, 124 bp, Heterodera glycines
ctgttcacttccgcccacctgccaatccaattggctgttctcagttagccgtttcccccaacgtcgtcgcgcccatccatccgttcactacacaaccaacaaaactcaacccatcccgcactcc

SEQ ID NO: 70520 - DNA, 233 bp, Heterodera glycines
atggctaaaagtgacaaatttagtttaaaaatgaaaaaactaaaaacaaatcattcatcggcctctgctggtgatcattaattaattaattagttaaacaaacaaaacgacgtgcagacagacagaatgagaaatgtgcaaatgcataattaagggagaaaattatcaacacggaaggagggtttagttgggtaattgggtacattttcggtgattaattattttcgattaaa

SEQ ID NO: 70521 - DNA, 363 bp, Heterodera glycines
atgattacgacaccaaacaaaatgattaagcaaggtaactaattactaaaattagctaaaactttttaaataatcagctgatcagagtgaacaatcagttttttgtctcttaccgagtttttacgcgaaaaatactgcacatttgggctgatctgatcatcgtcctcctcctcttcgtcattctcttcctgatcagaacggacggcaccgccaagcggcactccccgtcgtcggttggcatcgtttgtgtgctgttcccctgccaaatacacacgagtcactgtggcagctgatgctcggcctaattagtttttggaataggtaattagcaaataattaatagtgatttgacattcaagaaaa

SEQ ID NO: 70522 - DNA, 872 bp, Heterodera glycines
atggacggcacaactccaattggcagtcgacaaacccttgtcgaacagttcaacaaagttattgctgcttttcttacaatcctcactttaattctaaggatcccgatctttttgtgtttttattgacgacaaaagtcggtggacttggcataaatttgaccggagcgaatcgcgttttgatttttgaccccgattggaacccgtccacagatgctcaagtcgatttgctcaattttacaaattaattttccttatttttttggtcttaggcccgtgagaggtcctggcgaattggacagcatagggcggtcacaatttacagactgtgcgttacaaaattattgcccaattaaacaattaattaaggttgacaagcggaacgatagaagagaaaatttaccaacggtgttgtttttcatcggttttcgttaattaatataaatttattcgtttaattattacctttaaggcaaatattcaaacactttttggccaatcgcattttggacaacccaaaacagcaacggttcttcaaaaccaacgaattgcacgaattgttcaccctgggctcgtcaaaaagcgaccggaagtatggcacaggtaaaacaatctgtaaaaatctcatcaatttcactcccaaattttagaaacggcggttatttttgccgccaacggaagcgaagtgagcagaaaaaagttgaagaataacatggataaaagaagggatgaaaaggaggcggagaacaaagcgaaagtggcggaacggacggacgacggcggaaaaatgccctcggctgattttaatgacagtgcactttcggacgaggcccgggaaaggcttaaaatggtcgccaaacgattagcggcgtaaa

SEQ ID NO: 70523 - DNA, 284 bp, Heterodera glycines; identical to SEQ ID NO: 62736

SEQ ID NO: 70524 - DNA, 171 bp, Heterodera glycines
gctgtaaaaaaaatttggggcgatttgaaagagaatagaaagaaccaggttcgatgaagttttggtaagccaaaaaaaatgcaaacatttaaaaatctataaaaaatttaaaaatgagaattcatgcgagattttctggaaataagcttaattgggccttgttaagctgta

SEQ ID NO: 70525 - DNA, 277 bp, Heterodera glycines
  unsure (1)..(277): unsure at all n locations
aatnntagcattggatataattgccgcaaataaattgcaatcttaccggaaagccaatgatttggttggtttgctttaacattgtaaagtgcaaaatgctaactaacttatgtatttgtatttcattcttacttagtgttgacaattcggaatggatgcgaaatggcgatcttccgcccaccagattcaattgtcagcaggaggccgttcgcgcacttattcatcttaaattgagaagtaaccctgaaaatgctgttggccttctttcgttggcgga

SEQ ID NO: 70526 - DNA, 737 bp, Heterodera glycines
atgcgcagtacactcaaagaaatattctcaatttattcggtggacagttttttgggctctccaaaaaaaggagtgcttgacttccaaattgtaatttggcattttatggacgtcgtcgaaaatgcatttagacacataaaagaaatggaagtaactaactttttaagcaaataaataataattgaaatattaattaaaaatatttttttaatttacctaaactttcgttttttacatttttatttttcaagctttttgacggaaaattggaagaaatcagaacaaaatttgaaaaggaatgggaagaattaacggaaaaatggcaaataaacgaagatttcaaattcaatgtcaaaatttgtcttctgcatggatttacgcaccgaattatacggcacgaaacactgaacgggcacagcgagtgggcaacatatgccaagtcggtgtccaatggcattttcagcatcgaaggcggacccgaatttgacagtgtaagtacggttggtatgtacagtacagggggatactaccgtaatgcatacaaaatgggcgaataagctaaaaagaaataatagaatttttcctaaaaaatggtaaatttatgtcaaaaatattccaaaacttttgggttttaggcagttttttcgcaaaaaattcatgaatatttgtattttttctgaaattattttaataccgtattgaaccatttgaaataattttttactaaatttaataaa

SEQ ID NO: 70527 - DNA, 291 bp, Heterodera glycines
atgcaatccgttggacttcttctgtttccattgtttattttcattgcattattaatcattgctgctgtcacacaaaatgaggtacaataattagcggtgaatatttaaaaaatgaattaatcaaattttcgaaaatttattttattcacagaaaaaaattctcgaatgcccaagagaagaagcgcccattgagcaattaagggaactggataagaacaaattgccggataaaggtgaaattgaaagaccaaagaccaaattttgccattagaacaatccccaaaaaataaa

SEQ ID NO: 70528 - DNA, 844 bp, Heterodera glycines
atgtcgaaagcaagggcacacgagaaatatttgccccaattcagctcatccacgtgttcaatcacacgtcgtggtttcgactttcagtgtgaatggtgcgaccaaagaatggatatggatttcattacaagtcaatggccaccagatcaaacttgcagcccattcgtgttcacatttgtcgatcatacagcttccggtttggcaaagtttgggtgaaccgaggttggaaaaagttggtaaattatgggttccttttcgggccacaaattgaagttgttgggaagtttcaagtgtgacgttctgttcagaggagtcacaatgcggcttgaactttcagtggcagacaccgaagcgccgagcatcatgggattggattggatcatccctttcgagcgtgccacccaacagccaattgccacgactttggagcagcagtcgctcattgtcaacagtgtgcaaccaacaaatgatccggtcaaattggaggggcaaatcaaggcttccttcccgaaggtgtttcaacctggcctcggacattgtgtgaagacgaaggccacgctgcatttgaagcaaaatgtgaagccagtgctctgccgtgcgcgacctgtgccgcatggagttcaagcagcagtcgacgaagaattggaccgacttttggactcgggagtgctgaagcccattgatttttcgcgctgggcagctcccgttttggcagttcgtaagaaaagtggtaatgtgcggatttgcattgacttttctacgggactaaacgatgcgctggagttgaacaggcatccccttccgcggaccgaagacatttttcatgctctgcgtggagcccaaa

SEQ ID NO: 70529 - DNA, 1261 bp, Heterodera glycines
atgataattcgttcaccgcgtagaaatccatttccaaggcgtttggctggagaaaatccagagcaacggaggaatgagaacaatttagaaaacgaagcaaatgcattcgtttttccagaacagaacgaaggaaacaatccgcaaaacagccgaaacaaccagcattcacgacaaatgatgggagaggaagaaattcaccgcgcacttttggacgtgaatggtcagcagaacgagcagaaccaacagctcaacgcagacgaggagcaccgccttttggatcaaagtaatttgaatgtgctggcaaatttgggtggaaatttcgacgcaaatttgggaaacaatcggcaaactgaagttgctgcaaatatggcgcagcgtcaaaacaattttgtgacgtccacgcccaacattagtcccggtcaccaggcgcgacaaaattttaattttgttaacaaccgcgttaacaggcgcgttgtagataggcctagggatgcactcggacgttttattcgtattgaaaataacaatgagcaagaaatgccaaattttttgcaaaatccaccgcggaacccgcaaattccgccagtaaatcagcagcagggtaacaatttgggaaatttcggaatcccaaacaaccccaatctcatgcaaccgttacaattcggtatgaacggcatgtatgcgccagtcgcttggcctcaacaaccgatgatggcttatccaccaccaaattttcaaatgttttgtccgccaaattttgttccacaaatgccggttcaaaattttgtgccatttatgaataatttggcaccaaatgcgtttcaaccacaaattcctcaaaacgcaattcaaccaatgagagctcagccaacaaatgttgtgcaacaacagcaaaatccgccgctgacaaatcaggcgatagcacaacacaaccctcagcaggaggtgatccggcaaccaacagggttaagtggcattgaatatgctatgatcctggacaggctgcccgacattaaaggaaacgagggaagtgattcgatccgcaactttttcaaaaaattttcacaatatacgagtgaatggccaaacaaaaagcgaatcgaatcattagaagccaaattgagtggccgagccgaacgtgcctacaatgctgctttagcgacagagccgttcgcgtacgaaaacatcaaacgaaacattttgcagcagttggaagaaacggattgtagggagatgagtgcttttgacgacctcatgaacg

SEQ ID NO: 70530 - DNA, 468 bp, Heterodera glycines
atgctgaagaaactgcgcaaccggggccacgaggaccacgaaatacacgaacaaatccacgaattttacgaagtgtccccggaagaagtgaaagcaactgccagaggaattctccagagaggctgcgaatccatcttcaaagtgtgtgagggaagagagaaagacgaaaagaatgacaagagagactaattaattaataggttaagcaattaattattgacattgattaagcgtatctttggagaatacaaagcggaggaaataatccaggtaattagagatttaatttaatgagtgtcgatgacgtcaattgtttcatttgattgtttgaagatgcgcgacgaaggagcatccaatgttgaaattgaggagaaaatcacagaggcactgaaccaaattcgaagtccgcagaagcgacaggaggccggccgatttgcgatgtcatgtcgccgaatattcgcaatgatt

SEQ ID NO: 70531 - DNA, 689 bp, Heterodera glycines
atgaagcgacttaataaatcgattatggatttgcaagagttaatttctcaactcacactagctaacacggaatttgccgagtgtaggcgtaaaatgagccattatgaattacaagcgtatatcttggtccacattgagtgtgtgggcgaggttaagtaattttctgaaagagctcaaaagcagctttcgaatggtgtattcaattaattgtttacttgaaaattcacagagatatgtccaaccgaatcttgaaatgaataatggcgtagtattctataaaaaaaaatttttcttaggaattttacagtgcccagggatttgaattatccataaacacatcatagggtaaatatctagcaaaaacaaattttttttacacaaaatcctagtccagcaaacagatgaagcgacttaataaatcgattatggatttgcaagagttaatttctcaactcacactagctaacacggaatttgccgagtgtaggcaaattcacagagatatgtccaaccgaatcttgaaatgaataatggcgtagtattctataaaaaaaaatttttcttaggaattttacagtgcccagggatttgaattatccataaacacatcatagggtaaatatctagcaaaaacaaattttttttacacaaaatcctagtccagcaaacagatgaagcgacttaataaa

SEQ ID NO: 70532 - DNA, 202 bp, Heterodera glycines
ctataaaagggggggtcaaacatgccaaaatcacgttcatttcccaattggcccccaatcgccggacacaaaaacccacccgaaaatgttccatttggccgccatcgttgcgctagcggcgctcgcactgcccctggcatcttcagacaagttcagaccatgcctcgagggctacgcacaatacggcaaatactgctacaag

SEQ ID NO: 70533 - DNA, 98 bp, Heterodera glycines
taccgtatttgctctaattaaggcccctgggggattatttttcaacctcctcagaaagggggacataattggagacagggcctttaaaggagacgggg

SEQ ID NO: 70534 - DNA, 1154 bp, Heterodera glycines
atggctttcgatttaaaaatttatcttcatctatttatttcatttacttttgttggactgatcactgaggtaagtcagtgaatttttttttttttgatttaaaaaatattttttagccttaattttattcatcaattttcaggcttccatcaaagttgttccgatcagttatttgatcaaatttaatggaattgatcatccacaaccacaatatttgtcatacacaaataaacaaaatgtaaatttatatacatataaaatttactttatattttaaataatcattttaaattcaggtgcctaaaaatgaaaacaacaattataaaatggacaattccgtggtaaaactctcgccgaagttgaaggatgatacatgggacaaaaaggtaaaaaaattaaaatttttaattgaattcattaatttggatataattttaggaaaacaatggaatggtggtgcaacaacaaaaaataacgaaaaattttgctccaacaaccaaattaaatgatcaacaaaaagtgctaactcaaaaagatgatcagaggccgccgactttgtggacaatgtccagtttaaaacaaaaatttttaaaaataaaccgattattttaactgcatttcaacaacagcaaaaaagtgaacaaaatccgccagtcaatccaaattatattcaacaaaatcagtaccagtccactaaactgtttgatcaaaatcaatcccaaacaacttctccaacactgatccaaccaattcagtatcaaccggcggttcaaaaacagctccaactaactcagtaccgacctaattatccacatcaatttctgccaaatcagtatcagccggattcaatctctccaaatcaatttcatccaccagcagatttgcttcaacaaaaacaggatcagcagctggctacacataatcaataccaagcggacaagtctcagccggcggcgtcgccaaaccagtttcagcaagctcagtaccagtcgtctgtgccaagccaaattttcaaggagatgcgaacaaataccccaatctgcggatcaaagcaagaaaatcattccgcaatcggttggctctccagcaggcggaggaagaaacagcaaattcacgccatggaatgtgcacagctactactacacaagctatga

SEQ ID NO: 70535 - DNA, 388 bp, Heterodera glycines
atgccaaaacaaaacgaaatcgttttaaaatattcctttctggacttgacttggtttcttgatatcgaagctgttttctacgctatttctaaaacggttataccaaaccccagatttttgaatccggttttcagaaaaaatgccttgtggtgaaaacaatatttcacatttcactccataactttgtgagttcggcacggatcgagaccgggataagaccattggaaagagcagctcgagctctacaagaacgtatggaaagaaaaaatagttatttctgggactttttcagaaatcagaattaattctccaatgtggcccaaattttaggcccccagccacagacccttgcttctcccagttttaagtcttggatttgtcaaataaa

SEQ ID NO: 70536 - DNA, 153 bp, Heterodera glycines
atgtacggtaatatgggtcccctgtcgcttcccatcacttttttatcgcttttgctgttggcggtattttgccattctgaggatcgtaccgttggtggtgaagagcctgaggaaaagctgccctacaaacagtatttcagtgaacaaaaatat

SEQ ID NO: 70537 - DNA, 294 bp, Heterodera glycines
atggaaaaggaaaaggcaaaagggacaaaaggaaaaagccaaaaggaaatgccaaaaaggacaaatgaaaaaggaaaagccaaaaggaaatgccaaaagggacaaatgaaaaaggaaaagccaaaaggaaatgccaaaaggaaatgccagaaggaaaagccaaaaggaaatgccaaaagggacaaaagtaaaaccggacaaatggaaaataaattaagcagacgaaaactagcctgttccgaccgtttgatcttctcgtacagtttggcgtggtgcaacgcgagaccacaataa

SEQ ID NO: 70538 - DNA, 696 bp, Heterodera glycines
atgtccgttcaattcagtgtgatcggagtcgtccaaatggtcaacaaacgcagcggagtggcattcactcaaatcgacgaagaagcctttgaaacattcgctatttattgtggtctcgcgttgcaccacgccaaactgtacgagaagatcaaacggtcggaacaggctagttttcgtctgcttaatttattttccatttgtccggttttacttttgtcccttttggcatttccttttggcttttccttctggcatttccttttggcatttccttttggcttttcctttttcatttgtcccttttggcatttccttttggcttttcctttttcatttgtcctttttggcatttccttttggctttttccttttgtcccttttgccttttccttttccattggtttcttttggcattttctttctgaattttcccatttgttttttcaattcagaaatatcgcgttgccctggaggtgttggcttaccacagcgtgtgtaaccgtgacgagttgaacaagctgaagaaggtgaagctgcgcgacaaaatccccgagttggacctgtaatgaatcaatgcccccccttcccaaatgcgtttggtttgttcagtttcgagttcaacggaaaccgtttgtccgagttggagaagccgttgtacgccgtttacatgttcagaactctgttcgacggagtgat

SEQ ID NO: 70539 - DNA, 517 bp, Heterodera glycines
ttgaataaatcccaaattaataggaaattcatgcccatttccaaattaggacgggcacaacgttctaaaatcgctgagctcgtccgattacaaaagagctttgagcacaattcggcactgcattttggccaccgatttggcacttttcttcccgaacaaaggccaactcagtgccatcgtcaaagaaggcattttcagttgggaagacgacaaacacaggcaaaagagaaatgctttaaaggtgcagaagagtttgtttggttttcaggtgcctcgtccaggccattctgatgacggcttgcgatttgatagcaacagcaaagccatggcaagtgcaaacggagacggtcaaagtgatcttcgaagagttttacgagcaagtcggtgaagggagtcaaacacagccaaatgatggcaatttgttggaaagggcgacgccgagcgactgaacgggcgcgaacccatcccaatgatggaccggaacagggcacatgaactgccgcagatgcaggtgaaa

SEQ ID NO: 70540 - DNA, 1119 bp, Heterodera glycines
atggccaaactgcaaatagaacaaaagcatcagcacaaattctatatggacatggtaaatcattcctaatgaaatggtgacaacgattaaagcaatatttttttaaagacagtgaaaatgtggcatgacattttgcagcaaaatgaggcgacacacgacaataccggcattttgatgagacaacgaaggcaatgttagtagcaatcattgctcaacattgctaataatgcataagctaaatgctttaagccaaaccgacaaattcgccgcaatgtgcgcaagggccaaagggaatgcccggaattccgggagagccaggtaattaacaaagtgaagaaaaacaccaaattacttctaaggccaagatggtcttcccggggttcaggggcagccgggaaatgcggcggttggcgggggatcgggcggagggtacggcgaaggagcgtcgccatcgcaatgtgtcccctggtgggggaggggggtggaggtgccttttcaaaggactttccaatttagcccgtcaggccctcccggaccgccggggtacaaaggcaaacgcggacagcgaggggaaaagggcggcaaaggtaaaggacaaaaaagtcattcgtaattgcatcatttgaaggaacccccggggcacccggaagagacggacaaattggtgagtgaaacaattagaaattgagttgaatgtttggcaaattgaaggtgatgaggggcccgagggggagatcggattgccaggggacattggccaaatggggccgaagggcgcgccgggtgaggacggcgtcggatacgcaaaaggagcccagggaccaaaaggcgaattaggcgccccgggagccgctggggaggagggaccgccgggggaaagaggcgaagacgcgtcgccaggtgagtacggacggagacttcagagagaataagcgcgatgcaattcaggcccgccaggagagttgggcccccagggacggcccggggaaaagggcaaaaacggagagacgggggcaacggggatcgccggaccaccaggcaagtggaagtgccgatgggacggatcaccaggagaccatttgaaggcaaagacgcggaatactgtccatatccggaacg

SEQ ID NO: 70541 - DNA, 1796 bp, Heterodera glycines
cgataggaggggggtccccaaatgggcgccatggaacacaaacggaccaactcaaacaccgaaaacatacaataattttgaaatttgcttttcattccgattaatgagggattgaagccatgataatcccagcatttttagcttttggggcctacgcgttaaaaaacatgtttttcagccctatttgcttttttgggctgccccaggtttgtccggttgttggcgctagagctcctcgagagtcaaaattccgagactcgagaccgaggtttctagagcagccctaattggcggattggcggcaatctttttggggacggtccaattttaatggaatccaaaaagcccatggaaatatgtcaaggcaaaatcaccaaagagcagctccgttttgggtacgaagcattgggccgcattgagcgccacgtgcaaaaagggactttcggcagagactttgtggaggcaatgaatgagtgaggaaaagcaaagaaaatgggggggggaaaccccacgaaaatccaaaaaaaaaccaaaatgggcctaacagttgatcctccgccgttatgtttacccgggttatttagtgcccctctctttcagttattacacgcgcattccgcacagttttgggatgcgaacgccgccgccaattaaatcgccggaggaattgaagcgggaaaacgaactgttggaaatgctaacgggcgagtttttacaaaagatgtcattttcaggccaaacccgcttttaaggcatcgaaattaccgtttcaaacattggcgccgaccctttggaatgccattacgcgcgtttgcgatgggatttgattcccctggaaaaagatgatgcgaattacaaagtgaaatggaatttaacacaaaaactaaaagaattaacccccaaagattgtggaggagtatttgcaagggacgcacgggccaacgcacgacaaatatcggatgaaagtgcgaaatatttttgaattgagcgtcaaagggacggcggacgacggggaaaaaagaaagggtgccgaagaaaaacggaaaagcgcaaataatgacaaagggaaaggggaaacgcgaaagacgcaaaatgagcaaaagggcagaattggcaaccgaaagttgctttggcacggtactgaccaaagagggattgaaacgttttcgaaggcattgtccgccctttaagggtctcgcctcgccaattggtacagcattttggccaagggattgcgaatcgcaccccccgaggcgccgtcggtgagagagaggcgcaaattaccaattaatcatgcaaatctaattaagaccggctttatgttcggaaaggggctttactttgcaggtgctctttttgctttttcccttttcatcccattgaagacatttcgagtaaatcggccaattattctctctctgatccgaaaaagcccggctttcttttgctttccgccgtcgcccttggggaggcggtcgaactgaaagaggccgactcgaaaatgcatcaaaaattgccgaagggaaagaacagcgtgaggggagtcgggcattatgtgccgcatccaaacggaaggaaaacgatgtgagccaaagacgaacacaacaatcatttatggggaatcagaattggcatttaagtgacggagatgttgaagtgccctgtggaaaaccaattaaaaacaccgaagcggacgacgaaacttcgcttatttacaacgaattcgttgtgtatagcctcggtatttattattggtcggatcggtgctttctctgtttaattaaagccgtttaaga

SEQ ID NO: 70542 - DNA, 629 bp, Heterodera glycines
gaaatggagcagaaaacgacaaaaacaaaacggcgaaagaaagagaaagacacagaaaatggaggaacaaatcgggaaaagccaaaggacagtgaaaaggaaaatttggatggacgcatttcgaagagaaacaaaatgcaatcggaggaggcgacggtggacgccgaatgtgccgaattgcgggggaatgccaaagtgttcgtcgatgggaagggccgttgctacgacgtaatgctcagccaaacgaacattcagcagaacaacaacaaattctatctgatccaattgctgtgcaaccaaacggcggccaacaaattttgggtttggtttcggtggggccgcgtcggattcaaagtgatttttggaggaaataataaaggaaattcttttcattgtcagggacagacgaatttggtgccttttgggacggactttgacggagcgttggaattatttcacagaaaattcactgacaaagtaagcgaatccgtccttttgctcttttccttttacatgcaattaatttcagacgcaaaatgatttcctaacggacattaaaaagttcaaaaaagtcgccggcaaatacgacctaatcaaaattgaccactcgcgagaagtgacgacggaaa

SEQ ID NO: 70543 - DNA, 551 bp, Heterodera glycines
atggcgacgagtccccatcaacaatggcactatgatcgaggcgctttgctgtcatccacgatgccgggtacggcggaatgcggtcgccatgtgccgcaacagcagcgtgatgacaccacttactactggccccatccgcagggggagacggaccgtgaccgcttcggcgggcgcggcgccggtgccagcgacaatgccgccgcgtcagcggcactgcgacgccagcagagacagcagcaacgtcatcgcagtcgcctggcgcgtttcctgcacaccgacgcggcggaatgggaacgacatttgcgcgagcgacagttgcagcaggagttgaacatgcgcagaacggtggtacaacaacaaaaacagcagcaacagcaacaacaacggagtcgcatgcgaaacgacggcgacgcggggcccaacgaaatgtttcctcaacagtatcagcagcagccgcaacagcagcttcagcctgtggacggctccgctgggcatgaacagtttgcctacaatagtcaacaacagccatggccaacagcggcgccggcatg

SEQ ID NO: 70544 - DNA, 112 bp, Heterodera glycines
atggcaccgtcttcctcctctgccgccgccgccatgacaccactcggcgtcattttggtgtccaaggacgagtcggccgagcgcgtgctgttcatgtacccatttgagcgcc

SEQ ID NO: 70545 - DNA, 75 bp, Heterodera glycines
taaagaaaaaagataatgtttttctctggcactctctatttattggtacacatctcgttttttcggacggtgtgt

SEQ ID NO: 70546 - DNA, 418 bp, Heterodera glycines; identical to SEQ ID NO: 53014

SEQ ID NO: 70547 - DNA, 81 bp, Heterodera glycines; identical to SEQ ID NO: 58971

SEQ ID NO: 70548 - DNA, 225 bp, Heterodera glycines
agtcggcctcggcaagaatccatccgcaccacattctgttcctttatgatgtaccgttgcggacgttttctgcttttctgaagatgttctgcgcgtccgatgtccagctgtttgtcgatgtcccttgtgaatgcagtaatgaagtcactcaatgatgggtgatggttgagctcacgctgaaataccaaaattaatgtttttctaaagtatatgttgtacagcgaa

SEQ ID NO: 70549 - DNA, 1442 bp, Heterodera glycines
atgtttgtttttgaattccgttctctctgcccactcactgaaactctgattggtgatttcgtggtgccacaaattgatgcgcaaatcgtccgccgagatgaacgtctcctggtccgagttgatgcttatcgaattgatgtggtaagtgtgcgcgttggcgtacacgcggcggggcgacgcttcgacgattaattccatgggcaccaatttgggcagtttcaaaggcatggcacggttgaggaacctcaaaaggcaacataagcacttgaaaacagacagtttaatactgatctaactaatttctcccttcgattaaattttacctccgcgatccgtcgtcacaccgcaaattgtacccgccttccgtcatttttcgttcacgctcagaaatcttccacaattttaccgttttatctgcggaaaaagaaaataattttgaggtgaaaaaatgcgtgggatttgaaacatttgaaagggaaatatgtcaaaatattaaagggcattaaaaatgtctcagccgaataaaattcaaaattaaaaaaacaccattggttgagatgatgaaattggccgcgttctttttcttcatccatttgatttggttgattttctcctcgatttccagcgacttcaaataatcaaattcgggctcatgtgattggaaagttgagtacacattgtactcggaagtgcggacgccgttcagaaacactccctgaaaaggggacaaatcagaagcaaattgaaatggaattgacaaacgctttggtcccgttgaaagatcaccactcgtccgcctttgtcaccggtagcgagcagttcaccatctgtgcgagaaaaacgcaaaagtttttgtatttatttaaaacaaaacaaagaaaacgaaccgtgagaaaactcaacgcacgaaattatgtcagctgaaattaataatgcttttattaatctgttaaaacgtttaaaactaaaagacaattggggggataaagccaaagataaagcaaaaatagaaaaaagtaaacggaaatgaatgaaaagtgaaaagaaaagaaacacgaacagcatggatttacaacttttgttttggatttaccaatccaatcgtattgaaaagttaatttattcactaaaaattgtaaaaaaaaccgtcggttggcgcctcgcccgtctcaatgtttccctttatttgggagaagcgccagtggagttcgtcgccgccaccgctgctgacttcgaaggcggtgccgcaaaacggcggtggagttgccgaggaagaagctggcacatccattttcacaaaatgtagaaattccgcagaatttataacaagtggcgcgccttttttagttcaagccaaatttaggtgcactttttaaaaatttgcgaatagctgacaaaacaaatgaaattagaaaagaccgaaaatatgtaaatggaaatta

SEQ ID NO: 70550 - DNA, 108 bp, Heterodera glycines
tatggcacggaaagacttccgatttccgacatttttggggtcggaattccgacttccgaaatttttgatgaaaagtcggaaattttttgaatttaattgaaatttttt

SEQ ID NO: 70551 - DNA, 825 bp, Heterodera glycines
atggcaataaaattggaatttgccggagggcttgacgcaatttttaatgggaaacgcgagaccgaagctgaaaatgacaatatttcggtattattttttatctttgtgctttcataattctgcttcataattacataaattttaatttttaaaatttttctacgtgtgttaaataaaatttcaaattttattcattttgtcctttttcggactgttcgtcaattgttgcggtggctttcggacgggcccttgcggggcaatgatcggtcggaaatgctcatccaacgcgacaccgtcagaccgggcgttttggtgctgatcaacgacacggactgggaaattctgggcggagtatggcaaaaaataaaaacgaaagaaaattgtgcactcatttggtgtacatattttgtaaaaattcgggaatttagtttttttttttaaagtaatatttggccttattgcacagcgaaaatttgattttgttagggttcggacgaatgacgcgatttggcattcttttgactcaccattaaaaatggtcttttagtaaaaaaaaaaaattaagatggttaacccaattttcccaatattccttaccaaaaagggcaaaattttataaattttcatttgaatttaattgtttttgaaaatgcaatttttgccgtcttttttcagttggacgctcagctcaacggcggagacaaagtgacattcatttcgactttacacggcggataaaacagcaaaataattgaaaaataattcattcgttttttgtccatttttgcagaagcataaattataatttttaatcatttttcacta

SEQ ID NO: 70552 - DNA, 2561 bp, Heterodera glycines
atggtagaactaagaagtgattttgtgttacaatttgcagattatcaacgaactgtcgcctcaagtggttcggtgtatcaaagatcagaatgggaatcatgttgtgcaaaaggtaaatggttctttcaaaatggagcagtcccccccccccccaaaaaaaggggaatgaactgctcccattttaaatgcattgtccacttttgtatgaaaaaataaatgccattttcagataatcgagcgtgttcagccgcaccagctgcagtttatcatcgacacgatggtcaacggttttacggactcggtgagtttgccgttggccagttttcttttgcaatctgttcgtttttcgtcaggtcacttccctctccgtccatccgtacggctgtcgtgtcatccaacgtgtgcttgaacactgcacggagggacaaaaacggcctgtgctggaacaactgcatgagaatgtgctcactttggtcaccgatcaggtgagaaaagcgtggagggactttaaatgatcaatccaaaaagacatttgatcaatcataatgaaaggggggaagttatcgaattggtaaaaaggttgcaatcgtcgcactttccccctttctcaagtacggcaattacgtgatccaacacgtgattgagcacggactgtttgacgatcgggagcgcattgtgcgcgctttgcatggagacatcctgaaatatgcacagcacaaattcgcctccaatgtcatcgaaaagtgtctcatttgcgggacgacagacccaaagaatgcgctgatcgacgaagtttgtgcggagtgagttttcctctctatttctcaattgtcatttgtctgttttgaatgcctaatttggcctttctccgtttcagcaacggttcttccaaccacccctcttggagatgatgaaggaccctttcgccaattacgtcgtgcaaaaaatgctggacgtcgcggactcgacccatcgcaagaagatgatgtttgccatcaaaggacacattccggcactgcgccgtttcaactacgggaagcacattatcagtacggtctttttatcttttttatgtccatttgtgcataataaagtgttcttatttcatacttttcagcgaagttggagaagtacttccaaaaggtgaccaccaactccagtccgatgaccacccaccagcagtccatgaacaatggcaacggcacttcgtccgttgcctccggcattgacgcatcgacgcccacgccgtcgcctgctgtgagtccgagtgggagcagcaacaacggcgccaaaaacaacggcagcagcagcaacgggtcctgcacgatgacgtcgagtgcgtcgcacaaccaccattggatgtcgttggcaccgcccaccgaaccgcccatttactgatgatcagtgagaaaggagcagggagggaaaaggggcgagagtgtgtgtgaaatggggagagcggagggacagagagagcggctatttggaaaagacaaaattgacagtctttgatatattgttacagtttgatatattattattacagtcgaatgtatattatattattatttttattatcattatttaccttttgatgggagcccaacgcccaattgttttttgtaatgtttcgttttgtgttgtcaaggaatggaaatgcccgaattttcttctccattgtttttgttgttgataaatcctctgaattttgcacttctctcgggcaaagtcattatcatttgtaccattataacaaacaaattgggcaaattcccaaaatttaaattttgtaagggttttccatgaaattgactgatttttctcatttgttttcttctacacatccaatattctcaaaagttgccaaaactcatccacgcaaaaaacactcaccacaaatgaaaatgcttttttgtggcttcatcactatcattatcaccatcgttgtatcctccaaatcccttccctccatccttacacatttccatcctccatcaactgccgttttgttaaaaacatataaaaaatttttgtctaccacctccgaaaacattgcacctctgatgagccttattttcgacacaatcatcaaaattctatagcttaattagaaagaggtgtacatactcatataaataccatatttaaatatttgttttatcaatcaaatgatttccctccccgacaaagacaagcatttaattaaaaaacggtaaaggaatggcatcacatttaattcaaacttgtttttttaaatacatcctcaaaaatggaactttttctctgtccgatgccattgcctttctgccgataattttttccaccttttttatgatgaaaatgacctcttccaatctccaacagatttagctccccaaaatacgcacagtaatgcttcaaatataccatataccatacagtatacaaccaacgtacgaccaataattaattatatcacattacccttaatttacccaatgtttatttcttattttcccataagaacatacataggtagtacaattttgttagaaaaacgatgaatttcgactaaaaataaa

SEQ ID NO: 70553 - DNA, 503 bp, Heterodera glycines
caaaagttttttacaaccacttattgctaatctaatttcttgcagatttaaagccatccattgcctgccggttctcggcacagcaaagcactaatagggtgtttgactcacttcaaaaaataattccttacccaaaagttttttacaaccatttattgccaatctaatttcttgcagattgaaagccatccattgcctgccggttccggcacagcaaagtactaatagggtgtttgactcacttcaaaaaataattccttacacaaaagttttttacaaccacttattgccaatctaatttcttgcagatttaaagccatccattgcctgccggttctcggcacagcaaagcactaatagggtgtttgactcacttcaaaaaataattccatacccaaaagttttttacaacaatttattgcctatctaatttcttgcagattgaagccatccattgcctgccggttctcggcacagcaaagcactaatagggtgtttgactc

SEQ ID NO: 70554 - DNA, 86 bp, Heterodera glycines
aatcggaccaaaattgaggacgaagctcgagaccgaaccgaactgatcggagagctcggccttatgaaaaagaagggggaactgac

SEQ ID NO: 70555 - DNA, 456 bp, Heterodera glycines
gaaatgagtttttgaaagtggcatggggttgcattggttgcgccaccttcactgacatcaatgctcaaattggacaaaccgccaaagccactgtggactgtaaagcgatttttggcgaaaaggatctggatttttcgaatgaatatttcaattattcaatgttggcaatggccatggcaacaacgacgaagcagacaaagcgcaaaccgaaaaagcttatcacggagaagccgagcaccacggtggcaccaaaaaccaatggggcatggtcagcagaaatgacaatgaaggcccaggagacgacgattgaaggggaaccaatcactggagatcagggttaggcatactgtatttactgtgtgttcgttaaaaagccatttgtgcatgggtatataacagtcagtatattatggtaaaagttgttcctggaaaattggacaccgaaacaataagaaa

SEQ ID NO: 70556 - DNA, 1109 bp, Heterodera glycines
gacattgctgccgcatgtgtttttctggcaggcaaaagtgaggagtgtccacggaaacttgagcacgttgtcgaagcatggttcaaacttaaaaatatgaaggcagaagtccaaccaccattcacagaaacagttaatggatgcgcaattaatttgttttcatttttaattgcttctcaggttcggagagacggcgcagaattaatcgtctttctcgaaagtgttctgcttcagacgataggttttgatctccaggttgagcttcctcatccacttgtccttcatcacatgaattgttacgcgggtggtaggtttttggatttcgtttttctgttttcactcgtcgccgagacactaattccatcgatatttccgttacataaaatattaccaccatttattgagtaaaacatattaatgtatatattttaatctttttgttcagataactcggcgatttcacgctgtgcctattggttcgcatcggagatgatccggttgaaaagcatccgcatttttgtttcaccacctccttcgtaggttaaccaccttcccggtgcggtacagcattcagactattgcttgcctctctatatttttggtctcgctctggtcagatttagaggttttcccattcccgttttctaaaaatgcgtggaaatgccttttttcagattcccgactctaatggtgttccgtggtttaaaagcattgaaccggaaatgacaatggatctgctgaacagttaatagcattcagattaaagcgataataacgggccgctctttgagcactcgccgatgagttcacgctgctttaccacgagtgtgggagcagcgaatgtcgcaaggcggtggatttgcttcagcggttaaaccaatcctccacagctacgtccagcacttctttcatggtccatcagcttcccccgccccctccgccgccaaatttgagtgccgtaaagacaaaccaagcgcaacaacagcagaaaacccctgacaaagtgattaacaacgatcaacaaaggcaacggaacaaaaggccggcacttgcgaggacggggcaaagcgaagagccatcgccagcgaagagaatcccaacagatgctg

SEQ ID NO: 70557 - DNA, 2076 bp, Heterodera glycines
atggattcacttccgctggaacgattggaggatcggtcggtctttatcgttaataaccctccattttcgccacactctctccgtttagcgtgggacccgcggatgaacggagggatcgccaaaatgaaagtgcccgtcgaagttgtcatttctgttgtcgactgaattagcattctcctccattttcagatgatttggaagccggatatcattctgtacaacaacgccgcctcggaatatttgaacgaaatggtaattaattaattgatgggtgactcaccgatcacttaattaattggtcccgcaattctccccaattcagacgacggcgggtgtcacttacgacggaaacattgtaaagacaaaagaggcaaataaaatggtcaatttttaattttacagagtctttccatagccggcattttcaaaagcagttgcgaactcggtaaaaaggacaatctgttcaaaatttgtgcccaattcccacttcgttttgaagatgtccgtttttaccctttcgatttccaaaattgtctgatgaaattcgcttcatgggtaaatctgataattgttataacttttggcaattgtttttctttttttaagtcttatgatggcaccaaaattgacattttttctgagtccaccggtgacacttctaattatatggtctccacggaatggactctgcgcgaagtgcgggccacaaagaattcggtcatttattcgtgctgccctgaaccgtattatggcacctcttttttgtgccattctccgccattcccccaaaggtatccgttcatcgacgtttaccttctcctggaacggaaaccgttgttcttcgtcatcttctcctgccttccgtgtgtgctcatttccgtgttggtgctgctcggcttttatatgccatccgattcgggcgagaaagtcactctcggtgagttttgttggcgttgtgcccactgatcactttttggttgcagggatcacttcgcttctgtccacaaccgttttcctcatgttggtttctgagcatctgcccccaactgcggatgccctccctctaattggtattggtcactttttcgtcatttttcccttaaataataaatcgtttaaggcatttattacggtgtcactatttttatcgtatcccttcaaacggcatttaccgtctttacagtatgcccatttgagtgtcgttttgtctggtggcttttcctcagcttccccacccccctttcccatcagttgaatatccatcacattggcactaatgggccaccggtgccacgcattctgcaaaagcttttgttcggccgcgtctcgcggcttttattgctcaatttggagaagcaataccactcgataaatgaacacgtcaattacttcattggcaaacagaagaaagcggaacagagggagaagaaaggcgagaaaaacggagagaaatgggaaaatggagagggaaaaacaattttaaatggctcagagtttaaagttaataaaatatggacattctttagcttctccgtctccacgggtgagaagggcccattcggcaaattttttcgacgcaaatggcgcagacggcggcgtttttgtcgattccaatgtccattttccaaattcgatctaattttttcatttattattttcctttctaaggttcaatttgttgcggatggctccaactctttgctgaaagcgaaaaagaagcgcgtttccttcaccgatgacttcaacttttattgccaccagcagaagaacggtgcgttaccgtccgcctcggccactaccgtatcacttccgacccatcgctacggcagacgcattctgtcgctcatttcccccgttattccttcacataaacaccacccgaactgtgccaaaatgcgagtggccaccgtgtcgaacattggcaaaaaacgacatcggcataaggaccaaagcagtagcaacatgggaacaatgtctcctcattcatcggcccaccgaagtcggagtccctccgccctctcaacgacgggggaggaagacgtaaagcaaaagggagaagaaaacacggtattctaa

SEQ ID NO: 70558 - DNA, 150 bp, Heterodera glycines
atttgaaagagaatagaaagaaccaggttcgatgaagttttggtaagccaaaaaaaatccaaacatttaaaaatctataaaaaatttaaaaatgagaattcatgcgagattttctggaaataagcttaatagggcctagttaagctgtaa

SEQ ID NO: 70559 - DNA, 947 bp, Heterodera glycines
atgtctgttgatcagcataataatcatctgaatgacatgggtcctccgcctgatccggtgatggaagtgccgccgccaaaagagatcaaagtgttagagagcgcggtcgacattcagcaccggcgaacagaagcaagtggttcagaacagtacaaccattaatttgagtgctaattggccttaattaacgcacaatgcctggggatttaattcgggtttcaatggcttaaaattggaatggaatgtttgtgggcataattaaccccattcattctaaaattaataatttcaggtgcttgaccattactcacagttcaaagattttgcgaaaaccaaacgggaccggctggaggaggcccgtcaatttcagtacttcaaaagggacgcggatgagttggaaatttggattttggagaagctgcagacggcagcggttagttgaaaaaaacggaaacattttaacttaaacgagatcggaattttcaaacccgggaacgaggactgatgttggatagttgacaagaaacgccgttttattgtaccatggccgcgccggaaacggggattttcaggattcaataaaatggccatcataatgtaacaaaatcgacattccaaattattccgttttggaatccccttaattaatatatatatttattagttaaatcaaacctaaagcatcattttcgaattgcttacccctttctctctcccccaacggccgaacgtttttgaaacggggaataataaagggttttattggttttttgaaaattctattggattttcaaattatataaaagaaacatttttcaggaggagtcctttcgcgatccgaccaatttacaagcgaagatccagaagcatgatgcttttgttgcagaagttcaggtcggaaactggtgaagagaatttaattaattttggattgaattttcaagaaa

SEQ ID NO: 70560 - DNA, 65 bp, Heterodera glycines
atggctatctcttttttctcctggggatttgaccgcgaacttggtaccaacatttgccttctcta

SEQ ID NO: 70561 - DNA, 59 bp, Heterodera glycines; identical to SEQ ID NO: 68969

SEQ ID NO: 70562 - DNA, 59 bp, Heterodera glycines; identical to SEQ ID NO: 52421

SEQ ID NO: 70563 - DNA, 77 bp, Heterodera glycines
tcggagtaggaaaaaacgtcgtcagccgaaacgtcgtcgaacgaatttttcgaccataacttttttctttctcaatc

SEQ ID NO: 70564 - DNA, 882 bp, Heterodera glycines
atgcaaaatttttttctctatcgatatgcaaaatttggtggaaattacatggatagaaaaaaagttatatggagagaagtaaatgttgtttttcctaataataaaaatattagatagtacgccaaaaggagacaaaaaatcatagaaaaaaagataatgtttttctctggcactctctatttattggtacacatctcgttttttcggacagtgtgtttaagtattggtcatgggactgggaatccccacaggaaataatttccattccagttcggggccttgaagaaaatacggctagggtaagggttatgggcttgacatcaatacgggataaaaacccgtatcaaggaaaaatacggcccggcacgacgacacttcgccaactattctaaaattttggctatagaataataattcatgcaaatgtgcatctaagaaaaaccatggctcttaatgatttgtttgcttcgactaatttttaaaataatacagcaccacagagtacacatttgaattttctacccttaaccaatttaatcaaattaaaaaagtaaaaacaaatagtgggttttctttctcttcatcatcgaatattttgagcattagcaattgtttggcttagaggaaatggactaatctccggctggacaagttaaaagggaggacaatcataatggaaatatcttgttagactttcaatattgcacttaagaaatgtattcgtattcgtcgttttggtctgttcgttgtaggtagtatttgtcaatcagcgattcgatgttctttttgatgaactaaaccatttccgaatgcaatttttagggaaacaaatttcaagaacctgaacatcgggaacaaataacagctgcgactgctttatga

SEQ ID NO: 70565 - DNA, 357 bp, Heterodera glycines
ggaaagtgatgaaccttggtgcactcgtggaagaggtcataaagcagtcgcagctgttatttgttcccgatgttcaggttcttgaaatttgtttccctaaaaattgcattcggaaatggtttagttcatcaaaaagaacatcgaatcgctgattgacaaatactacctacaacgaacagaccaaaacgacgaatacgaatacatttcttaagtgcaatattgaaagtctaacaagatatttccattatgattgtcctcccttttaacttgtccagccggagattagtccatttcctctaagccaaacaattgctaatgctcaaaatattcgatgatgaagagaaagaaaacccacta

SEQ ID NO: 70566 - DNA, 1384 bp, Heterodera glycines
atggaaaacaatcaaataataacgaaacgaaacaacaaaaaactcgaacatgaaggatgcctctatgtcttccatatgttcaatgctgaccgtgacgtaaaattttggcgctgtgaacatcagcgcgatgaattcaaatgccgaggacgaatccacacaacgctaaatgacgtcgtgctgaagaccgttggagaacacacgtgcaaccacagcgcggcaaatgtggtcacacaaaaaatcgtctctggcataaagcggcgtgccgttgagacgatggaaccaccagcggcaatcagggcgcacactcttcagcaaattgccacgccagtaatggcgaaaattccgacaaagaatgccacaaaaaaagtgaaaaatcgaatttttttttttttactttttcacatttttgtttttaagctggtgaagcgagacagcggtgtgttttaaggggagcttttcacatattttttaaatttaagaattctgatttttggccggctttctttcggaaattgggcttccgaaatgaagtacatttatttatttatttataaagaaaagaaaaagtccacaaaagggataaatccacttactttgtggacatatacatacattaatcgtccaaaagtatcggattatacaagcacaaataaaataaaatcgccaagaaaaatataaaatgaggtcaaagtcaaagagatcacaataaccaaatcacttataaaaaaaaattttttttttaaatattctgtagccattttttaagtttttccggtcttattgtcttaatgaacttttaagttttgttttaaattgatttaaagaatttgtttttattagttctttatctagttgattccacaattttgttaccctcccagcaaagggaatgaattttttgcccagtttgtattttgtgttaaatctataaaaggggatgttaaagcgtgctgatggattaaaaatagaaaatagtttcagatctgttcggccataaacaattttacgtcattttggcgcggtacttttttgccaattttgtttttcaatcgtttttctcctaatttcagtcgtggaaaatgggtgtttccggttcttcacaacgccctccgcgcaaaacatccacagagctcaatcaacttttgtctcttccacttggtgcgcaacatgaaatctcgcctaacagacgaacaaactcgcgtaagaaaaataaaaatttattgattttgaaatctcaaatttagcgtttcacaaccgacgctgcctttgcacaagctgtcaaaatgatcacttcgctggcgtttgtgctgcttgaggacattacaccggcgctggcagcgctcgaagatcatcttccggatgagcttgagggcgttctcgattg

SEQ ID NO: 70567 - DNA, 930 bp, Heterodera glycines
accagcattccaatcactggggactcaacccaacagcatttttaaacactcgggactcaacccaccagcatttcaatcactgggactcaacccaccagcattccaatcactgggactcaacccaacagcatttcaatcactgggactcaacccaccagcattccaatcactgggactcaacccaccagcatttcaatcactgggactcaacccaacagcattccaatcactgggactcaaaccaccagcatttcaatcactgggactcaacccaccagcatttcaatcactgggactcaacccaccagcatttcaatcactgggactcaacccaacagcatttcaatcactgggactcaacccaccagcatttcaatcactgggactcaacccaccagcatttcaatcactgggactcaaaccaccagcatttcaatcactgggactcaacccaccagcattccaatcactgggactcaacccaccagcatttcaatcactgggactcaacccaacagcatttcaatcactgggactcaacccaccagcattccaatcactgggactcaacccaccagcatttcaatcactgggactcaacccaccagcatttcaatcactgggactcaacccaccagcatttcaatcactgggactcaacccaacagcatttcaatcactgggactcaacccaccagcatttcaatcactgggactcaacccaacagcatttcaatcactgggactcaacccaccagcattccaatcactgggactcaacccaacagcatttcaatcactgggactcaacccaccagcatttcaatcactgggactcaacccaacagcatttcaatcactgggactcaaccaccagcattccatcactgggactcacccaacagcatttcatcactgggactcaaccac

SEQ ID NO: 70568 - DNA, 645 bp, Heterodera glycines
  unsure (1)..(645): unsure at all n locations
atgcacgcgttttgcgctcgagctatttatcatcgggcttgtcaatccaaagcgaaacaacaaagatgctgttttgaacgaataaagggcataggttattttgaagaagtgtcaaagaacatgcagcaataagcctgcaaaatctaataagtggaaaatacatgagtatagaatttattttcagaaagtgtccacagacttttggaaatatatatttgcaatttatcaacaattttgataagtgagttagaaacttcacgattcaaaccaattttcgttgctctaattaaccgcgataaaaaattcgaatcaattaaatagcttctgagataataaggtttatcataaaatttcatttaaaaataaatcctcaattattggtatgaacgatactttccaaacatgcacgcgttttgcgctcgagctatttatcatcgggcttgtcaatccaaagcgaaataacaaagattgtgttttgaacgaataaagggcataggttattttgaagaagtgtcaaagaacatgcagcaataagcctgcaaaatctaataagtggaaaatacatgagtatagaatttattttcanaaagtgtcaacagacttttggaaaatatatttgcaatttatcaacattttgagaagtga

SEQ ID NO: 70569 - DNA, 327 bp, Heterodera glycines
atgagtcagttttctgatgattcccaaccccccgtgcttgatggtccttattcccctgttggtgatggtgggggcgaattgatggatgatgcacctccgctggaagacgttatgaaacgcctaccaatctccgttagtctttgcgaaaatgtcttaaaattttctattttaattttgcgaggtcttttcaggtcgagccatcggacaacaatgagcgcaaagtccaaaaggagccgtcgattacccatgaattggacgctgagttattcaacggcaacggatttgcatgtctctccgcagcacaggctgaagctggacggttcaaag

SEQ ID NO: 70570 - DNA, 84 bp, Heterodera glycines
gtgcgcccgtcaaattcatcactgtccgttccacggcatttgaggcggcgcccgcggacggaggcaacgcgacggttgaaaagg

SEQ ID NO: 70571 - DNA, 711 bp, Heterodera glycines; identical to SEQ ID NO: 42749

SEQ ID NO: 70572 - DNA, 1106 bp, Heterodera glycines
atgaccgctgctttgggccatttgctggttgcttgcctggggcaacatggcaacgaattggtccaacgcgtcttggcccgcgtaagtgccagccgaccgggacaaagtggacagggaccaacccgtggagtccaaagagtggcgaactctgcaaaaatgagggaaacccgtaaattaattagaaaattaattaattaatttgattagtcaatttgcgttaatttagcacaacaccttttcagcatggccaacgtcgttttgacgggacgggcgagctgacggagttggttctgttggcgaacctctctcacgtccagagagatgcgtcccaacgactcgaccaattcgcccaatgcgaattcgacggtgtaactgaaaacgaatgccaaatggaaaaaaggggaaaagacccgaggagtgttttaaataatcaaattgaaatggaaaggagatgatggcccaagctgacacaatgtcgcgaatggcggccaaattgtgccggagaatgtgcgactgtcgccacccgccgtgtccgaggccggcggcaacgaattggctcattttcagtgcgtttgtgtccacgactttggcacaatcggtcagctgagagcagaagaagcgctttcgcagctgtgcctttttggaaaagcacaaattggctaatgaataagaagcaattttaagcgaatggccggtggaattatccaaatttttttttttttgaaattcacttccgcttcaacagcggcggtgttcgcccttttgtccgtattcgccatttcgtcgccatcttcgctgtccgccatacttcccccgccgtcgtccattgcttcgtcgctgtcgctgtaatcgggcggtggtctgaaaaacatttgaaaaacattcatgcactctcacaaatttaaatctgtggtgcatttcattggagctgttaaaattattgaagattagggtcgttgagggaaattgaaattttcggttaaaaagcggcggaatttcacagttaattttgttggatgtcctctcgcagggcacccgaatgcctaacggatgcactgatcagaaagtgctttttgctcgatcatttctttgatcgtgcacatcta

SEQ ID NO: 70573 - DNA, 2949 bp, Heterodera glycines
atgccctcctgtgtccgtttccggcacagcagtggcagcgaagcggaggaggaaagtgaggcggtgaagatggcggaccatcgacgcgtctccgcgggggcgccaaagtcggttgctggaaaaggcagtcgtggagacaatcgcaacgcatcgccagccgtaaattcgcagtcgccgacggtcacttcgtcgctgcgactcacagaatttgtgccgtccaatggcggcgaacgcgcggaaaaacaatggaaagaagtgccgaagaaagtggaatatgaggtggatgccgtggaggaggcaatccgaagtttggagcagttcggtgggtattgtcttttcagcatgggcagtcgccccccccccctttttccaagggttttctgttgcatttttaattttctatatttaaaaaaacagtccattcaaaagcttcacgggtaacagcttataatgcttaataagccttagattttaataaaacaatgaaaaattaagttggcaaaaagaatcgtcaataaaaaaagaaagaaaaaaacgggggttaacgaattcatcggtcactgattttggcaagattaatttgaatatatttgcctcacaaatcgctcattttccatgcctatttaagcgatggcttctctcccctcctattcattctgtcattcatccaattaattaagacccgagtgaatttgtgtcgcaacaatacaaaacggaccaaacgacgaaattcaacgacggcacggcgaagcagcaacagcagcagaggaaccacaaaggcggctccccattcatcaggacccgagtgttcctggccagggctgagcctgtgcagctgcacccgactggctccgccaactcattgccatctccgctgcccgaagtaaaacggggaaaagccgaaagaaatggcgaggcattgtttcggggatggaaaggcaaggagagatacaaagaatctcgcagcactcgattcggggattgtttttgactctggcgaaacagtctcgacattttcctggcccggcatcgcattgtttctgcatccgattggcaaatggtcccttcccccccccactctcagcgtcggctgtcgcttcccttttcggctgatcatccgttcggcctctcttccgctgatcagcttctcttctcctcctgccatccgtcgcttcttccttccgccctctcttcttccggctccgctacgccaaccctcggctctctcacctcctcccagcaattgttaccttcgctggtcgagcccgcgttcagtcagtccatggattcgattaatcggaccccgcgggcgaacagtccgtcgtcctccgccttttccgcctcccagcagccgccgcaggcgcacaacggagtccgccgggcggtcactttcaacgacaacaccgtccaacacttttacacgccgtgtgacgggtttggccattgttttattagatgtgcacgatcaaagaaatgatcgagcaaaaagcactttctgatcagtgcatccgttaggcattcgggtgccctgcgagaggacatccaacaaaattaactgtgaaattccgccgctttttaaccgaaaatttcaatttccctcaacgaccctaatcttcaataattttaacagctccaatgaaatgcaccacagatttaaatttgtgagagtgcatgaatgtttttcaaatgtttttcagaccaccgcccgattacagcgacagcgacgaagcaatggacgacggcgggggaagtatggcggacagcgaagatggcgacgaaatggcgaatacggacaaaagggcgaacaccgccgctgttgaagcggaagtgaatttcaaaaaaaaaaaaatttggataattccaccggccattcgcttaaaattgcttcttattcattagccaatttgtgcttttccaaaaaggcacagctgcgaaagcgcttcttctgctctcagctgaccgattgtgccaaagtcgtggacacaaacgcactgaaaatgagccaattcgttgccgccggcctcggacacggcgggtggcgacagtcgcacattctccggcacaatttggccgccattcgcgacattgtgtcagcttgggccatcatctcctttccatttcaatttgattatttaaaacactcctcgggtcttttccccttttttccatttggcattcgttttcagttacaccgtcgaattcgcattgggcgaattggtcgagtcgttgggacgcatctctctggacgtgagagaggttcgccaacagaaccaactccgtcagctcgcccgtcccgtcaaaacgacgttggccatgctgaaaaggtgttgtgctaaattaacgcaaattgactaatcaaattaattaattaattttctaattaatttacgggtttccctcatttttgcagagttcgccactctttggactccacgggttggtccctgtccactttgtcccggtcggctggcacttacgcgggccaagacgcgttggaccaattcgttgccatgttgccccaggcaagcaaccagcaaatggcccaaagcagcggtcatggtcaatttatgcctttttcagctgcccaaagactgctacaagttggtccaatgggtgtattcgctgtccgtgtggcgtgacttgccccgcggcggtgccacttccgtgtttctgcccccgtcgtccggcaccgtccctttccatgccaaaatgcatcctccgccgccccctccggcgccgttcccccaacaacgaccctcctccccaagctcttctctgctcaactattattcatccgagtccatcgaagatgaacaaaataacaacaacgaagacagcttcagaaattgggcaactgtgccaatgaatggctcattgacggatcggcacggagggcaggcaaaggtggaagacagagtgatcagtgaaagccgaaatgatcaacgatga

SEQ ID NO: 70574 - DNA, 1079 bp, Heterodera glycines; identical to SEQ ID NO: 42752
  unsure (1)..(1079): unsure at all n locations

SEQ ID NO: 70575 - DNA, 193 bp, Heterodera glycines
aatcgaacgctaacggacgacctaatggaaaaaaatccccgaaggagagaatttaattaaatccattccttcgggggaccgtgccgggtgccgcggggtaagcagtgctggttcgtttcatcacggcaccgaaccttttggctagtcagcaatcattgcttaacttgccagatcggacgggtgcgcatgactt

SEQ ID NO: 70576 - DNA, 561 bp, Heterodera glycines
atgccgttaaatgaaaccgaatcgccaaagataatgccgttaaatgcaaccgaatcgccacaaaaccagcaattaacttatattgaactgttccatcaaaaccaacacacattgaccatgtggctgattatgggtggaaagtgtgcactctcatcggttggcattctgttcaatgccattttggttgccactaccgtaaagtcgaagtaagcgagtacagtagtagaactggtagcgaaaaagccagcaggaatgacgcggaaatctgccattaatcgcttcaattgtattgaaaagataacattggcgagtaattgagcaatggcaaagttccgaagtttaaaaatactcaaaatgttggcaatggttagcccccgagagtcgagaccaagaccaaaaccctgataaatcctctaaacgagactacgagattttgagcatccctaaaatattctaatatatttcagaaagctttacaacacttgtaatgtgctgttcgccttggattccttgtttttggcactattccaactgaactctctgatcactttgctgatcgct

SEQ ID NO: 70577 - DNA, 714 bp, Heterodera glycines
  unsure (1)..(714): unsure at all n locations
atggcacagcatccaatttatttatgggccgatgacgtgccttctgaacaaggaaaaatcggtgagtaaatgacacttngataatatcgcaaaatcttctaataaactgttgtgtccccgggtttaaggctttcagccatttcaaattaccgttttaggagagaggaatttattataaggaaaagcattgacaattaattatgaattgaaaaccgggaatatgtttgggtcaacaacaacctcagagcattttgggtgggtcagtgcaattggttatttgggaaaggattgccaaaggcaagaaatggcacagactgactcaccgcagacatctcgcagcccccgagggggaaattgagtggacttatatactggcacaatgggtatggactttggataggatgaggggtatgacggcataaacacaggaataagagagaaagggatggcatatgcaacagaggtgaatgggatagaaacggcacgataaatgagagggacaggattggcttgagattggatgaacagacggacaagtttatgacgggattgggtcgaggaatagggcaatttacattatgcacaaaatatggaaatttgaatgctgcggatacagcataaatggggcaaaattcgccaatatcatttgttttttcagtttcgatcgattagctgtccatttcgattccattcaatgccagcggtgacatcaaa

SEQ ID NO: 70578 - DNA, 656 bp, Heterodera glycines
atgaaccatttaaacaaagtgagaaggaagaaaaacaagaagcaacaatcaaaattgaaacattttttaatgagcaaaaagagtagcaaattgacactaattggccaattagcaaggggaaaacggaggagcaaattgacactaattggccaattagcaaggggaaaacggaggagcaaattgacactaattggccaattagcaaggggaaaaaggcggcaaagtcggaaagcgattctgagaatgaggaaaacgaagtcaaattgatgattgtcaatcaatttatcaaaaagagagatgcattcaaaatggaaagtgattacaaaaaagaaaatcggaacaaaaaagaatgcgaaattgccaaggaattgggcacttaccgggcaaaaattttccaatggaatagggaatttgaagaaaaagggcagcagaaaaagaagaaaaaatacagtgaaaaagatgaggaaaaaatgaaaaaaataatcgaaaaatttgacgaaaaaagaaaaaaatacgaaaagaaaatgaaaagtgaaaaaataaattatcaaaaaattgatgacgaaattgcgaagggattgggagtaacgcgaggcaaaatttacaaatggaaaagcgaaattggcatcaaaaagcagaaaaacaaaccaaaataa

SEQ ID NO: 70579 - DNA, 802 bp, Heterodera glycines
atgcaacaaaattataaggcaataaggcaacttcaaacttttgttaggtaattttgatgttcatcaaaaattcaatcgcaccaaagtgatcagataactccttcaaggtgacctgaaaacctgaactgccgccctaaatgacttggaattgccaaattttcgtggcccatgagaagtatgaaaaaatgaaaaatattatgtttggattttcgccataaatatatctcgatcatttcttttttaaagatattttcacctatttttcttattatagatgcagattttttttcaatatcatttaatcgttcttctaaaaactttatttctgactaaaaaaacaaagattaaagcaatagtaatatgtaatacaaactatatgaacatagctaatagatccaaatttcatcattctgtgtttttagcccattttcagccattttttaggaattaaaaaaacgcgaaaattacacccaaaaatgaattgtttcgtaattttggtaattttaggtattttgttcgctttcgaaatgcccaaagcttcagaaatcgcaatcggcgttcatatcaaaaaaattagaaactcaatgaatgacattggcgcacagcttgcttttttaagtccatgtaattagtaacgctacatatttttattattcgtttgtgagatgttttgtctcgtctattaaatttgacgtaagaaaaatataagtaaatgtttttgagtggggtttttcttcagttgtaatgttggcataacattagaggcattgaccgataaatattggcacaaacaaaaaataaa

SEQ ID NO: 70580 - DNA, 1666 bp, Heterodera glycines
atggggaaaagctttataaaaagcgaacaaagcattggaaatgaaaaggaaatgaccaaattttcattggatgttcaaatcaaagaggagataaaaaatgaagtgaaactcgagagattagtgaaagaaatcaaaaacgaacaatcggaacaaatggacgaaattgggggaaaaaagcgcaaaaaagatgaagaagaaacggaaacggaacaggacagcagcagcagcagcaggtcaaaattatttaagtgaatagggacgaaatttatgtaaaaaaaactaaaattcgtggaataatataaataaatatatttattaaaaaaaataatgaatatgtacaataaaatggcagaaaataacttaaattatacaatgcttacaagggaacctcgtgaactgtaactcggaaaacgtaaataaatttggtaattgtgaatttttaattttacgggacaatagcaaaaaaaaaaagagttatggcgcctcaaaaatgggagttttagtgccaaagatctgtcccattcacagctttattcactttttttttattaattcccctaacatttacaactgagtgatttttgcttattgtcattaaagaaaaatcaacatacatattttttcataaaaaaaagttctaaatgtttagtccttttataaattaattaaaatttattcagttttatgttggatttgaacctggacctcctaaagtgcgaatttaaccattatttttgttgttaattttctcgttttaagggtttctttttttaaattctcactatttataaaaatcaaaaattttgaaaatgctttttccataattttattttaataattcggaatttttcatgaatataatacatatagtgatgaaacagcagaagcagacgaatttgataatgacgaacagaaacgcaaattgatgattttaaaagaatatgacatacggagaaaagaatggaaattgaaaaatggaatcaaaaaagaaaaccgttacaaaattgaagcggaaattgccaatggattgggcacaaatcgggacaaaatttaccaatggaaaagggaaaatgtgccaacctacaggaagagaagtgatgaagcgaaacggaaaacaattgaagaatttgaaaaaatgaaaatcgaatccaaaaacaaatgggaaaaagagaaggcaaaagttggagggcaaatcgccaaggaaatggaaagaaaaattcaaaaatggaaaagagaaatgcaaaacggagaaatgaaattggaaatggccaaggaatttggaaaaaggaaaagagcgcttgagcagaagaaatacaacgaatttgagcaagaaattgcaaagaaattgggcacgaatcggtgcagcatttaccaatggaagagggagcttaagcttggcaatgtgcttcaaatgagcagtgagtggggggacccaaaaggggggtcagtccaagggaaaggccaagggatgtgccgagggttgggccaagggtttagtgaagggaatggcaaagggatgaaccaagggaatggcaagggatgtgccgagggagtggacaagggcgtggccaaggggatggcccagggcgtggcaaagggatgtgccaatggtttagcgaacggaatggcaaagggagtggccaaggggcggctgagtaatgagtga

SEQ ID NO: 70581 - DNA, 143 bp, Heterodera glycines; identical to SEQ ID NO: 66029

SEQ ID NO: 70582 - DNA, 375 bp, Heterodera glycines
atggtaaatatttcaataaatattggttctatttttttctttgcttttgccacaagcttatgtggaggcaagccaaatgatgacaaaaatgctgcctacagctcaagtgtgccaagcgaaacggaaaatcccaaaaacgaagagtcgaaaaagaatttggtgataattacggacatgggggcggatgatcaatttacactggagatgatcagcgcaaccgaattggccggtaaagtgttggcaattgggacgacggagaaaggaagaaaagcggcattgtcacaatcactgggatttgagaaagtgccagtgtatgtgagaagcagtggcgaggaattcgagaaaatgctttttatgaatcccaaagcagagtag

SEQ ID NO: 70583 - DNA, 532 bp, Heterodera glycines
atgaaaattattgttttattggtacttatgttgtttacagactgtcagattcgtgatcagcgaccccgaaaaccccctagaaatgtttaaatgtatgatttattaaaactatttttttatggtctgtaaacgacattagtaccgttttatttttggtgattttgcagcatcagcattaaattttccttttctcccattttgcggataaaatggtgcttctaaaatccctccttttcttcctcccattttatttgttttctttttccttggtttcttgccctcctccgccagctaaaagacagaagacggaatttcaacatgagaataaagcgaatgataacgaaaatcgggtggaagaagaagaaccggacaaagtaaccaatttatttgtatttgtttgatggattatgttaaattttagaatctatacgactttcactactcaaaatatttggaattggtcgtccaaatccttgaaagtcagccgaaatttcagcaacgtttgagggaaatgaatgaacacgacataaaa

SEQ ID NO: 70584 - DNA, 129 bp, Heterodera glycines
atggacatggacaaaatactcagtgatatgcgacagcacatatcgaatttgcaagacaaacttcacgtggcaaattctgccgttagcaaaggacaaattgtcaatgagaaaatcacactaatgaaggag

SEQ ID NO: 70585 - DNA, 857 bp, Heterodera glycines
agcaagaatattgctatcttgcctaggcgggattctgacttagaggcgttcagtcataatccctcagatggtagcttcgcaccattggtctatcgaccaagcacatgaaccaaatgtctgaacctgcggttcctctcgtactaagcaggattactatcatagcaacaggtctttagtagggtaaaactaacctgtctcacgacggtctaaacccagctcacgttccctattggtgggtgaacaatccaacgcttggcgaattctgcttcgcaatgataggaagagccgacatcgaaggatcaaaaagcgacgtcgctatggacgcttggccgccacaagccagttatccctgtggtaacttttctgacacctcttgctggaaactttacacattcaaaaggatcgataagccacgctttcgcggtccgtattcgtactgaaaatcaggatcaagtaagcatttgcctttttgctctacgagaggtttccgtcctctctgagctcgccttactgacacctgcgttacgctttgacagatgtaccgccccagtcaaactccccgcctgacactgtcatcggagcgtgtcgccgggccaccgcgtgtgccgacttatgacccaaatgggcaccctttcgggcgcactcccgttttaccgattaggtatagaatccatgaaagcacatgatatttcactggggccttgtcgttcccacttatgctacacctctcatgattcttcgcaaagtcggactatagccgagctcaataggttcttctttccccgctagatttgccaaggccgttcccttggctgaggtttactctagatagtatataggtgccgtggaaatctcga

SEQ ID NO: 70586 - DNA, 2075 bp, Heterodera glycines
atgctgattgagtttatgaaccaaaaacaattgaaacagcatgttaaagaaccgaccagagaaaatacgattttagacttagtaatgactagtgaatcagaattaattaatgaattaattgtattggaacatttttcaacttccgatcataaaatggccggatttaaaataaaagaaaaattccgtcgtaataatcccagtgtttatagaagagattttaaaaatattaatttttcgaaattaagtcaggcgatacttgaaaatcgaattgatttatcaataaactcagtgtacaccgctgatcaaaaatataaagaattcttaaataaagtactgaagttatatggtacttttataccaaatagacctctaaaatcgataataaaacaatcgtatcctcaaaaaataagagatttattttcagagaaattacggttacataagcttgtaagaaaatttcctgaaaaaagtgaaatcattttaaattacaaattatttctagggaaatgaaaacaattgcacaaattaagaaatgaacaagagtcaaaattatttcccaggggcaaaattcagttaacaaatttattagaaataaattatcaaaagttaatgaaattcctacgttaattgatagtgctggaaatatgttttccagtaatgagcaaaaattcgaaatattagcaaaaatatttcaaaaatcttttttagaaaattcagttgttaatggttcactgactcaatcagcacagaataagactaaactttcggatattgaattaaatgctggcataatttggaatatattaagaaagctccccaggcgaaattccacttcaccggataacattccttacattttattaaaaaattgtgctgagccaattacaaaaatattagctgacatatttcgacttgctttggattccggtcaaattccggaaatatggcgaacatcattagtggtaccaattttcaaaaaaggcgaaaaaactgatccattaaattacaggccggtgtcattaaccagcactgtctgtagagtttttgaacgaattttaagtagcaaaattttagaatttctgaacggtataagattttttgataaagaacaatttgggtttttaaaaaataggtcgactacaacccaaatattaaaaacaatggacgatatatataattctctacaaaaggatcaacaaattgacattatctatattgattttgtcaaggcgtttgattcagttccaattgatttattacttcaaaaaatcaaaaagattggaattgaaggaaaaatttataaatttttaactaactttttaaaaaatcggagttttaaggttaaaatcggcgaagtattgtcagaaagtttcagcatattttcgggagtgccccagggaagtgtcttagggccattactctttttaatttttataaatgatctgccgtcctttattgcaaatgaagcatcatcagttggcataaaaatgtatgccgatgatgttaaattatattatgcccatgaaaatgatgataaaacaaatcatttagataaagcaattgaagctttggaaaaatggtcaaaaataaatgggttagaaatttcaactgggaaatgttttgttctttatttagggaaaaataatatgaaaaaagattatttaattaactcaaaaaagatttcagaatcggataatgttcgtgacctaggcattataattgactcgaaactgcatttttcaggacatattaacaaaattgtacgaaacgcttatcttagagttttccagattttaagagtcttaaaaaccagggaaataaagactctaacaacagcttataaaacttttgtccgacctcaattagaatacgctaccgaagtgtggaacccaaatttaaaaaaagacattgacaaaattgaacgggttcaaaaatttttcacaagaaaagcatttagaaaatgtggttttttgtacaaaaaatataaggaaagactaaaaatcactgatttacacaaattagaagaaagaagaaaaatcaatgattgaggctttggaaaaaagatcaaaaataaa

SEQ ID NO: 70587 - DNA, 348 bp, Heterodera glycines
ggttcgatgaaactttttaaaatataagcctaaactttttggcctgtttaaaaaggaattaaaaatttttaaaaattttattcatctcccttttgatagaaaaagcttcagagagccttatttaacttttaattaacatttggtgcgtttcagagcacgttctaaaaaatatttatgaattaattttgcaaaataataaataattaatgaaaaagtcagaatttcgaaaattttaaaaacaacaagcgttggcattttttcaggttaagatagtcctttacaatggagaaggcctgcaaaattgtggagagattttatcgattttagtgcgctaggttcgatgaaact

SEQ ID NO: 70588 - DNA, 333 bp, Heterodera glycines
atgaaggaggaggaaaagggtattttatatgaaaatgattcatttttattcattcatttagtaagtgctcctgctgacaattcaaatttttcgtaaaatatttaaatttttatttcggtttttatgactttaaaaattttgggtttttcaattttcgtttcgccgcaattattctgctctttgtgtaatcatttggaaacggcaaattgtgctaatagccgtaaaaatgatccgacggtaaatttgaaatctcaaatttttaatatattaattttcccgaattttcagttggatttgtacggatatttggatggatattttgcccaattttga

SEQ ID NO: 70589 - DNA, 632 bp, Heterodera glycines
gcctaaactttatgaaggaaaagatgaacctcattcacagaggtgagcactcagacaatcaatcataatcagcctttgtccctttatatatatatatatatatatatatatatatatatatatatatatatatgtatattaatctcattgtcagacgtaaagccatcaaacattttgctgaaccgaaacggagaggtgaaaatatgtgacttcggaatttcgggccatttgaccaattccgtcgccaaaacaattaatgcgggatgcaagccgtacatgtgggtgacacttttgggggaatgggtattcgaagtgaagaaatatgaccatttttttttttgcaaaatatatagataggatgagttacgattaatttatatctttaaattaacagaattattttttaggccacccgaacgaattgagggcgagtcaaaagaagcttatggagtgcaagcggacgtgtggagtttaggcatcactttggtaatttgaattttgaaatttaattggattttttaattccataacaattttttcaggtggaaattgcgaacggacggcacccctacggcaaatggaagacgccgttcgaacagcttaagcaggtcatccaagagccggcgccgacg

SEQ ID NO: 70590 - DNA, 2550 bp, Heterodera glycines
actttggcagcgaaacgcggtgtgccgtctgtggtgaggagaatgccaagatgcattatggcgtgttggcctgcctgggatgcaaagtttggtgattagtctaattaatggaattgtgccatttgcgttttcccaaagtttcgtgctggggatatatatattttttaacatttttcttgctactgactgaacatatacttttgatcagaataagtgatcagaaatacccaaattggttggatggatcgagatcattagccggttctgattgattatttccgtttcttttttgagaattgagagaccaccgattccaaatgttcgtggtactactgatcaatcacatctactgattagaatgaatgcataaaatcaccttaatttgatcaggatcattcacattgattattgccccaaccattttttgtagggctttttccgacgtgcgctgaaaaaggtgaacgaatatgaatgcttgcgggacaacaactgtgtcatcgataaacgcgcgtgattctatttattataaatgaatgaaaaatctttaaaaattcgttttggataattttgatcatgctgatcagtgccattttcagaggagcgcaattcatgccgtttctgtcgcttacagaaatgcctggaggtcggcatggacccggcgggtaaaaattcgggagtggcacacacatatgtatttgcacctctaacaatagttggagttggcattttgggcataggcatttaaattttcgagggtgagttcccccccccccgcgaaaaattgaaaatttcaaacaatttccaaaaaaatcttagaaaatttttttaaaaatttcaagaatttaaacttttgtaaaaatttcagctattttgtcggaaaatttttgaaaaaacagtaattcatcttaatgctttgaaaaaatcgttaaaaatttttcgaaacttttttttattgaaatttataaaaaatttctaagatatttttgaaaaaattttctaagttttggttttttaaatttttctgcggaaaacgatacggagatgcggcgggggaagaactcgtcctgttttcgaaatgccattgctgtccctgcgttatttcatttttacataattttagcggtacgcccggacagagacttttcgggccaacagcagctgttgacgcgtcgcctgtcactttcggcgggtggcggcacaacaacagcaataacaccaacgacaagcagtagcagcaacacaaccaacaataataacaacaccagaaatgccactggggccggcggcacaaatcgacgggaaaagcgccgggtgcggcaaacaacagcattgggcaacaatggtggtgccggcggtaacaaagcggcgccgggggaagatggccgaaatgggcaacgaatgcccgtcgaaatgcgcactatgctaatgacggtgggtggagagggccaatcaaatcccgctaatccagcgggatcccgaaaaaacccagggatttggacggaatcctgacatcgggatccgtccagagccgtttttcaaaaatcatcaggattggtcggggatttcttcgtgattccgagttgggatctctccgacccaattgtctgtctctacttcgtttgtgcgcaaaactgacaattcccgagactcgggatggccgaggagtttcgaccaccattaaatggggttggcattccgtcccaccccctgaagaaataaaaaactaaacatttttaaggaaaatgaatgcataaatttctttaaaatatgcataaaattttccccagtggcgcctctcggcagcgcctctgacgacaaaattgccttaaattcttcaaaatttgaccccaaaatgaatgaatgtgtgggcaatgtttccccccccccctaaatgccaataacatcttcctgaatttcagctccagaacattgaggcaaaggtaagcaagcggaagtgagtggttgccccgagggcgtccaatcggttttatgggtccaatcaatgggccgggccatcactcagtttcttaggccataacttttttcttacttgatcaatgcccacatttaccaagccaagaatctatgccttggctaaataagaaaaaaatgatggcctaagaaactgaggaaatgggccataaagtgcaatggagccaattttgatcactcttgagaggcacagcacattttgccaaatttaaatttccaaatttttcgggtggtccgtggtgacactgtaaaggatgcgtccgaaatttatccacttcacatcaacaccatccgtgaggtgatcaatgatccggcaaagttgcgcggactaagaacaacggtgggacgggcattcaaatttaaattttaaattaaaaaagtgatcagattcgctatgagccctatcggatggcacgcaacgaggagttgtgcgtgattgtctaccggcgtctaatcgccgccatcgattgggttgaactgttggccgaacgaatgggcggtctgagcactgaggatcgaatagcattggtcaatcaatcaattattgagtatttctga

SEQ ID NO: 70591 - DNA, 232 bp, Heterodera glycines
tttacccaaatccgtgcgggtgttttttcaccccgcgccgcgcagcgccgcgggaaggtcatcaatcatccacctgtcaccaaagtgacaggtgaaggaaattcaatttaacttttgcaaattttaatcttttgtttcaaaactttttagcgttttattttctcaatcctgaaaaaattttttatgatgatttttctgatcctgaaattaaaaattctttttgaaaattagc

SEQ ID NO: 70592 - DNA, 567 bp, Heterodera glycines
tttttggttgctatttatagaaggggtatattctaggagtgaaaggaccatttgattggtacattgtatcaaaatgcaaaaaccgataatcgtaaatataattgctctcgctaatctcggtaccggaattaaactaaactctctgacgatcactgaatgcgaatttaagtataaccctagaaaattcaatgccgcggttatcaaatgtataagccccatcaaagccacggcattattatgggaatccgggaaaatgatatgtctggggacgaaaagtctgatagactgtgaaaatgctataaaaaaatttatagaaataattaagggttcggggtgtccgggggcttcttacaccggacacacggttgaaaatattgtttcgacctataaattcgaacgtgaaactgaactgaacgagtttcgaaaaaatcgtcgtgcattttatgaaccggaaatattttgcggtttaaatttcaagcggggtaaaagcatgacagcgttaattttctggaccggtaaagtcgtaattacgggaactaaaaacaattctgaaatagaggaaatgta

SEQ ID NO: 70593 - DNA, 646 bp, Heterodera glycines
atgccatcgtcaatggatcggatgaaacatttgttgagcacgggtgagcattcggatgtgcactttttggtgggggacggagacgcaaaagaggcgagtttaattaaaaataaaaatttaattttatttttcaattgcaatttcattaattatccacgttttttaaaggttttgccagcacatcagcttattttgaagagcgcttccgatgtttttgaggcaatgttccgttttgacgccaaaaaagaaagaccggaaaatggtaaaaaaaataataattttaagggaaaataccaattatgctatttgttcttcattttgtctctgctaatttccctaattaatttttcaattagtttctggtaattgtcctgatgttgtggagatacccgacattgaagcagaagcgttcaaagtgatgttgagcttcatttacacggatgatttaagtgatttgaatggagacaatgcaatggcagtgctttacgccggtggatttatttttaaatttaatttattaattattttttaattagccaaaaagtacaatatccctgatttggtcgatcggtctttgcaaattcccatctccgaattgcgcaatgttttctttgcgtatgcccaagctctccttttcgacttggag

SEQ ID NO: 70594 - DNA, 676 bp, Heterodera glycines
ctattcgacacactgctttcgcttggacagagcggcgccccacccgagattcgaacatatttttttcatcctaattgccgcaaattccaaattaacattcagctggcccgtgccttccaaccacggcgtgtgctcggcgtggacatcgacagtcatttggtgggcgctgcgcgcaaaaacattcgccacttttgcgacaaggacacaaaggtcggaaaactgggcactttcagtactcacacccatttattgatagaaaaagtgataaaatttaggttttttttcaaaaaatgaaaaatttaaaaattttattgcaatcgatgtgccaatcaatctttctccctcctccgcagatgtctggcaaattccccgcttcatttggcgccaattttgggcccatttccgccccgtccacctctgacgggccccatttcccggacaatgttttgttcctttgtgaaaattacgtcctgccatccgacgcggcattggaaacggtttggcatggatctaaatttttttcgttttaatttcctcccaattttccaggtacacgaggagtttgacatcatttttgcgctggcctgctcaaaatgggtgcatttgaattggggcgacgcgggcataaagcggctttttctgcgcgcatttcgccaactacggacgggtaaaaaat

SEQ ID NO: 70595 - DNA, 900 bp, Heterodera glycines
  unsure (1)..(900): unsure at all n locations
atggcacaggcgattccagaagagatacggtcggtgtcgagtccgccagaaatgcagccggagagggaaaagtcaaaattgtcagtgggagaaacgcagccgaagagggaaaagacaattctgaaagaaatacaactgaagaaggaaaagacaaaattggcactggaagaaatacaactgaagaaggaaaagacaaaattggcattgggaaaaacacagccgaactgggaaaagaccaaattggcaacggaagaaacacagccgaagaaggaaaaggcaattctggaagaaatacaaccgaagaaggaaaagacaaaattggcactgagaagaaatacaattgaagaagaaaaagacaaaattggcaccagaagaaatacagccgaagaaagaaaagaaaaaattgcaaccggaagaaacacattcggtgaagcaaaaggcaattctggaagaaatacagccgaagaaggaaaagacaaaattgtcagtggaagaaacacagccgaagaaggaaaagacaattctgaaaagaatacagccgtagaaggaaaagacaaaattggcactggaagaaatacaactgaagaaggaaaagacaaaattggcattgggaaaaacacaaccgaagaaggaaaaaacaattctggaagaaatacgatcggtgagaaatccggaataaattcaacaggcgattccggaagaaacacagccgaagaaggaaaagacaaaattggcaacggaagaaacacagccgaagaaggaaaaggcaattctggaaaaaatacgctcggtggcaaaaccggaagaaatacaatagaagatggcacaggcgaatccggaagaaatacggtcggtgtcgagtccgcaagaaatgcagccggagagggaanagacaanatt

SEQ ID NO: 70596 - DNA, 428 bp, Heterodera glycines
atgacttatcaaatgtaccgttccaccactttgggcaccgctttacaaagtgcgattttcagtgctttattaactttgccaaaaacatttgtcttccctttcaaaggttcgttggacgaactaattgcggatggaatgatttcgcagcaattggccggcacggtgatgaccaccttcgacaagtgcataaataaggcattgtccgagcgggtgaggaacaaaaccagcttcaaggtcggttttcctgatagaggagaatatggagggattttgttaatcggatgaaataattaatccatttgaggcggaaaaattgcgagcctatcgcttctgtgacaacgtgtggactttcatgatggaacacgtggaattcaaagacacgcaaaggcccatcgacggagtaatcgaccgggtgaaatttgtcgcat

SEQ ID NO: 70597 - DNA, 252 bp, Heterodera glycines
atttgcacaaaaggggcggggcgatgaagccacacaaccggcgtcactttcagtaagcccattcatcctttactattacaaatggcaaactttgacagatcgacgattgcttcgtcgaaccttcacggagagacgacgacaacggggaggacgaggaaggccaaggctctgaccctgagcaaattggctggctgttttggcactcgactgtcgagggcattctttttgcgggatgtaacgacggatcccttt

SEQ ID NO: 70598 - DNA, 883 bp, Heterodera glycines
  unsure (1)..(883): unsure at all n locations
aaatgagcaatgggaaattgncaagtgcttacagttcattcacaataccgtacactaccacgcaaaaatacggtaccacccattgnncacgcggggaacaaaacttttgcaaattgctcaattgcgacttaacgngtaaaattgaanttcaattctaaaatgatgnatttaggaaagtgtaaaattaaatgacaaaatgttaaaatttgatgattttacttaaattgtaatttttctacagagaatgcgtgccattatttgaaccacggcctcacaaaagtgccgtggactttgcgaacgaaaggatacggtaggacattttgaaatgggatttcagtttgtgattatggtaagcaattgcttagggtttccgctgaatcgtcacaccgatttgaggccgggtaaaaagcaaatgcagaaataattaattaaatttacattttaaagcttcgacaaatgggcaattcgttagcacaggtaaatgccggaattcgaaaaagcgaaatgatttaaaaataatttttgagtgctcggcccgggcgattttgccattttggagagtccgcgtttcaatctctctgatggcataaatgtgctgctgttccagtattttaggtctcaaaataaatcaaccaaaaacgaagtgtttcgcaaattcccaacttttaaggcccactcattcgtcgaccattcgcctttgcttgggcacgcgttacgcaaaacccctgaggcaatttgcaaactttgatttattgcattaattactcactaattacactcacagctttgttgtctctttgtttaggacagtgtccgcctttttgcaatgtccgcccatccttcggtcaatcacttcgaaacattccccggccaaatggaacag

SEQ ID NO: 70599 - DNA, 590 bp, Heterodera glycines
gattcaactgttgccttgctggcccagtgttgaaagcgcacccggcgctttcacagggcccatcgggtcctggttgatgatataattgaaatattccctaataaaaagaccgtctttatttttggagagatttggaaagacaaataatgttgcgatttctacatctaaagccgtccgtgtgcggcctttgacagatttttacgtgttttttttacaaaacctataacccgaacaattcttgagccatttctcgttttttcatggtgacctgtctttttcttgatgcctgatttaatattttttacttcaccaattttacattgcccattctcagacactctagaatctctgttaaatttttaaatttaatttatgcaaacaaatttaaaaatatgcattatacattataaaatattttagccattattcacttggacctgaaatcggacaatatgctttttgtgaagaaaaaggaaggaggaggtattgaaatagaaatgttgaaagtgattgattttgggggtagtgaatttatcaaggaaaatatggagagtacactggatgaacgacaggtggccaatgtgtgcaag

SEQ ID NO: 70600 - DNA, 673 bp, Heterodera glycines
  unsure (1)..(673): unsure at all n locations
agtggtatttcattggcgccttgcggctcccacttctccactctgagtnatgattttttataaagtnagnntagagtaacctttaagggtcttctttccccgctaaatttgccaagcccgttcccttggctgtggtttcgctagatagtagatacggacagtgggaatctcgttgatccattcgtgcgcgtcggtagttagccgacgaggcatttggctaccttaagagagtcatagttactcccgccgtttacccgcgcttattcaagtttccttggcttaacattcagagcactgggcagaaatcagacacggtcaacgtccacaaggaccatccgtctcctctgttttaattagacagtcggattccccgagttcgttttttttctaaactggtcgttcagcgccaaccgaagtgcataccctgacgagcatacacgcagctgaagcgctccacaagcagctctcaccactagtccacgcaccatccccgaaggaacagcaagcagccacgggcaaaagccgcctgtttcacgcaacagcccggctgacccgacctttagagccaattcttttcccgaagttacgaatctaatttgccgacttcccttacctacattattctatcgactagaggctgttcaccttggagacctgctgcggatatcggtac

SEQ ID NO: 70601 - DNA, 46 bp, Heterodera glycines
atgcgttgtggcggaggcgatatttcacaagtgactaaatatatcg

SEQ ID NO: 70602 - DNA, 186 bp, Heterodera glycines
ccaggaatatcccgctcgtttccaaccaaccgtcagtccgactactaccctactaccgctcacaacaaacactacgcctgggacgtgaaataactgcgtgtcgagcgaacagcgaacgacaagaaaaaaacatgcacatttattttatgttacgtttaggaatgacactgtaaaatgttctgccaa

SEQ ID NO: 70603 - DNA, 336 bp, Heterodera glycines
atgaattatttgagaataatggtttatttgaaaattcaaaccccagttggccgaggtccggcttttctggtctcggctgagaagccatatttgctttattttaatttacgtaagaaagttgaactgtttagtaattattcaatgattttttttgaacaatgttagtatttgtcttataaaatggtaacattaaattttgggcatctaatataattatcttattcatttgtagtaattacggtgctaggtcgatccacaaaaaaactcagtgtgggcgatccacaaaaaatctcagtgtgggcgatccacaaaaaactcagtgatcgataaaattaa

SEQ ID NO: 70604 - DNA, 2167 bp, Heterodera glycines
aaagagaatgaaggcacgccggcaaaagacaagaagcgcaacaggaacaacgactcagtgaaaaaactggaggctgtcgagtgtgcgcgaaagaactccatacgtgcagcagcaacgaagtcaaagtggacaggaaacagatcaatgactggatgacacatgaagacaaactgagaaaacagatgtacttaatattttaacatttttttgaccaaaatttagcatgacaccaaatggggggaagcgcatgagacttgagggagcgggtcgaccagttcaacatccggaaatcgacattgcattggctgaatagatcgccgagaaacgaaaaaataaacagcttgtgtcaaggaatatcattcgccgaagggcggcttcactgttcatagacattgacatcaaggtgagaaaactgctacctatactactagtcagaaaccgccgtccaactatgcagaagctgtggcaaaattcatcaattttgttgaacaaagacgaaaggcgaaaaacaattttcccggcggcatctttgcgatggacgagacggccgtttggttcgattgcccggacaaccgatgcatagacatgaaaggcgcaaaagatgtaataagtttttgaaaactatttagagctatttcctcaaattaggtgacagtggtggccaccggccatgaaaaaatgcgagtgacagtgtgcctaacagcccgcagcagacataagctcaagccctatgtgttggtaaacagaaagcgaccggtgccgcaaattatcaaccaatttgctggaaaattggtgatcaatttcgatggctctgtgtggatgaacgatgacacaacggaggactacctgcacaaataatcggggcaaagctgttcgttggcgaacgcctcttgatttgggatgcgtttggcagccacaagagcgagaaaacgacgaaggtggtgaaaggattgggagtggaaacggtttttgtccctggcggttgcatcaaattcatccaggtaccaaagcatccttctcaatgaaattcacttttcttccctaggctcccgatgtctttcacatggtacttgactggatccaccgatcgtggcaggaaatctccaaagaagtgatcatcaaatcatttgagggtcagttaaaaaatgaatacaggaaaaatgcttatatatttaagtctgtgggctgacaacgccattggacggaactgaagacgaaaaaattgcttgtttcaagccggaaggagcaattggaccaatagggatcaaatttttgcgcgagtttagaggaaatcaaacaatgagagatggaggaaatgttcaggaggaagccgcctatctgatgatgatgtagagctggatggagtgggagatgacgatgaattgctcatttgttagaatttttactagtgttttttgaaaataaatggtgttgataaaaattccatttatcccccgggggataaattgagcagggggattatttttcaaagccctcagaaaggggggggggataattggagccagcgggattaatggaaacggagggataaaaagagaaaacacggtaagtagttttttttctccgtactagtttcgatatattaagcataaataacacatttttcacttggtttgaggcttttattgggttgatgaaaaattgaccctttaagcacttcaacattaaacaatttttatttcacaaaaaacaaatgttcaatcaatgatgtactcaccattttgatcaatgatcctcccccatcgttcgggcaacatttcaatcccctttttataaaactgatcatttttcgatccaaaaaagtcatccaatgcattttcgacctcgttttgatcagcaaattctttccctctcaagaagtgctccatagatcgaaacagatagtagtcacacgggctgatgtctgggctgtatggtggatgaggaagaaccgcccatcgaagtttttcaattttttgttgcgttgagaacgcaacatgtgggcgtgcattgtcatgaaggagtacgccgccgcggaattttgcagaaaatggaggacgacgaatttggtcatgaacccgctgcagttgttgctggtagatgtcggcgttgatggtttgcccagccggaacaagttcatagcggaccaaccctgatgaacaccacc

SEQ ID NO: 70605 - DNA, 1022 bp, Heterodera glycines
caaaaaatggacaaaattcgcctaagacaactgttacttttcgaattccgaaaaaattctaccccaacccaagctcttcgaaatatttgtgaaagtgagggcaatgatgcactctctctttctacagttaagcgatggttcacaaaatttcgtgaaggcaatgagcagctcgaagatgaaccccgctccggacgaccacctgctctcgattcggacgacttggagcagcacgttcagcagcatccgtgttctagttcgcgccaacttgcagcagagttcggggtccatcagacaacagtgctcaattacctccatcagctcggcttcatcaacaaaaagggtgccgaagttccccatgcactgacccaacaacaaaagcatcagcgagtggtcacctgcactgaacttctcgcccgtttgagtgctggaatgcagctttcccagctgatcacgtgtgatgagaagtgggtttatctcaacaacaaaacggcataaaacaatggctgaagccaaacgaattgggcgagccgacccccaggcgtcttcaacatgcaccgaaggtattgctgtgcatctggtggtgttcatcagggttggtccgctatgaacttgttccggctgggcaaaccatcaacgccgacatctaccagcaacaactgcagcgggttcatgaccaaattcgtcgtcctccattttctgcaaaattccgcggcggcgtactccttcatgacaatgcacgcccacatgttgcgttctcaacgcaacaaaaaattgaaaaacttcgatgggcggttcttcctcatccaccatacagcccagacatcagcccgtgtgactactatctgtttcgatctatggagcacttcttgagagggaaagaatttgctgatcaaaacgaggtcgaaaatgcattggatgacttttttggatcgaaaaatgatcagttttataaaaaggggattgaaatgttgcccgaacgatgggggaggatcattgatcaaaatggtgagtacatcattgat

SEQ ID NO: 70606 - DNA, 329 bp, Heterodera glycines
atggtctcggatgacacgcaccggatgggcgacattccggccgcttggctgcccggcgtgtcggggtgagttgaacaacgaacggcgtgtctaactaatcatttttggcgtttcaattactttcatttaatttttttttaaattgcaaattaaaaaatttcatggatcgattttgaaaaaaattttcaaaaaaaaaattctaaaaaatcgctcgaaaatttttgaaaaattccctaatttgatttttattttatttttattttgaggggtaggggaaacatagaacccataaaaatgaatttcatattcattcgttcagaaaaacatga

SEQ ID NO: 70607 - DNA, 896 bp, Heterodera glycines
atggttgcattgtttttctgttgttgggcacccactgtgctgttcaattttcttcgggataaccagtggttgcccatttttgtgctcagccaagaatatttgtttggcatcatcactcactgcatatcgatgaggtaaaataaaatataatctttaaatatttaaaaaaataataataatcgtattttaaataaataatataaaattaatttgtgatttttttttattgaagttcaaccatatggaatccggtgctttatgcgctgttgaacgagcaggtttgttatatttaaattttaattattctattaacatgtttcaattccaaatatcccccctatataaatgaataattaaaacttgtaaaaaaaaagattttcaaaataatatttaattgatgattttgaaaatttgctgaagataacaatagcaggaatgaatctctttcttgatttaatttttcgtctgttttctgatttaacagaggaacaaaactaaaaaaaaagaagaagttttttgttattattattgaattaatatgctgaataaattcaaaatatatttttcaaattaaaaattttagggaattttattgtttcagtttcgtgcagccttttcggagcagttcaatcaacttcggcaccgtttctgttcaccatgcaacggtggcatgacaacggcacgaactcggctgccaacaattgattcatcggcacaacaacacagaaactcgatcagaaaggtggcattgccatcgccatcatttgtccaagcagtgccagcagttgcgcagcgatcaaaattacatgctgaaagatctgagtgatcagattttgatcaacggattaccgatcagttcaattaattcattttgtatttaaaattttcttaataaa

SEQ ID NO: 70608 - DNA, 304 bp, Heterodera glycines
atgaacgttccctttgctcgttatttggccacaaaaaatattgcaaagaaaaatacggtatcaaaatgccagtttttagaaggagcaactcgtgaaggaggcaaaagttcattactgggaattcaaccaatgtgtgtgttgtgataatattctattacactgggttccaattatcgttgcccatattaggattttgactttttccccatttcttccccgttccagggtaattaaaatctgccgatctttgcagaataagcatcgtttatatagacgcaatgttcgctgcttgcggagtgtttga

SEQ ID NO: 70609 - DNA, 571 bp, Heterodera glycines
atgcagtacaatgcttttaagccccgccgtgaggcgggacagttacaaaattttgtaccacattttactgtggaaagtccaagtaccttattggacaactacgtgtcaatgagcacagtcgcctttggccagttgtggaacggaaaaatgggaatatcagatggggtgcgctcttttctaaaaattcctcttttcgtctaaccatccctcccttttgtgcactatttcgtttcaaaattgaataattttttttggctttttgaaataaattgtgaaaaatatacgaaaattattttagcttttaattatgcagtacaatgcttttaagccccgccgtgaggcgggacagttccaaaattttgtaccacattttactgtggaaagtccaagtaccttattggacaactacgtgtcaatgagcacagtcgcctttggccagttgtggaacgaaaaaatgggaatatcagatggggtgcgctcttttctaaaaattcctcttttcgtctaaccatccctcccttttgtgcactatttcgtttcaaaattgaatcattttttttggctttttgaa

SEQ ID NO: 70610 - DNA, 391 bp, Heterodera glycines
gcttaaaagcattgtactgcataattaaaagctaaaataattttcgtatatttttcacaatttatttcaaaaagccaaaaaaaattattcaattttgaaacgaaatagtgcacaaaagggagggatggttagacgaaaagaggaatttttagaaaagagcgcaccccatctgatattcccatttttccgttccacaactggccaaaggcgactgtgctcattgacacgtagttgtccaataaggtacttggactttccacagtaaaatgtggtacaaaattttgtaactgtcccgcctcacggcggggcttaaaagcattgtactgcataattaaaagctaaaataattttcgtatatttttcacaatttatttcaaaaagccaaaaaaaa

SEQ ID NO: 70611 - DNA, 133 bp, Heterodera glycines
gcttaaaagcattgtacagcataattaaaaccgaaaataattttcgtatatttttcacaatttatttcaaaaagccaaaaaaaatgattcaattttgaaacgaaatagtgcacaaaagggagggatggttaga

SEQ ID NO: 70612 - DNA, 541 bp, Heterodera glycines
atggatgttaatgaaattgtaccatttaaatccaaatatttaactcattatttagcatatcacccagtcattaaagaaacttcaaaaacgacactagacttagaagataaaaaaggaaaatttgaaaaattgtgtaaagaattaacagaaaatgcatatgtagacaactttgtaatgatatgtgaataaaatttaaacattcttggagtaaagaaattttcaaacttgcttcaatgaatttacgagaatttatttctaatcatgaaaattctaagaattaaattcagaaaattgagagctctgaaaatgccaaaaataagcaagattctttaataaaatggaacatagaaaatgatgatctaacaatatcaataaaaatcccaacgattaccaatggaacaattaaaagaaatgtaattcattttgcaaataattttatccaatgggatgggtttcacccgtaattttgccacataaaaatgctttcaaaacttatggaaatctaagaaagattgggatgaccaaacttagtaatgaagaa

SEQ ID NO: 70613 - DNA, 773 bp, Heterodera glycines
gacaaagtggcgaaagtgatcattttgctgggaaggtacaattcaaaggacaaaataaaagaaaaccaggacaaagtgacgaaagtgatcattttgctgggaagatacaattcaaaggacaaaataaaagaaaaccaggacaaagtgacgaaagtgatcattttgctgggaagatacaattcaaaggacataataaaagaaaaccaggacaaagtgacgaaagtgatcattttgctgggaagatacaattcaaaggacaaaataaaagaaaaccaggacaaagtgacgaaagtgatcattttgctgggaagatacaatcaaaggacataataaaagaagaccaggacaaagtgacgaaagtgatcattttgctgggaagatacaattcaatggacataataaaagaagaccaggacaaagtgacgaaagtgatcattttgctgggaagatacaattcaaaggacataataaaagaagaccaggacaaagtgacgaaagtgatcattttgctgggaagatacaatttaaaggacataataaaagaaacccaggacaaagtgacgaaagtgatcattttgctgggaagatacaattcaatggacataataaaagaagaccaggacaaagtgacgaaagtgatcattttgctgggaagatacaattcaatggacataataaaagaagaccaggacaaagtgacgatagtgatcattttgctgtgaagatgcaatttaaaggacataataaaagaaacccaggacaaagtgacgaca

SEQ ID NO: 70614 - DNA, 843 bp, Heterodera glycines
atgacaacggcacttttgtgggatttttacatggaaaagcgggaggccctcgccagcattcagcagtttgactacgacaccaacaaattgggcatacggctcggccttgtgtcgacgagcgatgtcgcaatggacgaagacagtgacggggacgatggccggccgacggagagggtaagggagacgaatggtgccattctatggcatcgtttcctcattgtcagaccccctcccccgcctactttcactaattaccaaagttttgagttttatatgaggagttgctacaatctgccgatgatactaataataattgttgcccaacccccattttacagaaaaaaacggaattttaaaagtcgagaaaatacgatcagttgttactaatggacaaaccccaaaatataaccatgtttaattattgtaattcatcttcatctaacaataagttattgtcagtgcgtcactaaacgggggtcaaaaggcgtcgtcccttccattgatttcccaatttgattttacattcatttattggctcccccttctgaagggtgccttcgctcggattcgcgcgacggcacagcgatggaagcgacgcatttgcacacgccggggccgcgagcagctgaaggcacagctcaaacggctgaaggacagacggcccaaagacaaaaggtgcgcgacgcgatgaattggcattacgaccgggaaataatgggacagtaattcgaaattttcttttggaattttaatttcaaatttcagggcaccctaacaacagaatatgcgaatatttatgggcatggaattcctttttccaacttttttcaggcctctgaataa

SEQ ID NO: 70615 - DNA, 237 bp, Heterodera glycines
atgagcaaaaagagaatcgaatggacaacgataccgacgtaagtgccggtgctgccaaaagagcaaaaaaatgaatttaaaagagaaatttaaaaaatttcaaatttttaataatttattgcgtattctctgaaaaaacatcaaaatttccgatttttcagtaaaaatcatttaccaaaactgaaaaatgcttacgatttggcaaagttgggatatttgagcgcaatgataaaatag

SEQ ID NO: 70616 - DNA, 354 bp, Heterodera glycines
atgttgcaattccattgcatatggccctccaaagtgaagggggcggtgaaggagggcgtcggttattttgtgaaaggcgccaaacaacgaatcaccgactacgcccgggagacgttcatgtacgacatgtgagttgttggcacggattggtcgattggttcggttcacctccaggacacctaaaaaattgtttcgattactttgcttcgtaatttcctattcatattctgaaattttcattcttttcttttcagtgactcaattatattttcaggtacaataaaacggtacgcgacagtaagcgatgttaatgtgacgagaaatgacagaatcatcggcgatattttaaaatga

SEQ ID NO: 70617 - DNA, 149 bp, Heterodera glycines
atggaacggatggtacgcgtcaagaagaaggacgaagacattggggagcaggagagacagatgattctgaaggggctggcggtgctctccgaggagaaattgcgctgtcaccgctgctcacgcgtcgatttgagtgttgcggaggcatc

SEQ ID NO: 70618 - DNA, 81 bp, Heterodera glycines
aaaatctataaaaaatttaaaaatgagaattcatgcgagattttctggaaataagcttaattgggccttgttaagctgtaa

SEQ ID NO: 70619 - DNA, 70 bp, Heterodera glycines; identical to SEQ ID NO: 63777

SEQ ID NO: 70620 - DNA, 791 bp, Heterodera glycines
atgtacatagggttgagcggtaccggtaccggtaccggtactggccggcaattaccggtttttttggtaccggtaccggcacagataccgcctatttcgacaatgaaattacggttagaggttagttattttccgatatcgttggaaaataattgaattgtgaattaaataattgtgtcccagattttagtatataacagtagaacaatgacactttaatacataaatttttaaataatgcttcgtttcaataatgatgaaatactcattttaattttaggataagattttcctttggatgtttcttgatcgatcagccgtcaacatttaccaaataaaatatgaaaattctaatgcaaaaccaccactacaatttagaagaaccgccaaaattggtatcgcttcactaagcaatggacagaggagaacaacatgtagataatatgaattgcacatcattggatttaagaccaacaaaatcaattgatcatatatatttgccccaataatattaattgttaattaccaaaaatggaaaaataggacataagaagtcacaagggagacgggctaatccacaggcaatcttcagaggaataggatttaatccgttcattaaatttaaaacattttcatcctaagacaattattatgagcatttattatttttaagaccacaagttttttcattttcttaaatgttcgcttaatatttcggattttttgcaacattttagtcaatgtttcagcattttttcgtaaatatttatttaaatattttgggattttta

SEQ ID NO: 70621 - DNA, 762 bp, Heterodera glycines
ctgtcttcctttaggctactctccggactctgttcaattccaacagcagctgaaaaacggcgttggcattacctccgcggcggcggctgcaacagtgccaatcaatgcggagaacaaaggcttcaagctgctcaagggcatgggctgggcggaaggccaagggctcggcaagcacagccagggcatccaagcaccggagggttgaaagttttttttcggtcaactaaaagtcgagaaatcttttgtttccaccagcgcttttctgggtctctgatcacgtttctgtcttttccggatcgctaatctaaattcgaacaaaaagccaaattaaaaaatttaattattcgcgttagggactcggagtttgtccaaatggatgtcagacttgtggtcagaagagagacctcgagaattcccgacaacttcttcatgactttttaaacagaaatttttttgtaaaccaaaagggtttacttatttttatgtttttaattatttttcgcgaaaaagtctaatatttttcattattttattagaatttttttttgcctgacagatcgccacacaattcaaaggggaccgtgtcgggcttggcacagtgtcatccacaacaacagcaactacaacaccattttcgacatcatcaaaaatcagcattaatctgcgcagcaaacagcaactcaatgcggaacaaatgcggaaacgcattgaacaagtctggccaaacagtttttcaaaaaaagaggaatttttcgcaataaa

SEQ ID NO: 70622 - DNA, 439 bp, Heterodera glycines
aaaatggtttaagtaaaaatcgtaattacgctcaaaaagcttctcaaacaattttagcgcttccaattccttctacaatcgcctttatacatcccattatgagcgctaaaattatcagagtgccgaaaatcgcatgtgatctaagcctagaaaaaaatggtctaagtaaaaatcgtaattacgctcaaaaagcttctcaaacaattttagcgcttccaattccttctacaatcgcctttatacatcccattatgagcgctaaaattatcagagtgccgaaaatcgcatgtgatctaagcctagaaaaaaatggtctaagtaaaaatcgtaattacgctcaaaaagcttctcaaacaattttagcgcttccaattccttctacaatcgcctttatacatcccattatgagcgctaaaattatcagagtgccgaaaatcgc

SEQ ID NO: 70623 - DNA, 661 bp, Heterodera glycines
atgacaaatttcgccattttggaatcacatttccaacaattaatggtccaatgggaattgcgatgcggttattaggcgccgcccggaattttttttcaaatcttaatcaactatgataagaaagccaatttttttttttaatttgcccaaaatttttttttcatttcggtaagcggggggggggggcgtccccaccctttgtctcctggccaggcctgatgcttgtgccagcatctaatgcgtaggctgccaccagggactgtcgaccgttttttcattccactgccacccgaaaacccaaagtggacctttatatttgagaattttctaatttttttcctgttatcacgctctgactttttaattttaacttatttcagcattaaattgtttatttccacagatgctgatcaccgtaaaagaggtgacgttggtgctgaagaagcgaatgcaacagaagacaccgccaagagaatggtatgaccaatgtgccgagttggaggacaaaatgatgggccaaattgaaaaaaaacgggagaagagagagaaagcgaagagttggaaactgcgcgaaatggacgacgaatgaatggatgaaatgattttttggattccatcttttttaatttacttttcaaattctacgcaattatcactgcaa

SEQ ID NO: 70624 - DNA, 1521 bp, Heterodera glycines
atggcactcatccgcaccaccgcccgcgcgtggcattgcccgacgaaacgttcgaatggtttgcgctgtgttatttggtcgctgtcggcactttgttggcaccgactgcgctccattcctacgcaaattccgtggtgccgtacgacgcctcgtgggaatccattgactatgtaaaacaaagccaataatggcccaatcaaattgaaaagaatgttttcaaaaaaaattgccaaaagacaaacggatcattcccgacccactgattcttggccaaaaaccttggttgaagacattgatacacttatcaaccgatcggttagcaaatctctgactaaaaattaagtcgcttggcataaaatgtaaaccgagggagggaacgatctaaaaagttaaaagcgctattaataaaccatctctaaaattgatcattttcagctgttgatgggcatgtccgttgtgttcatgagcggcttcaagtactccgagctgtggctgatcagccgattggaggtgaggcaaaaagtatccattctttcaaagtgacagtacagcaaatcttttgcttgctcttgtataaaataaaccaaaagccaagaaactatccgaatttgatcacttttttgtattttatcttgaatcgtgctcattatctgacgaacgaatattttttgtaagcattttaaattcggatacaaaaattcatttggaaattcattggcttaacccatccaatcccaattttagccacatcaattttgtgcattggaacactccaaatacttcattgcctcaattgtatgttttttccattacttaaataatatttcaaaagcatatattaaaaaagggtttacttattgaaaattatgaaaatatttttgctaaatttttatatatttatttaaatatttttgaaaataatccgattgcaaaattttaatcctatacatctttttatcagttgttatgcattttattttttaatccaactttaaaacagggccaatggttcctccaaaacatggcacatgccacggtttttgccgcggtcggcaaggcgttgtttgtggtgtccgcgctgcgctattggctccgcgcggacgaaatggacgcggtcggcggcgcacgagccaaggaaaagtgtgggccaaagagcagttttgccggctgattgggacgaacggacggagggggggggggggggagtgatcggaaaagtgatcaatgatcagttatttagttgcgtatctacagtcatggtcatatgtttaacaacactcaaaattttctaccaaatttgatttaaattgattataaaatctcaatatgactatattgtgtatatatgttttatatttcttgtagcattttttgtgggctttataatgataccattcactatccctgtcaagatgttattattagttacaaaccattttaccaactgcactccctttttggggtggtcatatgtttaacaacactacccatatatttttatttgcagtgataattgcgtag

SEQ ID NO: 70625 - DNA, 1026 bp, Heterodera glycines
atgaattctgctgaaggattcgtttcaaattctcgactattcgctgttgtggcgacccgtcgcggcacaactgttggtcagcgcgttgtccgcccgcgtgtacgtgcacaaccgggccgggcattgtacttgtgcaggtaatgatggcacggcattaaaaagcataattaatcggaacagagcaattctacattagctttttcgagattttttggtctcgagtcccgggattgaccgaaatgttaattgggatttatatgcctgatttttgaaatgtatatattttcaagaattttcgacttcctcggcacttttctgatcattcgctttggcgccaactttttgaacaacgcaaacattgcccggggcaacaaagaggagacgcagcgccggaggggccgcgcggccatttgggcccttttggtaaaaattattttcctataaatttttgtattttttatataaaataaaaaaatttttataataatttttcagtgcgcctccgaaaaaaccaattcatttcaatgctaatttttcatggtttttgttattttttctttcatttaattaataaatttgtaaattcaaattaatacataacaaaaagagaagaaaattagtttttttttatcgaatttcctttctcttaaatttaattttcacattatttcttcaaaaaaggtcgaaaaaacaaatccaaaacccgaaatatcaatttgagaaattgtttttctctttcaattctttttctttattaattatgcatttattcatttacaggggccacttgcgttctccgtgtcactttcatggtgttttttctttaaaatttttcaaaaaattcgatttcaaaggctcgaatttggcaacatcgagtgggacccgtgggctctgtttttggccccacttctcgcacttgtccaagctgttcacattctgttgctgaagcaggcgcagttggcatttttcgctgccctcggcatgcccaacggcaacaatgtgccaattctatgggccaataactaa

SEQ ID NO: 70626 - DNA, 3725 bp, Heterodera glycines
atgaatcctgtatttctcactgtccggcttacaaaagtgagtgggcggaggatcataaagcctaattagtaattacagaggggtctttttgctcatttttaaaacaaaatcaccaaaaaattttgtgaccacgaacggggattggtgtgactggaaagggaaactgtggcaaaaaattcgttttaccggtccaaaaatgtaagaagcgatcttttccgatttatgattattcggcagacaaaatcaggggaacacgttgacctggaatagtaaagtttgcctcccctccctaattttccgaaaaacccgaagattaccttttggtcttttgatctacccccccccctcccctttcggtggttttccgcgttgaaatttgacgaaaatttaaatcattcgtattccctttctcagaatgcgcaacagagcattgacgacttcaagactttttatgagcctcgccaaaacagctccggcgcgccaccacccgtggttagtttatcagcgcttagaaaaaaacacagtaatttccccccgttgttttagcctcgcgctgttcacgccaatgacgaattcacacaccacgagggaaccgtccacatcaatcttttcgtatttgatccaatcgcggaaggaacagaagcgaaggttgaggcccaaaaactgacgttgacggtggcacacgcatttggcacaaagaagacggagaaagaattcgatttgccagagaattttttgccgtaccaatatgaagtgagttctttttaaatcataaacaaaaatgggtggggaagcccaactcaaaaagaattttttttttttacaagacacgaagaaaggcgctccagcaatttttgaaaaaaaattttttttttcaagagtcgggaaaacatgtcccagcgattttcggggttgctgttcacgaatccggcatggcatcaatttctaacaattggaaccccggacccgaattcaaataagaagtttaaaaaaattttcgcatttcaaattttggttcaaatttgtacacggaacgaacttaaagtccattaatgcttcaattaaactatttttagactaaacatgaaaattgacaaatttgaatttcgacttttttttgttcgaattgacccggggtccggaattgatcgaatggatggatgccggattcacgatcagtgaccccgaaaacccttgaaatatgttttcatgactcttgaaaaaaaattttttttttttaaatgggagcggggggggggcaaagccacagtattaccgaagaatgaaacagcgacctcagagcggggggtggggggttagtggggtgcttttcacacttcattacctctgtcgtttcccccagaaaattttaaaacaaaaattaatttacaaattagagtgttatatataatgaaacttgaagaaaaaattaaaaaaaaaatttttttttttttttgacaaattcaagtttaaaacttttgagttttcgttttcggggggaatgaaatgccccggggtcatgaccaaccaccactgattcttaaaaaaaactcaattattttttcaaaaaaatcaaagtttttcacttataagattttatggtgaattactgttttctacaaaaattttcaaaaattcactgaaaaatttcgaaaatttctttgaacttttgttataaaagttttctaacaattatttacagtttaaattttattttcgggaacgatgaggggggatgacttgctccggggtcatgtccagaatttttttcaaaattttatggtggaaaattttttttgaaaaattttttttattcttttcggggtctgaggaacgacccgctccgaggtcagttgccgatgaccactggtcattggtcaccaatgcatcctatcgcttctcagttgtcaatatacgtatgacctttttacaggtattgcttcacgagcagagagtggaaataacagcgaaagtcgctgaccgtgtggacacgccgccaatcacggtcggttgttttacattaaaattgaataatttttggtcactatttttttgggccctcccgtcgcaaaagcaaaaaaaggtccttgaactcgaagttgagaccccatattaattgacctcccctgacatccattcgtaaatggtcagacatatcgcatgtgaatgcgtttatcgttcgttatgtgaaaaacaatttgtccccatttttggtctttccattggaattgatgaccactggtcattggtcaccaatgcatcctatggctgctcaattgtaaagtgtattactttttacagattgttgccaaagaagcggagcagaatgacgacgaccaaccttcgcccatcgcggtcggttgttctcattgaaattgggtaatccgtccgaccccatatgaatgcgttattaacaatcgtttatgagaaaaaaaattgtccacattttgctctccattggattgattttttccgttgttcgatttgccctcttccaacccgcggaaggggaggagagacccaccaattcaccatctctgctgctatagccaccatttacccaaaccaatattaaaattattcccattttcgtataattgttaccctgaagccatggactgtcccaaaaaagttaaacttccccctgaactcctttcggagttggccaattgccttcattacaattttcgctggtatggcatccgaatttctttgtcctttgaccattttctcgccaaaaatcaaaataaaattcgtcacaataaaattaaggtaatgagttggtcctctgcattaaataattggaaatgagaacaaggaaagcccattacagagctaattagacattgggtactattttttaacttaagcattttctcttgggtcctttttcaaatccgtttatgttttttccaatgcctttattaattaattacaattatactcccaattaattgctcttgcagaaagctgatgaagaaattcgagttcttgaaaaagttattgccgatgcgcaaaaagctattgccgatgcgcaaaaagttattgccgattcgcaaaaagctattgccgatgcgagtgctcgtatcgaatattggaaggagcaccgttctaccatggtctcctttttttacatttttcatttctatccaagtgactaatttattccaaacacagcatacgatgactatgccggtcttgccgcagcaaagcgaaagtacgagtcaacagcccgtcagttcggtactgtaacttcaaaaattgtaaaatttaatgttttttttttgaaaaattttcaaagttgcaaaaaattttttttttgcttggcggggaaaccatgcggggaactgagcccggggggggggaatagctgctcccgattttacattggcccttggtcagttcagagccgcctactttggctttcttttcttatttttttgtcaaaattttaggtaattttgtagtttgtcccccccccccccttttttgaaaatttttttttgccttaaaaacatgtttcatcaattaaattcatataacaaatttttatttagccgcccattgatcctccgattttggagaaagaagaaaacggaggggagccagccgcaaaaagaacgaaagcaaacgacgaatgaaggaacaaaagggaaagaaaagggcacggcaaaatttgacagaaaatccattgccataatgtttttttggattgtttaaataaa

SEQ ID NO: 70627 - DNA, 1396 bp, Heterodera glycines
atggagtgtcagaaattacgaattggtcgcagaaattgtgccgtcgcaaagcgtggttggttatgcctgtgccagctttatatcgtgtccaagcccgtccgtattcagaaaaaacaaattaaatagaaaattcgaagattttttgctctttacattaaaaaatttaaatttccaccatttgtggatcactcttcaaaaaattaatgctgcaaaatggcgtttcctttagtgccgttaggcgccccctaaaaaatttttggaaattttaaaaaatatgacaagaaaatatgccaaattttcaaaaaaaaattgcctattttccttaaaaaaattttttttttcgttgaagggtggaggttaccgcaaaacatcgccggccaaaacgtatcgccaaaatttttttaaaaatttaaagaaaattttgaaattttttcgttccccccccataccaaaattttaaaattttatgggtacatttttcattttacagacaattttttgtaacaaatagcactcaaattttcaaaaattttcccggcggcgcctattggcaccgccggacctccattttacatctgggactgtccctgggtcccacccgaaaaaccaaaggtgacttttgaattggagtcatttttcatgggatcaggcccgtatccagaaaaaatttcggggagggcacccgaagaatttttttttttgtttgttcctcttcgggtcaaaaaatttttcctccggtgtttaatttgttttctagttttttcctttttattcattccttagctttttttccagcatcaaattgtttattttacaatgcttttccacagatgctgatcaccgtagaaaaggtgacgttgatgttgaagaagcgagtgcaactgagttggaccgaatttgtgaagacaccgccaagagaagaattggcttggtatgaccaatgtgccgagttggaggacaaaatgatgggccaaattgagaaaaagcgggagaagagagagaaagcgaagagttggaaactgcgcgaaatggacgaccaatgaatggatgaaatgattttttggattccatcttttttttaatttcaaatttttacgcaattatcactgcaaatacctaaactgttttctcataaatacattaaaaagtcttacaacaaattaaatttttataagccttcatgaattttgaaaaatggtgggccgacggtgctataggcgccgcctgaaaaccttggaaattcgagtgcaatttgttaagaaaattgactataaaattcaaaaatctacccataaaattttgtaattttagtttgggggattaaaaaaactccattattagctgagaatttttaaaaaattttcatttcggtggggggagctagctagataggcaa

SEQ ID NO: 70628 - DNA, 983 bp, Heterodera glycines
atgggcatgtccgttgtgttcatgagcggcttcaagtactccgagctgtggctgatcagccgattggaggtgaggcaaaaagtatccattctttcaaagtgacagtacagcaaatcttttgcttgctcttgtataaaataaaccaaaatccaagaaactatccaaatttgatcacttttttgatattttatcttgaatcgtgctaattatctgacgaaccgaaaattttttttctaaaatcttaaattccgatacaaaaatcccttgtaatgtataataaaccatcactagggatgcaatttttaggcaaaagcctatttttttcctgagctccccatggcctgaaacgcacgaaaaacatgtttttttcgggtgttgttaagctacttttcgagttattagtgcctattttctaggcttttatttttagcgcctaaaaagcctaataaattttgaaagagcctatttttgcctattttggcgttttgcccaaaatttgttaacaaaaatgcaataaaaacgaaaaatacacccttaagaaacgacccaaacatttttcaaaaaaacacccctatgaatcgacccgaaattttcaaaaatatacccctaagaaatgaaaaacttttcaaaaattcatctccaaaatttatttatttattttcttgacaagaatttgtgctttaaaaattatttatctcaatactgatttggcctaatttttttcttttttgaatacattttgcacccctaaaaatggggttttttagtgcctattttccattttttagtgcctattttggggattttttagagcctaaagcctacctattttggcggtttttagtgcctataaattgcatccctaaccatcacattccaattttagccacatcaattttgtgcattggaacactccaaatacttcattgcctcaattgtatgtttttatatccatacataaaaaatatttcaaaaccaataaa

SEQ ID NO: 70629 - DNA, 671 bp, Heterodera glycines
atgtcttctccaattgatgccattctcggacctaaggagaatgccgatcccgaagcgggagcaaaagcctcgaaaacgaagggctcgaataagcctaaagtctcaccggccaatatggccgagatccaaacggagctgggcaacgcaaaggaggaaatcctttccgccgtttcaaaatacattggcgaggctatgagtacggttaaccggggaatggaaggctttaccgcggccatcaaccaaatggctaatgctcttgatgcgagccgagcgcgggaagaaatggaacaaatgtcgctcgatgacccggagttggaagcggtgagcgttgaggccggagaaaccgggaaagaacccgagagcccgactgagggggagaatgagcagggagaaccccacccgggaccgaaaggcatctcattgccgcaggagcaatccgcccgtgagcgggggcgaggcaccggccatgggcgcgcattcatcagagggcgtgggggacatggccgtgggaccgctactggggcagccgcccatgcgcgccattatttcaacatgcgccagggacatcgagcgcaccaccagcaccacaaccaccgtcatcctgccccaggacattgccgatgccatgattgtcagccgccgaaccaccactttggacgccgcttccgtcc

SEQ ID NO: 70630 - DNA, 6666 bp, Heterodera glycines
atggacgatcacaaagggtccgactttaatcctaatcatttcactacgtcccaaaaccgaaattggtcccctttattggttcaactgcgcctatttgaagccaccgtttgcgaaacggtgagaaaattaatcgagaaagttgaagacatagagaaaggaaatggcaaggtcggtaattgtattgtcctcgaaggaaaactggaactttttggcgaaatgatgagacaaatggataaaggaataggtgaacaactagtgggaatcgaaaccgacttaaatttggctcaatcgaaattgaccgacctggagttgacagtcgatcagatttcccgaagattggacaaaggggatgagtctcagacggaaatgggacgaccaaatgtgaccgaaattaaggtcgcggcaatgagaagcaaagttgtggagatagacggaattgtaaaagaaaatcgtgaacggattacattcctagaacaaaaagttttggatgaaaacgaagaatatttttggaatggtcatgacaatgtggatggggagaataattttagcataaaccaaaatgttgaggacgagcaaaatcaggggctaacgggagaatgtgaagtaatgataagtgacccatttctgctctccggcagtcatttgtcccagtatgatggcaatccaagcatttccttttctcgttgggcacagaaatttaaagacttattatcgctttatacggctcagctcacagaggaacagaaaataagtcgtttgcgcttttgtctatcagggccagcccgtgccgaattagactcaatggatttaccccctgtcactttggatgctgctctagggcatttacagagcagattcgaaaatgagaacacaaagagtatagcgagacaaaacctcgcgatctgcagacaatacccgggagaaaaagtttttgattttgccactcgtttaagtgaggcagttaggactgctttggcaggggaaacggagggaaacattaggaaaagactgttggaagaatttttggatcggttaattcccgagctacaatacgaagtgaaatcggagaggccaacggactatagcagggcttacgaattagctcaacattatgagcttctccaggcgtcgcgcaagtcgacttcaaatgtggccatgaatgaacttattgaaaaagtcgaggcgttggccatgcaaaatgtgagacatgccccaaatttttctgatcagcgcgatcaccgggtttgtttttattgtaaaaaagcggggcatgtgataagagattgtgcggcgagaagaagggaagcaaacaatgggccaaattggcgaagagatgaaaacagccgtagaacggaacgcaatgggaattattctcggccattcggacagggatatgaaaggaaccgagagacgtggagaagcggaaatagccaacaaaatagtcggtcaaatcagaactatcggcgatacagagaccaaagtggtactagacgggaatgcgatcaagaaaatcgtttcccaagaacacccacaccaagagtaaaccctaggggaggcagaatagcaggtgcccgagtggcgagcccctactttttggcaataatcgctattttggcattgttctctccaacctcaatccttgcaaatgttccaaaacggcagccgatgatctgtttaccggacgctccgtcgagtttatggaaattgccagaggagccaatctgccccacgtggcaaccgactgaaagtccgatcccgatggaattaacgatttaccggccaaatacactccaatataaaacaccggctactgcatgtaaatgtgttaaatccaaaattcaccgcagagtcggagtttttggagccccattagaggaggtggaaactgagaatttggatatccctacctcaacttgccacagaatgagggatttagaccattccccagcgggagagctcagtaaaaatggaaccctccggtccactaatcactcattggaagtcggatggcgagtatggcccgtaggaatgttttggcatatgacggaagtcttaaattgttatacctatgatacggttgttttcaccaggtacggagttgaaggagtcagtactcccttaaataattgcccagggtgtcagtacaaatccggtgcatgtcgttgccagcaaaatagtatgatttggagtccggacccaacacaacaatgtccttttgtgtgggtagctaaatgggcaggtgaatacgcaacaaaggtgtggatttcgggctcaaatgattttgctctaacatttgaaaacataactgttcggcaaaactgcaaaaataaagaatttgcaatctcggaccaaggattttctgttcccttagaagagtatcaagaattggtaaggagaagggatttggctagccgagaaacagtgagattgagaagacaattagatgaaataacgcaggaagcgactcaagcgagggacaaaagtcccgttggactcatatactcttctcaattatcggctcaattaactgccttaagcgcccgattaacccataccactcaacggcttttttcagaggcaattagacaaatttgcacaagtttgcaatcaatcgcggatcaaacggctacgttagccatcgcaaatccaaccctattagccagatttttcttgagtaatcaactaataactgcgcgattagttacagagaaatccttggaaattcgcccatgttttggagtgaatgtgaatgagatgcattacaattggaaatcggggttttgtttcaatcgattaccagtgacatttatgatatacggggcacaacggcatgggtttttggatacggtaacccttatcatataccctgaggcaagggaaattgattgccagtcaggaagatggttgtacattcagggagagaaaaaattaacacaatatgaccaagtgaacggagatatcaaggaagtgccatgggaaacaattcataaaattgcccgttatggaaacattgatttgccagaaatagggtttactgtgttcaaaaataaggtgatggcaaatttgagtgagctttattcgccggaacatttcaccgagacactggaggccgcagagattcatcatgaaattgtcagattgacaaagccaagtggcgcttggagcgagaattcagcgaagcccgaatttttggccggaaatatagtgtcaaatgggcttttctcctttctgaaaggtggaattttttcagcaaaccaaatttgggttttttgtgtttgctgctatgttacaattggagcggtgatgcgtttcctattacccccattcttggctgaattggcaaaccaattaaatgttggggagtccctagttcgagttacacggacacttcagacaacaaaaagaagaaaaagggaattaaaacgtgtagcaaaggaaaatgaccagttacaattggcccggcaaagtgccattcctttaacccaaaggtggacaaattgtaatggggcattcacaaacggggagacccaaatcgctgaagttgcggtaattgaactcggaagatgtgatgaagactcccgaataggaggaataataaacgggaaaaaagttatatttttgcttgattcgggtgcgcatgttacactaattggtctggaaagtgccaaaaggttaggcataacaaaattttacccgccggaagttgcgggagtcacgggaattgggccgggagtcattccggcacttggccaggcagtcgtaactttatgtatagccgggtgtcagttcgaaaccacggcgattataatcccaaatgaagtaagcaaaagagggctttatcaagtgattttgggaagaaaaacgatgcgacaattacccctcctcttggacttagaaacgggccaattaataaaaaaagacaaaattacgagggaatgttttatttccgaaaaagtggaagaacctcgaaagtcaaatctgatgagccggcacaaaactgatttgcaaaccaaagctgagttaagcaaattttttggacttctgcaacgaaatgaagatattttctcgaaacatgattacgatttgggtgaatgcactatttcagctccacctattttaactacaacggagacgccagtctacagtcggccataccgagtgcccgaaaaataccaaacagaattggatgcccatttagagaaaatgttgaaaactggagttttggcagaatcaaacactccatgggtttctcccgtggtaatagtgcagaaatcagatggtaatttaagaccgtgtgttgactttcgagcgctgaacagagttactgtaaccgacccctacccaatcccaaaaatggagacagttttgcataaagtagcgggaaaagcattttatagtacgttggatttggcggccggattttggcaaataccccttgacaaacatacagcacataaatgtggaataataacagaaaagggagtctacacaatgagaaagctaccatttgggcttaaaaacagccccgccatttttcagcgaattatgaatgaagttttgtcggacattggacatacatgtgcctatatagacgatatcattgtgtatacggacacatttgaagagcacatgtttattttggagaaaatttttgaccgaatacgtaactttaaattgaaattgaagcctcaaaaatgtgaattttgtaagagcgaaattgtttatttggggcataaactaaactgtaaggggtacgagccgtccatcagcaacaaagaagtcatacagcatttcccagaaccaggaaatgttaaggaaataaaaagatttcttggactggttggattttttagaaaattcataccaaattacgctgcaaaagctgccccattgacattattgttaagaggaaaggaaaacgatgcgaattttaagtgggagacagaacaacaaaaagcatttttggctctaaaaactgagctgacaaagtccccaagcttacgacccccaaattataaaaaagagtttcatttatttactgacgcttcacaaatcgcttggggaggggctttgatgcaaaaagataacgaagggacactgtacgcagttgcatattgcagcaaaatattaagccaaactgaggcacgttacccaccaacccatggggagctggcggcaattgttcacgcgattggtgttttccatccaattttttacggatgtgacattaccatttataccgatcacaaacctttgactttcctgttatccaaaggaaagaccaatcccaaattgaacagatggcttctaattttccaggatatcaacccaaaaattaattatgtggaagggaagaataatgtggtggctgatgctttgtcgagagttgtgagcaccgagggaataaaatgggacctggttatggaaaagcatttccgggaggaaatcccttacattttgacaaccgaaccttttgtaattgataaaaacataattgagaatgaaacagttcgagacgagaatcttgctaaagtgatcagagagataaaggatagttggcaatcaacaacaaaagaaattgagccatatcacaaaatccggagcgagctatacttagagggaaatataattcggaaaaccccaacacagatcgtagtccccggaaatctaaaaattcccattttaaagggcttacacaccgcccattttgggatggtgaaaacaaaaagcaaagcccgaaaattgttttggtggcctggaatgagtaaggatatcgaggaatttatcaatgggtgtgagatttgtcaacgaaatgccgatttgccaccgatcactgataaaggaagaaaatggcccgaagcaaaattatgtatggaaagaatacatgctgacttagcagggcccatatggaatacgaattttttaattgtggtggattctttttcgaaatatccatgggtgtaccaaatgaattcaacgaattcccatgcaattataatggcattaggtaacattttttcagaatttggagctccgatcacttttgtaagtgacaatgggccacagtttgtgtcggaagaaattgagaaatttttatgggagaacggaactaagcatctgaaaagccctccgtataccccgtcctcaaacggagaagcggaaaaatttgtccaaacatttaaaaaaggagttaaaaaaatattagccgaaagaggggagggaaggattaaagaagccttgcaaatatttttgagagaataccgatcatatccgtgtatttcgaccatggagtcgcccgcccagcgtatgttcaaaagggaaatacgcaccccgttggaccgaatttgggtcagaacggaggaaaaacgtaaacaaatggctcaaaaagaagtgccgaaaatcagagataagcaattcgaattgggagactatgtttgggcaaacattaataaaacttggaggccaggaatggtggtggggaaaaagggtgatgttatctatgtggttagcgtcgaaggggacgaatcacccgatcggccggtccatctccactatttaaagccgcggagaccggcactcgccagagggcagcaaggcattactctgaaccaaccccccgaggatgttgtgtccacccctcccgaggaagaggagggaatacagtaa

SEQ ID NO: 70631 - DNA, 3429 bp, Heterodera glycines
ggactaaaaaagcccgaaatatggactaaaaaggccaaaaatggccaaatatggaccaaaatatggataaaaaatgccaaaatatatgttgtaaaccccccaaaaaaggtgtgcatatttaatatttgcttaaataaacctaaaaagtacaataaacaaccaaaaaatggggtttaaaacttaaaaatgcatattttttattgttgttcgttgtatcaaaaacacctccaagtttgccaaatttcgaaaaaattctcattaaaaaaaagaaatgttcgcaaaaaaatgacgaaaatatttattgaaaatgccaaaatgacgacgaaaactcaaatttttcgtgttttgtggggtgtaatttttaaaaatttccaaaaagttgatctttaggggtgtatttttcgttttttttcatttttcttgtgaaaatttccaaaaaatggccaaaatatggactaaaaacccaaaaatggcgaaatatggatttattcccgaaaacccccaaaatatggatttatatggactaaaaaccttcaccaaatcaaaaaattttaatgcagaaatgctatttttaagcccctttcttcatagcatatgcgcagaaaaaatatgttaatccatataatttacaaccctacaaatgaggcttttttgcttgccgaatgaggcttttgaaaattttcatctgcgagccctggtttattcctatttaaatttattttcagcaatttacttcgtctgtcatgaacaaagtcagctttaaattcaccccttctcaggtttgttcttctcttaatccattcatttcggctctattgcagttttacacgaccagaaaaaaaggttgaaaaaattcacaaaagtttcaaaaattaagataaacaaaaagtgcaaaaacgaattttctatttgtttataatttttctgaaaccaaatgaatcttaaaattttttaaactgcaatagatctttcatttcttggtcgtaattcatcttcattatttttttaaattcattattctcttttataatgttttgatttgtaaaagtttaggtcaaaccttccgaccgatttggcagcaaaccgtcgaaagatcagctgaatgaatgtacacgaattgcggaagaaaataaccaatttttggatgatagggccgcgcttgtctttctcctggccttgtttattctccttcagatttgcttttctgtcgccaattattcgggtcttttcttgcttacttcatagcttttgcggagaaatccaataattatttatcgtatctttaatctttgataccaattgccgttttgagtgcgtccctttaactttggtcgttttaggccaccaaagtccgccaatgttcggtgattttgaagcacagcgacattggatggaagttactgtaaatttgtctccctccgaatggttttccatctttcattggtctgattttctaacatttcttaatttaggtatgtcaattcgactacaaatgatttaaattattgggggcttgactgtaagtgcaaaacacacattaaattgctaattttctttaaagaccctccgttgaccgcttaccattcttggctgcttggacaaatgtgaatttattttggtttgactcccaccgtctatcatttcatcattatatccaattgctttttgaagtgctctttttgtcgacccaaattgggtccgtcttggccattcgcgcggtttggaagagccccgtctcaaattgttcatgcgcctttccgtcatccttacaatggtcgctttgtttgcgcctgcgcttatacatttggtattgggtcaacaacgaacggaggaagccaaagggaacaaaaaaggcattgtcatggccaacccgacaaaggttgggtcggatttactaaaaaattaccgaatcggatggcctttgtttttgaaggtcctccgtttggtcggtgctcctctgctgttccccggccttttgttcgtggactgtgcccactttcagtacaatcactgctccctcggcctctttctgtgggcgctctcttttctcgagaagggccgtctccgcaccggtgcttttttctttgtgttggcccttaaccacaagcaaatggaactttaccacgctttgcccattgccgtttttctgttcgcccgttcattcgttcacacaaatcgaattcgttcattgttttcggcaattggacaaaggcaggacattcgatgaaattccctcattttctattcatatttgacttttttcagtgtctttaatttgtttcaattggctctggcggtgctgctcacttttctcattctttggtctccattcctttggcctgagccttcattggccctccaattgcttcgacggattttccctttccatcgtggccttttcgaggttttaattgtcttagtttctaataattattaaattgtccaaggataaggtggccaatttctggtgttgtgcttctgtgctggtcaaattcaaacaaatgttctccataaatgtcctcgtcaaggccaggcaaaatgctcatttctttttctttgcaattttcttgtgattttacctttttccgttcttttcagtgcctttttggtgtttttcgcttgcgttccttcgcttttttgccttttttatcggccaaactcttccaatttgcgcgtcgcattaactgtcaacgcattggccttttttctgttctccttccaagtgcacgagaagtccgtccttttggcggccatgtgagtgattcaaaaaatgagcaaaaggcaaaatgtatgcgatttgtctgtaatatttttcttcgcatgggcaaaagggttttactcttcttcatggaagtgggatttttgatgattggtgcccctggaaataaactgccaattaaaactcattctccaatagacctgcgcttcttttactgaacgacgaatcattgcaaaggccgacttctctctttttggtcgcctctttgttcaggtgattaactgcggacaaatctctcttggaaacatcaaatcccccgcctcccatccgtttccctttttcatttcattttccttttcagtcttttcccattgtgtctaaaggacggtgttgccgaggttcttccgctgtttttggcctactcttttctcctttggctccaattcttccgtttttccaatggccgacctttcccttcggtttgtccctcctttttttgtttccttattttcccatttaagctttacaactttctgttttgctttgttttggggccatccttcgcaatttgtgtctttcaacttttgctctctccgcccgtccgttttccccatttgttcccattgcttaacgcactgttcaactttggcatatttacagtcttttggctacatttaaattttgtgatagttcgccaaaatttggccgtg

SEQ ID NO: 70632 - DNA, 423 bp, Heterodera glycines
gacatgcaccatcaggagctgcagttgaaggccatgctcgagcagttgcgcatcaaagccaagtcggtgatggtcccgtgggatcacgtggttcaacacctcgacaaaccaacgaaatcctctgggggaagcagcgcagcgtaagtcgccgcctcttggcttttccataatttgctctattctgtgtcctctcatttaagggacatcaccgattactccgaaaagtttgtcagggcggtcaacgaaaccattcagcgcaatagtagcagcgcagccatgtgcttcctgaacttgccacttccacctccgacaaacagcaacaagtcggagcagtacttgtccaaactgcgactgctgactgatgctttacccccgactttgctcgtccacggcctcgcttcggtcatttccacagcgttatga

SEQ ID NO: 70633 - DNA, 1997 bp, Heterodera glycines
aaaaaacttttcttttgaggattaaattgaaagttaaaaagcaaatgccacaaaattcctctcatttttaggccatggtcgatatcagcagtgtgccctccttgataatgctcggcattttcgttgccactttcttttcatcgatgagcaatttaatcggcgcctcgcgcgtactcactcgatttgcacaggtaatttttgttttgtaatttcaaaaattaatttgaattaataaagcattgtttttttcaaagttggacaaatggagggatgaagtcaaaaatacttttattttccaattaggacaaacttttcggcgctttgctcagaccggcgaccatcgaagtgggctccaaacggaatcccatcatttccgtcattatctcgtggatttgtgtcgtggtaagcttttttgtttgtttgtttttgcatttgttgtcaattttcttttcagatggttttgatgatcggagcgatgaatcgaatcgcaaaaatcacttccatcctctttctgctctcttacatgggcgtcaacattgccacagtaactttttctcagcaaattttcccgcatttctccattttcattgtacgccttttccgtctctcaatattcgttaccatatttttacagtttccttccccatttcttgcacaaatgttgacattgtttagctcgcgcttgaactgacttcggcaccgaatttccgcccaaatttcaaatatttttcttggcacagctgtgcgttgggtgccatttcgactgttcgtttctcccctttttctcattagtattttgtgttaaggtcgtaatgatgttgatcattgatgcgtcaatgtctgctgttgcggtggtcattctgatgttgctgattatgatccttcattatcaggcaaaatcaaacttttattttttattataattcgctcaattttcaaggctccgattggctcttggggctccatttcgcaggcactcatttatcaccaagtgcgcaagtatttgctgctgttggatgtgcgcaaggagcacgtcaagtgaacaccaatttaataatacaccaaaaaatgatgggaaaataagaaattaaataaataaaatgcaataatgttttaatttttcagattttggcgtccccaagttcttctgctggtcaatcggccggccacttgctgttcattgatggacttcgtcaacgacttgaagaagagtggactttatgtggtcggacacgtccaaaaagggcaaatggacgctgaagggacaacgatggaccctctgcaacaagtgggaaacaaataaatttaaacgattttaaaaacaattaaaacccaaaggtttacccctattggctttctctgatggactatctcaaactgaaggcgttcgttgagctgactttggcagaaaatgtgcgcaatggcattcagcaggtgcctttctcgttgcttgatgtcttcttttcaaaaaatccctccgtttttcagttgatccgtctcagtgggctgggcgcgatgaagccgaatacggtggtgttggcttttcacgaattggactcatcggaaacggcactgaccgaagcgcatctgttgaaggacctcaaattctcgaagattggtcgtgcggaagtggtggaatattttaacacgaacgatgtaaagaaaaaatccatttttaaagtgttgtaattcactcagaatggaatttcgtacactgaaaacgcactgaaggcgaaacagcgattggatggtgtggaatacgtgcaaatactgaacgatgttgttaatctaaataaaaatttgtgtgtggcccgtcactttgggccttttgagcgtgaatttgtactaaggtaaccttttgtaccaccgtaagcaatttcttcatttccatttcagacagtctgagcgtcgtttcatcgatgtttggccctcgcatttgttcaaacagagcgatgatggcaaaacgaatgaagacggaatgccaacggcgccgggga

SEQ ID NO: 70634 - DNA, 1323 bp, Heterodera glycines
atgggtgagaaatgtgtttttcggaccgattgtgctgttggctaattcaccttttgccccattttcagccgttacgtccctgtggattgctgtcaatatgctgcagttggagatgtgccgtgtgttgatcgctcatggtgccaacgtggacttgggaagtgacgcctccttgacgcttctgctcgcttgtgacaaaggcagcacagaaatcggtgaagcaattgtccggactaatttctcatcaaaattttttgccatttcagtcacccttctcgtggagaatggcgtcaacgttaatctcggggacagcgaaggagcaacgccgacaatgaacacttctcgttccggaaacgtgagaaaggcagcaaaatttgaaaacattttcatttctttagacagaaattttgcgcttcttactttctcacggtgcaaacattgaccagatggataacagcggtgggtttttgcccgtttctcaataattattgccctaattaatgtgtctttttcaatttcagggacccgatttgctcttttgaacgccgccgctaatggtcatttggaggtgtgccgtttactggtggacgagtgggcagctgacgtcaatcagcaagcgatcgacggcatcactgctttgataggcgcatgcatccgcggacgcttggacattagtaagagcaattggtacaaaagccgactcaatttttccccaatttcagccgtttttctcatcgaacacggcgccggcattgaccacgctgacatggacggatacaatgcccttatgtgggctgcgaaagaaaagaacattgaaattactcgtcatttgctggcaatcggcgcgaacgcagaccatatgggaattgacggtgggtaaaccgcaaaggcgttaattgtgatgcttcaactaacttatctccccccccccccatttaaggcaaaagcgctgtcgacattgccgttgagggcggacgcgccgacattctcgccttatttggcctttgaaagcgttcgctgtgttcagatgaaatgtgacctttcgataacctctgtttatcatgtgattgctgtcttattattcccactatttcggtccctttaattatgttcctgtcattgttatgtgatcgtatgtattatttacatgaaatgtcgttgcgtaaaaatatatatgtacagctgataaaatgctctttaaaattttgaaagtctgaatgaaaaatagtgaaagaaattgggggctaaatttaagggaccagcaggtcgttttggcgccagcccgagttttgattatagctttttttttgtgtgggccaaattaaa

SEQ ID NO: 70635 - DNA, 57 bp, Heterodera glycines
gctatagggaagatactcccgaaggattcggtctcccccataaatctgggcgcatcg

SEQ ID NO: 70636 - DNA, 1171 bp, Heterodera glycines
  unsure (1)..(1171): unsure at all n locations
atgcctcccggggaattggtcgcattggagaatataaatttgnagatacttgtcagggattntcttggagaagatgggccagccggtatgcacatattaagtattatgtatttgattttttgaggatacgagcaaaccatcaaatggcttgctcgttatggacttattgctaatgcgttaacttgtccagaatgtcagcagcacgttgcttcacttgtaaaatatgcacaaagccctgaaggctttatagtgaaaaaaatgtaaaatattcttataacattgattttaagtggcgatgcagtcattgtcgaaaagcaattcctggcagcgaaagctcaagtcgattttccatcagaattggttcatttttcagccaggtgcatctgtctctacaccaagtcatgaaactttgctactactggtctgttcatccaacaagcactatggatgcagtaatgagagaaaccggagtaactcgcaaagacacgatcgttgatttttataacttttttagagatttatgccaggactgggcaattaggaaacaagaggaagggaagctaggagggatgggcaccgttatagaaatagatgagaccaaaatgtatagggccaaatacaatcgagggaggatgttaaatcgcccttatgagtgggtatttggaatgattgaacgtggaaccaatcgtgtaaggttttttcctgtcgctgaccggactgcagcaacgcttcttccgattattgctgataatattgaggctggcagtacgatagtttcggacggttgggcagcttacggtggaataaataacatgcagcaacagtataaccatcaatgggtaaaccaccaaatgtattttgtggacccaaacaaccctcaaatacacacccagggaattgaagcgacttggagggctttaaaacaaagcctaaaacatttgcatgggactacgcctgacttattgccaacatatttgtatcagtacgcatttcgtcgttatcattcaaacatcaaaatattccaaaacattttggaggaaatgcgtagagaatacccagtttaatgctcttatttgttagccgtttgcttctctttttagtgtttttaaatgtcttccttctcagcattttctgtgtacttttctttattatcattttcttatttaataaa

SEQ ID NO: 70637 - DNA, 75 bp, Heterodera glycines
atgctggcaatttgtccactttcgcttctcctttttctgctactgatcttccgctgtttccatgcatttctatgg

SEQ ID NO: 70638 - DNA, 52 bp, Heterodera glycines; identical to SEQ ID NO: 52019

SEQ ID NO: 70639 - DNA, 909 bp, Heterodera glycines
atgtcattcgacacggaccaaaaattgccggttaaatcgccggccgaccagcgccgcgaggcaaatgccattcgcacattggcattcgtcggcgtttgtctgtccaccgtgtccacaatgatttgtgtggtgtccgttccgttggcttaccagcatttccagcagatgggcaccaacatgttgagcgaaattgacttctgcaagtcacgctcgggcaacatttggaacgaggcaattaaaagcgaaaattaaattggaggagaaaaaaacgctaaaattaaatatttgtttataataattaaagaaaattttcaaaaattgcttttattggcttaggttactcgtacccaagttctgtcgcaagtgtacggcaaaggcggcgcttttcgcgcagttcgccaagccgatggttacggtggcggaggaggaggtgccagcggcggaggagctgcctcttcacaacctcctgcagctggaggttacggcgcgggaggaggagctgcaggaggtgctgcgccacagggaggagctgcaggaggtactgcgccacagggagaagctgcaggaggtgctgcaccacatggaggagctgcagaaggcgctgcaccacagggaggagctgcaggaggcgctgcaccacagggaggagctgcaggaggcgctgccccccaaggaggtgctgctggaggtgctgcaccacagggaggagctggaggaagtgctgcgcctcagggtgcagctgcaggaggtactgcaccacagggaggagttgcaggaggcgcagcgcctcagggaggagctgcagggggagctgcaggaggcgctgccccacagggaggagctgcaggaggcgctgccccccaaggaggtgaagaggaggtgctgcaccacagggaggagctggaggaa

SEQ ID NO: 70640 - DNA, 521 bp, Heterodera glycines
cacttcctccagctcctccctgtggtgcagcacctcctcttcacctccttggggggcagcgcctcctgcagctcctccctgtggggcagcgcctcctgcagctccccctgcagctcctccctgaggcgctgcgcctcctgcaactcctccctgtggtgcagtacctcctgcagctgcaccctgaggcgcagcacttcctccagctcctccctgtggtgcagcacctccagcagcacctccttggggggcagcgcctcctgcagctcctccctgtggtgcagcgcctcctgcagctcctccctgtggtgcagcgccttctgcagctcctccatgtggtgcagcacctcctgcagcttctccctgtggcgcagtacctcctgcagctcctccctgtggcgcagcacctcctgcagctcctcctcccgcgccgtaacctccagctgcaggaggttgtgaagaggcagctcctccgccgctggcacctcctcctccgccaccgtaaccatcggcttggcgaactg

SEQ ID NO: 70641 - DNA, 1322 bp, Heterodera glycines
atggtcttcccggcccccctggtctgcctggtccccccggaaatgccggtgggcccgggcagccagcgcaagggggtggtgccggcgcaccgggaccgatcgggccgccaggacccgagggtcagcccggagcacccggaaacccgggagagcaagggcagcctggcaagctcgaagaatcgggtgggtttttcgagccaattaatgcgatttgtttttttatttaaggtcaaacgcagggtccgccggtcagttttcagggcatattgttaatctgtgggtattttggtcattcattcccgtgctggtcgtttcctaaaaatcgcaaagaagtgggaaaacaaaaaatgtcaacatatagattcataacttggttcaatttcaaccaaattaataatatttcatcgtatccaaggtgttctctacaagaaaattaatttagaattttttttttacaaaattgtaaaaaagttatggtcataatttttgagtcaaaattattttaccagaacttttttaaaactgatgaaattttttgaaattttaaacataaatagagaattcttttgaattatcgaatacatagaattcattttgacttaatttttaatgactttaaattttaaatgtttataattatatttgcataaccatgccaaaaaaacatagctgttcaatgctatataactttttttcaaaagcaattagattaaattttctttttagaatttcaaatactctatttaatctcttttctttaaaatttcaaaaaatttcattgagttttaaaaaagttcttgacaaaaatttccgacttaagattttattatatgttaaaaaattttgaaaattaacattctcatataaaacaactagagctattgaaagataccatgaatattaattttgttgaaattaaaccaagttatgaatttatatgttatacattttttgtttttctaccctttggcagtttttaggaaaaacctatcaacattcattcccattttaattgcttagggtccgtccggccctcctggccaacccggcggcaatggcaatcccggcccacccggccccaacggcgagcccgggccccaaggccccccgggcgacgaaggacccgcgggaacgccgggacagcccggaaacgcgggagagcaaggaaaattgggcgagggaggaaagtcgggggtgtgcgatcactgctcaacgccgaggacggcgccgggctattagagggaggaggaaaaggaaaaggcgaaggaaatgccaaaaaatgcaaattgtatttttaagattatttgaagaatttattatta

SEQ ID NO: 70642 - DNA, 573 bp, Heterodera glycines
caggctatagggaagctattcccgaaggattcggtctcgccataaatctgggcgcatcggttcggggggactgccccgaaaacaaaaataaatcgattttttcaagtgtccgtttggggtactcaaacaattatggggagcaaaaatccaacgcagaattaaagtacaggctatagtgaagctattccggaaggattcggtctccccataaatctgggcgcatcggttcagggggactgccccgaaaacccaaaaaaaaattttttggataaaaattatttaaatgaactgactagataatatttaaaataggttatttctcttcctttcagtatccctgcaaagtttggtgcgcttctgatcagtttctgaaaaaaaagttaagcctaaactttttggcctgtttaaaaaggaattaaaaatttttaaaaattttattcatctccctttttgatagaaaaagcatcagagtgcctaaactaacatgtaaataaaatttggtgcgtttcagaaccctttctgaaaaaatatttaagaattaattttgcaaaaaataaataaaaacgaaagact

SEQ ID NO: 70643 - DNA, 255 bp, Heterodera glycines
atgccatttccatttgacggtggtagaagcacaaccgccgaacgtcgcgccattcgaattggttataaatcccgtgccaaacgagtcgacggattttgtgcggacacttcggctcgcattggtttgaatccgctgatcatcaaacggcgatttgagtgcgcgtcgggcgagtgccaatgtcaacatccaccaccgaagggaagtggtgatatgcgcgtccgcgttcaatcggagcgggtgtgcccgacactttag

SEQ ID NO: 70644 - DNA, 60 bp, Heterodera glycines
atgagaaaaagagatagctattttttggtcagaaatttttttgtttgcgtttcaaatatc

SEQ ID NO: 70645 - DNA, 694 bp, Heterodera glycines
atgccaaaggaattggacgaggaccaaatcgaacccatcgatgggcagagaaaggaaatggcggcaaacggaaaggcgccgcgggcgattgaatttgacagagcgaagggattggataaggaagagcaaagtgaggaaaggaaatggcagaaggaaaacggcgaaagtcacgccatatttttgaaaatgtttttgaattttcgaaaattctttcggcggcagagcctatcgatgcaaaacaaattgttcaaaatgaaaacgatcataaaaataaaatgaaattgcattgtacacaattttaatgcaaaaactgatgagtcagccgcccgttcagagaagcacagccgtcgccccctcgacgcagtggtcgcgcggatgcccctccgctcgcgtcttctctacttaattatgccctcgggcgagtcttttcctttcctctcagcaactaaacttttttaattcagaaaggcgaaaacagctgaacaagtaaaattggaaaatgttcaaagcgaatgccaaattttaaggcacatgcagcggcgacagcgcgtgggcaccaaatgggtacagacggaccaatggttgttggacacggcggaaccgatgcatcagaacgccaatttttaaacggaacgaaggatgggttgcgaagatgcatagacaatttagaaagaaaattgtgtcgccgaataaa

SEQ ID NO: 70646 - DNA, 341 bp, Heterodera glycines
atggctctgaaacgcatcaaattttatcgtacaagttaaataaggctctctcgatggctttttactaatcaagctctagctcttttcatttttaaacgttaggatttttttttcggttaccaaaacttcatcgaacctggctcttttctattctcattcaaatcgccccaaattttttttaacaggttaactaaggccctaattaagcttattttccagaaaaatcttcgcatggaatttctcattttttaaagtttggagtaccccaaacggacacttggaaaaatcgattttttttggtttttcggggcagtccccccgaaccgatgggcccagattaa

SEQ ID NO: 70647 - DNA, 194 bp, Heterodera glycines
  unsure (1)..(194): unsure at all n locations
tcaagtgtccgtttggggtactcaaacaaantatggngagcaaaaatccaaccgccagaattaagtacaggctatagggaagctattcccgaaggattcggtctccccattaatctgggcccatcggttcggggggactgccccgaaaaaccaaaaaaaatcgatttttccaagtgtccgtttggggtactcca

SEQ ID NO: 70648 - DNA, 98 bp, Heterodera glycines; identical to SEQ ID NO: 59716

SEQ ID NO: 70649 - DNA, 362 bp, Heterodera glycines
atgcacgcgttttgcgctcgagctatttatcatcgggcttgtcaatccaaagcgaaacaacaaagatgctgttttgaacgaataaagggcataggttattttgaagaagtgtcaaagaacatgcagcaataagcctgcaaaatctaataagtggaaaatacatgagtatagaatttattttcagaaagtgtcaacagacttttggaatatatatttgcaatttatcaacaattttgagaagtgagttagaaacttcacgattcaaaccaattttcgttgctctaattaaccgcgataaaaacattcgaatcaattaaataacttctgagataataaggtttatcataaaatttcatttaaaa

SEQ ID NO: 70650 - DNA, 456 bp, Heterodera glycines
atgggcattggcctggcaatggccaagccctcatgtgcaatcgctaattgcgatcgccatgccccctgccagcggttgtattcggttggagtcggcttgagcgctaatcgccaatttttttttcaattcgtttcgttgttttaaaataaattagcagggctcgaattttctacctttttaggccagttttaaaagactatttttttgttcattttgcttttctatatgaatttttcgtgagtttttcaggtcacggggagctcaggaaaaaataggcttttgcctaaaaatgtgagccctactcattattatttgttccttattctcttacttatgctcattgttttactttatgaatattggttacttttctgtgctcatgaaaagcgactctttttgatctttggcgtttcttttaattttaattaattctttttttattttaattaaatggca

SEQ ID NO: 70651 - DNA, 1045 bp, Heterodera glycines
aaagaaaagaaagaggaacaaaggaatgatgagagtaaaaaagaaaaaggagagaatgaagagaggaagagcaaagaagaggagaagaaagagagaaagagcaatcaagaagagaaaaaagagagtgatgaagaaaaagaggaagaggttaatgaagaaaagaaggatgagagtaaaaaagaaaatgaaggagtgaatgacgagaggaagcgcaatgctgacgagaagaaagaaaatagggaagaaaaacaggaagaaaaggaggagaaaagggccaaggaagaagaaaacaaggaagagagtaaggaagaaaaaatgggagagaggaaggaagatgaaaagaagaatgagagtaaaaaagaaaaggaaggagagaatgaagagatgaagagtaaggaagaagagaagaaggagagtaaggaagaaaaaaaggaagagaataataaaaaagaaaaggaaggagagaacgaagagaggaagaagagtaaagaaaaagaggataatgaaactagggaagaaaaactggaagaaaaggaggagagaagggccgaggaagaagaaaagaagaaagaaaaaaacgacgaaaaagtggaagagaaaaataataatgacagcgaggagcaaaaagtcaaagataaaagaaaggacaaagaggaagaaaagaagaaagagaaaggcggaagagaaaagaaaactgaaaatggggcagaggaggaggtcagttttcaaaaacaaacaaaaaaacaaaaaaatttaccaattcagtcccgccgtaaggaaatgggcacgaacgcgggttatttgtcggcgaacgatgaatgggactgagatggacaagggatcagcggaggagagagagcgaagcgattggaggagagggagacgagagagacgaaatgatcggcgcaggagagagatgagagagagagagagagaagagagagaaagagagagagagacaaagtgattggaggaaaagagagacggaaatgaatgtttaatttttgttattttaaatgttttgattgaagatttgatttttaaa

SEQ ID NO: 70652 - DNA, 293 bp, Heterodera glycines
atgtgttttaaatttttgactcggaatcgagttgttcagcggcgttgtttcgagcggttgcatgtctttcccgatttggaggttcccgattctgtacgcgagaatatcaacaatcgaggtgggtttttttgtttttttgctatgcaaatagttcaattgttcgggttttagcttcgccaagtccgggaagtgccgaagaaatcaacggagtacggtgccgaagaacgcgccgcctttcctctgcttttccgcccgggagaagactttctcaaaaattgggaagagcctattga

SEQ ID NO: 70653 - DNA, 921 bp, Heterodera glycines
atgtccacaaattgtgatgaattgggcggtcaattgccaatgccaacaaataatggacaaagttgtgataatttttcaaaagcaattgataaaaagaaaagagaaactgtggaaaaatttcataaaattaaggagaaagttaagcaaatgggaaagaaacattcaacaaaagaatggaataaaattgaaagaaaaattgcacaaaaattaggtgcaaataaaatgaaaatttacaaatggaagagcgaacttggaatgatgacgaacaaaaattattcagttgaagaaaaaagaataatgttaaagcaatttgatcaaatatatgcaaaattaaaaatgaaattaaatggaaaattggaaggaaaaaagaaaaaatgccaaaaaataatagcaaaacatttgggcacaaatatcagcagtatttatacatggaagaaagaaataaaagatggaaaaatggtgaaaaatcaaaaaactgatgatgaaaaaagagaaattgttgaaaaatatttaaaagtaaaaattaaatttatgcaaaatggaaaacattcgcagaaggaatggaaggcatttaatgcaaaaattaaacaaatgtttggtgtgagttattggacgattgaaaaatggccaagaaattaggaattaaacaaactaatttaaaaggtaaattcaattaaacttttatttttaaatttaaaataaatttttcaatttaaatatattacagagcgaaaaaggttcacaattgtcgaaaaaatggaaataatgaagcaatattatcttatgaaaaaggaaactccaaaattttccgatgtgaaaatcgccgaattgttgaacattgagctaatgtccttaataaaatacaaatccgaatttaaggaaaaagtggaaatgttttaaatacgacagaaggccaataaa

SEQ ID NO: 70654 - DNA, 529 bp, Heterodera glycines
  unsure (1)..(529): unsure at all n locations
atggtgatgataatgatggtggtgtgattnggcatgatgaataaaaacattggacttattagaaatgagaaagacatnttctaatgtgaaacttccgcagaaatattaattgctaattaattaaagggtgcgcaaaatcttcaataattaattatcttatattttcaatgattttactttttcttttttcttaagaaatgaaatttttataaaattattttctattaaccatagtcattggtttcgttttttgaaataataattattattttaatttttgttagaatgggattggaaaaactatgcccaatgagaaacaattggcatccgtatttgctctaattatcccccatgggggattatttttcaaccacctcgtagactggtggataattggagattggaggattaatggagattgggggataattagagcaaatacggtactatagctgaagaggcaaagcggagattcttggctatgatgactttcataattcattttcaatattatttttttgccaataaa

SEQ ID NO: 70655 - DNA, 128 bp, Heterodera glycines
atgaattatgaaagtcatcatagccaagaatctccgctttgcctcttcagctatagtaccgtatttgctctaattatcccccaatctccattaatcctccaatctccaattatccaccagtctacgag

SEQ ID NO: 70656 - DNA, 729 bp, Heterodera glycines
  unsure (1)..(729): unsure at all n locations
atgtggccaaaagcgcgtcatcgcccaccaccactanctggtaaagtgggtgggtttcccaaggaccncatcgattggatacctgtcggggattggtatctgatttctaaatccttttcttcatcccccaccccccattcagaactgtgaagaggccataaatgattattggcagcgatatcgagaaggcaaagagtacagagagcggaagaaagaggaaaagatgaaaaagacgggacagcggaagagaaaagtctcgggaatggctacggccgcgggagaaaaggagcaaaaggaggaaaagaaagaggacgaaaagaagggagcggaggaagaattgcagcaacagctcccgataaatgccgggactgagggcacgaatgaaggaaaagcagaggtcggggaagaaactgatggggcggaaacaacagaggaagcgaaaaaagagatgggctctgccccgggggagatggtggaggacgggactgaaggtcgggaggatgtgtgcaaaaaagggaatttggaatcggcagatgtgggactggaggttgaaaagttgaagaaaatgttacgcgacagtggccaaatggcgacggacaatgccccacttcccctacctcgatgggtgaagggttgtggggcattcaaaaggaaatataagaaaatttatgataacatgattaaaataaacaattcgtgagctgtattgtattattgttgcgtaataaa

SEQ ID NO: 70657 - DNA, 967 bp, Heterodera glycines
atggtgtaagtaaaaatcgtaattacgctaaaaaagcttctcaaacaattttagcgcttccaattccttctacaattgcctttatacatcccattatgagcgctaaaattatcagagtgccgaaaatcgcatgtgatctaagcctagaaaaaatggtctaagtaaaaatcgtaattacgctaaaaaagcttctcaaacaattttagcattattttttcagaaagtgctctgaaacgcaccaaattttatttacaagctattttaggcactctgatgctttttctatcaaaaagggagatgaataaatttttaaaaatttttaattcctttttaaacaggccaaaaagtttaggcttaactttttttttcagaaactgatcagaagcgcaccaaactttgcagggaaactccccggtaaaggactaacttacactgaaatgagcgccgagctagctgggtttaaaaattttttcgaaaatcagagtctttcgtttttatttaattatttattattttttgcaaaattaattcataattattttttcagaaagtgctctgaaacgcaccaaattttatttacaagctattttaggcactctgatgctttttctatcaaaaagggagatgaataaattttaaaaaatttttaattcctctttaaacaggccaaaaagtttaggcttaactttttagtgaaaattaatttactcatttttcgagtagtgctcagaagcgcaccaggttttgcaggagcctaaaaaggtcaaggaaaggcgtctctgcgttgatttagcagtagtacctatgaatttaaatttcctatgaatttttaaaggttcacaatttatttattttttgcaaaattaattcataattattttttcagaaagtgctcttaaacgcaccaaattctatttacatgttaaataaggctctctgatgctttttctatcaaaaaggaagatga

SEQ ID NO: 70658 - DNA, 286 bp, Heterodera glycines
attgcgcaccgccctctctatcatgctctagagcatttgtatgtgtgtaaaatttatcaaaaaaaaagatagccattttctgggataacctctaaatataaaaatcctatgtgagaattaaatcggcgattgtagcacacgtcctcctgtctcatactgcaagatgcttttgtgaggtataaaatttctcaaataaaagacatagacatttttctgggatagagatataaagttaaaaattccctcaaaaataaaaggtctattgcgcaccgccctccctatcatg

SEQ ID NO: 70659 - DNA, 81 bp, Heterodera glycines
atggtgatggacgaccagcagcaacaacagcccaagcagatggtgccgacgcctccaccacagcaaaacagcggtcaaacg

SEQ ID NO: 70660 - DNA, 2201 bp, Heterodera glycines
  unsure (1)..(2201): unsure at all n locations
atgattccaaccacaattctccatcgatttaacacgctgttgttgaacagaagcaccaccaagccgtacaaggacacttttgtgctgtggacaatcgctctgctgatttgggacattgaagagcagaaaatgctggccttactccaattgaacagcgtagccaaagtgcatggacttaacagcttttgggatcaaataaaatcgctgatcagcgaaaccctccgaaacccaaaatcggagcaaaatgcatgtgtactgatcaagctgagcgaactttttcttattccaaaaaaagcattgccaaatattgcgagaatggcgtctaaatggcgcaaagagtgcgaagagaaaactgagcgcgagactgcgctgcggcgctttgttggcagcgcaaacggcgtactgtacaagaattgggtgagtatcgtattccaagtgtgcgaaaagacgaaagttggcgcgaccgtggcacttatgcaaaagcctggggccaaaacgcgcctcaaaaaagtgatgggcnancgaacaccggcggaagaactcttgacggaaaacaatttggcacacatttacgaaaatgacggtaagtcatccgttaatttgagaattgttttcaattggcattagtcttccctattttaaaattaaaaaataaaatgttcattttttggttctctgaatgccttccgatagattccttgggatatggcacaaatattcaaaaaaattttagtgttttttgacaatgaccgccttttggagcactacacttttggcatggaaaaagacgttcctctgatcgaacgcaaaagtcacaaattgggcgccgatgtcgtcgtttttatgcgatggtttgaacgtaaaagcgaacgccacattggcacggaaaagctccaactgatcataaaatatatggacaatcaaatttatgatccgatttttgatcaggacgaacaacagttggacaaattgggaacattcctcaaaacattatttatcgacgcgaaaacatttgcggaaaaaattgagggcaaaaacagtggagaagagaaacaaaaagtgcagaaaaacattttcaaaaaatggaaattaatggtggaaaatgccgataaaaatgagcaaggaaatggtgacgataaaaacggagaaatgaaagaatggatttgtgaattgcacgccaatgaatttttaaatttgatggaaaatgaggaaaagcaccgaagcttaaaaaacagtaattgaatttaattttttttttaatgttcaaatttgcaatgcgacaaaatcataatgtaaaaaaaactcagtaatgctaagtgaatttataaatgaataaattaaacattttacttattagcggtagaaaaactaaaaagttttgacatttctcagaaaatacagtaattcacagaatttgcaattttgaaattttttaaataaatatgattttgatatgcaacagggctggccgtgatcatggatcacgggaatcacgggggttttggggtgcagtgatcacggatcacggatcacgtgaatcacggcgtttttggggtgccgtgatcacggttcacggatttttttggaagccccgtgatcacggctcacggatttccgtgattggaaattcaatcatggccagccctgatatgcaacaacgtctcctgcaaaatcctgcgcggaacttttcctgtccggcctcttaacaatccgaatttttcgaaattttccaaaaaaaaagacaaaagcgcttaaattttccattttcaagctctcaacttacccaatcctggtcttgcatccgtggaataaaaatgaatatttttctattttcagttctaattcggcatggacctaaaaaggttcgcgaaaatttgctcgattttgttaatgaaaatgttgcaacgaatattttaaacaaattgaacacttttgaaatggtaaaaggaaataaaccgaaattaattttaaaattgcgccaaaatggaggagaattgaacaagcaaaaggaagaaaaggaaaaagaggaaacagagaatgatcaaaaaaaggaagaacaggaaaaagtagcggatgatgagcaaagggagggaaaaagggaggaaaattgggaaaatgcgaataaattccattggagaataattggagatgaggatgatgaatttacactggaaaaggaaggcattgagcaaaagcaaaaa

SEQ ID NO: 70661 - DNA, 702 bp, Heterodera glycines
atggtaaaacaattctttttattaaatttctatgaaaaaacaaattctaaaggaacgagccccgcccattcgagtttctttctaccattactggtctgggtaagttaatttattttatctaaattttttatttaattttaaattatttcatattaggcaagctaccttttgccaatatttgcgtgggtaaaaatgttgataattaatgataatgttttatttatttttttaattcagagacctgatcagtaatattcctgatcgcaatttcgccaattcgtaagtcagtgggttacggaaaatgtagtgtataaattttgaaattttatttttatatgggctttataattatttatttcccccaaattaattttgttcagagcaacgtttgtcttaatgtatctacctcatttttatgttctcaattatattaaaatttatccaattacaattaatttaaaatcagctaatctaaaataattcttgttaaaattactttgatgcagacgaacaaagtttcgcaaatagaaatgctttcataaagagacagataaatgctcttctaaattataactagggataagattttaaggttctaaaaactgcaaaaataggtaggcgctaggctctaaaaaaatagaaaataggcattaaaacctcatttttaggagtgtaaaatgacaaaacattcaaaaaaataaa

SEQ ID NO: 70662 - DNA, 59 bp, Heterodera glycines; identical to SEQ ID NO: 52422

SEQ ID NO: 70663 - DNA, 59 bp, Heterodera glycines; identical to SEQ ID NO: 52421

SEQ ID NO: 70664 - DNA, 59 bp, Heterodera glycines; identical to SEQ ID NO: 52422

SEQ ID NO: 70665 - DNA, 59 bp, Heterodera glycines; identical to SEQ ID NO: 52421

SEQ ID NO: 70666 - DNA, 59 bp, Heterodera glycines; identical to SEQ ID NO: 52421

SEQ ID NO: 70667 - DNA, 59 bp, Heterodera glycines; identical to SEQ ID NO: 52421

SEQ ID NO: 70668 - DNA, 80 bp, Heterodera glycines
gtcctgcacataatatctgtggcatggaataaattttggaactgcgctgcctaacggcgttgcttaaagtgcgctaaaaa

SEQ ID NO: 70669 - DNA, 1000 bp, Heterodera glycines
atggatctgacacttgaacaagaccgcgagtggtatatctcattcattcgtgacaatgtaccggagcacctcaccgaagcagatctgtcgcatgaagttcatttgggggcgtttaatctagcgatgcaaatgtgtcatgcattgtctacaacagatttgaatcccgctccaaaggacatcagctttactagaccattcacaccggcaagtactcagagataaacgcctctatcggattcggtctgaggattttttaagcattttcagccataattgccattttgtaccgtttaattgggtacttatacacctacgccacattaattctgatagttatgtcgttttctggggtattggggtggccgatcaagactatgacagtgaggttcatctatttagaaccacggatccgatttcgaacagaagttgaaaattacttattcacatgtatagttcataacagattcaagtgcactcaatgcccgtgagtctctattcacagctaaacgcctgattgggtgaatcggtcatgtccaaaaattgtgcttaggtcgaaaagttgatttaccccctctcatgttcgatttcgggattcggaaagtttaaaattggcagctgttgggggtgagttatattacaatgtgagagtttttgtatacggttcatttccatactaaaaacttggcccgctgcctgcagccgatgcgcgtacacccctgggtgaattctgtcgggaacgttcgttggatgtaagattgaattatgtttccaatttcggttttattttatatccgggaaaattttttgtaatttcgttctgatttgttaacagattttcaccaaaaaattaccaaattttgccataaattttatatttttttttgtaaaatagtgacattaggccataaatgggaaaaagccattaatttttgtttgaaaattgttgtgctttttgtattcaaaagattttttgactgataaaacatgggaaaatcatata

SEQ ID NO: 70670 - DNA, 375 bp, Heterodera glycines
tacggtaggggtcaactccgtctggccaactccgtctcagcaatgttcaaaaagctataacttttttctttggtggccaaacttcacaatcatggtatcattcgaaagccctagatgtttagaagatatttataagctatttctcagtgattagtcagctctcaaaaaagttgtcagttgaaaaccgcaaaaaaggcagaattttcaaagttttttatttctatctttttttatagttcgaaattttctgtaatttttagtaggctaatagagcctgtgaagagctttcgaatgatatcaagattgtttgattcggtcaataacttcaagagttatattgactcaaagttggctcagacggagttggcccgttcc

SEQ ID NO: 70671 - DNA, 211 bp, Heterodera glycines
ctgttcatgctcgtcagtccatcttccgctcgctgtgtatcattctttgcctgcaattttgcggttggacatttggccaactgacctacgcatttgtgtacatgaatgcgccgttgatgcacccgttgacccggtggcaaatcaacagcatgttactagtgtttttaagcttaactgcagcactggatgtgccagtgttgtacatcaacag

SEQ ID NO: 70672 - DNA, 559 bp, Heterodera glycines
atgaagaaaatcacttttttgaactcacttattctattggactgttcgagagtttcgagaactcaatttgtgctctcggtttgtcattaacgggaatttcgtcccactaatttcaaattaaatccaccacaacaaagtcaattgctgctctctctctctctcttttatcttttccgcctttcccctctttgtttttcaaactataattaatcactcactaattgtatttggtgctgctgtagtttgaaattccaatttaaaaatatgaaactattttgactgttgtaaaatagtaaaattggaaatatttctcatcttttcttcatttttcagatgatatttatttatttgattaaagaaaattaattttcaaatcatttgttttatttgatttattctgctgttgttctactgtttttctgtgttatcttatcaacatgaagaaaatcacttttttgaactcacttattctattggactgttcgagagtttcgagaattcaatttgtgctctcggtttgtcattaacgggaatttcgtcccactaatttcaaattaaa

SEQ ID NO: 70673 - DNA, 633 bp, Heterodera glycines
attgatgacaaggcattcctcgcatttgttaagggacaatccaattttgagcatttttgcatacaggaaaaggacaactatttgtttgacaagggattgccaaaaagtgtcacttttgatcagagaaaggagcatttggcacaaagatacggagcccatcttggcacagttcagttgatgagagagcattggcactgtgccaaattgggaaagcatttggaaagcatacgcagacggaatgccaaaaataccgaaaatatttggacattttgtacggctatttattctgtgtgtacactgaaggttgtgcttttcttagggaagggccgagaaattttgctttttttcagatgacgaacaaccacagggattaatgccgctgcttatccgaaatattgaaaatttcgggacactaattgatttcgtcaaacagctaaaccgaatagccaaattctattttgatgccaaattcagcaggtacaatcagtacaaaatagaaaatgccttcaaattcaaaaattcggtcatttctatgcaaaattttgaacaaatatttaaagcagcaaattatgggggaggaaacgcgaaaaatgatggggaaagccaactgatcaaagcacaattgaccaaaag

SEQ ID NO: 70674 - DNA, 821 bp, Heterodera glycines
  unsure (1)..(821): unsure at all n locations
gtgttcaatgacttggaaaaatggctgtgcgagttgactggctacgacgccttctcacttcagccgaataggcaaaaaataaaagcaaagaattgaaatggcaaaactgtttaattcagtggggccaacggcgaatacgccggacttttggccattcgtaaatatttcgaagcgaaaggggaaacgcagcgaaaagtgagtagggaaacaactcactcacttggagatttggcctcattagagaggaaatttacgattaaatactcactaatctgtgcattgattccccccccccccccgaaagatttgtttgattcccatctccgcccatggcacaaatcccgccactgcgcacatgtccaatttccgagtggtcccagtggagtcggacaaacacgggaacatcaattacaaggacctctcagcaaaggcacgtgggagaagggcagtggggggaaaggcattgaagcatttcagtgtgaaaagcacggggcggagttggcatgtgcgatgatcacttatccggtaggattttagttggccattgccaaattggcctccatttctagtcaactcatggagtgttcgagtccaacattttggatgtgtgccacaaagtgcatgagtttggtaatggcgctctgtttgcccattcaatattatttagcgttattttcccaggaggtcaaatttacttggacggtgccaatttcaatgcccaagtcggcctttgtcggcctggcgattacggaagcgatgtgtcgcacttcaacctccacaangtgacagaaaagtcatcaaagcataaactttaccctaac

SEQ ID NO: 70675 - DNA, 279 bp, Heterodera glycines; identical to SEQ ID NO: 58736

SEQ ID NO: 70676 - DNA, 121 bp, Heterodera glycines
gctgtaaaaaaaatttggggcgatttgaaagagaatagaaagaaccaggttcgatgaagttttggtaagccaaaaaaaatgcaaacatttaaaaatctataaaaaatttaaaaaaatttga

SEQ ID NO: 70677 - DNA, 123 bp, Heterodera glycines
atgcagctcgtctgtgtgttaaagaaatttggcgagttaattgacttgtgtaaatgttgcctaaggcacaaatgctgtggggaactcatcactggggatgctgaacctaaagctggtggtgaa

SEQ ID NO: 70678 - DNA, 66 bp, Heterodera glycines
atgttggcacaattgagaggaaaaggcatcgccgaggggcacgagaccagctcagataccattctg

SEQ ID NO: 70679 - DNA, 1091 bp, Heterodera glycines
tttagcgcgtctcattttcctcattatataattcattcgttgtttgctcatccctccgtcgaccgctgaccaaacgaatttgatcgaatagcataacggaaatgaactacgacagcgctttcaatgggaccaacggaggtgcggttgaggaccgagtccgaccggcttcccatgccgggtcgtggtacgaccgacgcatcagaatgatcaatttccctctctctatgttaaggtattccgaaaacgctaaagggttggaccgtcagctgacgaattggctcaacgcggccggtccgaccgttggggcagcgcgtgcgataatatcaccgtcagtttcgcataatcagcacgttaattgccctgcattaagaactcatttgaaaacggatggttaaccctcaccaactaagaaatttacttggaaatggttttgatttgaatgcactttagtcgcatcatttgcaatatgtcataatttagcatttattttattaccaaatttccacttttgtgggggggggagtaaatttaggcgttgtgttcgcttccgtatgttttggcattgacttattcatttgctgtttcagtcatgccgggtacacttattgcggtgaaactgcaggtgcctttctctttctctccatttacttttttctccaatttgccattttcccttttagcatttgccttcaaacaaattgtgccggacaaaatgttgtgccttttttttaactcctccgcccttttcaatgcgttcgttccctctcagaaagcgcattttcgtgctcggcccttcccacgtcgtttatttgtccggctgcgctttgaccacttgcagcaaatacgccactcctttgggcgaccttttcgtggacaccgcaggttttaagagggaaattatcataaaaaggggtcggatgggctgaatttctgcattttaattgctcatcgcatttttgttcattgtcagtgaatgagcagctgaggtcggccaatggtgccgactccttcgaatggatgtccgtgcggaatgaggaggccgaacacagtttggagatgcaaatgccattcattgccaaggtgatggagag

SEQ ID NO: 70680 - DNA, 731 bp, Heterodera glycines
  unsure (1)..(731): unsure at all n locations
cagaaactgatcagaagcgcaccaaacttgncagggatactgaaaggaagagaaataacctattttaaatattatctagtcagttcatttaaataatttttatccaaaaaatttttttttgggtttcggggcagtccccctgaaccgatgcgcccagatttataaggagaccgaatccttccggaatagcttcgatatagcctgtactttaattctgcgttggatttttgctccccataattgtttgagtaccccaaacggacacttgaaaaaatcgatttatttttgttttcggggcagtccccccgaaccgatgcgcccagatttatggggagaccgaatccttcgggaatagcttccctatagcctgtactttaattctgcgttggatttttgctccccataattgtttgagtaccccaaacggacacttgaaaaaatcgatttatttttgttttcggggcagtccccccgaaccgatgcgcccagatttatggggagaccgaatccttcgggaatagcttccctatagtctgtactttaattctgcgttggatttttgctccccataattgtttgagtaccccaaacggacacttgaaaaaatcgatttttttatttcataaatattttttcagaaattgctctgaaacgcaccaaattttatttacatgttagtttaggcactctgatgctttttctatcgaaaagggagatgaataaaattttta

SEQ ID NO: 70681 - DNA, 974 bp, Heterodera glycines
  unsure (1)..(974): unsure at all n locations
atggaactaatgnaaattgtggatgacgaatacaaggaacgatggcttgganaattgtntacggaaattgaggacgactcaattcatgtcaaacgatttggcagaattgacgaggacgaagaaattgacgacaacaatgatggtcgagatgaatgcagtcagtcagcatacatttattggtaaacacatgtatgttaccttaataatgcacttttctacctaaaaacgacaatttcgtttttaagtttatacaaattgcaacttccgctccttaattatttacaaattgtaacttctttctcttaattctgcatttttctacctaaaaatgacgttcccaaatgcttaataattttcaaattttatcttccgttgcttaattctgcatgcatgttaatgtccttaattatgcacttttctacctaaaaatgacaagttcgtgcacataataaaaattgtatcttccactccttaataatttacaaattgtaacttctttctcttaattctgcatttttctacctaaaaatgacgttcccaaatgcttaataatttacaaattgtgtcttccgttgcttaattctgcatgcatgttaatgtccttaattatgcacttttctacctaaaaatgacaagttcgtgcacataataaaaattgtatcttccactccttaataatttacaaattgtaacttctttctcttaattctgcatttttctacctaaaaatgacgttcccaaatgcttaataatttacaaattgtgtcttccattgcttaattatgcatgaatttttattaaaaacgcaaataaaatgacaaaattacacaacagaactgttaccaatggtgacccaaattaaaaacatcttatttattcccgactatccctttgatctactgaccggacgacagccttcgacgggcaaaaggccctgcgaggcgatttccttgctcaacggaacgatttgttga

SEQ ID NO: 70682 - DNA, 225 bp, Heterodera glycines
ttttaaaatttcgaaaattttcaaaatttttcgagttaggcctaaaaaacggttttcgggtttttgaattttaggattttttaacgatttttcccagagaaacggagaccacttccaaaacatagtttttcgagctctatcgactggtatttttttcggaaaaatttcgattttttcccggaaatagaaaaaatttttggcctgagcgggacgtttgagtcccgg

SEQ ID NO: 70683 - DNA, 180 bp, Heterodera glycines
atgcttgcaccaattccaataattgagccggcaactgtcactgttccgcccaatgaagacgttgtgggctcagatgatgagaatcagcaaagagaagaggaactcctggtcaatcaatttgtcatcaattcggaagcgatcaagcgcatattggacgacccgcgctacgctgacaaaaag

SEQ ID NO: 70684 - DNA, 904 bp, Heterodera glycines
atggtacgtatttcacgctatttattaattgattatgacaatctgcaggttcggccagcttctttggacgaaatcaatttacgttggatttacaagcagaattcagaggaaatactacaatttctggcttatcatggacttatcaaaaaccaaatggagtgcaagaagtgttttaacaaaatgtcattgacaaagaaaaagcaaaaaatggatagtttttggtaagcacaagttttagattttttaaatttatttttttagtggaaaggacttcagaaacaaaaacgccatcaaagaactgggaatcgcaaaatcaacttgcgtcaattggttcaatttttgtcgcacccaatgtgttcaacaacaaaaaattggtggcgttaacgtcgtggtggagctggatgagacctgttgggtgaagcaaaaacacaaaaagcctaaaaaaggctgcagcaagtggttttttggggccataaaagaaaacgttgtacaaattgataaagaaatggattcgtccaggctcagtgatcatcagcgacgaattggtcggcatacccgaaagtgggctcttcactttccacagtccgaccacatgctcttcagacaccaaaaatcgaccggtggtggcttgtcgaaacttgtcatgctcccggacggcaccgaattcaacgtcaatactaataaatgtgaaggactctgggctcaattgaagcaaaagacgaaaagaatttatggaaccagtacaaatttaacaaattccaaatgtttgaacaaatttttcgacttaatgctagggctaaaggaaaaactattattaatgctttctgtgatcttattcgtcataattataattttattcgccataatcatgctgctaatgcttaatatttatcattacgtataa

SEQ ID NO: 70685 - DNA, 218 bp, Heterodera glycines
atcgttttccaaattgatgatcccaccgcccattaccacgtgccaatcactttgagtaactttggctattccacgtacaaaggccaataatagcgatggaattacgacgcaattgcacttttttggtcatcgataaatgttttgagcatttcccgctgatttgttcatgtaaatccatcttttttttttgtccgatcgccaaaagtccgttgaataaa

SEQ ID NO: 70686 - DNA, 756 bp, Heterodera glycines
atgtatttatctttaaaagattggtgttccgtctttgctaaacatccgatttttctgaacaataattcgttcgacattttttactacgaaatttcaattggaaataagagatggtaagagaattatttattatttgaatattagatttattataaatattaaaattcaattattgttaattgttattcctttattttaatttcagttatttgatcttcggattcgctgttaaacagcagaacaaattcgatggaacaattcttagccacaagggcacttatgcatattataatggtggcgatatatgcattaacggagaaggaaagggaagaaatggcaaatattcctacggtgttggcgataccgtaggaattggtgttaattcggccactcgacagatctttttcactaaaaatggacttcgtttgggttggtaaataaataattaatttaagaatcttaaatataatttttatttaattaatttttgtatttaaattatcgaaatcccataactttttcacagattcctctgaatttttcgttgctcaatcttttgctgatgattcttttcatccattcgttactttattcaattctgatgaccaaattgaggcgaattttgggcccaatttcaaattcgatttgaaaagtctctgaggaagaaatacactaaagttgatcaatttgtttcttcttaatactttttatgcttttcttcttcaatgttttggttttttgaattttttaaataaa

SEQ ID NO: 70687 - DNA, 1502 bp, Heterodera glycines
atgcaaaatgatcagaagattcttttggagaaaatcagtgaattggagaaagaacagaagcagagaaaggtgaattaatttgtaaggggtaaaacaaagcatatgttttagtattttttatttattttatattaattatttgctgtatccgcagcatttaaaatttcatattttgtgcataatgtacattgccctactttctcccgacccaatcccgtcgtaaacttatccatctgttcatcccatcccaagccaatcctatccctctcatttccaatgttatcgtgccatttcttcctattcacctctgttgcatatgccatccatttctcttattcccttttgtgtttttccgtcattacccctcatcctatccaaagtccatccccattgtgccagtatataagtccatccaatttccccctcggggggctgcgagatgtctgcggtgggtcagtctgtgccatttcttgcctttggcaatcctttcccaaataaccaattgcactgacccacccaaaatgctctgaggttgttgttgagccaaacatattcccggttttcaattcataattatttgtcaatgcttttccttataataaattcctctctcctaaaagtggtaatttgaaatggcttgaagccttaaacccggggacacaacacctttttggtgccacgacccggtgtgtaaaatttttttgttaaacagagagagagagaattaaaattccagagcattccagacaaaaagtgtctgaggccattaaaggctaatttgaacaatgcagacttaaaaagggacgcagacccaaaagcagttttaatctggttaaattttaattccttgttggagataggaagagtaaattaaagtacgttttggcaacaaaaaaaaaaggactaaagcaatgggaaattgctatttttcagtaaaacgtaaatgaaccaacaaaaatgcattgtcttgcgaaagaaatttggcaaattttctgtggctaatatggctgagtacggtaatacaaaaaccttatggcatattttgtgatcattgattgatcaatgcgctgtgttttaatgtgataatatgttaatttttgtgattttggctgttttcgaaaggataagtgcaaaggttttgagcatgaaaagataaaagctagtcgcagctgtgtgctcctagctgggctgagtgccgttgtggctgtgtgccacgagactggtcgaagctgtgtgctcccagaaaagagaccaattaatgggtgaaatgagcgtaagccatggactagtcgaagctgtgtgctcctagtgtcaagcgaaaatggcaggtaacgctgtgtgcttaaaatgactatgtgccaagggcttagtgccaaaaatgaattgtgaatttgaaggcataaagccattgtgtgattttttgttattgtttgtattatgtgatgcctaactggttaaatgttgaaccgtttttaatgccaaaattggttttactgaataaa

SEQ ID NO: 70688 - DNA, 530 bp, Heterodera glycines
atgttatgttttgtttttcattgtatcttattgtaagttttattttgcaaggaaaaattgcattaattttgacccgggctaatgacttcactatttccaccattatttttggtcatgttatttcaaaacaaatttctcaaggatagatagggccggtggtcatttagacgccgccggggaaactttttcaaattaaggtgaattttgcaacagattttgaccataaatgacctttttaagtgttttctccaaaaaaaacatcacaaaagcctcatttttacgaattaataaaaaaattaatatttaatatttgtttttctaaaatttatacaaattattctagttttacgaaaatgattatttttcattgtttaaaaaccagggtcgaaaaatcaaaatataattcgtgtgaaccgaagcgaaaaaagtatgagtgcgggtgatcggaaggggcgggtcatttcagtacggaagagttattcgaatgattaattaattatttaaatttataattgaatattaatctaata

SEQ ID NO: 70689 - DNA, 107 bp, Heterodera glycines
cttatttgcttttatttcggtttatttctgccgtttatcgctcacactaaaagtgtcctaaatgggagaatgttcctccaacaatgacgtgccaaacgcatcaaaga

SEQ ID NO: 70690 - DNA, 225 bp, Heterodera glycines
attccggaaggattcggtctccccataaatctgggcgcatcggttcggggggactaccccgaaaacaaaaaaatcgattttttcaagtgtccgtttggggtactcaaacaattatggggagcaaaaatccaacgcagaattaaagtacaggctatagggaagctattccggaaggattcggtctccccataaatctgggcgcatcggctcggggggactgccccc

SEQ ID NO: 70691 - DNA, 892 bp, Heterodera glycines
atgtgtttttattcggaatcaattatcacaaaaacacatttccggttatatttatcatgaaaaatactcattttaagaatgtgtttttatttggaataaattatcacaaaaatacatttccggttatatttatcatgaataatacctaatatcaaaagagatattagtcattaaattttatgaattaattggtctttttaaacttcatttcatttttgtattgccataaaaatatgacacatttaattccttaatttaaagattctttattattcagttaaattttaaaaattttaagtttaaaaaaagtttgggacaaaaatattgagtctcgaatttcgaactttttagttatattttttgcaaatttttgttagaatcaattaaaaacatttcatatttttcaatatgtcctgatttttcacgtttttttcctgtgtatgaattctatatgcattttttgttgtaaattaatgtaaaatgattctcttttggatgaaaatcattgataattgtactgatttttttcatttgtacttttataatcaatccaaacaaataaattctcattttcttcatttattaaaaaatagcaaaaaatttcataatttccgttatcaaattgtaataataaacaaaaatttattgccaatcgcaaatgaattcagatatttcagtagtattaatgttttttttaagcgttatacctggtaaagctgaatcagtgaagaaacaattgcaagaaaagttttgtgaagatatttttggagaaaaatggcaatataaagaagatcaacttcgcaatgatgagatgatcagtgaaatgatccgaaacttctataatttaaacgctaatattaaccaaacaggaagaggatattattcagtgtga

SEQ ID NO: 70692 - DNA, 49 bp, Heterodera glycines
  unsure (1)..(49): unsure at all n locations
atttaaagctatccatgctgccnnggttctcggcacagcaaagcactaa

SEQ ID NO: 70693 - DNA, 432 bp, Heterodera glycines
  unsure (1)..(432): unsure at all n locations
atggtgaaaataaaaatttttctttcattttccattttggtgaaaatttttcccattgcctttggccatgagaattgtgagaatgcaccgaacaaaacattgaaaaagatttgtgaacagctgtatcgatatgacaaaaaagcgagggtaattaatttatttatttatttattacccaaatattattaattattaacaccccaaaattcgacaaattatttaattagaaaaaaaacatatttcgtttaataactcattaaggaagtcatacttgacgaagaagagactattattctaccaccagcaatacctgggcttgaaagtaattaaaataattggaaatttttttcattttaattgctaaacaattanatatttctcataaaatttttttanaaaatggaaaaatttagcgccaatnttcgccgctga

SEQ ID NO: 70694 - DNA, 483 bp, Heterodera glycines
atgccggtgccaatgcgatcagtgaaatggccaattcacttgggcatccgattgcgatgccaaagtttgcgtgatgctccgtgtgtccctcatgctgttgtgcggcggaggccttttatgtggcatagtttttgcaaaatgtttctaataaatgaaatttaaataaaaaactttgagttttttaaaactaaaattgtataattttatataaaagtcatttataagtgcactaaattcaatttatttatttattttttgattagcaaaggtagagctgtatgagggtttcggatgacggtattatggcaatattaagaaaagttactgcgtattgtgaaagatgatggctatttggggagctaagcttacgatttattaaaaagcctcataaaaagcaaatcatttattccatttcagtacaaagcttcttaaaaagaaaggtataataaagaatattaattgaaattttttttatttttataa

SEQ ID NO: 70695 - DNA, 223 bp, Heterodera glycines
atggttcacaaattctttttgctcgtcatattggcaattttgatcattggcacaattgctgaggacgacgaatgtgccgatgctccatcgcctacggtaaaataagaataaattcaaataaatttatttttaaatttttttaggcccgtaaatattgtgaacagctgcagagaaaagccaaactgcaaagagtaataataatttctttttaaatattaataaa

SEQ ID NO: 70696 - DNA, 637 bp, Heterodera glycines
  unsure (1)..(637): unsure at all n locations
atgggcaccggcttnttgtacgactatccaccgattgtctacacncaatatccgtggatcaacgacttgtgcactttggtgttgtccagttggatgttgttgttcaccagcagcattttccgccaccaatttgtcaaggacttttgtccaaaatgcatttggccaatgccaacaaacaaattgagtgaaaaattttccaaaacgaggacaaactttgggaagcagttcagcaaattcggaattataaaacgaatgatggaataaattgtcgtgtgaacttttgtattttttttttaaaattctattacaaatttactggatttttttgaaaattctttaacaatttagtttattgcagattccttccggtattgttggaggtcctaattcccgatcctggcttttagtaacaaagaatttctgaatttacatgaaaaatccgaaaaatgccaaaatgttaacaaaacattgacaaaagcccaaaattattgaaatataaaattcaaaaatttacatgtcttcaaagttttgaccttataattttcaaataatgaatggtttgccaaacagaagttataataacattcgatcccccctttttctctcgccgaaggttggagaccaaccctaaaataaa

SEQ ID NO: 70697 - DNA, 80 bp, Heterodera glycines
atgactagaaggtgtttatttgaactgaaatggattggtggaatattaataaattatgatttgattcttacacagattaa

SEQ ID NO: 70698 - DNA, 829 bp, Heterodera glycines; identical to SEQ ID NO: 42901
  unsure (1)..(829): unsure at all n locations

SEQ ID NO: 70699 - DNA, 817 bp, Heterodera glycines
atggaggttgacgtgtcttcttcatctgactcggccacaaatgttttgttcagtttacgtgccgatcggagtctgttggacccgacttttgaccggtacattttgcgtacagaaaaactggcaatgttcaagcggagaatggacgacaaaagtacgacattaatttaaatttaatttgaaactcaaatttggcaatcttaggcagttttattgaaaatatccagaaatactcattttgaaattctctttttcggtttaacaattataaatttgtttataaatatcaaaatgttcattttcagttcgtttcaaattgccctccgacagccaatggggctaccaacaaattcgggcccacactttggcctcccatcttttcttcgaccatttcgcttcctccgttgaccagcaattatttttcgcatttctcgacgatctccgtctgatttcttttacatttgatcgaacagttcgttgttttgttttcccattttaattggtgcgtttgactcactttcgctctttcagtccaaccgttggtccgtccccgtccaagtcgcggacattggcacttcctccgtggcattgtccccctcatttgtctttgtgtccgaggacgacgcttcttcccagtcgttccccgagagtttacactttgtcgactcgcgcacggcgatcactgcgcgcggactgaacactttcagtgtgtgggatacgggcgagcgacgcccgaccgatgggacgacacaaaaatggagggtcagtgaatgtgtaaagaaatgctgcggtgaaatgtttgcagggacattttgaaaaa

SEQ ID NO: 70700 - DNA, 229 bp, Heterodera glycines
ccattggcggtgctgaggaaattgcggtgaacgatgtttgtttgttggccctttggcgttgtgttattcattgtcctccactccttcttaggttcagccctccgctgccggggacgcgcagcagcagttcaattccgagcagttggaggagtgcgatcggccgcccgacgctgaggacgacgtcagcgccttttgggtggacggcgactcgcacgaattggtcgcgatg

SEQ ID NO: 70701 - DNA, 197 bp, Heterodera glycines
agcacgaactgaagaatcgtcggacgggcaaacgagcggaacacatcgccaaacaattggtgctttcgatgtccgacttggacaaggagttcgacccgaacgattcgtccaacgaattcatcgcatttcatgcgacggcggaaaccctctttctgcttactcgctgcgcaatttatgccgtggaaatgccaaaatga

SEQ ID NO: 70702 - DNA, 352 bp, Heterodera glycines
atgcttaatttgactcattttcgccttgtccacattttgctcagttgtgctaccatttttctgatcattttattccattttttgctgtccaaaaatatcctcacgattgatcaccgattatcagcaaaacaaacgaccgtatcagacggagtcctacttttaagttggatgtatacgatactgaagaatggcgtacggtcgttaaaagcgttggctgtgacctcagtcaatttacgaatgttcggcatgaaaaattggcacaattttacggccaaaatggcttatacacattaagcaaaagcaaaatgttttttgatgaaaaaggcatgaaaatttaaaaaagggtaataaa

SEQ ID NO: 70703 - DNA, 1062 bp, Heterodera glycines
atgcaggctggtacaactcagattcctggctttggccagttgtacattctggacccagtcgaggctatggaacagcgtcgaaacaaccccaggtttactggggagaaaatcacaaacgaagatgagtttgtgcagggtcaccagctaaatgagcagactcttgagatcttagaacaaatgatccaagtgtatcatcctgctgcgcaggcatataagcaggcgcgtgagcagctcactgagcttctccaacaacaaactccggaagagcttcgcttctttcgcatgactttgttgaatgagcgcagggctccagctggtctgaaagacccaaaattgcacccacaccaaataatcaccccttctacgggtgaagggatgttcgctattcatgcggaccccactggtgctcctccgcccaaaggaatttgggtagagaacaaacaagggcaattaaatgaaattgctcctttcagtccgtggactgatagtcttacgtatccattaatcaagccaatgggcgatgatggatacacaactggcattaaatatgctaagccaccatcgcgtaagcgaaaaggtgctcagaatgcatctggcctatttgacccggaagccgagtcagataatgagtcgtgcgagactcagtcaattgcatcatctgatgctgggtcagtcgcaaattcagatgctgaatctgtagcatctgtttcatcgcagcaccggcggattgacaaatccaaacaatttatctccctgcgagattattgcaagtattatctcgcaataagggatgaaaatttggagttgcaataccaccacatcctttcatgtggtggaggacttggtcagcgctggatccttgaccaggctgcaaaaattgattggcaaattgcaacatttttgcgtagacctgacatggacctgcggatcagcactccaaaaaatctgctgcagtatttggtcaaccagtacaacaggcagcaggcacggcaaaaccccaatgcccaacagaaaactgttgatgacattggcagtgttgttcggctttccgaaaacacgtaa

SEQ ID NO: 70704 - DNA, 67 bp, Heterodera glycines
tgtccgttggggtactcaaccatttatgggagcaaaatccaacgcagaattaaagtacaggctatag

SEQ ID NO: 70705 - DNA, 1574 bp, Heterodera glycines
gaacattttggcgactgcggcactgaaacgattggactttcaaacggcggaacacgcatttgtgaagttggaagactacgggggcattcagttcctgaagagactgcagaacattcattcggacgggttgaaaaaggcggaagtgtgcgcatttttgggcgatttggaaacggcggagaaaatttattttgaaaatgatcggaggtgaagggacggcacgggaaaaggaatggcataggaagggacggcacgggaaaaggaatggcataggaagggacggcacgggaaaaggaatggcataggaagggacggcacgggaaaaggaatggcataggaagggacggcacgggaaaaggaatggcataggaagggacggcacggaaaaaggaatgatttcagggacttggccattgacatgctgaagaagatgaatgattggtgtcgcattacgcagctcatccaaacttcgagtggacctggcgacgacattttggcacaacaaacatggcaccatgtgggcgacttttatgccgaaagacaaaaatggtggaaaattggggggggggggaattattggaacaataaacgaataaaattgagaaaattaattcgttaattacttaataatgtaatgctaaatgactccaaaggcaaaacgcggcccattattatgaaatgtcgaaaagttatgctcagttggcgaagtgttatttgatgttggatgacttttgtcgcatggaaatactaagcagagaattgcctgaaggacatgaagttcttttggttagtcagggaaaagcgacaattaaaggactaattagtgagggattaaacagctaattaagaggcattagttcgcactttattatgaaattccatagctttaaaacaaatccattgttgataattgataatattttttgaatttaagcaattggcggaaacattttcgaattacggcctttgtgaacaatcggtgaattgttttttgaaggtgaaaaaatcaaagaaaaagcaaagcacagaaattcaattaatcagtgcgacagaatcagtgaagcatttgaaatgtgcataaaactgaacaaatgggacaaagcgacggaattatcggacaaatttcacttggcaaatgttgagcaattgctgagccaatacgccttccaaatggtgggcaacaaaaccaaaaacttggccatggcacaactctaccgaaaggccgccaaatttattcaagcggcaaaaattgtctacgaggtgaaaagtgatcagtcaatgggaaaggggagtgatcaggggaaacagagtgatcaaagaatgtgttaagactgatcgaatggttataaacgatcagataacccaaatcggaataacgaattaatccaaattgatcagaatctgcttgaaaagaagcaaagaaattgctaattcaggtggccaaggcggagcacgagaagcaggtgccacctcaaaggctgaagaagctttatgtgatgggggcattgttagtggaggaataccacgagcaaaatcgggagaaattggccaaacggagagaggagggggcaagcgat

SEQ ID NO: 70706 - DNA, 1055 bp, Heterodera glycines
tttcccccgcccatttcagtttcaaatccaaacccccggctccgccaccttcacaaccatcgcgtggatgctcaaccggggttatgtggcggtgggcggcagtgacggggccctgagagtgatgctgctgaatttggaccagggcaaactttgggggggggggggtcaaatgcaattcttgaggtcccattttaacggcatttcccttccagacaaaagtgccggcccttcctccgcctccctcagtccctggctgtcctcccaacaactcgaaggccattccgccagtggtcattgtctttttttaaatttatccatctccctaattggtttcagttcgccttttgtgttggaatgaaattcaccaaaaattggcgtcaagcgacgatgccggactgatcatcgtttggatgagccacgggcaagtgaaagggcggaaaagcaatgtccaatcggtccgctaaccgacaaatcaatcaaagattagtcgaccaatcgaccaaagggttgatcaagcaatcgatttatcggccaatcgaccttgcgaattgatcaatctttgtcagtcccttcggctactgatgttttcgtgtttagtgcggatgagtcgtggttcgaggagatgatcaacaaccgtcaaaggtccaccgttgcctcgttgaaatggtccaacgacgggtcgcgcattgcaatcgcttacgaagatggtaatcagaggaatgaactcattttcatctcttccgattaaggacaaattattttgggctcggtggacgggaacagactttggaataaggacatcggagcgtcgctggtcaaattggcggtagggctgaaacggcggttgggctaatttctgctctcatttggcagtggaattccgacgacactttacttctgatcggtaaattggcactgggaaaatgccaaaccaacagatcagttcatgaaagggttcaccgacggagaagtgcacgcgtacgatcagaacggcaatttttgcatgaaaatacaaatgctttgtgtggaaaatgtcgaaatggaaacggcactga

SEQ ID NO: 70707 - DNA, 816 bp, Heterodera glycines
atgaataatatttatctttttaaatgcatttccgttggacagatcctcattgccaacctcgttttcctctattttttgactgcaattttttatggggtgtccattgtccgatatcaagttggtacaacactttgttacctaatatgttaagttggcaattaattaattaattaaccaatgttgcttcattccccttttcccagatgctcttccattcttcgttctctcctccaaactgtgtgcttttgctgacccctgtttggctcgccttccttttggctgctcccccttatttgtatttggtggccaatccgtttttccactttttcattatggccgaaaggtgccgagccactttttttgcgcggcactatgaaaatgtcggctttcgctttggatggatttgtgccgtaatttcggtgaatattttttaattttcgtattatctctcttttaattgcttttttgcctttttcagtggattgtcgcccttttgaccgtttttggcattgttttgagtgatttgtctgaccccattttctcccaacctttggccattgtctcattgacttcccaaaacaatgcgatggccatcatttttttacattgtgccgtccttttccttctgattgtcacttcaattggcgattattgggttcaaaaaaagaacataaaactgattagtcggtacactttgaagtcagtttactttattggaatttgaatttgcaattccatcgcttttggcattcttttttaattatgatgttttttgataaaaaaaatcaaattaatgaatcactgtatttaaataaa

SEQ ID NO: 70708 - DNA, 352 bp, Heterodera glycines
ggaatcaaaggtgttgtaagcttttttcctttttcacttttaaatttatttaaattttcaatttttttagcttttttcgaaatattttttgtcttttttttcggcaggcactgcctctgacaatattttttatttatttagaaaaataaatgttttttttctttttgatttattttaattatatttcattcttaaattttttaataaacattttcaaactttcaccttattaatttaaggcgaattttgccttttttaataaattctcttgtgaaaaggcaaaaaaataggctcttttaaatatgcctatttaaattactttcattgctttcctttgcttacgaccatacca

SEQ ID NO: 70709 - DNA, 328 bp, Heterodera glycines
tttttcttttttcactgtaaaatttattaaattttcaattttttagcttttttcgaaaaattttttgttttttttcgccaggcactgcctctgacaatgttttttattattagaaaaaataaattgattttttttctttttgatttattttaattatatttcatcctcaaattttttaataaacattttcaaactttcaccttattaatttaaggcgaattttgccttttttaataaattctcttgtgaaaaggcaaaaaaataggctcttttaaatatgcctatttaaattactttcattgctttcctttcgcttacgaccatacca

SEQ ID NO: 70710 - DNA, 677 bp, Heterodera glycines
gatctcacttgaatatttgctactaccaccaagatctgcactggtggaagctccggccgggcccacgcccaaagccttcaacgcaaccaccacgaccctcctacacgtcatggccagactacgcgacaagcacgtgtacaagccaatgacggtggagtataggtggcccgctccagcgccatccattttcagggctagttgattcggcaggtgagttgttacacactccttagcggattccgacttccatggccaccgtcctgctgtctatatcaaccaacaccttttatggggtctaatgagcgggcactttggcaccttaactccacgtttggttcatcccacatcgccagttctgcttaccaaaaatggcccacttggagctctaaacattcaacgcctgggttcagagtcaagcaaccctggcttcatacccatttagagtttgagaataggttaaggacatttcgtccccaagtcctctaatcattcgctttaccgagtataactgcttaacgagctccagctatcctgggggaaacttcggagggaaccagctactagatggttcgattagtctttcgcccctatacccaagtcagacgatcgatttgcacgtcagaatcgcttcggacttccaccagagtttcctctggcttcatcctgctcaggaatag

SEQ ID NO: 70711 - DNA, 86 bp, Heterodera glycines; identical to SEQ ID NO: 67418

SEQ ID NO: 70712 - DNA, 564 bp, Heterodera glycines
atgcgcggatttggccaatttgctcaatgcgttggaacagaggctgagagccgtcgaagaactgacggagggggtaattattatacaaaattgccaatttgtaattgtaatgcccacgattttcagattgccaaaaagatcggctacagcagctgatgagtgtttgagtgagcggagtttatcggggcaatccccagaagatgatttcgatgatgatccagtgcagcaccaccaatctgatctttttgctagtgtaacatttgatttttgatcagatccaaaaacgggaaacgtttactgttttgttagaatattgttgcttttagtaattgttgcatgcgaaaaacatttatttcctccattcattgaaaaagcgtaaattgaaaagtgcttttctattttgattttttatgtcctctgacaatgagcattattatcctacaaattgtctgtcatttttgctaaatctgtgctgattctcagagttctcttttcgatgacttcgtggcgattgtgtttaggaaagatcagacgaaaagagatggtcagattgtacaaagtgaa

SEQ ID NO: 70713 - DNA, 674 bp, Heterodera glycines
atgcaagaaaataactcatcatccgacgaagagggtcaattgctttcatcttcatctgggaatgaagaagcggctaaccaagaattaattcaattcatcgaatttaagtcaaagcgtggtgcctcacttcttgcacgtaatgggtttgagtaccaatttgaacgcaattcggccttagttgataatgttgaatattggaagtgtgttaaagtgagtaacaaaataaaatcgaatggatttttctttggtcagaggccaccctactgcgcgggtcgcatacatgtccatgctccttggcaagagcaaaatggcattcggtttaaatttggactgctaaaaaatgatcaacactctcacattgccgaacccgacaaagaatatgtcaaatagttgccaatttctttttgaatttcttaatctcagattcgttccgccatcgaacagttgaaacaatctgcaagagccaataacccaatacagacaagagacgcggttgatgctgcgagggctgcattgagtgaagaagttcgagttaatgctccttctggcagtgccatggccaaagtctttcgttccgcaaggcgcagcgcccaagaacaacacggagacagaggaaaggattagtggggttcatttaggcgctcgcgtttgtacgctggggtcgtatgggcaca

SEQ ID NO: 70714 - DNA, 1301 bp, Heterodera glycines
atggtcattcctcaacatttggaggcaaatgtgataacaaatgaaaatgtcaacattggtggccaaatgcgtaaaatcatagttttttcaacacaaagtgcaattgaaatgcttgatcgttaccgtaacgagatagcaattgatgggacttttaaggttaaaaggatcaaatgaattaaaattaaagcttaattggttatttcagaatgcaccgaggggttttgggcagctttttaccattcatgtcgtggttgatgcatgcgctgttccatgtgtgtttgcttgtttacctaccaaacatatgcaggggtatattcgtgtgttcgagtcgattcgcaacagaattcaaaattggtctccgggaagagtaatgtgtgattttgaagcctccgaactctctgctatccggcaaatatttccccaggcaataattacaggttccggtaataaaaaatcatttaatagaccaattttacaagggtgctcctttcacctcggaaatgcaattcataaacacatccaaactctccctgggttgtacaaccgttacagaaataacagggatgaccgacatttatttcgatcacttcaatcgctggcttttgtaccaatcaatgaagtgtacacctttttgtgcattttgatggacaatttgattggccctcccgaaattgaaattttgggtatgaaagggtttttattatttttttttcacctgattttagaattacttaaatattttgtgttaacctacattggtccttcctatgttgttgctcatccccaaataattgctggtgaacaggaagcgaattatggacagggatgtgatggatggttgcgtgcctggatagctcatgagaatttggcacatcgaaatgccttgtttccaatagcggtaaaaaattcttgactatctacttttacatatttctgtaatttagctatggaatctgactcatcgcctcgaaattggtctttcaagaagcaacaattcgttagaagcgtggcataacatttggggggcccttcttgaaccaaacccactgttcagcaaatttgttaagcgaatgcttaaagaatttgaacgttggcagcacattgttgccgattttcacaatgcaccggcaaatgggataaggggaaagggccttaagagaaagtccatttatctacaacaagacaacaatttgcggcaactcttcgctgaattccaacaacgagcgggtcaagacccattgcaatatttaagagcgatttcatatcacttggctcaaatttaatgcttttttattcaaaaa

SEQ ID NO: 70715 - DNA, 330 bp, Heterodera glycines
atgaatttaattccaaacttaatgttagtgaatttagatttaaattaattactttttaagagtccaaagagatccaaactttttcaatgttaaaacactgcttcaatttttagctttttagattgtagcacattttcaatattttattgctacactatttaacattaatgatgaactactattaattttttattgtaatcattagcattatacatgtaattaataatatttataatttttatattccagtttgaggaaatttaatcgttgtgaaatatgaaaacataataagtttcacattttaaatcgcagtaaaatatgaaaaacata

SEQ ID NO: 70716 - DNA, 324 bp, Heterodera glycines
atgctcattgatcagattgtttataatagggttcagccccaagctttcggggagcaaaatgtcggggaacggggagtaaattccccgaaataatttgtcggagatggctgtagaaatttaaaaaatgtcggggagcaacaccttcgtcggggaggaaattttcataaaaagtctaaaaaaacaaaaataaaaaatccagaacaaaaaagtcttaaaaactcatttaaagatacttccatcttatttcaagtgcaatttacgactttcgtaatttcatttcccgaaacatgtcggggctgaacctagtttataatatcaaataaa

SEQ ID NO: 70717 - DNA, 685 bp, Heterodera glycines
atgactgccgaagtggcggagaaatggcgccaaagttaccgacattacagacagcgcaaacacttcgagaaaagtgggtggactctcgttcaagtccgattgtgtggtcggatggtctttcgactccctatttctctctcccctgtccctccctttaatcactttcatttcttcagaattgcgcaattcgatagccgctgccgttgagtatggcacgactaccacaaccactagtgctgctcacactgtgcccgcgtttatcggcagttctgcccattattccaattcaccaacttcggaggacaatggcactgtcggcgtcggtttgcccccgcggcgttgcaaaagcgttacaatcattgaaactccgtcccatttatcgccgagtgaacgtcgtgcacgtcggcattttcgagtgcttttgcgacccgtttcattggactgcccggcggaagagaatggaggaggcgaaaaagggcatcagcaaccaaaaccggtgggtcgtatgagtgggtcactttaaagcccaacattttttgattattcttacactaacattatcttaaagggatatcaccgtcgtcatcattatcaaaaacgcagaccaaagagtgaagaacggcaggaaaaccgagaagaaaagattgacgaggacggcattcaaatgggaaaaattggggagtga

SEQ ID NO: 70718 - DNA, 585 bp, Heterodera glycines
atgaatgccaataagctcaatgcctcgcagccaaagtgcgcggcctcggctcatcgattgggaggcaaacggcccactgacggaggcaacattttcgggcggttggcgacggtggagatgcaattttaaagcttctaaacatgtaattcgaatgataccaacagtgtttgatttggttgacaaagaaaaaaagttatagtccaaaaactgggctggcgccgaaacgaccgacgccgaaacggcctagtccctcccattttcattgtccattttatgtcagcgtgcgctatttctagtataaaaagacggggtttttcttcatgaaaacattttgtctaatttcaaatttttttttttttgtcatatatctgaaaataataaatttctttacagatgatttacattattccgtgcatcgctcttttggctgcatttattctcattgcccaatgctgcggttgcggcagtgagggagcaacggaaaaggatgaccagcaggctgcaccttctggaaatgctcgacttcaacgagcgaaggacatgatgctgctaccgcaactgaggattcggcgtggacgaatattg

SEQ ID NO: 70719 - DNA, 1523 bp, Heterodera glycines
acattgacaacgaatcggatgaccgtaaggaaaatgggatccaaagaccaatttgttcggattttaatctaattagaatatattcaatctacaggttgtccagtcctttttgtgcgagcgatattttggagaggagaaaagtcagccaaaaccgggagaatttcgcaaaggcaaacggagtgatcgtcaacaatttaatgcagaatgcttttgtcttttagaattggtcactttgctaagtgaggcaatcaccgttaattgtgcgtacaattcgatgattgttgcgacgaaaaaggcgggcgaacggattcaacaattgggcaacaaaacggaatgtgcacttttgggctgggtcaggcaaatcggaggagattatgagaaaattcggagagagtacacggaggaagacaattacagagtcagtcgggaacggacgatgtcccgttttacagtattcgcttgctgaaggtgtacaccttcaactcctctcgcaaaatgatgatgaccgttgtcgagttgaaaaatggggctggtcgccgtgttgggttccgtgtttttgtgaagggtgcctcggaaattctgctgaacaaatgcgctttttttctcgacgccaacggatcaccgactgaattcacggagcatcgaaggaaacgaataattgacgaagtgatccaacggatggcggaggacggactgcgcacgttaaccatcgcgtacaaagactacgttttggctggggaacgaactgttggcccaacggaggttcgggaatcgccggtctcatttcttgttgcctattttttcaggtaccactcgattcagaagcagcagtcaattgggacgatgaacagagtatttcggatggcgtcgttgggttggccatttgtggcatccaagacccggtcaggtgagtactttttgcgcttttttgttcgggtttcatttttattgatttcttttcctttcttattgtaagagacgaagtgccagacgcaattgaaaagtgtcgccgtgccggcatcaccgtccgaatggtttgtgtcttttgcgattgctttcattcatatgcccgcccgtctccctgtaggtcactggtgacaatgtaaacactgcacgcgccatcgccattcggtgtggcattcttcgaccggacgaggactttttggtgttggaggggaaggagtttaacgaccgaattcgggacggacgtggcaaaattgatcaaaggaagctggacatggtcaaaatgggtgtggacaagtaacgaacattttgacaattatttcacagatttggccacgtttgcgcgtgttggccagggcccaaccggcggacaaatatactttggtcaaggggatcattgacagcaaattgaacacacaacggttggtaaaatgtgtttgagaatgcgtttcgcattttaatatcactttaactgcttctttcttaatacgattaatttatccatttccccagtgaattgtcgctgtcaccggcgatggcacaaacgacggacccgcgtt

SEQ ID NO: 70720 - DNA, 926 bp, Heterodera glycines
  unsure (1)..(926): unsure at all n locations
aaagtgtccacagacttttggaaaaatatatttgcaatttatcaacaattttgagaagtgagttagaaatgataaacttcacgattcaaaccaattttcgttgctctaattaaccgcgataaaaacattcgaatcaattaaatagcttctgagataataaggtttatcataaaatgtcatttaaaaataaaccctcaattattggtgtgaacgatactttccaaacatgcacgcgttttgcgctcgagctatttatcattgggcttgttaatccaaagcgaaacaacaaagatggtgttttgaacgaataaagggcttaggttattttgaagaagtgtcaaataacatgcagcaataagcctgcaaaatctaataagtggaaaatacatgagtatagaatttattttcagaaagtgtcaacagacttttggaaaaatatatttgcaatttatcaacaattttgagaagtgagttagaaatgataaacttcacgattcaaaccaattttcgttgctctaattaaccgcgataaaaacattcgaatcaattaaatagcttctgagataataaggtttatcataaaatttcatttaaaaataaaccctcaattattggtatgaacgatactttccaaacatgcacgcgttttgcgctcgagctatttatcatcgggcttgttaatcaaagcgaaacaacaaagatgctgttttgaacgaataaagggcttaggttattttgaagaagtgtcaaataacatgcagcaataagcctgcaaaatctaataagtggaaaatacatgagtatagaatttattttcagaaagtgtcaacagacttttgganaatatatttgcaatttatncacaatttgagaaagtgagtagaaatgataaacttcacgattcaaccaanttttcgttgctctaa

SEQ ID NO: 70721 - DNA, 205 bp, Heterodera glycines; identical to SEQ ID NO: 42923

SEQ ID NO: 70722 - DNA, 305 bp, Heterodera glycines
aaaattccctcaaaaataaaaggtctattgtgcaccgccctccctatcatgctcgagagcttttgtatgtgtataaaatttatcaaaaaaagagatagccatttttctgggataacctctaaatataaaaatcctctgtgaaataaaatggcgattgtgcaccgccctccgtctcatacgcgagcgcttttgtgaggtataaaatttctcaaaaaaagagatagacatttttctgggatagagtataaatttaaaaattccctcaaaaaataaaaggtctattgcgcaccgccctccctatcatg

SEQ ID NO: 70723 - DNA, 304 bp, Heterodera glycines; identical to SEQ ID NO: 51570

SEQ ID NO: 70724 - DNA, 703 bp, Heterodera glycines
atgaacaaatgcgcctcacagcgcgacttcaaccagtccacctggaagaaagttggcaaaactgagcagcgtgagcacttttttttactaaattttataaatttaatgattagagcgctgcaaatttggatataaatcacgaaatatgtgccataaaatagggccaaaaatcatgcaataaataataaaatggcaattcaatttgaatgtataatttctcaaattttcttcaaacttgtcataacggctttatcagagttggcaaattgattgccaaaattggcatcatattcttaaacagagatgaagcatttgcttggccaattttaggagggcatttctttttaaatttttgcataatcgctttatcagagttggcaaattgattgccaaaaattgggatcatatgcttaaattataaaaaaaatacaactttatacatgaataagctgcatattgctttattgctctttcttttccaaaaaatcttttttcattaaaaaataatgtaaaattttttattttcattattttcaataccaaagtattttacggtgaagcacaaataatcagcttgcgaaatttatgaattaaaaaataaaataaattttcagatgaatgcgagtatttttctgctgttcgcagtttgctgttcttttctggcccattattcccaaggaatgttttctgggctcagaaataa

SEQ ID NO: 70725 - DNA, 523 bp, Heterodera glycines
atgtttttcactgggcttgaccgactcatttgtgttcttttcccggaaaagtaaggcataaaaaaacatcccaaattaattgacttaattatccaattaaaaaaggcactccaaaattaatttgcgcttttatttgggcgcgattacttttgtctgttctctgttctccgctgcgttactttgcacactctttttgactgctaaacagctcaaaggactgatgatcagcggatgtatcgtcgacattgtccaagtccaaaaaaataaaaattatttatttaaattgaattttaaaatggaattcattaaattttagggtccatccgttgcatttttcgctctttccaatttgctcacaaatctcgtgaccactgccatttatttggccatcggaatcaccgtcaaagccaaaactggtaattatatttaataaaaacgctttttcatcccaattaaccttcattttttctttattttcagcttctttcgccgcccaagcgaatctttccgccgcggcgaataa

SEQ ID NO: 70726 - DNA, 339 bp, Heterodera glycines
atgcctggatcgagccatgacaagcctggattttttgggattcgttatttgatcccttcccaaattcgctgcccttttcagttggccgttgtcgctgtgatgagtgctttcccgttcatgcatccgcccatgattgcatttgtgcggcacaatgtcggactttatttgttgggatagtgagttttggcactcaattaattgcccaattaattaattggctgaaatgtccaatttgttgctctgttcagcatcactttcttcgtcgtttacattgcattgatctgttgcgagggcgtccgtcgatcattcccggccaatatcattttgcttggcattttg

SEQ ID NO: 70727 - DNA, 709 bp, Heterodera glycines
atggcctacagtatgcttggcattgtgttcatcgccacaatgtgtttggcgttgttcggcttggttgtgatcattgtcggaatgttcaccaatgtgcgcattcttttcgttgtttacgccgcgattggggcatttctgttcatgatttggttggccattgacattcaggcaagcaaaatggggcagcagccgaaatttacgaacggagtgacaaaagcgaagccattcgttgaacgtcacaaaaattggcaattttaaattgcaaaaattttttgtcaaactgctcaaaattcgatagccctgcatttaaaaaattaaatttcaaaaagtgtccatgatttgtcttgttaaaatttaatgaatttttaggattttttctttctgtcgaaacgtccgcttggcggatttacaaaaagtatcaaattctctaacaatgttcttatcaaaatcgaggggatagccatgaaaattgtttattttataattttaagaaacaaaatattcaaaatcaatcatcctcctccccccatttgctttttcagatggttatgggcggtcgtacctacgaaatttccccggaagagcacatcttcgcgtcgattactttgtttcttgacatcattcaggtggctttctcatttaatccaaaatataatgtataaatgttttttcagattttctggtttcttcttgcaatttttggagatcg

SEQ ID NO: 70728 - DNA, 537 bp, Heterodera glycines
  unsure (1)..(537): unsure at all n locations
atgttagcttttactaaaaactttaacattttagtaagtaatatcatttttgtttatatccttcaaaaaaattttaaaggatgtttttcaaatttgcataaaatatgatttaaaaattacctcaaaaataacagtttttaattctttaaattgtttataaacaaagaatataatgtataaaatgattacaataaatatatctaaaaattaaagtaaatggtataagtgaaaaaaattaaaagcttatctcaacaaattcaacaaataagcacttgatttcttttaattaattatttattacaaaaataaattatttttattcttagtcaatttcacctatgctaaattaatttaatcttttaagtcatttattatttattatatattttttatttcagaaaacgagatcagatttagtcgatcattgagtaatgttcccaaagcttatttattgctttgaattttgatttcttanataacaataataatagaatatgcatcttaaaactgatttgtagtaaacaattttttaataaa

SEQ ID NO: 70729 - DNA, 207 bp, Heterodera glycines
atggacacgagcagccaagagctgaacgcgtgtgccgagtgcggcttcaccacccgggactgggcactgttcacgcgtcatgtggaacggcacgaaagcgccgatggcatcattaacagttggaaaagttcaaagactgtgccgacaacgcccgaggcgatggacgaaagcgtagaagcggaagatggtggtggcacagattttcag

SEQ ID NO: 70730 - DNA, 367 bp, Heterodera glycines
cattatgatgcgctaaaattatcagagtgccgaaaatcgcatgtgatctaagcctagcaaaaaatggtgtaagtaaaaatcgtaattacgctcaaaaagctcctcaaacaattttagcgcttccaattccttctacaatcgcctttatacatcccattatgagcgctaaaattatcagagtgccgaaaatcgcatgtgatttaagcctagcaaaaaatggtgtaagtaaaaatcgtaattacgctcaaaaagcttctcaaacaattttagcgcttccaattccttctacaatcgcctttatacatcccattatgagcgctaaaattatcagagtgccgaaaatcgcatgtgatctaagcctagcaaa

SEQ ID NO: 70731 - DNA, 715 bp, Heterodera glycines
atgacggtcggaggtggcaccgatcaggagaaggagacgaagttggcggccggaagtggcattgacccggagaaggcgaagaagatgacggtcggaggtggcaccgatcaggagaaggagaagaagttggcggccggaggtggcattgacccggaggagacgaagttggcggccggaagtggcattgacccggagaaggcgaagaagatgacggtcggaggtggcattgacccggagaaggcgaagaagatgacggtcggaggaggcacagatgctgggaaaggggagatgacggtcggaggtggcactgatcaggagaaggagacgaagttggcggccggaagtggcattgacccggagaaggcgaagaagatgacggccggaggtggcaccgatcaggagaaggagacgaagttggcggccggaagtggcattgacccggagaaggcgaagaagatgacggtcggaggtggcaccgatcaggagaaggagacgaagttggcggccggaggtggcattgacccggaggagacgaagttggcggccggaagtggcattgacccggagaaggcgaagaagatgacggtcggaggtggcattgacccggagaaggcgaagaagatgacggccggaggaggcacagaggctgggaaaggggagatgacggtcggaggtggcactgatcaggagaaggagacgaagttggcggccggag

SEQ ID NO: 70732 - DNA, 815 bp, Heterodera glycines; identical to SEQ ID NO: 42941

SEQ ID NO: 70733 - DNA, 647 bp, Heterodera glycines
atgcgaaaaaatattccgacggaattactttttgaaattatcggtgcaattccattcgacagaaaatgggctcaaatccatgtgtcccaagtgtttaaccattttctgttcaatcgtatgggctcgtggcttagtcaaatcaaaaatttggtgagtttttaaagggtaatttttcacgaatttttaaaaaattctttaaatattttaaattccattggccgattattttttgatttttttttgtcaaatcattaaatttttggcagattgccaaatgtacgtttctcgtgcgaagcatagtgaaaatgatcagaacaattcctgataatttgctgcttagcaacgtaattccaattaaacaatttgaagcacagattttctataagggttttaatttgaaataaaaattaattaattttcaaataaaatttaattaattataaataaatttaattaattaaaaaaattccaaattacccctcataaaagaccttctttacttcattggacgttggaccaattgttctcgcatttttcctgaactcattggcttgccgcttaactcagacgaccctaattacgtaattaaagcgctcgaaaatattttaggtgttcgtatcattacgtagttgtttttatttaataaa

SEQ ID NO: 70734 - DNA, 68 bp, Heterodera glycines
gacataaacatttatttgatttattttaccatattcacaatttgatcaaaatatagggggtcaaaagt

SEQ ID NO: 70735 - DNA, 654 bp, Heterodera glycines
atgacggtcggaggtggcactgatcaggagaaggagacgaagttggcggccggaggtggcattgacccggaggagacgaagttggcggccggaagtggcaccgatcaggagaaggcgaagaagatgacggtcggaggaggcacagaggctgggaaaggggagatgacggtcggaggtggcactgatcaggagaaggagacgaagttggcggccggaagtggcattgacccggatagtgtaaaatgcactattttcttaagaaatacagtactttttataggcaccgaaataaaagtcgacgtatgtcagcgggcctaaatcgtagacccactattccaaaggcaatacggtagcaaattttgtgctctataaaatgggcctactcaaaatttccagaaaaattttcccaaccccctagaaattttttttgaaatttacccctcgttcccagccaaaatgggctgatcagatcaccatgaaggagtgatctgatcaacttggtgttgctaccttttttgatcagcatccaaagttatgcttacctgaatttttttagatttttttaatgctgatccagagaagcaatattttaaaaatgaaatgggacaacacttttgaccccctatattttgatcaaattgtgaatatggtaaa

SEQ ID NO: 70736 - DNA, 355 bp, Heterodera glycines
atgcgtaattcatttgactcatcaaatgcgattggactcataaagtgcaataaaaccctcgaaacaccgaagaaaaaagacattttcctaaactttggtaaaatgtgagtgttttttttgtaattttgtgcattttcgtcaaattttccctatttgtccccccccccctcccaatttcagccggtttggcggagaatgtgcttcatttgttggacgccaagtcgttgtgcgcctcggagtttgtcagccgccggtggagtcgtgtcattgtcaacggattgctgtggcgcaagcacatcgagcgccaagtgcgcaacgacgcgctgtgggccggcctcgccatccgacggggatg

SEQ ID NO: 70737 - DNA, 527 bp, Heterodera glycines
atggagcccggtgcgaagaagcgcagaaaaaggaagaatgccgaaaacaccgacggcgagtctatggaatgcgaagaagaagaggatgccgtagatgaggacgccgagaacaactggatgctggggtacgaagaagccggggagaagccggagtcggtgacaacatacgcgtacgcccacgccggtaattttggaattatttaaaaaaaaacttggaagaaataaaatttaaaggttcccgctacgatcatgtgctgatttatggtgaaatgctgcgcatgggtgtcagccctgaactcatccaccaggggaaccatctcctggaaatgaaggcccgcaaaacaggagtctacacaaccaccgttttccgggacaggtaaatattttgaatattaaatatttttaaaatttttgatcattttagttacaagttgatcccaataaaacttgccaattttgtcaatacgtttggcctagaaattgagggcgtggaaaacaagaaatattttccacacaaattcaataag

SEQ ID NO: 70738 - DNA, 469 bp, Heterodera glycines
gtttcaaatatcgtaagattgtttgatagggccagacaagagaaggcaactgttggtaccaattttgcggtaaaaaaatgagaaaaaagagatagacattttttggtcaagaattttttttgtttgcgtttcaaatatcgtaagattgtttgatagggccagacaagagaaggcaactgttggtaccaagtttgcggtaaaaaaatgagaaaaaagagatagccattttttggtcaagaatttttttttgtttgcgtttcaaatatcgtaagattgtttgatagggccagacaagagaaggcaactgttggtaccaattttgcggtaaaaaaatgagaaaaaagagataaccatttttggtcaagaattttttttgtttgcgtttcaaatatcgtaagattgtttgatagggccagacaagagaaggcaactgttggtaccaattttgcggtaaaaaaatgagaaaaaa

SEQ ID NO: 70739 - DNA, 314 bp, Heterodera glycines
atggccaaaaatgaaattttagcgcagaaaaatgttgaaaaagaatggaaacaaaattatgtagaaatttgtaagaaaattggagtcatccgagacataattaacaaatggaagaaacaatttggaattcgctgtaaaagaataacggaggaacaaaaaatagaaaaaatgaaaatttattggcaaataaaaagtgaaaatccaaaaatgagtgataataaaattgcaaaaatattgaaaattcatctaaagagcattttcaattggaagaaacaatttggagaacaaataaacgaggaatgaaaaagggataa

SEQ ID NO: 70740 - DNA, 557 bp, Heterodera glycines
atgggttcaagcagttctagcaatgcgggctcgttctcatcagcatttgcgagtagttctggaagtgcgcgctcatcaagtcagggctcttcaaaactgttctgcagtgaagctttctgtgcctgtccccgttctcaccttcgtgccatcgaattcaagaaggtcgccgttgccgttgattcgggtaagagagtataagttttgtaatacaacaagtaactgtagaaatatacgaaaattaatggaatttcatgttgaatggtaaaattccttttctttctacagtaataactttattttggtccatatttggccatttttgagctttttagtccatatttcgggcttttttagtccatattttatgtccatatttgggatttttcagtccatatacttattgtataaccctagtaatgacttatccccacgcggctgttgaagtgctctacatatgcaatgactgtgaccatgaactgcgtgtcacgtacgatcttgtgttcaatttgcaccttctaaggggtcagtcaattaaaggaagagttgaagtcatttaa

SEQ ID NO: 70741 - DNA, 274 bp, Heterodera glycines
ttttttaggtcgattcttaggggtgtattttttgttcttattgcatttttgttaaggaattttccaaaaaatgtcgaatagtgaaaaaatagtgacaaaaccccaaaatagtgatttttaactattttagtgacgaagtcgccaaaatagtgatttttaactattttagtgacgaagtcgccaaaatagtgatttcagtgaccgataatgacatcagaatcgaaaatttttaatgcagaaatgcgttttttgagctcctttcttcaaaacaatt

SEQ ID NO: 70742 - DNA, 2695 bp, Heterodera glycines
gccaagagctgcaactgttatttgtttcatttattttaggccagttttcccgagttggtcgacctgttgcccattcaattgtccttctccgccctgtactttctcatttggttggccgcaattttgggcaatgcttccgtcctttatgtggttagcttaaaacaggcgagttttattatgcataatttggggattcgagaataaatgcatatttcgcattttttaagaatattttttatgccgacttttttaccaaaaaaaaagttaaaaaaaattatttagcaattgttttgatattttatcatttttatatttttaaacaagttttacattttttggcttaaatcatttttggcagtttttagtgcatatttgggccttttcatatttctagggcatatattattaatttttcgtgcatattttatgcaaattggcatttttgtacataaaacgaacacccttataattagagttttgggttgttagtaatattttaggccttaaaatttcaattggttctttgcccaatttttacaattcaataaaagggaaatattcgaattcgagttcgatatttaaaaaaagcctgggtaaaacggaaaatagactctctaaatccaaatataattataaatatgtctttttcattttcggtccaattgtcatcggtgcgttcggtgttcatctgcagtttggccgcatccgacattctcatgtcgttcacttcattgccgatcaccgccatttcaatctttacacgtgattgggttttcccttctccattttgcaaattgatgggcattttccaagtcattaatatttaatttttttaatgaattttctttcaccaaattagcagttccgcgaaaattattcaaaaagacagaaatatgataatttaaagtttgctttaatcatctccgtcctcctccattaatgagctgctaattcggcataattaaaacattttttcatggatttaaaaaatttgtatttttcattcgataagaccggatcgataggacatcgataggtgccgcagtgaaaattaatcaaaaaaaaattattggcaatcataatttacacatttgtattctcaatgttttcaaaaagtcagggcggcacagtttttgtgtccagcttcacactgaccgcaattgctgttgaccgttacattctcatcaaacacccgacaaaacaggcaatataatttataaatatttttttattaataatcataatttaaaattgcagaaaattgaatttcgcaccgcaatttgcattgttattggcgtttggacattgggttacgcttgtgccttgccggttggtcttttctcatcaacgcaagaatatccaccattttgcggcacattttgtgaagaaaattggtaaaaaaaaaagttaaggggaaaaattgccaaaattaattaagttaaattgttattaaatttaacggaatttaaaattaaataggccagacacggaagaacaaacggggagaagtcggattcgtaagctgtacggtttgcttgtgctgattgttcagttcggtttgcccactgtaatctcttcgctgtgctattggaacatcggtttttaaatatttaaatgatttatttgttaatttattttttattttttaaaggtcgactgattcggcgccaaattcaaaagagaaaggaacggcaacttgtgctgctgcaggaaagcaaagacagaatgaaaagtcagaagaacaggacaaatcggatgatggtcactatggtaaaatactgtaaaaaaatatgatcaaacttttgaaaaaatttcaaaagtccattaaatattcactatttaaatcacacgaatgctttgcttatctttcccgattaatcccggcccaacagggaccggaataaaacggataaagattctaaaagatttgagaagtgaaaacataattttttcaccaaaaattcctttttttccttctgatcaaggttgctggcttggtgttggcctggttgccaatgaatttgatcaacctttggcgggattttaacagcgaaaacagtgccaactccgatgatgccaaatctgttcgatcaaaacccttccctttttattataattttttattgaaaaagaatttagaacgaatggtattctctgatttttgctgcatgtcattccgttgcgatgacatcaggtaaaaatgataattcaaattgaaaataataatataatctgaaaccagcggtatggaacccattgatctacagctttttcaacccacaattcaaagagacaattcgcgcgtctttggagcggcgcagaaaatcccaggtcattaaaatttggtttatttgcaacttttcaaaatgatactttgatcatctgggagttttttggcttgtcactttattttttcgtctcctttattcattttttatggaaaatttgctgataaatgagaaatggatgactgtgaaatgagaataataaaaatggaattaagcattaattcatataagaggacatttgtgtccatagaatatttaaaaaatttaaaaaaaattaggcagtcacggcacttctgatgactcagcaacaaaccaacgccaataccagcgagtcccggagaacatcatgccgaagtttaaatgtgcttatcacaaacaacgcgccatctgctggcaacagacaaagc

SEQ ID NO: 70743 - DNA, 795 bp, Heterodera glycines
atggtgaatggtgaagaaaccatcattcaatcggttggtgcttctgttggtttctcagaccatgctgattgcttcggcacgaatgaaccgtctcgactggccgaagaggattcaccgcgaggagagatcatgaaagcactccttgccaggcctggaagaagtggactgaaagtgaccactcaaaaactgattgattatggtcttggccaaaagacggcaatgccatcagtagcgagactcaacgaggaacaacagcaaactttggcactcattgcatgtgaccttcctttggttgtgttgcagcaagccccgcctggcacaggtaagacactaacattggctacggccatcgaccttcttttgtcggagaaaaatgaggaaacggtcattgtggcgacagctacgtctaaccttcctgtcaccaaaatggtggaagaaactcgggcagttggagtttcggaggaacacttggcactcttcagtggaacggccagagtgcgctacggcgagcaaattcaaccgttggaaagaagtctgctacggccaagactcacgcagacattcttgaaaaaagtcaaagacaagaaggtaaagcaatttgaggactacaaaaagcacgtgtttaacacacctctgcgggtccgagaagcaaaagtggctgaaagttatctgaaatacgacaaaaggaaagttattttcctcacgactcacatggctggtcgcatcaaaggaacgataagtcgagcaacccatcttcttttggacgaagcaacgcaggcaagtttcaccaccgta

SEQ ID NO: 70744 - DNA, 283 bp, Heterodera glycines
atgcttttgtgggagaacggacccgaggacacttccttttaccacgcgctcagaatttgctccgaagaagcgatggaacagaacaaaaaagcgccggaacaaaagaaagtgaaagacgcggaggatttaaacatggaaatattcgccaaaatgatcatttgcatgggcaaaaggctgaaaatgccacgccgaagggacgcaattttgaacggaatgcattttgacaaattggcaaaattggtggacgaatgggaccaattcggcaaaatattggggcaaaaaa

SEQ ID NO: 70745 - DNA, 1104 bp, Heterodera glycines
atgaccaactggcacaagaagggacggatggacggaggggaaaagggggaaattgaaggagaggcattaggagaggcggaagcgaccgcggcggatgaccatcaccatcaatcccaattcgaggaaggacggaggaaggggacagatggaagacggaggaaccgacggcggggtaaaagcggtggccaaagaaagggtcaaattaatggccaaaagaggggcgtagacataaaatataaagacagacagacagacaaagtgatggatggccaggccaaactgtggtctgtcggaataaaagtaaaagtgtaaagtgaaaagcactgaccgctacggcgcgcctaaaatgagaagagagagaaaaaagggataggcggagatttatactttatatacaaagaaaattgaagatcagtgcgtactttgagctctcagactttcgtctcccccggcacattttgccgtctttcccccccccccttttccgctctcttccgccgattgctctttggccggcattgccattccagcggcgaaatatggaagcgtaagaagccactgataaaaaatgcacaattttctgcataagcaagcgatgaatccgccgtccgtcgggacacaacggcaaaaatgccattggtaagcggtgccaacccaacctttaccctgccccgtcctccgcattttgccattctctttttgcctgctataattcaatcataaatttgcatacgccgcgagggaatccgtccaatcagtgggacaaatcaccaaacaagctgatcggagatacttgtgaaagtaagactgatctttgagcaaagtttgagtgatcagaacaatcggtgcttactcaaaaatcatcaaatggaaaatattaactttgttcaagagtttttcgcgcatttttggtcataacttttttgaaactaacaataagcgaaattttgcaattttatagagaatagaaaaggctacccgacttttggggatttgcaacttggggacccgacatttggggacccgacatttgggggaccgaacgaacatttgagcaaaagacacttaagaaaaccacggacatttggtaacccgacattttag

SEQ ID NO: 70746 - DNA, 56 bp, Heterodera glycines; identical to SEQ ID NO: 57643

SEQ ID NO: 70747 - DNA, 936 bp, Heterodera glycines
atgcgattcttggagcaatcagacttagcacggggtgtgctgcgcctggcacaatttgccacgcgccaaacgctggcggcgctttccggcaacaattttgaggctgaaaaattattggagtttaacatattgtgcccaatcataattagcgcgcaacagcaacagcagaaggtcgattttgacaagatggtcgagaaatgcatctattcaccagaaaagtgagaatttaaaacaaacaattagtgtggttaattagggagtgaacaatgcattaatgaaaatttaatttgtcaaatttttgatttaatatttatttggattgttataattaattagaaataaaggaattaaatccttaatacaaaacaaattttgcttaattgcatttttgtagttatggcgtcgcttctgtttttgctgagttattgcgcaaagctattgtcaaaaatgacaacaaaaatgacacaatttttcaaagtgcaaaaatttattcggaactttacacggcgattttaaaaatgcaaaaagaggtcaatttggaagaatggcgaaaagtgccaatgccatttgctatggaatggaataaaatgaacaaattcctaagcgaaagtgtcgaagaaattgacacatttgttaagcgatgggaggaaatgggaaaaaatgaaaaagaaaccaaaattggcgaaaatgtgaaaaaggagggctttttcagtgacaatttgttggaaaaatgcattccgttcattgtggagagcagcaaaaagggaaacagaacaaacaattgaggaaaaagagaacgaagaacaaaataatttagattttattaaaaagagaaatgaaattaattatttcagtgtcaaatttcatttcttttgtattgttaaaaattggaaaaaaagaaatcattttttcattaaaatattttgaaaaaataaa

SEQ ID NO: 70748 - DNA, 2884 bp, Heterodera glycines
atgaaagaatcaatgaatgattggatgattattattcaccacaaaccaaaagagcaacagaagcaaaaggtaattaattaattaattggaagaaatttgaggatttcgagttgaaagtaaataagtaaattggaaatgcaaacaaaagcataataataatttaaattaaggggtgcaaaaatggccataaaatatagaaaagaaattcccgaaaatgaaaataaaattgaaaagacaaggacaacatatgttttcagattgtaaaattactcaaattcttattaaaagctaaaccaagttcaaaccttatttttcacaaaaaaaaatttggacttgagatgttttaatgaattgcatttcttttatgtatttatagaaaattcaattttcccttctattcgcttatttttattttttcaaaatattttaatgaaaaaatgatttctttttttccaatttttaacaatacaaaagaaatgaaatttgacactgaaataattaatttcatttctctttttaataaaatctaaattattttgttcttcgttctctttttcctcaattgtttgttctgtttccctttttgctgctctccacaatgaacggaatgcatttttccaacaaattgtcactgaaaaagccctcctttttcacattttcgccaattttggtttctttttcattttttcccatttcctcccatcgcttaacaaatgtgtcaatttcttcgacactttcgcttaggaatttgttcattttattccattccatagcaaatggcattggcacttttcgccattcttccaaattgacctctttttgcatttttaaaatcgccgtgtaaagttccgaataaatttttgcactttgaaaaattgtgtcatttttgttgtcatttttgacaatagctttgcgcaataactcagcaaaaacagaagcgacgccataactacaaaaatgcaattaagcaaaatttgttttgtattaaggatttaattcctttatttctaattaattataacaatccaaataaatattaaatcaaaaatttgacaaattaaattttcattaatgcattgttcactccctaattaaccacactaattgtttgttttaaattctcacttttctggtgaatagatgcatttctcgaccatcttgtcaaaatcgaccttctgctgttgctgttgcgcgctaattatgattgggcacaatatgttaaactccaataatttttcagcctcaaaattgttgccggaaagcgccgccagcgtttggcgcgtggcaaattgtgccaggcgcagcacaccccgtgctaagtctgattgctccaagaatcgcattcgcttttcctgatgtaaaataaaatgaatttttattttgcaatgattaaataatttttatttttctggtcactgttatacagtatacgtattttaccatctcttcttgatcaattcttgacgctccaacgatcgcataaaattcttgcgacatttgagccaacactgtgctaaaccaactgagcatccattttctcgttgaagctatgtcgatgaccttaattaaatgacaattaatattcaaaattcactaaattgtgtgtcatttaccagaatgccatcggaggtccaagaaaaaaaggacaaaaatggcaatatttaaaaccaaaacttttggattttggaaaaggggtgttcgaacagagaccgcgagtgtttttttattttaaaaacctgacctgaatatatctttttttttgcacgtttaatgaaaaaacattcccaaactaataaaaggactaaaatgttaatgctgcttctctttaatcatctgcacagatacactactgtatactgtggatgttcttactgtatctttttgactgtaactttggtatggagtctctaattctacgattaattttgtgatgagtcgcgcacaaaaatagagcattaattgttctttgtgttcgtttgtctgctcttcctacaatagcgggagcagggagttgtactcccgtaaaatcccacggtagtcctgatcccgccgcactctattgttaagctattaattcaacttttcgcccacaatagctgatctcttttccaatcacacggtgcgctgggaattgtttcaagaaatgtcctccgaagaaaatgtgataatttttggcattgaaacgtaaaatccccaggtaatctaaaggtaattgtttacatttttgccgcatatactgcaatacgatggatcgtctttggggcggacattcaaacggattcaagaaatgtggacagtacttgaaaagtacttcagatcactgagagaccgtgattgtcccaaatttttgcgtcaaatttttgatgatgaattgacgccaaggtcagaggaatggaaagttgttgtgtgctttatgtgttttgcattcgatcagtttaaccaattgaatgttattagccaggtagtacttagaaaattactagattaattttaaaaaattcagaaaccgacacttccgttttccattttggccaaacaaattaaatcattaaaggtgaagctgtaactttcattgaacgaggagttttatggggaagcgaccagtgaactcttgaaacaacttgaaaatgatggcgctatttatcaaaaaaacaaattaaaggcctgtttctttaataaaatattggttttagttttgttttttcagcaattttacgcggacgcacatgaatatttgggcaattggtcacagcaattctctgagacggatgaaattattggagattgggtcattttcgagtcagagccaactagtgaaaaagttcgaagggcgtataggcatatttctgtggggcatcaactgacgaaatggatgctttgtttg

SEQ ID NO: 70749 - DNA, 500 bp, Heterodera glycines
atgaaccagggcagcaacaacaacaatggcggtggtgctactgcaatgcctatgccaccaaatggtagcggtgcgtttgccatgtccccctccacgtttgtgccgtcgcatccgtctcccctcgccacttcgtcgtctcctccgcccgaatacgcgccgccgcctccgctgccggcccatggcgctggtgcttaccgacagcaaacgacgggcggagtgcgtttttggattgcataaatttttcgaaatccgaattttttaaataaaaaattcggggaaagacgggcaatctcaaaatttttattggataatttaatacaaacagcaaatggatgacaaaagttgcgttatttcagcacagtttccctaccggcgacctcgccaacaaaagtggggtcggcgccgtttatccatcggcgcatccgccgcccgcgggcactccgacgcagcccttcccaaacgcaacaccaccaccacaacaacactaccaacagcatttg

SEQ ID NO: 70750 - DNA, 484 bp, Heterodera glycines
atgaaaattctcattttgtgccctcctcaaaggtgcgaatgggctacttttttttcgcactgcgacggatggtggcaataattgtgcggcacataggtgccgtgccgaaacagtcgtttgcgatcagtccaatcgtatgggccgtgccgatttttcacttaaaacaatcatttttaaaacaaaggctttcatatattcatattagctaataaataatacaaacattttatttgtaaaatattaccaagccaaaagtgatcctcaattgtctcctgaattaaaatttttttttattgttgaattaattaaattttaatatttcattttttcctaaaattaatttagttgatttaattatatttaaatatttttatttatacatttgcagcaattgtctgctcaaaatacagatgtgtgctgttgaaaatgtgcattcgactgaagccataattgcttgaacgaaatgcgctcctaaacaattaaa

SEQ ID NO: 70751 - DNA, 944 bp, Heterodera glycines
ttacgtggccccaccggctcctgttcatattatcagcggttctgcgggatgccaagaaaatacggacacatttgttgctcatcctggaccatggtaacgagtaaattatgtgccggaaattttttttatttttattaaattgccaaatgggcgggcattttttcaaccaaaatttcttataattttgctcaaaaccaagctaaatttaatattttgctaatgttctctctatttatattcattattttccaattttggtaaattcaaaattttttgaactttgttcaccatagtttgtgtaaaatctggtaaacaaggatgataaggatactgttgtcttctatgctaactacagtagttcgaaaaaaatcgcagtgattttacaattgaagtaatttaaattaaaatagtttattgaaattttctatcttaattataaaataataatttaataaacatttaaatattttattttaattgtttaggagcgcatttcgttcaagcaattatggcttcagtcgaatgcacattttcaacagcacacatctgtattttgagcagacaattgctgcaaatgtataaataaaaatatttaaatataattaaatcaactaaattaattttaggaaaaaatgaaatattaaaatttaattaattcaacaataaaaaaaaattttaattcaggagacaattgaggatcacttttggcttggtaatattttacaaataaaatgtttgtattatttattagctaatatgaatatatgaaagcctttgttttaaaaatgattgttttaagtgaaaaatcggcacggcccatacgattggactgatcgcaaacgactgtttcggcacggcacctatgtgccgcacaattattgccaccatccgtcgcagtgcgaaaaaaaagtagcccattcgcacctttgaggagggcacaaaat

SEQ ID NO: 70752 - DNA, 65 bp, Heterodera glycines; identical to SEQ ID NO: 56492

SEQ ID NO: 70753 - DNA, 59 bp, Heterodera glycines; identical to SEQ ID NO: 52421

SEQ ID NO: 70754 - DNA, 59 bp, Heterodera glycines; identical to SEQ ID NO: 68969

SEQ ID NO: 70755 - DNA, 59 bp, Heterodera glycines; identical to SEQ ID NO: 52421

SEQ ID NO: 70756 - DNA, 59 bp, Heterodera glycines; identical to SEQ ID NO: 52422

SEQ ID NO: 70757 - DNA, 518 bp, Heterodera glycines
atgtcggcgaaagttaaaacggaggcgtcgtcgccaaaacaaatgaacgaaaaggcggaagagaatgaattgacagagcgtttggagttagactttgtcgaagtgcgccttttttctcgatagtatttggcaccataaatccaaattgatggctaaaacttggcgaaaatggctaaatttcctgggttttcccaccgtgtagaaaaatttaagggaagttacatttgtcaaaaacttgggccagaagagtaaaaacttgtagagcctcttccgaaattttctttcttctatacgcacctgtttagaatgtccagtttcacccatctttatgaactgtttaggagtcagtcggcgacgattggtacggaaatgccatcatggaatgcgacgacactttagccaccgcagatgaagcggaggaggagggccactcaaaacgtcgcccgactcgccacgttcgttgtctgccccgcgttcccccgaagacgaagtggagacaattggtgccaaggaattaa

SEQ ID NO: 70758 - DNA, 987 bp, Heterodera glycines
atgacaattcttgaaaatagaaaaatgatgaacgattcactaggaaatgttcggtaaatgccgttaaaaaaaggacattaattatttcttgggcttttggatggactcaaggcatattttaggaatttaacagtccaatgtgtcaaggttgctttaaaaatcgtgaattttatttcatattttttattactttttgactttaatttccaaaaatatgtttttatggtgactaatatttaataaaatagaattcgatggattattaatgcatttttctctgagggttaacagaaaattggataaaataattcgttgaattttatttaattttgactgttaacttctaaaatatgctcaaaaagaggacaaaatcatggacaataatcttctattactttccatttagacctttaccggaaatcccccaaaaattcatctttttagattttggatattttttgagattaaatttcgaaaatattactttactaataatgaatatgacgtctaataatttctccacattattaatccgttttttcgctgattcttaacagaatatttgtccaaataattagccaaattgccattagctggactgtagagttcttgttaggacggggcattgctgaagctaaatgcatcgagcagcagccagccccgccaaagcagattttggctgtaaagcaaaattgtgcagtgagaaccaaaggctttgaagcacgtggtcaagtgcaacagcagctgaatgtgtgctggcgctgtgggcgaagctcacattttccaagtgtatgtccgcacattaaagttgcgtgccggaagtgcagcaaagtgggacatttggaagcgcagtgcaaccaacaccaatcgtggataataaggcaagggaaaatgcaaagtcgtaagcaaggcaacctcaagcttggaggtgtgctgatcaattcggtgaaccaaccgaaacggctgattgaatgccctataaaatga

SEQ ID NO: 70759 - DNA, 647 bp, Heterodera glycines
atgacaattcttgaaaatagaaaaatgatgaacgattcactaggaaatgttcggtaaatgccgttaaaaaaaggacattaattatttcttgggcttttggatggactcaaggcatattttaggaatttaacagtccaatgtgtcaaggttgctttaaaaatcgtgaattttatttcatattttttattactttttgactttaatttccaaaaatatgtttttatggtgactaatatttaataaaatagaattcgatggattattaatgcatttttctctgagggttaacagaaaattggataaaataattcgttgaattttatttaattttgactgttaacttctaaaatatgctcaaaaagaggacaaaatcatggacaataatcttctattactttccatttagacctttaccggaaatcccccaaaaattcatctttttagattttggatattttttgagattaaatttcgaaaatattactttactaataatgaatatgacgtctaataatttctccacattattaatccgttttttcgctgattcttaacagaatatttgtccaaataattagccaaattgccattagctggactgtagagttctaaaataggctttaaaaggggccttatttctgaataaa

SEQ ID NO: 70760 - DNA, 300 bp, Heterodera glycines
atgacattctatgcttctcttgttggatacacgggaagaaataatagttagtccttttgttgaatttttagaaattctatccgtccaatcggcttttggaattttaatgagtaaatcaggaaccgtaaatgaaattctatgcttctcttgttggatacacgggaagaaataattgttagtccttttgttgaatttttagaaattctatccgtcatatcggcttttggaattttaatgagtaaatcagtaaccgtaaatgaaattctctgcttctcttgttggatacacgggaagaaataa

SEQ ID NO: 70761 - DNA, 300 bp, Heterodera glycines
atgacattctctgcttctcttgttggatacacgggaagaaataatagttagtccttttgttgaatttttagaaattctatccgtccaatcggcttttggaattttaatgagtaaatcagtaaccgtaaatgaaattctctgcttctcttgttggatacacgggaagaaataatagttagtccttttgttgaatttttagaaattttatccgtcaaatcggcttttggaattttaatgagtaaatcagtaaccgtaaatgacattctatgcttctcttgttggatacacgggaagaaataa

SEQ ID NO: 70762 - DNA, 356 bp, Heterodera glycines
atgggtccggtgaagcatttgatggaagctgagcagaaaatgtgccgaattcgcaaccacggactccgatcactgaatcattttacgaccaatgcaattcgttcgaatcaatttttgcacgtaaattcaatttggttgactgttcctacaaagattcggtcagcgaattcacaaaaaaaaaaaaaatttgaatttaagaccgatccgccaaatgctcctcgggcagcgaattttgaaataaatcacttgggacccctcattagcaagtcaccaccatacgtcgccatggatttgatatttgttttcgaaattgtcaaacctttccatccttcgaacagctcatcatcaatgataag

SEQ ID NO: 70763 - DNA, 656 bp, Heterodera glycines
atgccagaatttaatccaatgactccaggaatgccaccgatgatgcctggttttaatccgatggtgccagggtttaatccaatgatgccgggttttaacccgatgatgtcagggtttaatcctatgacgccaggaatgccatcgatggtgccgggttttaatccgatgatgccagggtttaatccgatgatgccgggtaggaggaattgccgaaacttcaatataatttattgatgaatttcaacattctaatggccaaccctatttgatgaaacaaattttgagaagaaatttagttcttttaactgcttaaaatggattacaataaaaagcattagtttttttaaatttacgaataaatacttaatgcccattaataattattgtacaattagtaacgcagtttatgatttatcgctcttacagcaataacaattaggttaaataacttcgaaaattgtataaatttgagttgaaagtcattttttcaatttcacatcaactttatcttcaaaaatgccaagatgttcttgagctgtgcgagtcttctcatgctctaaaaataaatgttaatcaaaataaatttttttgtttcagtttttatttaaaatcttttttttaatttttaaatatttaataatgtaaggctaaccaaa

SEQ ID NO: 70764 - DNA, 49 bp, Heterodera glycines; identical to SEQ ID NO: 60106

SEQ ID NO: 70765 - DNA, 397 bp, Heterodera glycines
  unsure (1)..(397): unsure at all n locations
agttcatattattgtatggttggtcgtgttcagcattcaacagcatttaaagttcgaaagtggttcagcgtcttcgtttggcccgtttttgttatcagttatatccttggcgacaaataccaatattggcaattgaaaaccgggagacgaaagaacctttttgacgaattcgcatttcttcaggttaatgcggtcagcattttgttgcctaataattttccatttttaggaggcacaaattcgagagncaaaggcactttataacagtccgtacgggccgagagcctgagcnaatacaccgttttttggattatctgtncatgngcaccttcacccttaaatatttcttcaanaaggccgttcttgagcgcccgtggtactttttccccgcctttat

SEQ ID NO: 70766 - DNA, 1009 bp, Heterodera glycines
atgggcgagaaacgaccaaaaaagttgggtgtatttgtcgactgtatggaaatgacttatgaagacgccatgcgattttatgcgaagtatgtcatttatcgtcgggaaagtgccaacattttgggctggaataatcgctttttctcagatgggcgagcggactcgaagaattgtcggcagattgtgttcagcaacggctgagcattttccttggccgcggcgttcgggcgggtgcccaaatgcgaagtgttgtgatgcgatgtccggagatacttttcatgggggttcctcagcaaatggacatgttttgggagaatattttggatttcttcacgttaaacgacttaaagaaactgatggtcaacagtcctcaaatctgtttgatgagttttgaagaaattgaggaaatttatgaggtgagcgaattatttctattcttcgcgacaaaatttcctttcaaatcaatttccattttttgcagtacatttattttcacatgggaattgagccgggcgaattggcagaaagcaaatattggcatactcttgagttggaccaagtcatgtctcgccatgaatttctactcaagacgggcaaatacacttaccccgacccaaaaaagcctcaattgaaaaaggtactctggatattggaaatgttttagcatttaaatttgcatttcatggcttcattaactgtttctccgttaggaaaatccagcggctcgtcggatctttgacgttgacgaattggaatttgcaactaaggtcggctgtgtttcacatgaagaatgggtaattttccaagacatgagaaaacaggaagagattttgagcgaaaaggagcgaccatatgaaaggtgaatttaccgtagctaatatagatgatacggtcccattgagaagctcaaactcatattcctttaaacaacttcaaattatcataatggactaaaatttaaaaatttaccatttttgcctattttattttaattttaaattataataaa

SEQ ID NO: 70767 - DNA, 172 bp, Heterodera glycines
atgtccccacaaacaatttatgcaatgggagaaaacccatcagatacagtaagacgacgttgttttgatgtacggcaaaaccaaaacaatgtgtactccgacttttgacaaaaacaagcaacgaaaaacaaccaaatatccagcaatggtagttttgtggtttcttcgaaaa

SEQ ID NO: 70768 - DNA, 77 bp, Heterodera glycines
atggcaaagcgatgccgccgccgctgccacctgctgctgatgaagtggccgatgaggaggacacattgttgacctaa

SEQ ID NO: 70769 - DNA, 143 bp, Heterodera glycines
aggtcaacaatgtgtcctcctcatcggccacttcatcagcagcaggtggcagcggcggcggcatcgctttgccatctgctaatcacccatttgtttcaccaacctcattagtgccacaactggaggcagcaaactcattttgg

SEQ ID NO: 70770 - DNA, 529 bp, Heterodera glycines
atgggacctggatcccgcaggattttctgggcccatatcccggcttttaaaaacggctcaggaccgggaccccagcaaaagcaggatttgaataccggactcagggtactcaaattccggaaaaatgaactttccatcccggtattcttatctcggcctgatgtcaatgccaaattccgacttttacattatttaaaatttaattttcaaaattaatccatccgtttttctgcagttgtttttttttgcaatatgaatacgcttgctaatcgctgctctttttctaaattgtcgtccttttctcgttcgtttcactttttggcgaccggaaaagatttgcaaaaggttttattataatgaggagaaactgtgttggcactgttctgaaaatgccaatttttagttcaatccgatgaaaatgccatccgactttaaaagtgccgttggacgtcgtcagctgtcagtccaaagcaattccatttcacgagaggcatcaaatttgaaatcgtttgacgaaatttgtgctgag

SEQ ID NO: 70771 - DNA, 777 bp, Heterodera glycines
tcaaaaaatggcaattttaaattgtgaaatgccaatgccaaaaagaaataatttaaacggcgccgaaaaatgcctttccctcagggcggaaatgcggtggacgcggcggtggccacaacattttgcatcggtgtgatggacacgcaaagttccgggcttggcggcggccatttcatgaccattttcaacgcgtaaaattctcctccagggggatggggtagaaaatttttgaaaatttctaaaaaaaatttgacagtaccacccgaaaatgccacgtggtcgacgcgcgtgaggtggcaccggctgccgcaacggaaaacatgtacaaggaccggtggaacaagtcaaaatttggtacggtttgtcactgtgtgtgtgtgtgtctttttgtgtattgtaatttggctagcaaatttgttaggtgtacggtatcttatcaatcaatttttatgtactgtatatttgattctacatgatttggcttaattatcttttataaattgtgtatttggctaataagcatcaatcataatgggtgtatggtaactgcagtttttgtatatacggtatttggcacaacaaatactgtatttggttaattaatattttaatatacggtaattttgtaattaaagcacatcgtttctttaaattaggttgggaagctgttgccgtgcccggcgagctgcacggcctttggacagagtacacacattttgggggccaagtcagctgggaatcgattgtccggccgacaattcgactaatggaggaggg

SEQ ID NO: 70772 - DNA, 1870 bp, Heterodera glycines
  unsure (1)..(1870): unsure at all n locations
attttctttggctaggctatccgacatcgcacgcgctggcacatgcgttggagcagtacaaagcacaggtgctcaacgagccgaccatgcgccggcactttgtcaacccggcaacgggcgtggtgtacaagctgggcgagcagatcaaaacgcggacaaatttcatcaacacactgcgcgggttggccaccgcggcggaccccgtggcatttttctaccgcagcaatttgacgcagcaaatggtggacgagttcaagcggaacggtgcgggcgggcggcattttaatttagtgggggcgggggagggcggtggacgattgctgatcaagcactgacacactgatctgaaaattctgcaattaacaaatttggaggggtggggaattgattgggactgcccaaatgcgaaagtcggcattttgccgcgcgagccaagtgccgaaaacagggaaacgatctcgagactgaattgatgccgagcatttaaccccgagaattgagttcatggaacgaattttaaataccgggggatgattcgaacggctcccgttaattgacccgtgagtcaagatcgagagttttctccgagtattgagacagagaaaatcgactccgagactccaaaaaccagcaaaatttctcgactcagtaacctagattctcgtatattgtcaatcaattcaagaaaaaggctccaagattactttaaacatttatttatcgatttttcgatcattttcccatttttgttaggtggcattttgacgatggacgactttgccaattatcgtgccattgtccgtgccgatgccgacatcatttacactcaattagaggacggtcgcactgtttgcgggcctccgcccccatctggtgccgcggtgacacaagcaattctgtccattttggacccgtcagtgatttgacgcatatttatctatatataattttcgaattgtttggcgcgagggtaattaaccaactaattaccccactaattgtatttgaaaataaacgaaaccagaattgtaatgtaaaaaatccgggaattcctaacttctccctcttaccgtataactctcaaccacaccgggccaaatacggtacatacaagcattctctgattactgtcatggtatcgttcaatccaaaaaatcattgtttcaaaatactttaatttgtaataccgtattaccgtaccaccataaatttccactccgttactgtaccaagtattttcagtatcgtgttcaacaccagcaccatttctggcaacgtgggcttcctccaccgcttcatcgaggcatccaaatttgcgtatgcggcacggagttcaatgggcgacatggcatttgtgaagaacgcgacggagttggcacggaacatcaccagcaagtggtgggcccagttggccaggtgcgttttgtggggctgcactttttaaaaaatatttcagcgattttttgaaaattttttgaaaagtttcgaagtgaaatttaaaaaaaaattttcgggatggggggggcgaaaaagccgctcctgttttgtggcaccgatcggagtcatcccctgctgatcaggtagggacaacgttgagaattccatgatcatgggatgatttcaaaatggcattaatatcattcattattcattcttcaaggtccaagatcagctggggcacacatccggacgactattacggtggcggttaccaagcgctgcccaacgaccacggcaccacgcacatcagcgtggtggacaagcatggcaacgcggtgtccatcacatcgaccatcaatttaatgtgtgtgtttgtgtgtttggccaanatttaatccaatgatccaagttgggatgctaattgatcatt

SEQ ID NO: 70773 - DNA, 466 bp, Heterodera glycines
atgaaccaaattgtaattaattaataaagcaattattaaattcacgcaaaacaattacagtaaatttaacttttagaaaaataattttttaaaatttttctgtacagaaatggagggcgtcgttagcagccgaagctgtgaaagtgttgggaacaagtcaaaacaaagcagtcaatgttttggatttggaggtttcactttaaaattgaatattttttggcacaatgccaacaaaaattgattaattaatcgcaacgaattgcattttcaaggcgattcatctgatcgccggtggatatagtcagcagcagggcgaaaacggcacgggttacggtatgaacaacagcgaattgggcggcgcaggatacggtaacgagcgggactacggtagacaattctccaaattttccatttgaaaacattaaaattgcaaactttcaagatttaggattcttctcgggactga

SEQ ID NO: 70774 - DNA, 640 bp, Heterodera glycines
  unsure (1)..(640): unsure at all n locations
atggaattcactgacttttcagaaattgccttccgtcacgaattgctggacgaattggccaaggagcgctatgatgccgccatttatgaactgttcgatctgtgcggtgctgccattttcgagcgcatcggtgtgcgcaccaaattggcaacacttaccgtgccaatgtatcaaacgactgccgcccattttggcattccaacatttgccagttttgtcccaagtaaaaaacgaaattaatcattatgaggagaatcacaatttcctgttcaaataaatttgccttaatccgctattcacagattgggctcatccgccgctcaatgcgccggcgatggacttttgggagcgtctgatcaatttcctcaacactttttacgattggtacaaattgaatgatcgcgtcaccgatttgcaggtgcgttcggtgcatttgttgtccattgtatttttagcatttatttttatttttattatttcagatttttttccatattttacattcatatttcggtactttcacaaaaataaaaaccgaaaaatacacctctaaacatggaaaattttttggaaattttgtaaattgcaaaatttactaatttttgctttttttctaggttcaatatttttcaganaaata

SEQ ID NO: 70775 - DNA, 469 bp, Heterodera glycines
gtttcaaatatcgtaagattgtttgatagggccagacaagagaaggcaactgttggtaccaagtttgcggtaaaaaaatgagaaaaaagagatagccattttttggtcaagaattttttttgtttgcgtttcaaatatcgtaagattgtttgatagggccagacaagagaaggcaactgttggtaccaagtttgcggtaaaaaaatgagaaaaaagagatagccattttttggtcaagaattttttttgtttgcgtttcaaatatcgtaagattgtttgatagggccagacaagagaaggcaactgttggtaccaagtttgcggtaaaaaaatgagaaaaaagagatagccattttttggtcaagaattttttttgtttgcgtttcaaatatcgtaagattgtttgatagggccagacaagagaaggcaactgttggtaccaagtttgcggtaaaaaaatgagaaaaaa

SEQ ID NO: 70776 - DNA, 929 bp, Heterodera glycines
atggtgattagaagaagtacaaaagcgattagaaaaggtacaacagtgattaaaagagtgattagaagaggttcaacagtgattagaaaaggtacaacagcgattagaagaggtacaaaagtgattagaagaggtacaaaagtgattagaagaggtacaacatggtttaaaattaaataaataatgaaaagtttttataaaaatcgaatgcattttaatttaaaattttttttataataaaatactctttttattcattaaatataattttgaaaattaataattgaatatttattttgaaatgaaattcatttttataaattcaaaaaataaataatgaaattaaataaattcaaacaaaaaattaattttaaaaaatttttcacaaaaaaataatttaatttaaattaaaaaattaattaaaaaaaacaaacactcttttaaatgaattaaaaacattaaaaataaccaaaaatgcatagcaaaaagaatgtacaccgtccggatccgaacctgccccccccccctcaaaatgatgcctcagaatccccaatcacacagggattctgaggtcttaacgatgtctaaactaaaatctgatcacgtattcgtgatcagcggcccaaataacccctaaagacatatttttggaagaattttgtgaaaaaaaaattttccattcaaaaatcatgtgcacccccctttggtcccgaatcccaaaatcacttttatttttgtaacatctctcaaaaaagtgataaaaatgccaaataaaatttatataatagagcataaaattgcggatttttgtagtattttacttttacagaatgacttttcagaagcgagttctgaatttttttctgaaaaatctaaaatttccagaatttctggaataacttttttcatattgatgttagaaaacccaa

SEQ ID NO: 70777 - DNA, 668 bp, Heterodera glycines
atgcaggctggtacaactcagattcctggctttggccagttgtacattctggacccagtcgaggctatggaacagcgtcgaaacaaccccaggtttactggggagaaaatcacaaacgaagatgagtttgtgcagggtcaccagctaaatgagcagactcttgagatcttagaacaaatgatccaagtgcatcatcctgctgcgcaggcatataagcaggcgcgtgagcagctcactgagcttctccaacaacaatctccggaagagcttcgtttcttccgcatgactttgttggatagccgcagggctccagctggtcttaaagacccaaaattgcacgcacaccaaataatcaccccttctacgggtgaagggatgttctctattcatgcggaccccactggtgctcctccgcccaaaggaatttgggtagagaacaaacaagggcaattaaatgaaattgctcctttcagtccgtggactgatagtcttacgtatccattaatcaagccaatgggcgatgatggatacacaactggcattaaatatgctaaaccaccatcgcgtaagcgaaaaggtgctcagaatgcatctggcctatttgactcggaagccgagtcagataatgagtcgtgcgagactcagtcaattgcatcatttgatgcggg

SEQ ID NO: 70778 - DNA, 906 bp, Heterodera glycines
atgtacgatttgcgcccggacaggcccgcaatgtatttccgtccttcaccaactgatggtggtgcccaattagaggtaaacggcctgatatacgacaactcacatgtcgtgccgtataatccttatattctgctgcgttaccgagtacaccataatgtactgtttgcatatggtaacaaagcaaatattaaatacgcactcaagtacccttttaaagggccaggacattgttatgtcgagtgcaaacaagagtccggcaataaaatcggaattgatgagccggctcaatatgccaagatgaacttccgtggtgcaacggaagcatatgccattgttcattcactgccatttgccaaactttcacatcaggttgtcaaacttagcatccatatgcctaatcaacaaccgattgtgtacagggcttttcagctggtgagcaaagctcaacaaatccagcaaggcgaactgccagagacgcaatgttctgcctattggaaacaatggcaaaatgaatggaagcatgatccgaagctcaaggacatgctttttgaaaaagtccctgagcattttatatgggcaaaggacaaatggaacaaaaggaaatataacctaacaaagagaccaccaatcggtcgaattgttcctgtacccccatcggacccggaaaggttcgcgctctattcacttatgcgtcactttcctggagacccagaccatcttaagatggttaatgggttgctttgtacctcattcactgaggctgcaataatgcatggtcttcttgaagacgacaaaatttgggacaaaactctggcggaggcagctctgtcgcgctggccagatcagatgagatggctctttgtgagcatcctggtctatggccagccgagtaatgccatagaatag

SEQ ID NO: 70779 - DNA, 287 bp, Heterodera glycines
aatcgaacgctaacggacgacctaatggaaaaaaatccccgaaggagagaatttaattaaatccattccttcgggggaccgtgccgggtgccgcggggtaagcagtgctggttcgtttcatcacggcaccgaaccttttggctagtcagcaatcgttgcttaacttgccagatcggacgggtgcgcatgattccactgttccaagcaccccaccaaaagcaaaacgatataaccaaaatataaggaaaaattttttaaaaaattttttctccattcttcgacctgca

SEQ ID NO: 70780 - DNA, 1642 bp, Heterodera glycines
tacaaaggaaaagcccgagaattggccaagaagaagtttaatgagaaccaacggcagggattgagggacttggtcaaagctgggctggtcaacggttcagctgaagacattgcaaatttctttctgacctgtgatggaatcaaaaaagtaaatatattgaatgtctgatttttagcccaatatcttttataaattttcctttttcagtccgcaattggcgatttccttggcgagaaggacgatttcaatttggaagtcctacaacattttgtgcatctccaaccacttcggtcgctgccattggtgcaggcaatgcgtgggtttttgtcgcgtttccgcttgccaggcgaatcacagcaaattgaacgcatcatggagtatttttcggggcattaccatgtccaaaacccgggcatatttgagcatcaaggttggtaaaaaatgtttcaaaattgataaattgcaattaacttctattttaatgcaatgttagcataaaaccctatttttgaagattggcatcatactacgagcagaatataattttttgctttttcttcagacaattgctacaccctttgctacgccataataatgctaaacacttcgctgcacaatccgagcgtaaaggagcgcatgagtttggacaactttctaaacattaccaattcattgaatcttccgccggcactggttacggttggcaatattttttgttgctgggcatttaatatgaacaaataaaaatttaaaaaataaatggttaattctataaaaattatcgcaaatttgtttaaaaaaccgaattaatgctccttttctgtatgttttaattctaaaatttaaggacatttataattccattcgctccgaagccttcaaatttccggacgacaatttgcaagagcatttctctgccgctttgtttcaacagtcggagaagcagggctggcttgagaaacaaggtggcacaaagccaaaatatgcaattgtaacaacgaacatttgtttatttcttttcaggcagtcgttacaaaacgtggaaccgtcgttggtttttacttgccaatcgttgcctttactattttgaatcgcccagtgtaaaaattttgtaaatatttgggttcaatatgaaatatttcagagtcgagaacccaaaggcataattccattggagaacattagggttcgggttggtttatctaaaatgatacattttttatttctgtttttatttcataggtacttgaccaagaaatcgacacgattcggcgagcgcatgtgtttgaactttactcaccgaacacggaggtgatcaaagcgtgcaaacagagcggagagggacggcttttggagggacagcacagcacttaccgagtaaaagcgggggaatgacaaaggcacggacggcgaaacagggcactgacaatgccatgtttttaatttgcaaatacctaatagggaataaaattactaacaataaataataaattattagcattcggcgttttcttttagtccaattgccctttaattaaaaaaatattctttctttttgcagatttctgctccaaacagagaagaaatgcattcgtgggttagcgccatccaacgcagcattaacaaagaccaacacattgaa

SEQ ID NO: 70781 - DNA, 427 bp, Heterodera glycines
atggcattgtcagtgccctgtttcgccgtccgtgcctttgtcattcccccgcttttactcggtaagtgctgtgctgtccctccaaaagccgtccctctccgctctgtttgcacgctttgatcacctccgtgttcggtgagtaaagttcaaacacatgcgctcgccgaatcgtgtcgatttcttggtcaagtacctatgaaataaaaacagaaataaaaaatgtatcattttagataaaccaacccgaaccctaatgttctccaatggaattatgcctttgggttctcgactctgaaatatttcatattgaacccaaatatttacaaaatttttacactgggcgattcaaaatagtaaaggcaacgattggcaagtaaaaaccaacgacggttccacgttttgtaacgactgcctgaaaagaaataaa

SEQ ID NO: 70782 - DNA, 545 bp, Heterodera glycines
atgacagtgaatcgtaaacaaactcaaaggcaaaggtaagtgacagcaattaattcaattcaacgcttttgtgtacaattccataaatcatatttcatcaatcactgccaccatgaaggggaattagcagagaacctttaaaaaattgttgattggacgtgctttattatcagttaatgatacagtatattcattcactgaccactgacgtcgactgggttttgctgctgccccgccgatgattttcccaccaatgagccaccgcttgcgattcgccttcgtcgctgttcaagcacatcctattgatttgaaaaagatttactattattagtttttttaaatgtgttttttcagagagactcaattaaaaatccatccatgggattttgggtaattcataaaaggctttgccgatgattaatcgtttcttacttcaatgtgttggtctttgttaatgctgcgttggatggcgctaacccacgaatgcatttcttctctgtttggagcagaaatctgcaaaaagaaagaatatttttttaattaaa

SEQ ID NO: 70783 - DNA, 990 bp, Heterodera glycines
atgagtcgttatgagccgaacagtcgccttccttatgaaaagctcgatgctaatttggcaatcattcgaaaaaggttttttttttttactttcggatcacaaattcctgtgaaaagcacatatacttcgaaaacccatttttaaatctccaatttctgcattattgaaattcttcaggttgaaccgtcctcttactttggctgagaaaatcatttactctcatttggatgacccgcaaaaccaaaaattggaacgcggtgtgtcatatctgaacttgcgccctgaccgtgtggccatgcaggacgccactgctcaaatggccatgcttcagttcatatcgtccggaattccggcggttcaggttcgcacactcacaatcagagactgacacgaaaggctttctatgttcatttttcaggtccccaccacaattcattgtgaccatttgatccaagcgcaagtcggaagtgagaaggacctttaccgagcaaaggttggccaatttgatggatcaaacattactattattcatttaaattccgaaaggagtttattattagatagttattctaatgcgataagagcaactattgtattgctaaactgctttttaggagatcaataaggaagtgtacaactttctcagctcctcttccaacaaatacggcgttggcttttggcaccccggcgccggcattatccaccaagttatcctggaacactacgcttttcccggtctgttgctaattggcacggactcgcacacgccaaacggaggttcgtgacttaaaaaaaatacctttcaaatatgacaaacattttttaggaggattgggcggaatttgcattggtgtcggtggtgccgatgcggttgatgtgatggctggttttccttgggaattaaaatgcccaaatgtcatcggagtcaaactgaccggccgtctttccggatggacagcaagcaaggacatcattctcaaagtgggatga

SEQ ID NO: 70784 - DNA, 1505 bp, Heterodera glycines
accaagcaaaacatcccccagacaaaagccgggaaaagcacgggcggttgcgagttcgcccacgcggacgccatcgaagatttatgcggtgctgctttggtgggcaacgcggcgcagtcgcgcagcagcacagccgagggcgatgtgcgcgagctgtacgaattgggacgacgccgtcgcgcctgtccgtactttgccagccgcgcggcgcttggcctttgccaattggtgttggtcccgtacaacattttgctgcacaaatcgacgcgagacgcgtggcggtaaggaaaaagcgcatctggcgaaaaaatcaattctctcgaatttaatccctttttgggatattgtttttgaaattttaaaagcatcgctaattatggcacttcgtaaaggcataaattttcgaatcaggctgaatttgcgcgacaatgtgctgatcgttgacgaggcgcacaatctgttgcagacattggcctccatccacgctgtaattttcatttggcaaagtgatcggcggaattggaatgaatttactttgtagataccgaccaatgccgggattagggggtcgagatcaatttgatagcactttgggcaaagtgaacggaattggaatggattttactggagagatttcggcagtgccgggattaggggtcgggatcaattttaaagcattcagattcgttggtctttcttgatcagcagttttactgttgactctttctttgcctttgtgtcaaccaatgattctcccaccgatccaaggtggagctgagcacgggccaactcagtctctgctccgcgcttatcacgactatttggagcgcttccgaaagcgggctttcaccgcgaaaccttcgccacattcgccaattgcattcgcttacggtcgctgtgtacaatttggccacttcgacggcaaaggaggaggacggcggtgccgaggagagagtgctcactctgacccaatttatggccaaagtgcgctagggggagggccaaattggggggggggggtcgatcaccgatacttaaatccgaattggattgattcccttttgaatagccttccatcgctcccattaggtccattccttcccccattagtcgcgtaattatcgacgattgtcccaaattcgcctttctttgtttaagtctccgctgtttcagttgggctccgcctcggacattgacctgttccgtctgctcgactacctggatcagtcgaaactttgcagaaagttgcgcgactttcgtcttcggcactccgcccgagggcattcccagccgaccgtcgcttcttccgagcaaagaaatggtgccgtgggactcaaatctcacaggggccgaagtgggcaaaagctaaagcagcgccaaacagcgaaaaaggaaatgccgaggggaaattctgcctcggaaaacattccgccatctgcgaatgagcacggtgaagctgcgacgccggcggacaccaattcaacaccgctttaccaattgcggga

SEQ ID NO: 70785 - DNA, 819 bp, Heterodera glycines; identical to SEQ ID NO: 43004

SEQ ID NO: 70786 - DNA, 108 bp, Heterodera glycines
ttggcattttcatcatctcttcttgtttattggcattttttatggcacaacatttcttatcttttcctcgtcttttcgtttcttgtggcatttccctatggcacaaca

SEQ ID NO: 70787 - DNA, 1799 bp, Heterodera glycines
  unsure (1)..(1799): unsure at all n locations
atgacttcattgcctggagagactgctgatcaactatttgattggatttgttcgtccatggaaaaacatcagctggactttaagaatttgatcagtttttgtgctgacaatgcgccgacaaattttggtgtgccacaacaattacaggagggtaggacggggaacaatgtttttgcaaaactcaaaacaaagaggcaaaatatcattccgattggctgttccggttacttttaaattgtttgttcttcttatttaaaaatttcagcccatattttgcataatgcagcaaaaaagggtgccgaacaattgcaatttgacattgagtccgtcgtttacaaattaacttcatatttcaaaggatcaacgcaaagacacaccgaatttcatgaaatttgtgaccaatatgaggtgctcaattttcaaattttaaaattaattttgttttaaagattccgacatccaacgcattcgtggaacgagttttttcactggcaagcagtcaatggaccaaagaaagaaatctattggaagttgaatcagtcaaagcgttgctactggtgcaggtgaactttgatctcacgtgcgcggaaatgaggaaaatgataaatgaaaacaaaaaaatattggaaaaaatccattccggtgaaaaatacaagccatttgaataaatattaaccattttcattgcatataataaaaattttaaatgtccttgaatttcatgaattttccncactatgtccttgaaaatcggcatacccgtccttggaaacggaggatggacgatgggagccctgtaataataagtgcaaattaaaatggccaattagagtgatcagaaataataataaaatgatcaatcaatgatcagatgtggcagacacgaggaacagctgatcaaatggcacagtgagcagagtcatcagatggaaaaggaggtggccaaagtccgattttggcataaatttcttttcttggctaaacatgtccaagcagaagggatcagacccaaggatggaagagaaatttatattcatttttatcaaaataaacaaaaataattttaaaaaatttaatcaataaatcaatcaaaagtatacaattttttgtaaattctatcaaacaaatattttattatccatagatggaaataaaaataaaaaaagttttttttaataaatgaaattacagacctcgccctgcttggacatgtgtatacaaaaaattatttttatttttttttacaaaatctctctgatcactactgatcggccagcctcagcactttttgccaattgccattcgctttcactctgccgctaatgtttttggtgtttttcgatctttttttcactattttttgttgtaaaaatcattccatttttgttttaatgattattattatttttatttcatgagacgttgccatttttgttttttgtttatgtattattattgtattgatttatattgaacaaataaaaattgataaaaaaattatcaggaaaatgtcggactcaaaaataatatgtgataattagggctttaattttaggcaaatgcctaaaattcctgcacacttgctacgcacagaattccgtttaaattaaatataaccaaaattaagtttggtcctattccagtttaacgcgtccaatcagtgaccattctcatttttttaggtcatacaacttttttattactacttagtcaatccaaacattgctggtttcaatcgaaagcttagagaattaagaccaagaagaaggtaattttgaacagtccaaatccaaaataaa

SEQ ID NO: 70788 - DNA, 951 bp, Heterodera glycines
  unsure (1)..(951): unsure at all n locations
atgaaatctctcctaaagattatattccgccagaggtgagatggagtaccaaacttcctactctcccaaaaccgggattgaatcgccctccgtctaaaagaatatgtcttgaggggacgaaactgagtaattcgggacaaatttcgctaaaaaatatcgttgataaatattctgaggcattcgtcggtgatgacggtaaaattggactttacaacggccctattgttcaccgaattgaccttgtaccagggtccctaccatttcacttcagaccttatcgttacccacctgaaacacaaaaagaaattgagagacaaatcaaaatgatgttggaccaaaacatcataagggaatctgaatcagagtattcatctccgatagtcatggtcccaaaagctgataagaaatcgtggagatttgcagttgactatcgggcacttaataaaatgacaaaaaaacgtgttttccatctgccaaacattcaagaattactagacctaatgggagccaaaaagttttatacatgcatggatatgcaacagggctttatgcagattccaatggcaaaggaagatatgagaaaacagcgttcatttcacatttgggaatatacgaatttataaccatgccatntggattaacagcagcacctgacacttttcaacgagtaatgaattcattacgtaggagattgaccgctgccatgctaatatatttggatgatattataattgggagcgaaactgaagaaatgcacttggtcgatatcgaaaattttctgaaacttctgagagatgtcggactaaaacttaaaatcgagaaatgtttttggggaatggcagaaatcaaatatcttgggttcctattaagcgaaaaaggagttcgaatggacccaaaacaagtaaaagcagtgcagaattttaggccaccgaaaacgctaacggaattaaa

SEQ ID NO: 70789 - DNA, 199 bp, Heterodera glycines
atggccattctactgaagtgtgtgctgctcctctcaatcatggagattttctgcgactgtatgaacgaccccggcaaaaaaggaaagagcaaaggtaaacccaaaaataaaaataatttttataattttattttaagccattcgaaaaaaggctgagcccgatgactattttaaaatgataaattttaatgcaaactaa

SEQ ID NO: 70790 - DNA, 505 bp, Heterodera glycines
caaaagttttttacaaccacatattgccaatctaatttcttgcagattgagagccatccattgcataccggttctcggcacagcaaagcaccaatagggtgtttgactcacttcaaaaaataattcattacccaaaagttttttacaaccacttattgccaatctaatttcttgcagatttaaagctatccattgcctgccggttctcggcacagcaaagcactaatagggtgtttgactcacttcaaaaaataattccatacccaaaagttttttacaaccacatattgccaatctaatttcttgcagattgaaagccatccattgcctgccggttctcggcacagcaaagcactaatagggtgtttgactcacttcaaaaaataattccatacccaaaagttgtttacaaccacatattgccaatctaatttcttgcagattgaaagccatccattgcctgccggttctcggcacagcaaagcactaatagggtgtttgattc

SEQ ID NO: 70791 - DNA, 1014 bp, Heterodera glycines
  unsure (1)..(1014): unsure at all n locations
caacacgcggatcaccgatgtggaagtctgggaacgccgttacccggtcattgtgcgccgattaccccttcgtgccgggtcgggcggcgacggacgattccgtggcggcgatggcatttcgcgacacctccaattccgtagagtcctccatctgtcgctgctcactgaaagacgcgtcttccccccnctatggactgaatgggggagaagcggcgaagcggggaaagaacacactttgccggaaggacgggacgcgggtgaatttgggagccaaaaacagcgccgaaagtggaagccggggcaagcgaattaggggtggaatatccactgatcgaattgaatatttaggatattttggaattggaaacgcctgggggcggtggatgggggcaaaacggacaaaaatgcacgcaacaaaagccaaatgattttgtgatttagatttgataaaattctattttcaaccgcatttttgctttgaatcaccaataggatatttccgttcaaaatgaatggttaattcattagtcaatctctgctggaccattttagttaacttgaccaaaaaacaaaccgattttaaaaatacaccatattttttgttatctcaattttctaaatttttttgtacaacttttttatattgtctgtcattggttctctaaaactttggcgttcgttttgctgtgagaaagtaattctttatcgcaaaataacaacaaaaagtgtctcttcttttttttctcttttcgctctctaatagtcttcgatgtcttccccctcctccgactcgtcaaagtcttccacgaactgtcgctgcttctcccgcgttgtctccgtctcatattccacttcttcctcctcactttgctccgactcgtccaccctttccatcgctttgtcaattgtcttgtcactgaatttgtacatgctcccgtaggtgcccttcttcagcctctgcagcagttccctttcgatggcattgtccaattttgccgcggccaatgctttttc

SEQ ID NO: 70792 - DNA, 651 bp, Heterodera glycines
atgcgcacccgtccgatctggcaagttaagcaacgattgctgactagccaaaaggttcggtgccgtgatgaaacgaaccagcactgcttaccccgcggcacccggcacggtcccccgaaggaatggatttaattaaattctctccttcggggatttttttccattaggtcgtccgttagcgttcgattgctctagtcaatttttcaaaatttttgttgaaatatttgtcgtgctctgaagggcgtgggagggggggggcgaaggcccaccacgaggccgcgaagaggccgagtgagtaccttcggtgcaggaaaattattaaattttttaattgctttttaaatatgccaaaaaatgtaggcttaacttttttagtgaaaattcgatcactcatattttttgctaattgagcagaagcgtaccaaactttgcagggatactccccggtaaaggactaacttacactgaaatgagcgccgagctagctggctcaaaaaaatttttcgaaaatctgagtctttcgtttttatttatttgcaaaattaattcataaatattttttcagaaagggttctgaaacgcaccaaattttatttacatgttagtttaggcactctgatgctttttctatcaataatggaggtgaataaa

SEQ ID NO: 70793 - DNA, 1268 bp, Heterodera glycines
catttcaatcactgggactcaattctcttgcattccaatcactgggacctaacctcacctggtccttcggcattccaatcactgggactcaattctcctgcatttcaatcactgggactcaaccctccagcatttcaatcactgggactcaattctcttgcatttcaatcactgggactcaacacaccagcatttcaatcaccgggacttaattctccaggacttcaatcactgggactcagtttttatgcatttcaatcacagggactcaagacaccagcatttcaatcaccgggactcaattctccaggacttcaatcactgggactctattctcctgcgtttcaatcacccggactcagtttttatgcattccaatcaccgggactcattctcctgcatttcaatcactggtcaattctcttgcattccaatcactgggacctaacctcacctggtccttcggcatcgcaatcatcgagactcaattctgcgaaattccaatcaccggaactcaattctgcgacattccaatcactgggactcaattctccatcattccaattcccgggactcaatcccaccagcattccagtcactgggactctgttctcctgcattccaatcaccgggactcagctctccaacattccagtcactgggactcaattctccagcattccaatcaccgggactcaactcaccatcattccaatcgctgggaccgaacctcacctgattcttcggtatcgcaaccaccgagactcaattcccctgcattccaatcactgggactcaattctcttgcatttcaatcacagggactcaaatctccaggacttcaatcactgggactctattctcctgcgtttcaatcacccggactcagtttttatgcattccaatcaccgtgactcattctcctgcatttcaatcactgggactcaaccctccagcatttcaatcactgggactcaattctcttgcattccaatcactgggacctaacctcacctggtccttcggcatcgcaatcatcgagactcaattctgcgatattccaatcaccgggactcaattctccatcattcctattcccgggactcaatcccaccagcattccaatcactgggactcaatccttcacttttcacggattcttcggcatcgtaataaccgaggactcagttctccgccattccaatcaccgaggactcaatccttcactattccaaacaatgaactcaattttacggattcatcggcat

SEQ ID NO: 70794 - DNA, 1415 bp, Heterodera glycines
atgagggcgatgaagaattatgtgaggaaaagtgaggaaatgtcgcccttttatacaactttttttcccttaatttcgaaatttttttgcttgtctatataaagggagggattgcaaaatttgctttcattcattgcgcccgtcaaattttaattcttctattatgcgaaagatcgtctacttcaaactgttgcaaattgtgctcagtttggccttcatgtggcaacttctttcccttcaccaattctgcggcacttttgtctctccaaaggtgttgcttttgctttgacaattcatttgaatttaatttattgttccatgcttttcaggccttcctccatgacatctcaggtggccattgcaaacgcttcacgttcatcggaaaggactcaaagacgggcgaattcggcgcagtgttcgacgagcgcaagtggcacaaccaactgttcatgatcagcaccaatggccaaccaatcgaggaacagcaacagaaattcatggacgaattggccgagaaattgccccccgctggacgccactgtattccgataaccgtaagcaaaagctaatcacaacaaatacatgcaaaaataatcccattttgttctttcagctctcgccttttttctggactgagaaagacagaaatgtgctcgactacgttatggaccttttttccggccaactgctcatcgcaatgtgctcgctgctcactcttggcgtcggcttcatccgagtgttacgctctgcggcagaatatgaagtgagttcgatgcgtgaacacagacagcacatcagcccgacaaaaacgtgaccaaattgcttttcagtcgaaatccgagcaattttttgatcaaactgtgatcagtttttcttttgcgtgaccaaattgcttttcagctgaaatccgagcgattttttgatcaaactgtgatcagtttttgtcgtgttgcatgttgtcaaaattgctttgtttgccattgtgtctgtttctaatttgtttttcatttttaagttctacgactgttgcactgccttctattccgtcttctgctggagtgcctctgcttggttctcgtcgtgtttgctgctctattggacgccttcttggtcttgcatcaacttccgtgcggatgacacaaatgtgccgttggtcactttggtgagttttgccgtgcttttcccatttgattctacgtttttcaattgctgtctttcaggtgttcagcatcgtcatggtgtgtacgttcgtcttcgagattttcttcaacaattcgttgctgaaaaaccggcccgtgaatgcttcagtcgccgcagccgatcagaaattgcgcaatgatgtcgccaaggaatgtgccaatgtcgtcattcatcgacagcagcagaagaacggaagtgccatcatgcagacttaa

SEQ ID NO: 70795 - DNA, 497 bp, Heterodera glycines
atggctattgagcacagcacatgggtgggtcggttgatctacgacactcactctgatcagagggtcgtcactcactccgatttcaccagtctgtcaaccatgtgcagaattttgtggacccaataaccggtgcacatacaaaccacgtggaaaatttttggaagaacttgaaaatgaagaacaaagccatgtcaggcacgcagcgcaatttactgcctggatatgttgacgaatatatgtggcgccagttttatggcaaaaagacactttcggcatatgaaaagacaatcgatccattttgataaatttcagacagttgaagacgcacaagcagccgaaagggaagcgatggaattcattagaaaatatgagcagcaaaacggcggaggaggagagggacaacaacaatcaacaatgtccgaccaaagggggatgaccgccggtcactctccgatcggcgatgatcactgatcagagaggctctagaaccaaataaa

SEQ ID NO: 70796 - DNA, 569 bp, Heterodera glycines
atgggtgtttgatgtgtgccgaaatgtcagagtgatcattagcctcttcttcttgctgctcctgcttaacttgacgaggcagaatgccggcagcgacgagcatttcatagtcgggctggttgaggtcggccaaattcattgcagccatttggcctgatttttgtgggaattttttaattttttattctcctcagataaaagtttgtgtaaaattatgtggcaaatttttcaggaattataagggttgtcagatgtaaattcaaaaagaaaaatcagttggcatgccaaaagcttcatttcttctcacaaagctttttgaagaaaaaaacggtgttgagaagtgcctccggggaaaaacttgaaatttttgtctaatttgttttttagaaatttatttaaatattttaaaaaatcccttcgtctagtgaaatggatatggacggttggcacatttagggccgtccattgacgccgaaaaatgttgaattggtgcccttttagtcgggagcaaaaaccaatgttcactttggtttacattagaaaaatgttatgaaaattatatttgtcaa

SEQ ID NO: 70797 - DNA, 720 bp, Heterodera glycines
gctcattaccagtgatggacttccactatattctttttatgaatataaaagtggaattactggaaaaccacaatcgtgtggagtggcgagtgagaaggcactcactcaaacaaagaaaaatgggcttttgtacaaggcgtcagagcatgggaccctgcaagggtacaaagctgccatggatttcttgacagcaaaaaggttgccactcgtaacacgtatgtcgaaatataatattgtaaacaaattttttttctaattacctatgttttaggaatttttgctccgcccagctttcacgagtacaatggtacttttgtttacatcccaagcatcaaggaatgcgaagaggcggaaaaaaacaagacaaaacaatgcacacattaactatcttggggtttggcacagaaggggacaaagatttttggcttatccaaaacagccacggagcaagttggggaatagatggggttggcaaatttatcagggctctaaataggtgtgggatagaggagtttacctattacataaaaaatgtcgtgcatattaagcaataatgcgttattgctttttatgtgcacgacggtttttatgcaatagggaaacttatatatcccacaactattttgaccttgatcggggcggcgggctgaggggctaaaggctctccccaaaacccaaaaagtaaaaattttagaaaaagacaaattttttgaaaataaa

SEQ ID NO: 70798 - DNA, 539 bp, Heterodera glycines
atgactggtaaaatcgactggctccagcacttcactgcctggcatcaatttttttgctttttccaatcagtcggactcaactcaccagcatttcaatcaccgggactcaattctccaggagttcaatcactgggactttattctcctgcgtttcaatcactgggactcaaccctccagcatttcaatcactgggactcaaccctccagcatttcaatcactgggactcaactctccagcattccagtcactgggactcaacacaccagcatttcaatcaccgggactcaattctccaggacttcaatcactgggactctattctcctgcgtttcaatcacccggactcagtttttatgcattccaatcaccgggactcattctcctgcatttcaatcactgggactcaaccctccagcatttcaatcactgggactcaattctcttgcatttcaatcactgggactcaaccctccagcatttcaatcactgggacttaatctctcttgcattccaatcactgggacctaacatcacctg

SEQ ID NO: 70799 - DNA, 804 bp, Heterodera glycines
taattaaatccattccttcgggggaccgtgccgggtgccgcggggtaagcagtgctggttcgtttcatcacggcaccgaaccttttggctagtcagcaatcgttgcttaacttgccagatcggacgggtgcgcatgattccactgttccaagcaccccaccaaaagcaaaacgatataaccaaaatataaggaaaaatttttaaaaaaatttttctccatctccctttttgatagaaaaagcatcagagtgcctaaactaacatgtaaataaaatttggtgcactttagagcactttctgaaaaaatatttatgaaataaaaaaatcgatttattcaagtgtccgtttggggtactcaaacaagtatggggagcaaaaatccaacgcagaattaaagtacagactatagggaagctaatcccgaaggattcggtctccccataaatctgggcgcatcggttcggggggactgccccgaaaacaaaaaaatcgattttttcaagtgtccgtttggggtactcaaacaattatggggagcaaaaatccaaggtaaaaataaagtagaggtatatcgaagctattcccgaaggattcggtctccccataaatctgggcgcatcggttcggggggactgccccgaaaacaaaaaaatcgattttttcaagtgtccgtttggggtactcaaacaattatggggagcaaaaatccaacgcagaattacagtacaggctttagggaagctattcccgaaggattcggtctccccataaatctgggcgcatgggaggaaggggactgccccg

SEQ ID NO: 70800 - DNA, 677 bp, Heterodera glycines
agtctttcgtttttatttattttttgcaaaattaattcttaaatattttttcagaaagggttctgaaacgcaccaaattttatttacatgttagtttaggcactctgatgctttttctatcaaaaagggagatgaataaaatttttaaaaatttttaattcctttttaaacaggccaaaaagtttaggcttaacttttttttcagaaactgatcagaagcgcaccaaactttgcagggatactgaaaggaagagaaataacctattttaaatattatctagtcagttcatttaaataatttttatccaaaaaatttttttttgggttttcggggcagtccccctgaaccgatgcgcccagatttatggggagaccgaatccttcgggaatagcttccctatagcctgtactttaattctgcgttggatttttgctccccataattgtttgagtaccccaaacggacacttgaaaaaatcgatttatttttgttttcggggcagtccccccgaaccgatgcgcccagatttatggggagaccgaatctttcgggaatagcttccctatagcctgtactttaattctgcgttggatttttgctccccataattgtttgagtaccccaaacggacacttgaaaaaatcgatttttttgttttcggggcagtccccccgaa

SEQ ID NO: 70801 - DNA, 1401 bp, Heterodera glycines
atggcattgttcggatttgggctcggaattctttctgcaatttccagctatgttggctttcacaacatctatgccggaatggtaaattaattaattgattgaggaataaaaattcaaaaaattttttgaaatttgtccacaggtgtacctggcttcgtctcttttctatctgtcggttattattgccatgaaaaagaaggagccgtcactgttcctgccttatctgattttcgaggtgatttatataaaaacacacatttcgaaaaaaattttgaaacgcactaaatttcgatttacataaaacaatctttagacaaatgaaagtttatttttaaataaattttaaaaatggggatcaccataaatcagctcttaattggataccgaacgggctcgggcgcccgataggcatttaccggtcaacctgagcccgggccggtaatttttcaaaaaaatacctggggcccggaccgccatgttaaatggcttttttccgggctgccttggcccgatcagttgtctaagtaagcccggccaaaaaatccggattctagcaatcataatatgccgccaagttcaatcgatttgttttttaagggcatcggcttgttatgcgcagcggtgatctcattgactatgtttatctttggaatttggtctccacagcaagccttctctactaaggaacagggtgaatagagtttacttatgaaaaaaagaataattaattttattggtatgctgcagaaagtgtttttttttaaattttgattttgaaaaattgttcctgaccagattaaagaagcatgaaaatcaggattttttaatattttttattttagtgtattttgggcgcattttaaagatttctagtggtaaaaacagttctcggagagtttttgggatagctagctgatcacaaatcagacatccccatggctttcaaaattaattacattttaatttgtcgcgctgctaattgtacactaattatttcagaaatgaattttcgttccctcatgcttttctttgccgccaccgtgggcattgacgtcgctttgaacgcctggttctactccatcatttaccgcacctacaatttgctcaaaaagacaacaaagttggtggcatcggcttccgccgtcgcttcggcacgcgtgccgccgcccgtgtgatttatggcgagagattgatttgatgagtaataacaatggatggatgtgatcgaagaaagaaacaatatttttggcaaaagttcaaagttcaatgcatatttttgatttttaaaaatttattcattttttgtgccaacccaatattatggtagtcaaattatttatttttggaacaataatcctgctttttgttatgtgatatgaatctgagtattttgcgaataaa

SEQ ID NO: 70802 - DNA, 237 bp, Heterodera glycines
atggggggaattgaggtgatgatgatgatgatgaggaaggatgatgatgattatgaggaagatgggcaaaatggaaacgaaaacggatggatgactcatcaaaatgaggaattggacaaaattgcaatttctacatgggcttttgaggcagaaacaaagtaccgtcttttgatgaggaggcaggcgcctctgttttgccttgcccttgttttcgtggaaaagaaaagagatggatga

SEQ ID NO: 70803 - DNA, 2675 bp, Heterodera glycines
atgggcttttacataaacttagaagtatcgacttttgatggggcctcccttttgccacccacccttggtcttcggccgaaggcatttgtagtattgaaaaggatatggaattgtaatgataatgatgtgatgaaatgatatcgaaaaaacatggattactcaaaataattgatgttcggcttccgatagggcctgtttgctagccttgttttttcgtggtaacaaaaacggaacgaatttggataatattggaatttctacatagactttttacacctaggggtatcggcttttgagaaaaatgatgaatttggaagatatgtattacgaatttttaaataaagatttgtttatttgttatcgttgttgaaaggagttttgaaacgagggagagatcccggctttcgtgtgtatgtcttgttttactagctaaaagatatttattttttttatttcatccaattcattcatgcaaaagtgccatcagttgaagtataaaaggaccttgttgtttttaaaatattaaagtgaaattgtaaaaattgcgcaatgaaaaaccgatgatgaaagaaaatttctaagtgaaaaaattttagtgctttcttacagataaattaatgcttcccgattattaatagcttttaaacttaatgatttagccaattacattttctttcatttttcagccatttttactttttaattgcctttttttgatattatacgtcacttaataaacaaactttttttttataagtaaaaattgttatttaaaaaaaattaattaaatatttctctcctccactcatatgtaaattagaatttcacgctccgattgtcttttaatcaacatttgtttaacattgccaactgtgcttcctaaatatgtaatttttatccattcattcagaaaactcattagcaccattttggtttagctttaaagctctgaaaattattattttttcaatttcataattttattcacaattatttaatttaacttgttttaatattaattaagaatggagggcaaaaaaagttatggaggcgtaaatggagcatttatggcaataaaaatacattttattttaaaattacaaattttgaaatttttaggctctgcgaaaaagaattccaacttttccatttgaaaagcgtctctccaaaattgacacattgaatttggcggtaatttttaaggcattgggataatcggcaaaaattaattaggacaataattatttttcgtgaattaattataagtatatttggaacattttaattttttgttccattaaagtttcttgttgttcattgaattatcaaaaaagcgtggaaaatataattttttaacaatcctttgcaaatatttttcatttggagaggaaacccaaaaattaaaaataattaatatatattttttattaaacaaataaaataaaattggcccactaaaattgccgattttccaacgccaatttctaaatattatattaatatatttttaaatattcaatttaagtgtgcttacatcaatcttctcgatgtttgtaatgcttgtaaactattaaatttttctcaaatttttatgtcattaaggaaattttggccactgaagagcatccagctgtttttctggaatactcaattagtttggcaaaatatggcgggaactcagcacaaactatttggggcacaagcggtaattattatgaaaaaattgaataaaaaactcattagtgggtgaagcgttaatttaataattaccagtgattagcgggtgaagcgctaattaataaacaatctttgtttgctcattaatctccttcctcttattgctctgtttctctcccatcctcccactttctatattttttcatgctctatctctccttctatatagctctttaatgctctctccacttttgtttctctctcccatgtttctctctcccatgtctctctctcccactctctctctctctctctttgtttctcactcactcactcactcactcactcactcacgcactctctcgccctcgttctctctctctctctctataatattctctctcctctctctctgtataataatgtgttgcaaattgttttaaccccattctgctgctctctcaaattttcttacccagccttagcgctaatgttattttttaattcatgaattcaaataattaaataaaaaacaattaacaaacaatactccagatctgctttctcgattggactggatcaattggaaaggaatgggaatggacccgcccagaacatcatctcaattttaaatttggcttcataattttgattattcataatattgaaaacaaataacaaatttaacatttcatccttttttatcaagcattcattggctatatgtagtataatttgccaaataattcatagacaaatcccgaatcactttttttcgatgatcaatcggtcacctcaaaattggtgtctctacttctcatagcagtaatgtttgggcagcagtgtgaacgtgcagaaggggtttcgtcggaaaatttttgtcggatttccatttctcagatagtaatgaaacatgaaatccggctgtttctttagtgcctgaaaattaaaaaaaaattcatttattgccgagaaaacaactggcattctataaaaaa

SEQ ID NO: 70804 - DNA, 1185 bp, Heterodera glycines
atggtctttagtggtgtgtttgttttttttgaacagaaaaaacaaaactggtcaaaagcatcaaattgtgagccaaattttatgcatcacatcgtttaaaatgacacaaacggaatatcagacccaatttaagaattccagatttccttcaaatgatccgtatttaacattttcaataatataatttttaattaaatttttttttgatatacttcatatttttcatttttgccaagttaaatttagttttattcgtcaacatttttaaatattttcaattttaatgacataaaaaattcacttaattgtgcttttttgagaaaaatgatgttatcctcttatccattttggtcatatgcaaaagttttgcctctagtgaaaatttattcggattctaatttatgttttggcatggattatcttattttttgagtatggcacaacatattaaatatttttgtggggatttattttttcaagggcttcggcaaatgcagattaagctcagctttaaagtcgataacattttaaggaacttttatttattctcacatcattcgtacatttttacatttaactgaaatataaaaattttcaattcaactcaattttacattcttatttaaatttaactgagaaataaataatttagtattagggttaaacaaatcttcataaaatgttaatcttatttattttcattaaattaattaagaaatacagtaaccataatttcataccgaaaatatacaaaaataaatttttcataagaagataaatttttgtcatccagataattttaacaattttgtacataaattttacggaacaaattttgtaattttttgcacatggtttaatgcatttttttccagggttttgtcccctactaattaattaattatttttatcaaatgcatactccaattttacaaattgcattttgttttctgctgagctttctgcaaaattctgatagcaaaataagcttaggagctgtcgtgtcaacactgaatgcaaaacaacgaaatcaggcaaaaaaaaatggaaaatttaattttcaaattttattttgcagattttgaaggagcaaattcactggcaccatatgagcaagcagcaaaccgtgaaggtatacaattttctgcaatgaaaaatgccgtaattcaaaatttttgccattaa

SEQ ID NO: 70805 - DNA, 563 bp, Heterodera glycines
  unsure (1)..(563): unsure at all n locations
atgcacagggaaaaaatgctaaaatgccacgaaaaaaagtaattaattaaaatatttcttnttacttaaaatccccatatgaatctcttggttaaatttttttaatattttcttaattttaaaatatttatatatttatttaaaggcaaagttgaaaaatttaaattttttatttggtaaattgaattctttttaaaaaaattgttggcttttcaaaataatgatttatttttttatttaaagacaacattgaaaaattaaaattttttgctaaaattatgcgttattcaaatgagtttatttaaatatggtttcttttcaaattttatttatttgttacagtgttatcaatgccaatgtcgcaaccactcaaactattcagctgaaattcagcggtgccaaagacccgattgccacgttcagtggagtcgataacagcgacccgcaaaattaccatatgatcatcaaaacgtgtgttttgaagggcaatgtgtgccagaaagggtcagagaattaattacattaaataatttatttatttttaacacatttatttattatta

SEQ ID NO: 70806 - DNA, 203 bp, Heterodera glycines
atggacccaagcgtggcgacaaagggtggccgtttcagtcttgaaaattacaagcaaaacaattcaattgcgacgagttgtgagcaacagctgcaacaatcgggtggaagcgaaacattggccatagggaaggtgctgcacggcttcaacatcgcatttgctgaggacaagctgttgttgacgtcatcgaccagccagaaaag

SEQ ID NO: 70807 - DNA, 728 bp, Heterodera glycines
atgttggaagaagcgaagacaatggtcgaccaactcgtcgaagtcggctcggtccacgccgcttactacggatgttcggcggagtaccaattccaaatgggcgaccacgaccgttactatgaagaggttggagttttgttcatttttaattgaaaatgcttcaaaaacccattaggcccttcattatctcggctgtgaagacattaacgtgaaattgagcgcggaacagaagcgacaacaagccgagaaaataagcatttcggcactccttggcgaaaacgtgtacaactttggcgagctggtcagttgttcataaactaattcgttttgccattccctctgcttcacttataaaattcgggtaaaaccgaatttttcgattgaaataatttttaatggacgaaaaagatttaaaaccggaggagtagcaaaattatgcaaattaattacaattttatgctagctaattcctcagtgatttttcttttttgagttggcccatccaattttgaacgatttgtccgacacgccaaacgcatggcttaacgaacttttgcacgcggtgaacgccggcgattgggacggctttttgaaggtttgtcactgaaatagcaaaaacccggccgttttcttttaagcacgaagagaaattggtcgccgcttattcggaggcggggcgaaaaattgaggcgttggaacggaaattgcgcctccaatgtttgatcgag

SEQ ID NO: 70808 - DNA, 213 bp, Heterodera glycines
atggcattgctttccgaccgtttcgacattttagtggacaaacattttgatggaaagggcgaattggcaatttggagaattatcagaattgacaaggacgaaggaccaaagccgaaattatctgtgcggatcgacggcacttttgtggaatttccgttccccgaccaaccactgcccaacaaaatccgtttttgtttccttcagattcagtaa

SEQ ID NO: 70809 - DNA, 983 bp, Heterodera glycines
atgtccatcacacgtcgcgcactttttgcgacaagcattcgccatttgagctttcacgatggcgatgctttggacaacttgcgcagtcgcacttcgccgacaattctcactgatcttgatcaattgaattcaatcgattctggacttctattacccgatggaattgctgacgatgggccaaatgcaactgctggccaagctttgaccaaatggttacacactccgagcaaaaatgggcaaccgaagcaattacgtttccgtgcttatgtgagtccaccaaatttcgaatgcgtcaacaacttcaaagaggtgtcctgccatattttcgtcaatttgtttttattttaccaattttctttagacattcgccgtgccaccacttctgtcagttaccatattcaattttatttttgggtggacacaatgccaactgagccatttgaattggtgaacaaagtgacgaaagaaaagctgacactgaaacagaatatcgatgaattcgacttaaatgtgtgtaattggttgttgcaacggtgcccaattggggagacggcgacggcgccagttaagtgggaaaaccgcgaaaattcgggtgccaattttaactatatcagatttgagctgtggtatgacaataattcggatgccaatttgaacaaaatcatatttgatttgtggggtgaaaatgatggcaatcattaagaattggtgtcccgacgaaaaaaaatgttaaaaatttgtcgggtattttttctaggcttaaaaaatgcgctgatcacgaatctgagctcagattttgaaaatcattgatttttatctaagattttttgtcaactacttgattttttcgatttttaaagttattttttaaaaaaagtttagcaatgaatttgggttaaaaaaatactctgatcacgaatctaagctctgactatgcatgaaccttcattttgtctgattttcatcaagtgtcataaaaaaaa

SEQ ID NO: 70810 - DNA, 73 bp, Heterodera glycines
gccattgtcgccaccagcggaagaagaaaacgtagaagaagaagcggatcaaagcaacggaaatgtcgtctga

SEQ ID NO: 70811 - DNA, 723 bp, Heterodera glycines
gtaatttttttgtttatacttttttcgaaaatcgttaattattaatttggattttaagaacgtgccctctgtgcaacggttatttggtcgaagcgaccacagttatcgactgcttgcatactttttgcaaatcctgtctgctcaaatattttgaaggtgggcagcatccaattaaaaactaattttcatcgttattgaagattttttgcctttcagataacaatgattgtccaaagtgccataaccaaatccaccagtcccatccgtctcattatgtggcatttgatcggacaatgcaggacattgtgtacaaattggtgccgggcatgcaggcggaggagcagcgacggagggaacaggtccacccgcacggatttttgttttaattagagtgatttgggttacaattttcctggtttatcatggtcctcctttttaaaaatgtctatccttattttttgcccaaataaatcttcaaattccatttgccgttttgcagtttaaaaagcgccaccaacaaatgaaggaggcgcgcgaaatgaatggccgagcagcggaaaaacataatcatcagaacatttcctcctcctcttcagccaccgccgtcgtaccgccgccaaatacaaacgatgaaaattcagcggagggcgctgaacagcgaaagaacgtaatttggcaaccgcggctcttaaaactgagaaaatggacgaaaacggcgacacc

SEQ ID NO: 70812 - DNA, 733 bp, Heterodera glycines
agcaagaatattgctatcttgcctaggcgggattctgacttagaggcgttcagtcataatccctcagatggtagcttcgcaccattggtctatcgaccaagcacatgaaccaaatgtctgaacctgcggttcctctcgtactaagcaggattactatcatagcaacaggtctttagtagggtaaaactaacctgtctcacgacggtctaaacccagctcacgttccctattggtgggtgaacaatccaacgcttggcgaattctgcttcgcaatgataggaagagccgacatcgaaggatcaaaaagcgacgtcgctatggacgcttggccgccacaagccagttatccctgtggtaacttttctgacacctcttgctggaaactttacacattcaaaaggatcgataagccacgctttcgcggtccgtattcgtactgaaaatcaggatcaagtaagcatttgcctttttgctctacgagaggtttccgtcctctctgagctcgccttaggacacctgcgttacgctttgacagatgtaccgccccagtcaaactccccgcctgacactgtcatcgtcggggggtcgccgggccaccgggtggcccgacttaacaccaaaatggacaccccttgcgggcgcactcccgttttaccgattaagttaggatcgatgaaagtagtggtatttcactggcgccttgcggctcccacttatgctacacctctcatga

SEQ ID NO: 70813 - DNA, 388 bp, Heterodera glycines; identical to SEQ ID NO: 59796

SEQ ID NO: 70814 - DNA, 551 bp, Heterodera glycines
taattaaatccattccttcgggggaccgtgccgggtgccgcggggtaagcagtgctggttcgtttcatcacggcaccgaaccttttggctagtcagcaatcgttgcttaacttgccagatcggacgggtgcgcatgattccactgttccaagcaccccaccaaaagcaaaacgatataaccaaaatataaggaaaaattttttaaaaaattttttctccatcttcctttttgatactaaagcatcagagtgctaaaattaagttgtaaataaaatttggtgcgctttagagcactttctgaaaaaaatatttatgaaacaaaaaaatcgattttttcaagtgtccgtttggggtactcaaacatttatggggagcaaaaatccaacgcagaattaaagtacaggctatagggaagctattcccgaaggattcggtctccccataaatctgggcgcatcggttcggggggactgccccgaaaacaaaaaaatcgattttttcaagtgtccgtatggggtactcaaacaattatggggagcaaaaatccaacg

SEQ ID NO: 70815 - DNA, 182 bp, Heterodera glycines
taattaaatccattccttcgggggaccgtgacgggtgccgcggtgtaagcagagtaggttcgtttcatcacggacaccgaaccttttggctagtcagtaatcgtggcttaacttgccagatcggacgggtgcgcatgatgccactgttgcaagcaccccaccaaaagcaaaacgatataacc

SEQ ID NO: 70816 - DNA, 697 bp, Heterodera glycines
cataaatctgggcgcatcggttcggggggactgccccgttaacaaaaaaatcgattttttcaagtgtccgtttggggtactcaaacaattatggggagcaaaaatccaacgcagaattaaagtacaggctatagggaagctattcccgaaggattcggtctccccataaatctgggcgcatcggttcggggggactgccccgaaaacaaaaataaatcgattttttcaagtgtccgtttggggtactcaaacaattatggggagcaaaaatccaacgcagaattaaagtacaggctatagtgaagctattccggaaggattcggtctccccataaatctgggcgcatcggttcagggggactgccccgaaaacccaaaaaaaaattttttggataaaaattatttaaatgaactgactagataatatttaaaataggttatttctcttcctttcagtatccctgcaaagtttggtgcgcttctgatcagtttctgaaaaaaaagttaagcctaaactttttggcctgtttaaaaaggaattaaaaatttttaaaaattttattcatctccctttttgatagaaaaagcatcagagtgcctaaactaacatgtaaataaaatttggtgcgtttcagaaccctttctgaaaaaatatttaagaattaattttgcaaaaaataaataaaaacgaaagact

SEQ ID NO: 70817 - DNA, 66 bp, Heterodera glycines
cttttgaccacctatattttgatcaaattgtgaatatggtaaaataaatcaaataaatgtttatgt

SEQ ID NO: 70818 - DNA, 482 bp, Heterodera glycines
aaaatggacgtcgctttttgaatgataaattccgtttgtcgccaaaagcgttggtggaacgcccgtcggacggtgatttgttggccaattctgttaaggatgtgatggaggtgggttcattaattaaaaattagtaaataattgttttaattaattaatttaattattaatcactgatcattgctccgatcagactccgaatgctgaagagatcaactggattttcgtgatcaatttcccaaaaacgttctataaaataattgggcctagaatctattttcaatattaaatctttgtctctcactttctgatcagtccccaaaagttcatgaaaatgtgatcgatggtcagtgatctcggagcgaatcactttcaaaactctcgtccttaaactgatcaatcgccactttcagacattggccatggtcgactacccgtacccggccaccttcttagcaccgttaccaggatggccagttaag

SEQ ID NO: 70819 - DNA, 2790 bp, Heterodera glycines
attgaaaaaaattatgtatttctcggatcataagatgactttaatattttaaatattcatttttagatatcttttgaacacggacagttttcgtgataaaaatgcgcccattttcttttacaccggcaacgaaggcagcattgagggctttgccgagaatacggtaagaattattggcgaggatacggtattgtttggccaaaaacaattatcctgctctgatctgtagtgatctattgtaataatgaagtctctccttgatttggagattttattattttggctttaatttttggcatttttgaggggttttttgccgaaaaatgttgtcttgattgaacaatctgatcagtgatcacattcattaagggcttcatgtgggacattgcgccagagtttggcgccgccattgtttttgcggagcatcgcttttacggcaaaacgcaaccgttcggcaatgagagctacacaaaattggaaaatttgggctacctgagctctgaacaagcattggccgactttgctcaactgatcgactacttgaaaaatgaggtgggcgacaatcctttgggactttgatcactgcgattgatcagctcccgttggattttggatccgggatcactgcgctttgatcagttccctttgggtttttgagttagggccttgaccattgcacttgatctgcttggcatttgaatgtctgactctgatcaccccgcttgatcagcccgctgtgcagctgggattataattaatgcgcttgatcggcttccgtttagttttcgatttgtatccgatcacaaaaagtaatattggaatataagggcgggaaaatagaagaatgatctcataattggactgtttccctgattcttcaatcaaacaaatcaaatcatttgcattttgaccattatcctgtctataaatattgcagaaattaccgaatgccaaacattcgccggtcattggatttggcgggtcttacggtggaatgttgacggcatggatgcgcatcaaatacccgcacctcatggacgggtatgattttttgaattcaagaaataaaaaaaatgccaaactttaagaccgtcagtagtagttatggtaccggtccataactactgttagttgagcccaaggtttttgtcctagactttttgaaaaaaaaattttgtttcagttaataactggtgcaaaaattattttaatattaaaagcttttcaattgttgagtcgagagtctataaaatatcactcaattaattgccttttgggatcgggatttggtcgtgattcctactcattgatctcttatcatatctctctaattataattcttctaatgataccaattttttttttcaaattttgatcattttcagtggcattgcggccagcgcgccggtgttttggttcctcaatgtgccaactccgccggaggatgcgtatgacaaaattgtgacccgaacatttgtgaacagcgggtgcaatgtggagagcatcaaacagagcatggacgcgatccgagaccttgccaagacaggtgggcacattattgtaataaacattgtagtaaaggtgctgctaggtagagaatggcaaatcattttttaaaatttatatgagcggtttataattttagtgcgagagataacgcaaaaatgagagagtgctggatctcagtcccagtcatacaaaacatttttgatgaaggaggtagagaaaacaatttcaatagagagcgcaatgggaagggagttcatgtctcttcttcgctgattcttttggtaagagacgcagattcctcgctatgttctctattctctctctgtcttaaatctcttcccataacactctctttttaattaatttttctttattcttctttaccaaaaatgcttttgtatgactggggctgaatataacaccctctcacttttgcgttatctctctccccatcttattttccgccaaaagtcatttttgaaaaattgctttaaattttaaaaaattatcccaattttaaaaatagcgttgatattacgttgatggcataatgttatgttgatattaaataaatatcaacgtcaatgttgatatttattaaaacaattttcgctaagagaaaaatgttgatttgcctttatctactcctccaccaccttcttcactcaaatttctcaaaaattttttttgcaaatttccataaaagtgccaattttttggtaccaaacagacttaccctccgccacctcagcttcctcctccacgccgccgttcgcgagggcgacagagccacgccggtgtagctggtgctgtcgttgttgtcgccggcggcgctgctctcgttccagccacacgctgtgctgcagcacaaccgcacggcgtacacagtgcgcaatggttttgcccaaccggcggctgcccgtctccaccgccaacagtcgttgctcatgttgttgctggttggtgccggcaacggtggccaattggttgggcgaacagcggaatttcatgcgccgcttggagtggaaacagagcacctgggcgtcaacgccaaccgtcaaatggtccaggtcgcacaacggcagcacatgctgaaacagagaatgagttgatggaaatttgaaattaaaaaaaaaaatttaaaagaaaactccgtttttttgtttttttgggcgcgtcggcagcgccatgaattttttttggaatttttatgaatcatagtacttatacagtttacagggtactttttacatacattttcagatgcctataaatgtgttt

SEQ ID NO: 70820 - DNA, 476 bp, Heterodera glycines
atgctaaatttattgctgtttttgctgattgtgtccccaattttggcgatcgaaaagccatggattcgccgtgatccgatcactttgactaaattttcgcgccattttgcgctgaaagaagcgcccagatacaaatggcaagagctgtggtacgacaacatgcccatcgatcacttttcgttcagcgacccgcgcagctttcggctgaggttcgaaaaacctgcaaaaacctaaatttattgggttagggggttgaaaaaaacgaaaatttggcaatgaggccttgacgggctcaaaataatggaaacccccaaaaattataccttaatctatgaaaaatatgtaaagcggtcaggcctctgaatacaaaaaatttttaaaaaattcgtagcgtaatacgcagaaaatctcgaggcctaattagttttaaattgaaataattgaaaaaaattatgtatttcaggatcataagatga

SEQ ID NO: 70821 - DNA, 76 bp, Heterodera glycines
aattactggagtaagcatcatagcagtgcttttccttgtctttttgatgccctcgcaaaatctggttcgcttctga

SEQ ID NO: 70822 - DNA, 484 bp, Heterodera glycines
tttaaaacaacaagcgttggcattttttcaggttaagtttgtcctttacaatggagaaggcctgcaaaatttggagagattatatcgattttagtgcgctaggttcgatgaaactttttaaaatataagcctaaactttttggcctgtttaaaaaggaattaaaaatttttaaaaattttattcatccttttgatagaaaaagcatcagagagccttatttaacttttaattaacatttggtgcgtttcagagcagtttctgaaaaaatatttatgaattgattttgctaaaaaaataaaatagtgaagctttaaaaattaataaaaaattttaaattcagaattactggagtaagcatcatagcagtgcttttccttgtctttttgatgctctcgcaaaatctggttcgcttctgaccagtttataaaaaaaaagttaagcctaaaatttttcgcatatttaaaaagcaattaaaaattttta

SEQ ID NO: 70823 - DNA, 59 bp, Heterodera glycines
  unsure (1)..(59): unsure at all n locations
atgcccacctactatgactatcatagcaagcgattgaagaccgctcatggaacacaaan

SEQ ID NO: 70824 - DNA, 327 bp, Heterodera glycines
atgagtcagttttctgatgattcccaaccccccgtgcttgatggtccttattcccctgttggtgatggtggggccgaattgatggatgatgcgcctccgctggaagacgtcatgaaacgcctaccaatctccgttagtctttgcgaaaatgtcttaaaattttctattttaattttgcgaggtcttttcaggtcgagccatcggacaacaatgagcgcaaagtccaaaaggagccgtcgattacccatgaattggacgctgagttattcaacggcaacggatttgcatgtctctccgcagcacaggctgaagctggacggttcaaag

SEQ ID NO: 70825 - DNA, 1529 bp, Heterodera glycines
  unsure (1)..(1529): unsure at all n locations
gatagcaaattgccagaattacggctaattgacggtcccacccgtcaggccaagccgtctgcaggcaaatttctttaatattttttttcaaaaaataatttacgaaatntaataaaagttcgttttcaattaaaaatgttttttttataaaaaaaacatttgaattaaaaataaaaaatacgaggtttacattttaaagccatttaaaataattgtctaattgagctgaaattttacaaaaaaaaaagaagattttgctcaaaaataaaaaaagcgtatttttcagaattattttcattgtcatcaagatttgatcaattttggaatttttcgaaattaactatgaatgttacagtctaaaaaaaactaataaaaatttttttcgtttaccactaaaatgattcttaaatgattttttcatctttttgttccaaaaaattagaaattgtaattaagtaacaaaaaaaaaaaaaaaaattaaatttttaatttcgtaacgcctttttatcatttaaaattaatttgaaaaatgcataatacattttttgaaattttttttttgattagattcgctttcgggaccgttggcgttccgtctgtacccaaatgacaaattggaccagcattgacacgggcaccgcgtgccgtaccatgggctatgatgacggcgcattttggcgcttttttcggcgcaacaacgacacttacccatttgtaatgccggcgcccaaatgtacacaaggccaaagtgggaaaattaaaaaattttaatgccaaatttaattttatttattttttgaaatttaagactctctgtggaactgtccaggctttgaggacaaagaacagattccgttgtccgaaaatttgtgccaaggtgaggacgacattggcatttattgttggggaaggccaactttcattggatgggctcgccatgggaaaggtaaaatagaaaaaatgggttagaatttaattntaattaaattcaattagtttatattattggattgtgcatattaaatttaaaaaattagattttattaaaaccaattaatttaaattaaaatgcattaaaaattaaattattaggtcgatgcatcaattaaaaaattaaccaattactgaaatttattgacactcacagaacaaaatgctaattctatgcaccacccaaataacattgaataatatttatttttaaaaattcatcaatgattttaatgtttaaatttaaactttttttatataaattaaaatattgaaaaaaaaacaaattctcaaaaaaaaatttgaaattttcgcattttttttcttttttaattgtgatttttccactaaataatcttgtcataatatcgtttatcctaattatagcaatttttctttaggttgaatgccaaattttgcttttgtatttgcgtaatgagttttttggaatgtttaaaatttcggcaattttgtattctttgattttgttctttgagttgataatattgtttaatatgttccattttttcacccaattg

SEQ ID NO: 70826 - DNA, 621 bp, Heterodera glycines
atggcagggcgaaagggtccaagagttggtccaaaaagatggctttttttcgactgaaaaaccaatgtatcgcattttggaccattttttgtctgccggattgttcaaatcaattcctggaatggcatcattatgtccagatgataaggtttattattaataaacggcacaaacgaaccgagaacataaaaaactaccaaagcactaaaaaatccaaaataaattattttaaatttgcaaagcctagattttcttcctaattagagcttcattaaagattgatttacgcctaattgccaccactcattcaataatgataaattaattattattattttttgcccaaatttaaagtttaggcaactttatttcgcgcacttgccataccgttgtgcggcttcatatccgcctacttttcaattcagcaacagtcggacacggtgatccggccaaacgggctgatgccgttttggtatatgaatgtgccgcgctacacatttgatcagaatgtgaaaatgttcatcacaaatatgtactgcaatgcattgaagccgttcaagcaattgcagatgaaccgtgaggagtttgtgctgttgttggccatcctgatcacacaaactt

SEQ ID NO: 70827 - DNA, 1041 bp, Heterodera glycines
atgatgcggcgtgagaagaaaaagttgctgggaacgtcgacgtgcaggacccactggcctttgtcattccagcaacgttacgcgaaaaacgtggcgaagacatcgtcttgtatgacagtcgcaatgtcaggcaaggcgaaaaggacgttgtccttattttcggcagtgttaaggtacattttttggctataaaattctgtttgttattggcattcctttagactctgaacattttgcgccaatgtggcacgtggcacctcgatggaactttcaaatgtgctccagcgatgtgggagcagtgcttcgtcattggtgcttcagtgcatcagaggatgtgcatcagcatgtggtgtctcctgcctggaaaacagcgacgctactacgaagaagcactgaattcggcatcggctcaccggcaccatcaactcttacgtggccaaccactgtgagtccacgggagcagcttgttcaatattcgttgagcccgctaccgactttgacagctccttcaggcagaatctttaatcaatcatccgtttaaatttaataaaaaaattcagttccagcgtgggaggacgaaatcgttcgtgcgccacattttccaattccgctttggaacatgcactcacaggcaacatctgccctcgctcgtacaaacaacggactggaggcaactcatcttcattttatggtctttaatttattaaaaacaaattgaaaagaaacatttagaaaggcctctgtcaccaccccgccctctcggacttcatttgtggggttaatgaaagcatcgacagacaggtggacgctgcccgatctgctcgccatttcattcacaagcgacacaaacgatacatcctccaggatgctgtcattatgcgaattttggcggaggcgtcgtacaacagcaatggtgaaattagtgatcttatgacggcgctcggtctccaaaattgaaggatatgcgggaaaattgaaggatttcgagaattttgatgattcaattgtccacgttccgtaaagaattttattgaatgttta

SEQ ID NO: 70828 - DNA, 80 bp, Heterodera glycines; identical to SEQ ID NO: 51817

SEQ ID NO: 70829 - DNA, 80 bp, Heterodera glycines; identical to SEQ ID NO: 51817

SEQ ID NO: 70830 - DNA, 460 bp, Heterodera glycines
atgtcaatgaaacaacacataacgtcattggagcgtaaatatgccgaaaaaaagcccaaattgaaggcacgattaagaaaaagtatgaagaaatcgtgacaaataatttgtttaatgttttcaaaataatatttttcccaacaagttcgcgaagaaattacatattcattatgcaatccaatatcagttaattgcaccatatacgtcaattctttttgtccattgaatttcaaaataaataaataaatataagaaattttttgcattttattttcatattgagtcgtttcgtaaaactgtcaattgaaaaggcatctttattttgaaaaatctattgctttatctgaactttcaattattttgatttgtattttttgataataataatgattagaagaatgaaatattttttagttttatttaatgacttctgagaagaattcttttaaacctaaataaa

SEQ ID NO: 70831 - DNA, 979 bp, Heterodera glycines
atggtgttgagaagaggtaaatttaaaaaaaagtgaaaatttgcatattttaaaaattttcgctttaagccacccaaatgcatcaacgacatgagcgaaaattgtccaaaatctcagcggaaagtatgggtaatttttatattagcagttaagtgctaacggtgtgatgtgaccgcggtcagcgatttgcgcgcttttttggctattttcattattgatccttataaaacttatttaaatgaatattatttaattcttaaaataagaaagaaaagtaaatttgcatgttcataggagctgaaattttccattttattagtgtttttctgcgatttttgagtttttttttaccgttactattgactctctattttgctctttaactccgcaccgaaaaaaattctatttttcgattctaaaaaggattaatataataattattttaatattttttgtttctatagcatttttgcgtcgccgcaactccgagtgtttgtcgccgttccgtgaggcggaggacagtgaccaagcggcgacaagcatggaggaaaaggtggaggaaatgcgccgtgccatttggacaatctgtgccgacgtggagagaatggagtcaaattttgtggtgggcatgccacacataaaagtccaagtttcccagtctctgatcaccggtcttattgcttttggtttaattaattccgcgtcccagaccccaatcaaatcataatttctatattttaattgtttgatttgtaaaccaaaaatgaaaattttcgttttaagttaaagggctcaaaatcgcatttttacgataacattttttgttttatgaaggtaaatttattgaatatttggcatttttcgggttttgagcatatttgagggatttttaatgcatattttatgcgcatttttagtgcatatgatttatagcccatgtgacaaagagagatttttgtatgggctgccgtaaaataaa

SEQ ID NO: 70832 - DNA, 1064 bp, Heterodera glycines
ctccggtcccacggcattcggaaatttgaccaaaaaatatgcaatgagcttttattggtccgccttaacattggttacactgggtgaacaggtgacagaattttaaactgtaaatgaaaatataataaaatcattaaagaaattaagtgttattggcttaatctaccagactatggaagcatattttaatgctaaaaataaaaaatctgttttaataaaagctccattttttaaatacatataaatttgataattttagaaaaataaataaaaattaattgacaaaaagatcaacgaagactttattataaaaaatatttatttttataattttgctttttaagccttggcccgaaaattccgtccaatcgatgttcgaaattgtggacactttgatcggactgctggtatttgctgcgattatcggcgatgttggcattatggtttgatttttttgttttggcgccatttattttttcaaattcttcaggttagtcgtgcccattctgccaaagcgcgttttcaagaatacattgatggctgcaaactttacatgcacattcggtaagcatttttacattttgacgaatatttataaatatttaattaaatgataaatttacatttctattttaaatgaggaattaattaataaattttcaattaaattgtattttctcctcttatattttcattttttatgaatttttaaaattaaaatactttttttccatttttcttttgaataactcagccatgtcaaccatcaaatgcacgacagagtgatcaaatgggtggaataccaatggatgagcaacgatcggggccaaacagtggacgaaaatgtggcaaaaataaaaaccaataatttcaaatattttaaattttaggaattgctaaattcgttgccgccgcggttggcacgcgaattggcagccgaattccatctgaacgcactcagccgatcaccagtgcgccaaaatataattttaaaaatattctcataagaaatgccatttgcaaagaaaatgatttatatttttatttaaatacgaccaaataaa

SEQ ID NO: 70833 - DNA, 138 bp, Heterodera glycines; identical to SEQ ID NO: 50950

SEQ ID NO: 70834 - DNA, 710 bp, Heterodera glycines
gctgcatcggatgcaagtgccgccgttgctgtacgcctaacagttggtgagcaatgacggaaaattgcttaaaaaagaaaccaaacaaactcatcaattgttagctcccgttggcaaaccgaagggtacattggggcaatggatgttgggctaccgtatcagttattaaaatttttgtttttcaaaaaggatactaaaactgggataaccccattcagagactagtcaaaaaaaataataataggcttggactactatactaattagaaattttagaatgtgtctgttaaatgcaaaactgttgtgaaaaattgttataactcctttcagagaagagatagaaaaaaaataaaaatagggttagagagcccgtgaacagctgcatcggatgcaagtgccgccgttgctgtacgcctaacagttggtgagcaatgacggaaaattgcttaaaaaagaaaccaaacaaactcatcaattgttagctcccgttgacaaaccgaagggtacattggggcaatggatgttgggctaccgtatcagttattaaaatttttgtttttcaaaaaggatactaaaactgggataaccccattcagagacaagtcaaaaaaaataataataggcttggactactatactaattagaaattttagaatgtgtctgttaaatgcaaaactgttgtgaaaaattgttataactcctttcagag

SEQ ID NO: 70835 - DNA, 498 bp, Heterodera glycines
atggagaaggcctgcaaaatttggagagattatatcgattttagtgcgctaggttcgatgaaactttttaaaatataagcctaaactttttggcctgtttaaaaaggaattaaaaatttttaaaaattttattcatctcccttttgatagaaaaagcatcagagagccttatttaactttaaattaacatttggtgcgtttcagagcagtttctgaaaaaatatttatgaattaattttgctaaaaaaataaaatagtgaagctttaaaaattaataaaaaattttaaattcagaattactggagttagcatcatagcagtgcttttccttgtctttttgatgctctcgcaaaatctggttcgcttctgatcagtttataaaaaaaaagttaagcctaaagtttttcgcatatttaaaaagcaattaaaaatttttagatttttattcatctccctttttgatagtgaaagcatctgagtgcctaaaataacttgtaa

SEQ ID NO: 70836 - DNA, 1387 bp, Heterodera glycines
atgggcggtgaaattcggcaacggttcacttcctcccgccagcagcagcagcagcaagaacagcagcagagaaggcaacagccgcagcaacagcaaagtgccggaaaaggcagcagtctgacggttgtggtcggcggagagtcgcaacaacagcagagacaacaggtggggagtttattttaaaaattttacaaactcacaaattttcaagtttttttaataagagaatttcaagaaaaattaggaaaaatttttcagcgattttttggaaaatttttgaaaaaacaaattgattcatcttaaaatttgaaaaaagcgcttcaaggtcactcgcagtattgttctcttttgacagtcattgagcattatcttttcttcccgaccaaaattacgaaaaacaaattcatttttttcaaaaagaaaattagctataatttaaaaaatcaattaattaatgatagccaatgcgttaaattttagtgttttcctttagccgtcctcccttctcaattcgtcttctccattccttttgccacgggtaaattcatcggacgccaacaaaaattgcctaattgtggaccttgacgagacacttgtgcattcctcgttcaaagtgagcactaatgaattgtatttaaaaacaacgaatttcccttttagccggtcaaaaatgcggatttcatcatcccggttgaggtgagacattttccatcattttatttattcatttatttgtcctttttcaatttcagattgacaatgtcgtccatcaggtggggaaatttcataaacatgatttaatcaacataattatttaagttaattagattcaaactgacaaagaattagacttggccgggttcaaacccaggccttttttgtcaacctgggttttcctcctaaattttaaaaacataaaactcgataattttgaaaaaaagcctggatcaccctagacttggattccatgtttgacctctggacctggatttctagacaaaagcccaggccgaggaaaacccagggctgaatccgtgtccagatcgaactctaatattattattgtcaaaagttcaggaattttccaaaataccgggctctacaaaaaacattcattttcaaattcgcatttccttttttgaaggtttacgtgctgaagaggccccacaccgaccactttttggaacgaattggcgcactgttcgagtgcgttctgttcaccgccagtttggccaaggcaattaaaaacaaataaaattaaaagtttttcacttttgtattattacagtatgccgacccggttgtcgaccttttggacaaaagacgcattttccgctcgcgactgttccgcgagtcgtgcgtcttctacgagggcaactacgtcaag

SEQ ID NO: 70837 - DNA, 499 bp, Heterodera glycines; identical to SEQ ID NO: 60789

SEQ ID NO: 70838 - DNA, 269 bp, Heterodera glycines
atgtcgcctctccgttttatcattgcctttcttttggtcgttttgtgcgctttttccccactgataaccgcgcaagaagagagagttgacaatgaacctgctgctctgcgcgccagacgtgagtttttattaagcaattattaattaattacatgccaaatttaaatggacaaacattttaatttaaatcattcgaaaaaaggctttttgaaaattgaaatgaaattcaatttaaaagtgccaacatttcagaatatttatgtaaataa

SEQ ID NO: 70839 - DNA, 308 bp, Heterodera glycines
atggtttgaaataattttaacataagtgaaattctataatttccctttatatttgccatttctcagctctatccactaatattaaaaattagcttgaggaaacatggagaaattaattttattttcttttattgcattaattatttttacaaatgatgggcaattaaatttttgttttgttgcccaaaaggggaagaataattattttattgtgaagtcactaaacttgcgcaagtgattcactttcaccagcagcaagtttgaagaacaccttcgattaattgtacgacaaaattaaatttaataaa

SEQ ID NO: 70840 - DNA, 311 bp, Heterodera glycines
  unsure (1)..(311): unsure at all n locations
tctacttcatctgctactcgccaattcagcttttcttatgcaggtccaattcttaatacatcaccccaaatagttagctaattactcgttaattatgcccctctctctctacccctgcaggggtctcttcaacttgtccatccatccncccctacgaattcgtccttctgatgaatgccttggccattctttgctccgcttgtaaccctttgctgtacactctcttctccagtcgtttccgcgcgcgaattggtcatttgttgtgcctttgctgcgacattttctatcgccgcaacaataagtgaaacgcc

SEQ ID NO: 70841 - DNA, 368 bp, Heterodera glycines
gatggcaatggcccaccgcccggcgacgttttctgaatacagcgaaaggaacggaggagacgaagacgcaaacatggaattttttgaccagcgaatgccttttccgtcgacgatcactccgtccgtccttcgatttgtcctccatcactttccctccctttttctgtcgctttgcctttcctttcgtttcgctgtctcccaaaaaggctgatgaatggcatttttcaactttgagctccgtctcaaaattggattgtttgtctttttgccggtgcttctcccccccccccccccctttctcccacatttctttctccgaatttcgtgcaaatgttttattccaaaaagaaaaaatgattcttcgatta

SEQ ID NO: 70842 - DNA, 396 bp, Heterodera glycines
atgggctttcgggatgtggacgatgacggatatgaggaggaggaagcagcggcggtgaatggtggcggtggcaccagcccgatgaatggtggtggcaacaacaaattggcgacagcgacgacgacggcaaaactcttccaaaatggcatcaccaccaacaccaatggcaaaaagggcggcgacgacgacgacgatgggcaggaggaggaggaggcgaatgacggcgacaccaccatcaccgcgcatggaaatggtgggtgtgtggaacagcaaaggggttgggtgcgcaattacggcgggggccagctcgttcaccctcctccccatctcccgaaaaaattttcaaacagaaaattgcatgaagaattttttaaattttcagttttatggtggtga

SEQ ID NO: 70843 - DNA, 787 bp, Heterodera glycines
atgaaaagttccctcttttctctccgtccctttttcctcattttttcactgctttttctttcctccaaattccgacttcaaaatgcgtgccctttccaagtgcgtgccttttgtgcatgtgttgaccatgtcgacggagtgcaactgaattgcactgttccagcagaaggggcggcattgcatcttcacaacaatttgcttaatggcattctgccggcactttccttcatgaaccttcccgtgctcagtcttctcaatttggcaggcaatcaactcagtgccatgcatcgccattcgacaatttcgacaacaaaatccacgacagtttcggaaattgaggcaaattaaaagcaattacctaaaataattatgaaattcatttcaaatttaacttcccttttaagtcactctccgccgatcaaatcgaagacaacgcatcggaggagacggaagcagcagaagaatccgcatttgttcagcaacagagcaccaggccgcccaaggaatcgaccgaccaatttgctgagacaattgaaacaacgatcaatggccataaaatgggcaaaatgacaaacattcgacgacgaaagaaatctgttgtacctgttagttaatacaatgaaattccaaattataactgtgtttaattcagtacgattacttccccagagacgttttcccgacgttgaaaaacataattattgaagagactacggaacagacaacaaccacaacaacaccagtgacggtggaacaaactcgccaaacaacaaaaattccaaagtaa

SEQ ID NO: 70844 - DNA, 124 bp, Heterodera glycines
atgggaaaaagaaaactattacctaaaattcacggcaaaaagggagtgaaagagcgtcaaaagaagcgggaggagaggaaagcgcaaacggccaaggcgatgcaagcccgatgggcaaagaaaa

SEQ ID NO: 70845 - DNA, 56 bp, Heterodera glycines; identical to SEQ ID NO: 52733

SEQ ID NO: 70846 - DNA, 1168 bp, Heterodera glycines
taattaaatccattccttcgggggaccgtgccgggtgccgcggggtaagcagtgctggttcgtttcatcacggcaccgaaccttttggctagtcagcaatcgttgcttaacttgccagatcggacgggtgcgcatgattccactgttccaagcaccccaccaaaagcaaaacgatataaccaaaatataaggaaaaattttttaaaaatttttttctccatcttcctttttgatactaaagcatcagagtgctaaaattaagttgtaaataaaatttggtgcgctttagatctgggcgcatcggttctgaaaaaaataccccgaaaacaaaaaaatcgattttttcaagtgtccgtttggggtactcaaacaattatggggagcaaaaatccaacgcagaattaaagtacaggctatagggaagctattccggaaggattcggtctccccataaatctgggcgcatcggttcggggggactgccccgaaaacaaaaaaatcgattttttcaagtgtccgtttggggtactcaaacaattatggggagcaaaaatccaacgcagaattaaagtacaggctatagggaagctactcccgaaggattcggtctccccataaatctgggcgcatcggttcggggggactgccccgaaaacaaaaaaatcgattttttcaagtgtccgtttggggtactcaaacaattatggggagcaaaaatccaacgcagaattaaagtacaggctatagggaagctactcccgaaggattcggtctccccataaatctgggcgcatcggttcggggggactgccccgaaaacaaaaaaatcgattttttcaagtgtccgtttggggtactcaaacaattatggggagcaaaaatccaacgcagaattaaagtacaggctatagggaagctattccggaaggattcggtctccccataaatctgggcgcatcggttcggggggactgccccgaaaacaaaaaaatcgattttttcaagtgtccgtttggggtactcaaacaattatggggagcaaaaatccaacgcagaattaaagtacagactatagggaagctattcccgaaggattcggtctccccataaatctgggcgcatcggttcagggggactgccccgaaaacaaaaataaatcgattttttc

SEQ ID NO: 70847 - DNA, 204 bp, Heterodera glycines
attttttcaacagtccgtttggggtactcaaacatttatggggagcaaaaatccaacgcagaattaaagtacaggctatagggaagctattcccgaaggattcggtctccccataaatctgggcgcatcggctcggggagactgccccgaaaacaaaaaaatcgattttttcaagtgtccgtttggggtactcaaacaattatg

SEQ ID NO: 70848 - DNA, 599 bp, Heterodera glycines
atggcaaaggaggaatactgtttcgatgcaaaggcggcggcagcggcggggcaatctcgtcgtccttcgacaacggcatcagtacttgtgcaaggagatggccagtcaagcagatttgtggatgcgatcatcagaaaagtcacgcagccgcctcttcaacgcttcacggatgaggtggaccacaaattttggaatgttttaaagcaattaatcaaattttcattttttgcacagatcaccgacgaggaactcaaacaactctgcaaggcggccacggacgtcttccggatgcagccgacgctcgtcaggatccgcccgccggtcgtcgtcgtcggagacatccacggacaattctcggatctgcagaggatcttcacaacgcatggccccccgccggagcagcagtacatgttcttgggcgactacgtcgacagaggagcacactcgatggagacaatcatccttctcttctgctacaaggtgtggttttcagggattgacaacattttacccccaaaattgaatttcagatcaagtacccatcgaacttcatgctgctgcgcgggaaccacgaatgctccaacatcaacaaagcgtga

SEQ ID NO: 70849 - DNA, 725 bp, Heterodera glycines
atgccacaaatttacaattctaaatctgaattcactccgtcggcacaggtccctccgcgcggatcgtcttctcattggccggcagatggttgggctgggccttccacgcggtcaaattgggcggccatgtgtattatctgatggtgtacaggtgggggacattgatgtcattgtgtccgttacttacacacatagtcacaattaaaataaaaattctacgcccagactcctgataatgtcattccatttctaaagcttcgcggctctctcctactcgtcacttccatttcacaagtaatatccaaaattgactaggataacccttcaacattaatgcagagacccaacccgtatccattttccatccggaaaaaaaagttaatttttttaatttagaaattgttcaagttttataagaaaatttcaggaaaaaataatttggaaataaaaattttctaaagattatttctctaaatagaacccccgtgggctctatttttcaacctccctcaaaagtgcggcttctttattttttgggggggggcactaatttaggggcgggcgggctatattttaggaatacggtattgaatttcaatttgttttcagcccgcctaccaaccggtggacgaggacagtgccgaactgatgcgtttggcatcgcccagccaaaccttggaaatgctgtttttctcgctgtttggcctcgtcgagccggacagcat

SEQ ID NO: 70850 - DNA, 138 bp, Heterodera glycines
cggtgcaaattaataaggcaaaggaattcaggggtttagtaaaagcaatgagttctgagtaggaaattttctgtgccacatatacactaaattttaatcacctgtgaatttttaacatttgatttatttttattcatt

SEQ ID NO: 70851 - DNA, 650 bp, Heterodera glycines
atggtgtaccaatcgaaagaacattgccgagttttatttgcacaactcgaggcggtcgaatcaaacacgtaaaaatgggggaagcgaatatttgaaaaatagcgggtgccggggtaaatttattgaaatttgacaaactttcaacgccccgccccttcacattttaggaaaacggaagtgtgaaaatgattgaaaagttaattttgttttttttcagtctccaacttttggccaatacgctcgacgacgcattgacaaaagccgaattggtaaagaaacgtcaaagcgaagatgtgttactgcacatgaccgttctgaacactaaatacttggtaagtggggggggggagagagtaagcagggagagagagacagataaaaggaagagagaaacgaggaggggaaagggattaattgtgagaaggaatgcgagtgagagagagtggtagagacaggaagagacatgggggagagacaaacagccaacaaagagagagacaaagggaaaagagacgcattggagaaaagcgaaaagaaaaggccgtccctttcttcagggctggcagggatggaagaaaacgacgctcaatgtcacccaattgttggaaaagtatggacaattaaactttgacccaatcaacgtcgaggag

SEQ ID NO: 70852 - DNA, 683 bp, Heterodera glycines
atgtccatgaatgttcaatatatgattgcactctgggccaaattatgtaacattgaagagaaaaatgtgagaatattctattaaccacttgccctaaaaattcaatttttcatagggtatgcaagcaagcctcaatttttttttttcaaaaaattttccaacgcgaaagttcgtgcaggctctcatgcaggcttccgctgctgatccctcctccaacacctccggcgcccatttcctgcgcatcaattgcgttactccaatcggtgctcatcggttgaatggggctgaccggactgatcggagagctaatattttcaaaaaaaataaaaaatttgttttaaaattttgtaacaaaatgtaagcctttatacattttacatagtcccggattgtgtcataaaaataaaagttaagataaatttaaaaaaaactgcttttccgaacatttttggcacaaatttattgtttttttttgaaactcaacgtaattttttgaaattttacaggctaatagagagcacaagttacttgttatgaatataaataataaaaatttggttggattcgaacaaatgagaaaggacacttaaccaaaaaactgggccatcgcccatttggccctttccgacataggccaccacacttttggacatgtaatttaggcatttctttataaaaattca

SEQ ID NO: 70853 - DNA, 143 bp, Heterodera glycines
ctctccgatcagtccggtcagccccattcaaccgatgagcaccgattggagtaacgcaattgatgcgcaggaaatgggcgccggaggtgttggaggagggatcagcagcggaagcctgcatgagagcctgcacgaactttcgc

SEQ ID NO: 70854 - DNA, 1304 bp, Heterodera glycines
atgggggcgtccattaaaatgccaaactgcgtaagtccaaattattagtgaattttggctgaataaacggcttcaatatgttcactcagcgggaaatttggtttttaatgttttcaaccgactataaaagtacaaaaaattatgtcattgttaaaaaaatttaacattcacaagtaagtattaaaataaaataactaataatatttcgattttttatttaatttttattagaaatatacttatatatatatatatatttaataaatcattattaaaaatttaaagaataattaagtcgaatttatttatttattttttttaattaaaattgactaaataaaaaattatcaaatttttgaattaatttatttgaaatataaatagaacgcaattatctaagaaatttcggtttttgaattaattttttatttgaaattacctaattttatttttaaataatttattaaaaaaattaaagttataattaaagagtaatttctcataaattctttatttaaaattgttaaataaagtgaaaaatcttaaattaatttttttatttgaaatatatttattttaattaagcaccaaattcttgattaaatacaattataataaaaacaaatttcttaaattgtttattgggtctttattcaatttgaattttttaaattagttgaaatctttatttttacggtgtaaactgttttttagtctaatgtttgcattagctttatatttaataccatcaaataatttagactcaaagtaattaaacaagcatgcttctgcttgtttacataacctgtgacaaaatagtagaacatttgatgtctgaacatttaattaaatgttaatagtgctttttaatttttaaatgattaaataattcaaaaatattttttattaaatgtatttttaatttaggattttaaaaatctttcaatacaaataatttttatgttttggaaagcatcacacaatttgtctcgaattctccaagaaaaaattgtaaattaaatattgaaataaatttttataatgattgtttataggctaattttcgttgtttttcgaccagcaatcagttgaattttgcaaggatttgtacaaatgcagccgaagcaattagtgatattccaaatggcgccacaattctttttggtggtaatagagaaatattttatttttaaattaatttaaatgtaaatattatttaaataatagagcctatatgaaatgggagaagctggttcttccacgccgttgcttccccctcgcccccccccccccaagaaaataaa

SEQ ID NO: 70855 - DNA, 45 bp, Heterodera glycines
atgaatattatgccagccaaccttgggaagatgcccatgaaaaat

SEQ ID NO: 70856 - DNA, 214 bp, Heterodera glycines
atggcaaattactcagtaaaattgccaatttccgattctcaatttgcttggtttattgtcgaattggcctggctcgtcaaccgtgacagagctggttcaataaacactgctttgatgctgcgtcggatgtgtgaattcagggtgatcataatgattgcgaacaagcctttatttaagaaaaatgattatttaaacaaataaaaatgaaaataaa

SEQ ID NO: 70857 - DNA, 320 bp, Heterodera glycines
atgactgcaaagttttatttgggttcagttataaatcaatttccaattagcacatatgaacaacagttaggcaagggttttatggcttacaaagaattatatgacaaaatggacaaaaaaaaagatgatgccaaattcaacaaaaagtatgctaaagtgccgaaaaacaatgctgaagagatgaagccgttgccggacccatgtgagcaggcaaagctcaaatggaagaagaattgaagaagttgaaagacgaacattgaaattgagaggagctttttcggtgctatgtttttataaaaaaaagcatcgaaaaaggcgta

SEQ ID NO: 70858 - DNA, 1335 bp, Heterodera glycines
atggcccaaaccaacaataatcatcttaaacatgcttttgctctttttttggtcaccgcttttgtcattttaatcgccgtcgttttggcggaaaaaagtgtcaccaattcggacagtgccactgccgcaaaggtaagtggaaaagagaaaatgtgccttatgtggagcctataaaagtttaaaacacggttaaacagcctaaatttgcatattattgaacaaaaaaaaaagttcacatcacttttcaataagttcactttttgtggtgcgctttttaaaaacttttgatgaacagagggggggggggggggtgccgataggcgccgccggagaaaaacttgaaaattgctgatattttaattgattttgtccaaataatgatcaaaattttgcgattttgagtaaattatgagaaaattaaagatattgggtccaaatgtaaaatttgagaagtttatgcaatttgtcattagtagagaccgactaaaaggcaccaaaaaccgtgaacaaggcactataataggcaccaaaaaataattgaaaaacgcacaaaaatcccgaaaaaggcaagctttttaaaaatttattaaggatttttagggaaaaaaacacgaaatttaatcgaaaaaattaattttgatcatttaaatgattaatatcggaactaatgcccagaaaaaaagatatatgactaaaaagtcagtctttatgaattttctggttatgtaaaactattttttttgttgttgtaaatttgccaaaatcaaataaaaaaaaggtttttcaagtttaaatcctttcaaaaaaacaatttaaacactttccgtaaacttttttcaattgtttggcatcagaaggcctataaaaggttgtttttggtttgtttttttgctctaggacatatgatacccaattctgaaaaatgaacaattcacccgatacgtaaaaacagggtccgttctttccaatttcgtggataaatatttaattgttgaggggatattgatggattttctttcctttattgaattgtttcaattaaaaaacaacaaaaaaatcattaaggatattcaacggatggaaaaattacagaaagcacaggaatatgtggacaaattgaacgaagcgcaaaattattggactgttcgtccgattttatctatcaccgcaaaattatttttaaaattatttatttatttaaggccgtcgttcacaaaaattttgtaattatggacagaaagccatttaaaaaaatggcgaatgggccaattgaaacaccaaaacagcagaaaaaaacgcagcagagaaaggctaatgtaaattatattttagcaa

SEQ ID NO: 70859 - DNA, 705 bp, Heterodera glycines
atgggtggtccgtgtgtagcagagggcgaggcgcttgggcagatgaagcgcgagctcaccgaccgacggatcatcgagttcgttgcgggaggccccaagaactacggcatccgccacactgcgggggaaggctccgaagagcgcgccaacctcaagatccgcagattccgcctgtccaacactgcgcaacaactgctcacctttgaggcgatgaaagacctgacgctagccacgtacaacattgacggaccaatgtgagttttcaacatatcattttgattatagatcacatattaaattgaattttagcgatgatgccttggacaatgacgacctttacgtgtacggaggcggcgaacatcgtgccataagcgtcaatttcccgcaaattgatcgcaatgtgtacgccgatctctacacgcatgaggcccacaaagactacaggcccttctatgccaaggggcgcgttcggcctgggatgcagacgcgcccctttggctatgtggaggatgatggacagccgaacggaggacaacggacgccggacgcatcgacgatagagaaattttttggaacaagatcccacacagcccggacactctgggtggttctgatgttgtgatgttattttatttatttattttttattttcatttaatttgatatttattgtttatgtttaaattgtacaaaatattgtgacca

SEQ ID NO: 70860 - DNA, 671 bp, Heterodera glycines
atggtcgacgttccggctgattttgctgttctgctaaactccgcgccgccaattagccgaattgagtcaaacaaaatgcattggctgcgaaaacggcaacagacaaatgcgacggcattgcaacgcggcatcgatcagattggccaactcgcgacggaggtgcgaaaaattggaacaaaattagggacaaagaaagaatttaatacttaagtgagtgggaaaaataaattgagttaaaaaattataaaataaaaaatatttttccattttaataaatctcttaaaatatgaattttatttgccgaatccaaaaattaattagtgccatttaatgatcatttttctttcttcctaagagtcgaggtttgaagcgtccggtgaccagttttgcgcgttttgcggattctcccgacgaacaggcgctgtatttgctgtgggaaccgctcacttcggaccaaccgacggcaaacggagggccgtcctcacggatttatggatatttaaaagtgaaattaacaaataaagaactgtgcaattaaccataataattgtttaatgctgctgaattgatggcttatttattaaaaaaacaattttctcattgagcaaaggtcgtccgggaccgacgattgtatttggtggacggagaagggcgacagttcgtcacgacg

SEQ ID NO: 70861 - DNA, 399 bp, Heterodera glycines
atgctcggagttggacagctcgggaatcattgccaagtgcgaaatttggacagcggcccagccaaattggaaaagcataatgggcggaatgaaccaaagaaggcgcagaaaaggcagccaatggcagagcaaacaaccggagaaaatcagcgggaaggaaagagtgacacaaacggtgccgaaaacgcaaaggttgaaataggaaatggaaaaatgccaaaccaacctatgatatgccacgactttcgtcgcccaaaacggcgtaaaatgccgggcagaagggacaaatcgctgagcattccaaccaacggagtggacacggcgtcagtcacctggcggaaaatggcgaaatgtttttgtccgtctacatttgcagtttttccatggaatattcattga

SEQ ID NO: 70862 - DNA, 975 bp, Heterodera glycines
  unsure (1)..(975): unsure at all n locations
ggtcatttttacancgatttgtgcgcatcgatgtggttcacctatctgctgattttcttgagaaggtcgtcctgctgctaagttggcaagctggtctgctcatgttcattggacaggcaaacacggactgacaatcaatgaatattccatggaaaaactgcaaatgtagacggacaaaaacatttcgccattttccgccaggtgactgacgccgtgtccactccgttggttggaatgctcagcgatttgtcccttctgcccggcattttacgccgttttgggcgacgaaagtcgtggcatatcataggttggtttggcatttttccatttcctatttcaacctttgcgttttcggcaccgtttgtgtcactctttccttcccgctgattttctccggttgtttgctctgccattggctgccttttctgcgccttctttggttcattccgcccattatgcttttccaatttggctgggccgctgtccaaatttcgcacttggcaatgattcccgagctgtccaactccgagcatacgcgaatggtcagcggaaaagcaattaatgagagcaatgtcattttagccatcccttttcagtcaatgacttcctatcggtacggtttcaccgtggcagccaatctgttcgtgtttgcctgtctctttctgtttttggcccaagacaaggacaccagcaaaatcaaaccgtccgatttggccaattttcgggttcgacccacaagcaaaattgatttcttgtcggacttttcaacatccaaaatctccactcgttcagaatctcggtctggttgctgttgcgcttggtaccgccgtcacggcacttttttacgggggagttagtgagccgaacagcggacagcggcggatgagccgactgaactcggagagcggcgacgagcaccgattgggacgcatgtcaagcaagaaaatattttatcatggggctgaaatggaaaga

SEQ ID NO: 70863 - DNA, 49 bp, Heterodera glycines; identical to SEQ ID NO: 51181

SEQ ID NO: 70864 - DNA, 270 bp, Heterodera glycines
atgctttttctcctttttgtatttgtgtttttaattataaacaattcaactgacaaaatattgtcagttaatctgtgtaaaaaattgggccaaatttttctgaaatatttggcgaagaatgggcaaatccacaaatggaagaaaatcaaaatgaattaattaatcagaccgatcagttggattttcagaaaaaatgtcaaattattcacaaatttcatgcaataaaagaaagaattaacaaaaaaaaaaaatattcggaaaaaaattgga

SEQ ID NO: 70865 - DNA, 369 bp, Heterodera glycines
atgcacgcgttttgcgctcgagctatttatcatcgggcttgtcaatccaaagcgaaacaacaaagatgctgttttgaacgaataaagggcataggttattttgaagaagtgtcaaagaacatgcagcaataagcctgcaaaatctaataagtggaaaatacatgagtatagaatttattttcagaaagtgtcaacagacttttggaaaatatatttgcaatttatcaacaattttgagaagtgagttagaaatgataaacttcacgattcaaatcaattttcgttgctctaattaaccgcgataaaaacattcgaatcaattaaataacttctgagataataaggtttatcataaaatttcaattaaaa

SEQ ID NO: 70866 - DNA, 109 bp, Heterodera glycines
attagggctccaatttttaggcaaaaggctatttttttcctgagctccccgtggcctaaaatgcacgaaaaacatgtttttttgggctgttgttaagctacttttcgag

SEQ ID NO: 70867 - DNA, 758 bp, Heterodera glycines
  unsure (1)..(758): unsure at all n locations
atgaagccagacttaaaagaccgggactttatgtacaaattaattgttgggtatgttttccttgatttttgttttcaataatccattttagccaactcttttacgatggtcatcaacaattggcactgaacttggcacaaacgcttggcctttcgctacgaccgcctcctccatctgacaaactttttcgtcttgtggcaatagctaaacaatttgtggaagatcccgagtctaaagaacgggagacaatcttgcaggtgttgttttgatgactgactttttccttttatgaccatttatttcattgacaaaaggtcggtgggtttgagtctgctgggcttgacttggaattcgatgctgatgttgtcccgacaagtataatatagcatcaaatctgagtaaagacaaatgtttctcaaggccctgaaccaagtttgtacgaaactgtgtacctcaccacacacaaggccccgtgtcgggcggctgctttctctccagatggtattcaattcgcgtttagtgctttacattttaatttctttaggagctcttgtcgccacggcctccaatgattgttcaattaaaattttggatgtcgataaaatcatttccaggcaagttccccaaaagggtgcagtttgttaacctggcccaccaaggattgacgtgactctgagtgagtccggccccgacgcccatcacccgggtcattcggnaccctttatgcccccacctcgatgtgacaaacaaaacactta

SEQ ID NO: 70868 - DNA, 606 bp, Heterodera glycines
atgaattttctggggtatattgtaaacaaaaatggatatacttcaagcataagcaaagttgaatcaattcttaatctgcaaaatccaaccaatgtaaaggaaataaggcaagtagtgggaatggcaagctttttcagaaagcatattccgaatttttcaactattgtggaaccattaacgagattaactaggaaagagaagcaattcaattggactgatgagcaagaaaaagcttttgaaaaaattaagaaaattctgtctgaaaaacctgttctgatatttccggactattcaaagccatttcacatattttgtgatgcttctaatgtgggtcagggaggcgcattaatgcaatgggattctgaaaaccgagtctataatgcaattgcttattgtagcagaacgctttctaaaactgagagaaattggcctcctgttcagactgaattaggagcaataattttttcgcttcggcaattcaaaccgttcatttttatgtcaaatatcgaattacatacagatcacaagccattagcttttctattaaaaaaggcagaaacacatcaaaagttggctaggtggcttattgagcttcaaaattataag

SEQ ID NO: 70869 - DNA, 81 bp, Heterodera glycines; identical to SEQ ID NO: 66151

SEQ ID NO: 70870 - DNA, 438 bp, Heterodera glycines
atggcttcaataaacgatttagattatgttcgagattatgattatgtttatgatttagattttgatgaaatggaagaatgtgttgagattttagatcaagaaaatgaaagaaatattaggaattatgatgtgtttgaagagcataactatgctaagagacaaagatttgtggatggtggtcccagtcagggatcaatgaatttggatgctgaggttgcggggtcatcccgtatgactgacagtcaatttgaagataggagacttgagaatttgcgaaagaaaagagagagagataggattagatggcagaataagtcacaagaatccagaaatgtgcgcttagaacagatgagaaatagaaattgtaatgcaatagcagatgaatctgtagcacaaagacggatgcgtttagaacaaatgagaaatagaaattgtaat

SEQ ID NO: 70871 - DNA, 795 bp, Heterodera glycines
atgcaaatggacgcgacagatgcggcggatgtaagggggggggatttttataattattaatttttaattaattaattaattaaatcaaaatagtttttgtaaaaaatgggtaaacacggggggccgggaggaattatttttaatattatttttaaattaattaaataattaaaaatgtttttgtaaaaaaaggggggattatttttattaattttgaaaatcatttaaataattaaaatgtgtgtttgtaaaaaaaaaattttaaattttaaattaaataaggtattttgatttatatggggagaaaatttattagtattttatatcacttaaaggaagcaaaaattttatgtattaaataaaatttaacttcaaatcaaaatatttttaaaattaatttgtgaggggaaatattttttaaaattattatattgaatttattttttaattttaaaatttattttcatttcaatttttcttgaaatattatttttaagcaaaaaactaagttttatctttctcgagaatatgatcattttgttaatttgcctaaattttagaaaattaattaattattttaattatggcattatttttaattatttaaatttttaatttttacttttttcagatatcagttacagattgtgaaaatgagcgcagcgaaagtggagtgaccattgataatcgtggcgaacattctttccatttcatcattgatgaagaggacgacgaaatgcagccaatggaaatggacgaagaagaaaaagcggacgaaggcactaagaggaggag

SEQ ID NO: 70872 - DNA, 145 bp, Heterodera glycines
agggattggacattcatcatattcaagtgtagcggttgaagaacatacagatggtgatcgggaaaaagtgatcgaaatttcgttttgtttatttttcgccaaagctcgtaatttagaaggcaattattaaaaaagctgtggattg

SEQ ID NO: 70873 - DNA, 870 bp, Heterodera glycines
atgcgtcgcttgtcacagctgtttttgcggtgccattggacgccctcggagattgcggcgagttgtcgtcatgccagcagtgccgccaccgcccgtcccttgtacatggacgtgcaggcgaccacaccgatggtgaggcggacgggggaggagtcaatgtgacaactattaataacttttcgggaatgtggtcctgccgaaatttaaaaaatggccagcatctctatctacgctttcggttttattttttcgacattttttcctgtaatccgaggggatgccgttcaagcgccctattaaaaacaaacgtttttgtataattgcttgaaccaaaaattgctttgaaaagatttaattaattaagtaattgctgattattttcgtttgtaactttcttgaaatgttagaattctcttgttttctcgtattattacattattcagactttgtgctttcgaatgataccaaaaagatagaaaagttattgtataaaaacccggcattgtcaattgtttggactcataaagtgcattagagccgtacttttttctacaagcacccaaattaaatattcctggctttttttttttgaaatgtaacggaatctgaaattttgaatagagatttattggggctatcgaatgttggtagcatttgcttggcaaaaccggttggtaccagggcgaacgcgttcttagtcgggctttaagtaatccaccatttcactttaaaaccgcacccattttccagacctgggacaaaaccgactggcgcaatgcccgtttcgagtatacgccgaagcaagtgaatccgcataatgcggcccatttgatcgccgagctggcgcccgtgcccagcgaggagcgcgtg

SEQ ID NO: 70874 - DNA, 701 bp, Heterodera glycines
atgacaaaggccgaggtgagcagggcgaacagaacgaatggcatggaattgaaaaacggggctgaattttacagagcatattaaaatatttgcctgagggtcggggttgttagcggaccaagccgtttcatacgagctcaattttttgttataatttttttctttagcaaccaaatccaacaatcttggtatcattcgatagctctaagagtcctctattaatttgccaactttcgaaaaattctgttacggttcaaaaatgtttagaaacccagttttttgaaattttctgagcataacttttttgaacctaacgaaatttttcaaaattttgcagattaataaaggactcttgggactattgaatgataaaaagattgttggatttgcttggcaaagaaaaaagttatagccaaaaacttgtgctcgtacgaaaacgaccccgaccggatgttagcccctctcccgcccgaagcaaagtggggtttggcttctattgagggtttctaagctataattgcaccatctaattaaaattttattttgcaggaattggacattcatcatattcaagtgtagcggtcattcattcgtcggtcatacagaaatgttgcgctgtttttcagtgatttgcactataaatatgaatcgttgtgtaaaatattttgattaggaaatgtctcatttatgaatcgaataaa

SEQ ID NO: 70875 - DNA, 1442 bp, Heterodera glycines
atggaacccaataacaataatgatcaggcaaatcagtgccaacaaaccgatataagcaaaagcattgagtccgcggttttgcccaccatgatggagcttggtggtgatgaagccaatgcttcttcacctcgtgctgctgaaacggcacaaatgccgtcattgaatgccactgccacaaatggtggcccgggttcattttgtgatgggacactgggagcaccaccttacgataatgggcatcaaaatgctgctgtcacgattgcggcggcggcgtcgcttcctaagaccaccaaagcgcttggcgagccggcgaacagcggcgtcgctggcggcggtggtgtcgattcgctcgaccagccgagcgacgatgtcgaggagtcccaccaagcggaagagcttgtggtcaaggaagaatgcatctttccccaagacgagtacatggaagacgaagaggtacctcattcccatccaatccatccaaaccaaatataggaatgaatttggccattcccatatggccatggttaggaagcaaattgctcttcatttactcttggcttattgtcagcgtcttggccaacttttcactctttctcaaagcatttctgtgccaccattctgtcctgtcaaacttctttttcattcatctcacttcgtcattctctttgtttattggttcatactaggcaaaaattgttattatgccatgacgtgaccgaacatccatccccccccccctccatttttattaaattttcttggcacaaaaacagaagtatgtgttacaagcggaaggaatctggcaaaacccctaggaaaattgtactaaaagagcggagaaggaatttttttttatttaccaggcgatttctccaaattgctgttgtgactccccaaaaaaaccccaagtcaaattttagggtgtaattttacagaatatctgcccctttcgtgattagagactttcttagtccaataatacgctcattgttagttgagctgacgcatttggggataagaaaaacaaaacaaaaaatcgctaaaaacattatattgactttgaaacaacgcaaattattgtatttattcgaaatttccttttctaactgttctatcattaaatcgaattcttatccgctttttccattcattttactttttcattggcacaatattttttcgaaaattgttcaccattaaaacgagcatttttttaaaatggaatggaaaaacatccacaattattccatttttttttgtagctgcaactcgtcgatcagcacaatgatgacagtccgccagaaaacggaattgccaccaccaccgatggcaccaatgagcgacagcagaaaaacaatggcacgacagcgcgtgatggggagacaaagcaaaaccaaccgaaaacaattcggatggtggtgccaataatgctgaccacactg

SEQ ID NO: 70876 - DNA, 1451 bp, Heterodera glycines
gtattggttcgtcgtcagcagctgacgacgattccaaggtgggctcatcgtcgcgatcggccaaactgaagcgcgagttgcgttttcactgcgattggcccggctgtgcatatgcaactgcttacgggggcgacttgaacaagcacaagcgcaagcacacgggcgaacggccttatcaggtgattaagcgatgctgcgatcaaaatgcttaattagagaggcaatttgacaatcgattgttgatcagtgcttggttgctttttaattacgcttgtgatcaattcttaattgccctggtgattaattttaattacgcttgtgatcaattcttaagtgccctggtgattaattttaattacgcttgtgatcaattcttaagtgccctggtgattaattttaattacgcttgtgatcaattcttaattgccctggtgattaattttaattacgcttgtgatcaattcttaagtgccctggtgattaattttaattacgcttatgatcaattcttaagtgccctactgatcaaaatttttcatttgaggagcaatttgacaatcgagtcgagttcttgagtaactagttaatatttagattatctatatatgttttttaaatttttaactaacttaacattcatcaaaatcggttaaccgtagagcaacaaaattcaaaatttttaaaaatctgacacaaaatagcaatttttgtcggaaaattcgggtttacccatcccattattttgtttttctggatgcgttacgcctgataaatattactatattttataatttttatttgtttgtacaacagtgtgatcagtgccatgccacgtttggtcaacactcttcactttcggcacaccgatacacgcacagtgacatgaagcggtttcatgttcgtttatttattggtttattcaaagaaactttcatgccctttaaaagtttttttaaataaaaaaaaatcaggaaaatctttttgaacttttcaagaaaatcccgaaaatatggtcttcacctgttttttcttttatgaacaatttcctttatatctatctttaaattaaataattttttcaattatttttttaagaatttttttttgatttttcagagacggaaatgtccccattttattaaattaggtataaacatttattttgcccttttttccagtgtcctcagtgtgaatattcgaccaataaatcatcggattggacaaagcatttgaagaccggaaagcacaagaaaagtctttaataatgccatcattattttattggatttctcagcatatttttttaaccaatttatttaatttgccatcaaaatcccataaattcaaatggttttgaaaattcaacaatttttttgtgtatctgcgcatttcttttcctatttttgacgacaacaattccatggaaaatgtgcccttaaaaatgcaataaa

SEQ ID NO: 70877 - DNA, 984 bp, Heterodera glycines
acattggctcaacttttgaaggtcacgcgcagtgcacaacgacgtgaagcagcggaggacgcggtgccgccggcaaagagacaaatgggctttcgaagaggtccacttgcaaatcgtgagtttaatttaaaaaattaaataaattttaaaattaattataatccattacatttcctttatttattttttgacaatttaagcgccgccaccaccaccaccatcacaaattgaagatggtttgccgttgccaatgccaccatcaaatgccgaagtcgtcgccgaaccaaatgccacaacttcaacaacaacagcagcaaaagtcatcgccagccgaaataccggctgctctacatcatccaccgcattgacaatggtcacgcgcagtgcacaacggcgtgcagcggaggaggaagcggttccggcacttgcaattcgtgagtttaatttttaaaaaattaataaaaaaaatttaaaattgattataaattcattgtatttcctttattaaaattttttgaaatttaagcgccgccgccacctgccggctgctcatcatcatcatcaacagcagcaaatgttcctcagccgtcgtcgtcgtcactttccgccgaagaaatcacacgacaaaaaaagagggataaaaacaacaaaaacaaattcaacaaaaaacaggcaagctttaataaaaagtttaaatttcatagcatttaaataattaaaaatattaacctttcatagtcttttaaaattattataaaaatggttttaataattatttttaaaaatatcttccaaatttcttttctttttagccgccgcccccatcaatccgcattcctaagggcaaaacgccgaagaaggtccgtccacgccgcccggaacccgaccagccggacgaccaatatgagctccgggcggtgttggcgaccgccgaagtggtgtccgggggcacgacacatctgtgtctgtatgtggatttccttg

SEQ ID NO: 70878 - DNA, 56 bp, Heterodera glycines; identical to SEQ ID NO: 52733

SEQ ID NO: 70879 - DNA, 693 bp, Heterodera glycines
atgactttggcgttttcctttgctgcaccgcttcaaaagaaggtaaaaaaatgctcattaaatgtaattaaatttaattaaaaataagacacgaattggagttacaaatgttcggcaacccttcgaattgtctctcaaaagaatgagacggaacattacacttggaaattcattgaccacatttttaacagtaaatcaagtcacttggctttccccgctttattttcatttgtggtgagtgtcgaccaatggaatttcgttttttcagttaaatttggagctgttatttgttttcttgatatcatctttcctcaatataagccccttttgagggagcttgaaagattggagcccccggcggaaacctatttaaatagttaccggacaagtggttcgatcggttttaccgataaaaaaaccgaataaacaagatcgatcgtaccggtcctctaattttaagactataaaatcggtatcttggatctgatcatatcattggtacaggataatctttattttaataaattaaattcagcgattgatggatccgagcaaaggacttcacaacaaaattgcggacaaagtcacattggccattgacatcactgaagtggagaaattggattcgaatccaaacaaacccaacgggacaattgtaatggaaattgacagattgtcgaactttgcgcaaag

SEQ ID NO: 70880 - DNA, 254 bp, Heterodera glycines
atgtccaaatggattcccacattttacacattgaaccagaaagttctcaagcaaatacgcaaagtttcttcgaagaaaataatcagctcaactttgaggtcacctttgttcattttcctcatatttcctgtatttcccttaaattatctcacaatttgctaactcttttccttatttttgttttttagattgatacgactgaatctctgacccccgtggctgggcacatttgtgtcgaataccgaggtgcctaa

SEQ ID NO: 70881 - DNA, 364 bp, Heterodera glycines
atgtcttcttttgccccattttctgctctttttctgttggctatggtgctcaattttcattctttggtgggtcaattttggccaatttggcccattttcgatcatttttcagaatgggttgatcaaacgcgagtccgccctttccaacggtcgtccgatcactttttgttcatttgattattaaataattttagtagaaattgctgaaaagaaggacgcactgaacgaagagttcacgaggaaatttggcgatttgcgtgagggatgttttccacggccgaaagggaaagggtgccgatgcacagtgaagggaccaatgggacatgacgaggagaagcgatttgacagggacgaggagtgccga

SEQ ID NO: 70882 - DNA, 1417 bp, Heterodera glycines
caggacaactgctcatggaatgcccaatgctttgatttgccggacgacggcgacgtgccgagttggcgctgtgtgtgcaacccgggcttccgtgggaacggagtcaattgcacgggtcaatcagtgccatggaacggcctgaataccatttgtccaattgcagatgcttgtctgaacttctgccttaacgatggcatttgccgtaagaatcgcttgggtcacgtggagtgccaatgcaaggagaacttctcgggcgaacgctgcgaaattcgttttcaggtgttttttgttggttttgttttgatttcaatgctttttcctttaagccgcgatcgcaaaaattggcttattggacgggttccattgtgtgagtttgggttttatcatttggtaaatgtgctgtcacttggtcagttccgtggtattccttctcatcattatcgttgtcgtcatttggatgatttcgttgcgtttcaatcgctcgtcgtcctccgaggccaaattcagtaattcttcgcttccgttttggttgatcacttatgtaatctgctgatcatccatgacccccatttgctttccgatcattttttccttatgtccttcgattcgatcacttttttcttgtctcccttttctcgtttaccatccgatcactttttgccatcatttacaatttgtgcccttcctttgtctgatcactccccctcctcattcttcctcattttgtctttttgatcagtcttcccccacctttgcgcagtgtcctccctggagaagccctccgtgttctcctccgtccagcccgactcgccgttggcctccaactttctctacggccgtgccccgccccgcttggccatagatcggtcccattcgtcatcccttgccggctccatccgtcctcccattggcttgtactacgaggatgaacagccgtatgagcaaagtgctggcggcggcactttgccgcgtggagcggcgaggcatttgaggggagggagtcaaagccaagaagttggagcaggacagaaaggacaaatggactaatgtgaccattttaggcaagaagtatgtttttgggtgggcctgacggaagcgattcgtcgactgtccaactgaacaatgcgttggtgcccccggggagtcggagccctgctggtgccgagtctgaatccgatcagagcccgggcggggccgacaggcaaaaacagcccattgaccaaatttaaatttcttttttttcagtaatttttcggccactcgcgaattggaacaacggttgaggtaaaagaaaaaaaggcaattggttgtcgatggattttaacattttaggaatgttcaacagcatatgtacaggcagaacaacgagcaatgaatagagaaaatgaagaaagtgccaataccaaatcagacggaa

SEQ ID NO: 70883 - DNA, 1017 bp, Heterodera glycines
atgtacaatccgcaaggcattattactctggcacagcataaagtagcagagcttgaagccctagccgacattgattggcggctgcacagctgctttaacttaagctgtgtgcattttagcctgccagacccgccaaactcaattgccaaaaatactgacgcggcaattgaagagtttttctttggcgatgatgatttgaatttgcctccagggcaaccaaatcctcgtccacagccaaatacccctccgccacttaacagcgaccaacagaaggtctttgatgctgttttgttggcaatacagtcgaaccctagggattcgactgtcccccgccgtttcttcatatacggcgatggaggcacaggaaagacattcctgtttggccaaattattaggcgcttgcgaaaggccccatacacctacaaagtgcttgctacggcatccactgggtgtgcagccattttgctgccatatgggaaaacagcccattccacgtttcgtctgggtagagaagtgtcattagacaaactcccaagcattccgctggagagcttctttgcccgtcggattcgtgaggcccaactcatcatcattgatgagatcaccatgcttcacaacacggtgattgaggtcatcgaccgagtgtgcaaagagatggcaattcgccagcacaaggatctcctcttcggaggaaaaacggtcattttcagcggtgacttcaaacagtcgctgccggtcgtgcctcatgaaggcttaaccgctcaggtgacagcctgttttcaaacgtctccgttgtttggtcaattcaccacgatgaaattgaccatcaaccagagactgggccaaggtcagcaagcgtacttgcaaatgtgccgccaaatcgggctcggagaaaccggagagcacttctggattcctccgcagttcctcgttaagagcaaggaagagctgatagattatgtctatcctaacttccaacaactccttggcaatgacaaggagctgctcaatcgttag

SEQ ID NO: 70884 - DNA, 348 bp, Heterodera glycines
  unsure (1)..(348): unsure at all n locations
ctttngaaaattctgcctgacaacgtcctgcagcgttttgttgtcggatcgacgcatggcattgtgttacaattggatttgaacggcatgattttgcgctcttggcacgaccccgagggatcagtgatttcacacatttcggaggtctcaaaaaatttttttcaatctcatggaaatcatttaattaggttgatgatgatggaggcgattttctgtatttgtccagttttgtgaacaattacattggaagaatgtcgaaggaatgaagaatccaaaatttggaatgaaaagccgataaaactgcccaatttttcaaaatatttttttttgataaattcttgactttta

SEQ ID NO: 70885 - DNA, 213 bp, Heterodera glycines
atggtcggctcgcagcagcagcaacagtaccatttgctgccaacgcagcagctcaaccacaacaggaacaagcagtacacgacacaacaacaacagcagcaacagttcacctcgccgtacgccacctccaactacggttaccacgaactgacccatccaccggcctacagtatgagcatggtcggcggcggagacgcggggcaacgacgatag

SEQ ID NO: 70886 - DNA, 740 bp, Heterodera glycines
atgtcaaacaaattaattcagtttttcgtttcgctcttcatatctttggctgcatgcgggcacgtaccgccaccaaatcactggagtgcatcgttggacaagccaaagtcaggagctttaccaaaatggacactgaatcgtcaggaggaggaggatttcaacgaagactttggtaaaaaatttgtcttcgttagctatagattttaaatatctaaatgtgatttaatcatttaataaacattaatgacgagcttaataacttatttcagggcgagaaactcaatgtggcctaaccaagcaccactttcaatatcgtgttagtatttaaataaatatatttttaaatgaaaaatgaaaattaataatttttcttctttgcgttttatatatttttttagattgttaatcattgtttatctataaacttgataattttaaaatattatttattactaattatatttaagtcactttttatcgataatgatttttattttttccgacatacagattgaacatggacaaattgcaccagataacgactggccatgggcagtatcagttaggcttgagtgtgaaacgaaacaaagtgcaaagcgagaggtgcttgggatttgttctggcgttctaataggcgcaaaatggattttgactgctgcacattgtctatttgcaactgatgatattttgcgctgcaaaggagtcgaacttaatggactaatcccagaaaagggtgcacg

SEQ ID NO: 70887 - DNA, 599 bp, Heterodera glycines
ctagcttccctggtgtttgcccttactgtaactggatcgaagagaagacgaaaggcgaagtcaaatgcaatggaatcgcccattaatgcggttgctttcgcgtggatgtttacgatcatttggacaacactgacgaaaaacataaaagttgtgaaaattgaagttaaaatgttgataaactaattattaaaggacgctttttattttggaattcctagccttaagttttaaactgataaaaatttttttaaaagaaaagatatttgaagtaaaaaatttttcgaaaagtctaaacaaattttttggaaacatgttaaaaatgtgataaaactacaaatattttttatgtaccgaacatccaaattattttatagatgctgaaaagccattctaatccgaaaattagcgtagaaaatttattaaaaataatttatatttatttttttacccaacatttttttattgaaaaatttcgtgcttcgaaattcgaaaacttcgcgtttttcgcttcgaatttctgttgccatctaaaatgacctcctgtctcatttgcaattttgacttcttttttaataatacaaagcaaatcccttattcta

SEQ ID NO: 70888 - DNA, 552 bp, Heterodera glycines
atgcagaacactcagcgaactgagccgaaggtcagtggcaattattgttggatttttaaaacgaatcgcagactaataaaaaaaaattgccaaatttgcgaaaagacatttgttggattattagctaattcattttaaaaatccatccttagaagtgccggcttttcttctgttattaaatccaaattaaatgatcacagttctcttttgtaggctttggcttatggtaggattatttatgagtgttcactgtgctcaattggccacggatttccattgtccccaagggctaaaatggcggagacataaaagtgccgggtgttcgcctaagatttggccaagataaatggtcggctaatacatcaccaaatgttgcctccaaactttccatttttggctcccatttttcatatttgaattccattttaaaaaataattcatgtacgaaccttttatataaatggtttttttggggttcgaatttgggaacatttaaatttttgcacgaaatatttataaatttcttaaaagttcaaaatttatgttctgaaa

SEQ ID NO: 70889 - DNA, 325 bp, Heterodera glycines
atgcacgcgttttgcgctcgagctatttatcatcgggcttgtcaatccaaagcgaaacaacaaagatgctgttttgaacgaataaagggcataggttattttgaagaagtgtcaaagaacatgcagcaataagcctgcaaaatctaataagtggaaaatacatgagtatagaatttattttcagaaagtgtccacagacttttggaaaaatatatttgcaatttatcaacatttttgagaagtgagttagaaatgataaacttcacgattcaaaccaattttcgttgctctaattaaccgggataaaacattcgaattcattaaa

SEQ ID NO: 70890 - DNA, 375 bp, Heterodera glycines
atgcacgctttttgcgctcgagctatttatcatcgggcttgtcaatccaaagcgaaacaacaaagatgctgttttgaacgaataaagggcataggttattttgaagaagtgtcaaagaacatgcagcaataagcctgcaaaatctaataagtggaaaatacatgagtatagaatttattttcagaaagtgtcaacagacttttggaaaaatatatttgcaatttatcaacaattttgagaaatgagttagaaatgataaacttttcgattcaaaccaattttcgttgctctaattaaccgggataaaaacattcgaatcaattaaatagcttctgagataataaggtttatcataaaatttcatttaaaaataaa

SEQ ID NO: 70891 - DNA, 730 bp, Heterodera glycines
gtgcagaaattcacacgggccaaggacgagcagtactacaacaacttggcctatgtaacaattgtacaaataggcatatttgaagaaagctgtgtttacttaaggtggaaaaaccgcaaaaagatttccccggcttggagttggagccggtgcagctgaaggccggccaagtgtccaggtatcaaccggtgcacgagaagttggagacggtcgcgctgagagagttgaaagagaaggaggcaaagaaagaggcggagccgttgccggactgggccagcggagaggtgaagctgggcgagccggttggaaagtgagcgacggaagggatgacaaataaagaaatgcttaaaaatggcatttagaatctcacaaggtcccgagcctgagcgggagccgagcattccgcaccgggaccaggtgaagctgaagacggccaagccgaagccggccaccgaagcgccgccggtagagcacgtgaccattgaggaggaccgagcgaaaatggcctcaatccaacagggccccccaattgagcaagagccatttgtacggatggcatttagcaaataattaattagggtttattatttcgaaatcccatttgaaggtggcgcacaaagaccaagtgcagataaagcagcagttcaaaccgaaggaagtgaaagtgcacgagcagggcaaagtggagggcgcggacaaacagctcaaagacattccgccagtggtcaaa

SEQ ID NO: 70892 - DNA, 76 bp, Heterodera glycines; identical to SEQ ID NO: 53797

SEQ ID NO: 70893 - DNA, 155 bp, Heterodera glycines
  unsure (1)..(155): unsure at all n locations
taagcctaaactttttggcctgtttanaaaggaattaaaaatttttaaaaattttattcatctcccttttgatagaaaaagcatcagagagccttatttaactttaaattaacatttggtgcgtttcagagcagtttctgaaaaatatttatgaa

SEQ ID NO: 70894 - DNA, 1746 bp, Heterodera glycines
atgcgacggtggcttatgatattaattgttgcagtggcatttgccgcattagcatttggcccaatttcggttaaatgtggaggtaaaaacaaattttatatttaaattactaaaataaataaattaataatttgtagtgcttgaggatgtaaaggattatgttgaggcattttccaacatcattgtgcccgccggaagtgttggagaacaactaaaaatgatatccctgagcatgccaagattggttcattggcgggtcccgttgggacctttgcagctttggccatgcagaaggcttttgaggttcggtcaaatcaccattcttcaaaaatgcatacagaaaattatattaaaaaccgctccaaaatttgtttgttttccattttgaaaaaaaggcaataaatttatgcttatgacttacaccaaatttttgtcgaaaagccttacttcttaataatcccttcctcctatttttcagccagaaagtgaagagctacaggcattgaatttgttgcacgtcaccatgattaagcagttcaatgggctggaccaacgaattgaacaccttggtaacaaattgattgagcatatggccctagttgaatacgatcaggtgtatactatgagtaataaatatttaaatatattttataaatatgttaagatgattacccatccgcttgacattattttgcgtgtatacaaaaaaattaccgacccaagccgaaaccggactctctaccgaaaacaatttgtccatttttgtacgtaccatttatctccacacaattcgctgcttgtaactatgcgataaaaatataattttaaaaaatataaatattttttagttacactaatatatatttaaattcagtggctcaacaaacgagtgaacctcaattgcgttaagccgacacaggaagaagcagacacctttgccaaagccagcaaaatttttgacttaattgacaaaaactcaacaaactttgttcacctaactcaacgtcgatacgccgactttcgaaggagtataataattcttcattttttgttgtttaaatttgattttagaaattattcatcagctatcattggccaaaaatatctcattgttggattcagttaaaagtacttaaaaatatttttttaaacatagcccattgctgaatttaatttaattaaaaataattaatatttattaaaaagtctcaattatttttatttgtaatacttaattaattcagataaaatatatggtccaagctttgcacttgagagtgcaattgtcgatttgcatcactcgcttaaaattggtctttatcagcgaaatcatggcaggtaagaatggttaattttacctaagttaaaaatttgataaattgaaacttttatttacaattttattaataacaaaaaacctaataattgtgtggcagcgccaaaattttatcttttagatgcattttgaaggaaatttctgatgcgaacgaaaacattcgtgaagagttgtatgaattgattttaatgattgaattggactcattaaaattggtcctctttatttaaaaaattattatattattaattctttatttgaaaacagatctcagtcggctcattgtgtgccaatgtttcgcacaacggcgacaaaaaagggactttggatgagttatcggatcttaaagccttcggcgtcaacattaccaccggaatgcgaatttatagtgatcaaaaactcgtaataaa

SEQ ID NO: 70895 - DNA, 395 bp, Heterodera glycines
atgccatcggacaaattggcgggaaaacattccaacagttacggataccaaagcgatggcaccttttgggttaacggtttctgcgtaagtggaaagctgggattttcggagggggacacggtcggatgcggcgtcaatttggccaccggacggatcattttaaccaaaaatggacttcgattgggttggcaaaaattaataaatttaaatttataaattaatttactgtcagacacaaccaaaatgttcgccgtggcttcttctgcagatgacccactgtttccttgtgtttctttgtgcgaatcaaatgacaaaattgtggcaaattttgggcccaattttaaatttgatccgtccgctgttgaagtaaaaattcttttaattaaataattaaa

SEQ ID NO: 70896 - DNA, 49 bp, Heterodera glycines; identical to SEQ ID NO: 51181

SEQ ID NO: 70897 - DNA, 911 bp, Heterodera glycines
atgtattatttaagcccttttgtacgaaaaatgccaggttcgtaaatttaaactcgacttttgctcgaattaattttggggattcgggattaaaaattgatttgacttttaaaatttaaagacccagggatgggccccaaaaatttttggaagtccatacttcctggggtcaaaaatttttcgtaaatcgaattccgatcccaaaaacataggaaatctgaagttaagttggaaattttttaaaatatataaaatataacaaaaaattttaaacattttaataggaaattttaaaattcttaaccaagtaaaagatgtttcaaaaatgcttttggtatatcaggttgaaaaaaaattcagtgattttcagcaaaaccttttttcatgttattttatattgttttagaacatttttgagaaagggattattttgttcaccttttttatttcagatgaaattgtacaaaaaggctaaaattcaaaaaaaattttgaaaatttctgtctttttttgttacagaatttcggaaatcggattttcgtgctatccttgctacgtacgttgcataagagagagatagagagagagcaagagagagagagagcgagagggaaatcatcgagaggaagacaaagtgagagagaaggaagagagagagagagagcgaggagagagagagagagagagcgaggagagagagagagagggggggggtgagaagcgagaaaaagggattgagagcgagagaagagaggaaaagtgagttagagggcgaggggataagagaggaaaggaggcagagagagaaaagaaaaagagagtgaggaggataaagagagagagagagaggagagaacagaggaaaagagagagagcgagcgagagggaaatcaatgagaaagcggaataaa

SEQ ID NO: 70898 - DNA, 531 bp, Heterodera glycines
ctgccaaatttggtgtcacagaattgtttagcccaaatgatcgtccaaatggcaaatcattgcccgaatatttgcgtgagaaatatgatggtggccttttaattgcattcgaagctgctggcagtcatttggcagtggtttgtcaaattaataatcataatagcccaccaaattcaaaattgtggtcttctttcatttttggttatgataactgagtcactagtgaaaatggatttagtaccaatatttttttattctttatccattttttaatgtttaatagattattcaaatcaaattctataaagaaaatttaatttagttttttctgaaaaacattaaaagcattttcatgctgcctcttttgccttgcacatatataatagaattatagtcatttaaaatttttaagtcattaaaacgtaattagccgaacttatttgttataattggaagatctgatcaatgagctattaaatattaccatgaaaaattaatttggttgaaattcagtcaaattatgaaaataaa

SEQ ID NO: 70899 - DNA, 304 bp, Heterodera glycines; identical to SEQ ID NO: 53844

SEQ ID NO: 70900 - DNA, 437 bp, Heterodera glycines
aaaatggtgtaagtaaaatcgtaattacgctcaaaaagcttttcaaacaattttagcgcttccaattccttctacaatcgcctttatacatcccattatgagcgctaaaattatcagagtgccgaaaatcgcatgtgatctaagcctagcaaaaaatggtgtaagtaaaatcgtaattacgctcaaaaagctcctcaaacaattttagcgcttccaattccttctacaatcgcctttatacatcccattatgagcgctaaaattatcagagtgccgaaaatcgcatgtgatctaagcctagaaaaaaatggtgtaagtaaaaatcgtaattacgctcaaaaagctcctcaaacaattttagcgcttccaattccttctacaatcgcctttatacatcccattatgagcgctaaaattatcagagtgccgaaaatcgc

SEQ ID NO: 70901 - DNA, 989 bp, Heterodera glycines
atgccaaccgaatttaaggtgcccaaattcaataagtctgacactcttgtggagtttcttttgggtgagaatggtgccggtcggcgggaattggaacgaacgaccgacggaggttatttataaattaaaacgaaataagtattaaaaagacgaagcgataatgcccaaaatcataaatttcacaataaattctcatctttattaaatatttggcagaatattggaagacgcggaaaacgcttgtttttgtggagcgaaaacggagctcggacatgttggcaattgcacttcgacagaacaacatcagggcgttgagcatcaacaggtcgggaaagagttcgaccatttcccgattctccctttgtttcagtgaccgaactctgaagcagcgcctgggcgctgccgaagactttgcctcggggaaaattcttgttctggttgccactgatgttgctgctcgaggactcgtaagcattgcttggagttgtcctcccattttgcttattttctttcagaattttccgggagttgaaacggtgatcaatgttgatctgccggaacaggacgcctatgaacgggtgaggagagggggcgggaatctcccagaagagcaaatttaacagttcgatggggaaactttggatatgtccaagtttcgtttcgaacgtccatttctttttatatcttttaacaattgttctctttcagtacattcatcgcattggtcgtaccggtgcgtcagccattcccccccccccccattttccccgttaattcccatctttaggccgtgtgggaaatgccggccacgcaatttcatattttgacccggacagtcccagcgaccttcaaaatgccggcgaatacgttaaggtggtgccgttttgctttagttttgttttattttatgtttccattttcagattttggagaccactggtcacgaattgcccacttttttgcttgaaattgcgaaagggcaaaagtga

SEQ ID NO: 70902 - DNA, 1696 bp, Heterodera glycines
atgaaagaattgtcggcacaattgagacagtgcgaaagagaaaaggcggacctgacgaaaaaggcactgattttggaggagcaagtgaacggagaagcgaaggaattcgaccggaggtttagggagagagaccgaattcaaagagaagtgatggaggacaatggccgactgtaccaaaagtgagttgacatgggaagagaggggaggacgacgaatcgaatcggaggaccattcagaaaagatcagctggaagaggaatgccgaagcatgacggaaaagctgaaaggggccgaatcggaaattgggaggagggaggaaaaggtaaaaaagagggggggggggacggatcgggggaaaactaagaagggggagggaatgatgtaaaaagacggagaacagcgaagaagcacagatcaaagaactcgttgatcaaattggggacaaagagcgcaaaatgagcgaattcgaagccaaaattggccaagtggaaagagaaagggacgaagtggcggaccaattgaggaggacgaaaacgcattcgcaccagggggacggacagccgatcttctcttatcagcaggaatagggcagcagcagaagagcaaacacattgtgatcaatgaaattatattaattgacaatcacttttctaaattattatggcattttaaatgattgttccgctaaaataattttgccatgcgattgattcagattcatttaccaatagccttttaaattcttttacccatttttggaatttgatcacaattttgcgtaaaattctactgattgattggtctttccgtcatcctccgatgtccgttagcccatttgtcagatgatttttctgttgctgttgttggcgtttccttcttcggcattccgaatgcgaagatggcatcaaattgcccgtctcacggaacctggaaaatgaatatcgaatcgccatccgatggaaatggggggggggaggacctggtgatgattttggagacgcatccgtgcgaaatgcacaactgtttggagatggcattcaccttcatgcccccgtggaacagatgaatgatttgggccctctcctccatgctcagaggtcgacctgacattcaaattacgaagtgattttcatgcctttccgttggtcgtgaacctggacaatacgagcgtccgtacagatttgtgccgcggccggaagctgaatcaattgtgtgaattgctttgcatttctcagcacgccctccatcgcgcattacccttgtcaacattgcgctttcttctcatcctcgtccccaaaattgggccaactttggcgttgacattttgcgatgacgaggatgccatcttcgaggagtatttgtgttgctgtagctgatcagcacaggagggagtgaccatcaaacggtagtgctgctgctggaataatgggtgcagcggcatttggtggttgggcgggagggaatggtgcgggaaaggtggcgccagcgaacacggcgtaaagggaccgatagaggaagcggaggacgacgaggcggagcagaacgaggagatggctgaggagcagtgccccgggctgacggaggagtgcgacgacagacagtcagaagaggcggatgagccgagcgcatcccaacggcccgggggactttttaggtcggcgagagggtccaatgttaaaaagggaggtgcggcttga

SEQ ID NO: 70903 - DNA, 173 bp, Heterodera glycines
taggtgttactgtaatattcggagcttgggttatctttggcatttccgttactgaacttggtttaggcattgaaatttcacccttgaattttattttttgggttggttttacatttgattcgaaatttgtttttggtacttttggtaatttggtagtatgtgaaatggtatga

SEQ ID NO: 70904 - DNA, 61 bp, Heterodera glycines; identical to SEQ ID NO: 66666

SEQ ID NO: 70905 - DNA, 702 bp, Heterodera glycines
atgttatccgaggacggaagcagggacaatcaaatggtaagcgagcagagaaatcaaaattcctagataaaaaaacatttttaatttaggagcgaagtcttgtacgtggagttgaaggacatgatgatttgtcgaggcgaatcggctcgctgtcgctgcgcacaatccatcaacaacaacctgtcacactaccagcttatcgtggacgaactggaccgttggctgatggacaacaaccaactcaatcggcgggacgtcgtcgaacaagaagaagaggaaaacgtcgaccactcaacctggtgaaggcactgtgtcgtttcaacgggggctgcatgccatcagttttgccgcagatgattcagaggagaagaatggaaaatttgggttttcttcgtgatctcaggctgcaaacagtgcatctgaagaataacattatgatttccgccaattcattttcatttcatagtgccggcagtttgcttgcctaccgtggctatttgtccataacggtagagcagcacttgtacgttcgccaccgcgttcgtcttagatttcccttcctgccctgtgttgcgcagtatgggggaaatcaccatcattattattttccattagaactgcttgaaatatgttcacgtccaactgacgaatcctcctaatctactcatcttccgaaacttttattgttagttattgtgaaaa

SEQ ID NO: 70906 - DNA, 1333 bp, Heterodera glycines
atggttgctgttcgccaagctctcctcgtctgcatcccattgcttttcattgtcctgaatctccctcctattcatctgcagttgagaattggatcctcgggctcatacaatgcatggatccaaggatcactaatacgtggatcgaaaaatgcgttaaaatctgtattagtcgtatttcagatttaaaatccctaggaattgacaaaaatttcacatcttttcgatgtactgaataaaacaatattaaaacaaaaatcatttgcaactttaaaaagaaaatttgttgaaatttcttacaaaaaccgtactatttcatttatagaaacccaaaatatttagacaaggaagtttttttaaaggcatttaatttaataaagccaaaaatccttggcatcactgtggaggtagatatattgatttattgttctgcggaccaggaacaaagatccatctcgttggatcatttttgatcatgattgttatgcataggaatcaatttgagcttcagttatatatccgaatatatatccgttaaagcatggatcggtgtgctgacccgagcatctccgatccttttaggaatacggctactggactttggagctggaccatcgtttggtggcttatgacggacggagacgagcaatatcggaaaacattgaaggaatagcaagcgatatgggcacagtcgcaggaggagccgcaggatttggtgccttagttgccacaatcattttacctggccttggcctggcagccgctccgctagtgggtgcggcagtcggatcattgattgctggtggagttggagcaatcggaggatttttttacaattttggtaaatcattcgcctgtcatgtgagtaggggggggggtggaatggagcagaaggaatccagggatagaaaaagaaaagcatggtggattatgaaaatgtttaatctctttttttatgatttttgcgagagcggaatgcaacttgggggtcggcaccagggccgttgcggtgccaaaatttgttaaaagttttcgccgaaaaaatctgcaaattttgcgcataattttcttataaaaaaagtgatattatgccataaaatttcaaaattgtctgcatcgaaatccccgaaacgacatggccccgaaacttgatgagattttcgtttaagaccagctgtccgcatgaaactgcatgttatcgccttgaaagtgatgtttcatggatgtgctgcacacaaaatttaagacggaaagttgtcaaagattttgccgaggtaatatgtaaagtgttgagaagaaataatgtttaaatcgcaatgataactggtagaataaa

SEQ ID NO: 70907 - DNA, 167 bp, Heterodera glycines
ctttagataattattttttgctttttttgaaacttcgattgcattgattgtgaaccgtgtcccttaaattcctttcttcctcgacgtgtctcgcgcgagttcggctaaaaataccgaaaaagctgaatatcaaagagcaattcaaaacagtggcaaagacctttctg

SEQ ID NO: 70908 - DNA, 461 bp, Heterodera glycines
  unsure (1)..(461): unsure at all n locations
atgttcggcataatgtgccgtccggttctcttcatggtatgtgccttcttcgtattgttttttgtttacgccaccaagcctgaactgttcatgcccaaccatgccccaaccgatgaaaacgaaatcccaaacatcggaaaagctgaaccggatgcaattggccgttttggacatgatcacccgcgcaactcggacacggaaacggaaaagcccgcgcacggattcggtatcagtcccgaattttaacccgttttggcatttttgtagccaattttttgggaaatgaaaatggaaaggccaatgacaggattaagacgtggaaaaaatcatgaaaaatggttaatcggcttcatgtccttgttcaaggacgtcaaaaagcaaggacaggangaaagactntggaaaaccatgacaaaatggttaatgagcttcgtgtcctggnntcaggacgccgaaataaa

SEQ ID NO: 70909 - DNA, 1038 bp, Heterodera glycines
atgacaaccacgacaaccacgaagacaaatccatggacaacaacaagatgggcaccgatgacgactaccaagcaaagatggactccaacgatgtcaagcagcgcatcaacttggacgacaagacgaacccgaatccaatacgtcacgaaagcaagaagccaacaaacggatgcaacgacacctcccggcacgatcaaatcggcaaaatcagcaaaaagagacttgggaacgaaccgtgacggagcggacgttttctggtgttccgacaggggcagtacgatttgggaactcaagggcacggaaaattcacctttctgccgtcccccgccaacactcactgctcaatggcacaatctggcaattgagctcttcgcaaaagtcatcaagccagagcaaatcgcattcgcatggcattgctccatcaaacgtaccagtgaacgttattatacaaatttgttggccgataagttcgtcaccattgagaaggaatttccaccggtcaacaagcggatctgcaaacaaatggccattcaccaggaatgcccattcgccaagtctgaaatgacgaatcacgaagcacaattgtggtcaacgaatgacgaattggaagtcaacttccctggaccaatcgccggacttttcaaaggcgaacaaatcagcacggcgacaaactgctttgctcaaccagcaacacttttcgtaaaacggcacaatctgcagatgttttcgccagtccaccaaattcagaactgtcaatacgcaaccgaattctgccaactgcccgacaactcaaccctgatttggaaatcaacctgcaatggcaacgaatgccaaacatgcgactacgatcgagcggaaatcatcagcggaaaatttaccgcagcttatggagaaacagtagccacttggatctccgaagatcaccaaaaggcattaactttcgccaaaaatgcgccagaactcatcgcctgcgatggcacacgcatcgtcatgtccgaacagaacttcggaattgccaaggagcaatacgacgacatt

SEQ ID NO: 70910 - DNA, 796 bp, Heterodera glycines
atggagctgaaggaagaaagggaattttgggcatttttccgtcgcctgctgcgatattttctcagtttagaaagtcattttatggcggcagcagctcatcagacgaaaatgagacaactaacactgaaaagcatgcgagctcatcaagtaatcatcgccaagggcagtgcaggacagggctctccgttcttggctaatcctaaggacaatatccttaataataattttaaatttagattttttcaaaataaatatttttaaaattcttttttaaaaagatttttttttgtatttacggatgagtatgtaaatgttatacagtcatatctttttgtcaattccttaggactatatagcttgactttgggataatgctagattatcctatttacatcctgtagattattgaccaacgaaaatttttaatttctatttttttaatcttttttcagttagaaaaacttctaatttaacaactaattaaacacaaatccaaattaacattttcttaaggctcgccaacaacagagattttgaaagaaagaaaagaagcagaagaagaaaaagaagcggataaacaaaagtcgctgcagacggaagttggagaaacggaagaaaattgggacaatttatttttggaaagaaaaacaaaatggaactgccctgaaaaggcgaacgacaaacaaaggtggacataaaaataattggattaaaataatgaattaaaatataaaatggacgaaaatggattaatccgactcatggacggtaaaaaacggaaaaaattgccaataaa

SEQ ID NO: 70911 - DNA, 479 bp, Heterodera glycines
gtcactcaatggcacatcaaattaccttttggcacttttctcctttttcgaaattcttcaccaatttggccattttctgttcgtttacatcgcattttatggacaaaatttaattgagtatcgtttggcagcaaagattgtatttatctcatcacttggttatggtaattttaaaaattttaaattttataaattatttggcaggtgcaatttatatttcaatgcttttcactggcgttgaccgactaattgtaataatttttgacgaaatgtatgcaattattgcttattaaaataaataaattaatttaatttaaatttataggaacaataagcataaaattcgtttgtatttggcaactgtcacaattatgtctgctttctgcggttgcatttctactgtttcactgtaccaagatgcacaattgcatggtgatttgatgatcaccggttgcactgtcgatttttttatggtttaa

SEQ ID NO: 70912 - DNA, 695 bp, Heterodera glycines
atgaattctcttaaacgctttcaactcccggagcaagggacacgacagcaagaggagttggattcagttgaaccgaaacacatcagcgatgtggtcaacttcaattcggccggcgttttttatgttttgggaaaagtgacaaatatgcagtaccgtgtttacaaagtccaaattaaattaattaattaaattattaattttttctagtttaggcatgcccatttcgttccaaggggctcatttgccgccgaaaattgtccgatgataacatgtgtgaggcgtgcggccaaaaagcgattgctcccatccacacggtgtttgttcgtcttctgctgcaggatgttgaacaagcagacattgctcaacgtgtcaccatgttttcgagtgttgctgaagagtttttgggaatgaaagctgccgaattgctagccaaggagaaggagccggaaagccttgcgaaacacttggacgatttgattgctgtgaagataattgcgaaagttaacattaaggttttttgttgctatttattatgtatttgacaaaccacgccctaggcgaacaatcagacgtacactggatttgattggattgtcaatttgttcaagaagtgcccagggaatgatgacagtgatgtgccaaaagaaaaaaatgatgttgaagggattgcaaccaagaaggccaagaaaaattga

SEQ ID NO: 70913 - DNA, 3315 bp, Heterodera glycines
atgtttcaatttgcgctgtttctgctgttactaattgttgagttcgctgacattgctaatttatttcatttgtctcagttggaaaattccctcgggcaattcccgacgagtagcacaactgagaagacaatcacagaatatgtgccgtggctttaccgattcggtcaaaagctaatgcgtgagtttaagagacaaaaaatttaaaaattaaatttcgatggatcaaaggatttaaatattttcagcgtgccaagacaatattccatcggacgaatgtcagaagcatgaaaatgattgccaagtgattgttggaggggggggggaagcatagaagggatagaagaagcggtcaatggcaactcgtacaaaaggcaactcgtattttacaaaataaagcctaagcctaggcctaacctaagcaattgtacgagttgccctttgagttgccatgacaccgaagaagcgtctgactttccggaccaatgttttaccagttgaaccactgagactgcagtccatcacagaggggggggggactgattagcgagagactaattggccaatcaaagggtgactgatttgcggggaaagaatgggtccatcattttttaagtgcaactttccattccctctttcccaggataccataaagcgccgagagatggcattgttctgttgtggcacctgccgaactttgtatccgaattttttgccaaaacaatcggggagaaaataaggcaaatgcaaaagttgtgaagattatttcaatttttattttcattgcagaggaaacatcagaagcaattacgagaaagagcagataaattaaaatggacaaattttcttttattgttttattcacagggcgacaaaattaacaaagcaaatgaaattttatgataaaatgttacaatttctgggtttttatggtctaatcgcgagaagaacaaatcgaagtgaatgcaaagaaaggaaatgatcagaaaaagccattaacaagaaaaagcgagagataaacaaacacttgcaacaaaacaagaaaattagtgaacttttgataaaataatttctgaaattcaaaaagtttgtcatttcatcatttcttagtgctttttcgcgatttttgagtcatttaattttggggcgccggcgatgccgacagacgccgccgggtaacaattggaaattttggcctttttcaaaattcctattttgtgtctgtttggattaaaaattaatacattgaatgacggtctaactcagttgggcgcactccaacttttgatgctgctgctgcgcattgtgcagaatgtgctaattaattctatggcttatttggccaattgagcgatgaagcgagcaaaaattcctttgattttttgttggcgattgttttgcgtgaaattgtattttgataaatcctccaatgccactcctttgcctgcttcgcttcccttcccttgtccatatggcttttttcccatgctttatcccatgcttttcctccatttccctgtgcctcccctcggggcttacattccatgccctccctcccccaccccacccttctcattcatcccgttttcgcttctctttttgcctctcctataattcgattattctccccgtttatttcccaaaagtgccgcgccgtcgtaaaattccttcgtcacttttttcgccaattgcactgcgcattttcgttaattttttcacgccattctttcgagtttttcaggaatttccgtccttagccgcgaaagtgtgtttaattggattgacgattttagcgaagaacgatgtgcttttgttgtgttgcactgaggcggaatcgtacacagcggcggagcgaaagtatttaagcgacaaaggcaacggacagtcaccgaaagagtgccgaaagaacgaagaaatgtcggcacacgcggcaacgagcggtgccatcgcattcagtggagcaacagtaagttaatggcaaaaaaggagagggagggagtcaaaaatgggaaagtggcagagtgatcagcagtgatcagtgatcagtcactgctcgttaagctcgtcctttgtttgggctctctgttgtcggtgtacaacgaaatgcaaagcatttggggcgaattggacgtggagatgagtcagttcagggtgagagaagagtgttttgtggcaattggattaaaattaaatgtaggcccaagcggacggactttgggacgatttgctgacaatgggcgcgggcacttcctcaaaccgaaagcgacgagcagcgatcgaaagtgcggcggaggacgacaatttgccgaccaatcgaaaccgccgaaatgggtacagcgtcgcttctgctgttcctgcacctccttgcagtgagacagtgaaccaaactcgtaaatgccttaaattcataaagagtgcgaagcgatcaatccatgcccacacggagcggccgggccgccgggagacaatggcccgccgggactggcgggaatcccgggaaaagacggtttttccggggtggcggcgtcggattggcacagtgggccgttgaagggatgctttgtgagttggtcccacttgacgagttcattatattttcttacacaaagtcctattcagaattgtctcgccggtccgcaagggaaccccggcgaggcaggacgacccggggttcgtggaatgtgagtttggaagaagacaacacttttttgattggcgaacattaatttccaaaatgtgtaggcgtggccccaaagggtcgcctgggatgccgggccgtgacggagtgccaggactgcccggaatacaaggggacgaaggcgagcagggcaaggacggattgccaggaaagggcggcgaacacggacaggacgctgaaaagccaatcggacgacgggggccaaagggcgcaccaggagaacatggcaatgaaggaccggtcggaagcccgggcaacccgggacccatcgggaaacagggcccacctggtcaattgggaccgcgtgggttcgaagggcccccgggggcggacggagacgaaggcggacttggcacgggagggaaaatcggaagagacgcggcttattggtcggtttgggcagcaggcacaaattcaagacaaaggataacactaatggcattcattcagtccatgcccgggccgagaagggcacaaaggccgagggggcggcgcagggatcgaacacggaggggcacagagagaaggcgaatacggcggaaacaaaagtggtggcgcatatcgccgaagggtgcactgatcggaaaagcggaggaaaaggacgaagaaacgataaatga

SEQ ID NO: 70914 - DNA, 251 bp, Heterodera glycines
atgtgtacttttgtgggtgctggagaagactctgtatcatataaaaggttggatacgcactgacactggtgagaaaagagaggaggaggcaaagggaaagggcattttggacaaatgccattgggagacaattaaatggagcaattaacaactgctaattaatcaacgatgatccaactgacaaaaaaaatatatatatatatatatatttaagcaattttaaggaattcgaaaacttaagaccaaaaaaa

SEQ ID NO: 70915 - DNA, 388 bp, Heterodera glycines; identical to SEQ ID NO: 51536

SEQ ID NO: 70916 - DNA, 415 bp, Heterodera glycines
atggttgccaaaacgcgtggatggcccagctggaaattttacgattatatgcatagccgacttggtcaacgtggactttttcatcaagacactgtgcagctgatgcgccaaatcaaagcaccattggatttggacgcatacgacgccgacacgtacgtacccctggtcatcagccactggaacaatgctcaacaacagcagcagcaccgttttgcactgttcatttttggaagcaccggacactacaagccaatctacaagtatattgacagcacttacgacacaccattggttttatactttaacaacaatcatttcgatggtgtacacttcctcagcggactctttggcggcaaaaagtattgtctggagtgtgagaagccttacaagaagccgaaggaacacatgcaatcat

SEQ ID NO: 70917 - DNA, 668 bp, Heterodera glycines
atggtgaaattggaaaattcgtggattgatgcaagcaatcaagaaagtccttacatttctacattagcttcttcgggtctagcggcatttcacaaaaaatttcggcagctttatgggcaacaacaaccaactttaatcagatgtgcggcttttttggatcctaatatttgtgcagttttgccaaaaatcgttgcgactaacagcaattggggcaaagttgcagaggtaaacgttaagataaatttaaaaatgatggaataattaagatttgtgctaccataaaaacagttgcacaaataagacaccctgattgtaattcattaattcctcggccttgtacttcgccaagtctttctggttttgatcgttctccgagagcagcgattgacattgaaatcgaccgatatatgaatttatgtgacagtctttttatgaaaattgatccattaaaattctggtccgaaaaccagaaatccttgccaattcttgcatctcttgcgcgcgaatttttgggcattcctgcaacatcagtgagctgtgaaagaattttttcccgatttgctgctttaatagttgattttcgtcgaaataaattagacccatttcagatttcccgtcttattactcttcaatccctatttcgtgatacttaaattgtgtatcattta

SEQ ID NO: 70918 - DNA, 494 bp, Heterodera glycines
atggccaaaaatgaaattttagcgccgaaaaatgttgaaaaagaatggcaacaaaattatgccgaaatttgtaagaaaattggagtcagccgagacataattaacaaatggaagaaacaatttggaattcgctgtaaaagaataaaggaggaacaaaaaatagaaaaaatgaaaatttattgggaaataaaaagtgaaaatccaaaaatgagtgatagaagaaataaacgaggaatgaaaaagggataattaaattaaaaattgtggcattttgttgtcctcctttagccttttgaaaattcctatttttaggggcgtatatagagaatgacaaatcaacctttttattactttttgcggagaatcaacctcaatgttgatatttaattaaatcaacaaacattacgccatcaacttaaatatcaacgtaatttttaaaaatttaaaaatgaattccattatttatttattctcgttgaataatttttaataaa

SEQ ID NO: 70919 - DNA, 1264 bp, Heterodera glycines
atgaaattatttccgctactattattaattatattatttttaattgtaaaaattggatcagaaaagaaaaaattgcaacaaaagtcatttggcgaaatatttggagaaaaatggcaagaaaaagaagaagaaaaacgaaatgaactcaaaaaaagagaaataattggaaaatattataaaataaaagagaaaattaagcaaaaaggaagaaaatactcaacaaaagaatggaataaaattgatggaaaaatagcgaaaaaattggggacaaatagcaattatattcaaaaatggatcaaagaatttggtcttcaaaaaaagaaatgctataaatcaaaaactgatgaagaaaaattagaaattgtgcaaaaattcattgaaatgacaaatgaatataagcaaaaaaaaaaatattcgcacatcgaatgggcaacaaaattatgccgaaattggcaagaaaattggagttagtcaattcacaattaaaaaatgggaagcaacaatttggcatacgctataaaagaataacggagaaagaaaaaatggaaaaaataaaaatttattgggagaataaaaagcaaaaattcaaagatgcatgataaagaatttgccaaaatgatggaaattgatagaacgaccatttcaaaatagaagaaacaatttagaaacaaaaatgattaaaataaaaaatttagggaatttggagaattattttcgaagaacagcagaagaagagtgattattagttggagcatttctttttgaaaatttcgcatgcaaattttaatttttctttattttttattttaattaatttttgaatttctcttaagtttttttgtggaatttagatataaacaaattttgaatacgttttatcaattaattgaattttaaaattcacaaaatacttttaaagtaatattatttccacaccgatattagggatggggagggaacagggctgggcgcaaatgcggattacggaaattgcggggtttttggagttgaggattacggattttttggatttttccgcaattttgatccgtaatttgacttttggattagttttcgagactaacaccttaatttgggtattttgcttagaaaatagcggcattctttttgtcgcacctattcatattttatgaaaattcataaaaccatagccatgggatggtgatgaattccctccaccaaaatgaaaaatgaaaattttccaggaaaaattggcatttttttaatttatcgatttttctta

SEQ ID NO: 70920 - DNA, 111 bp, Heterodera glycines
atgacagtcctggtaataagctagtaaataaaactataataattaggtcgaggattcttatggatttccatttgaaaattaaaatttttttactttttttgttgaaataaa

SEQ ID NO: 70921 - DNA, 634 bp, Heterodera glycines
atggttattaattacattaagccattaactcgtcatctatcgattgaaacaccggccaatttggctgatgccttgggaatgcacactccaaattgggctttttatcactacagttcgcccaattatcggtcagcgtggccatggcgaatgttccgtgaccgtttcgatgtaagaagcaattggcaaaaatgcaaaaccaaattaaatgcattttttggcaaaaaatcgtcataattttctcgaaagtaatcaaaaaatcactatatttttctattaacctaataaatttatgaaaataaattattttttattaaaattattttaatttgcttaaattttaaattttactttttactttattaatgaattaattaattaaattacaaattttatctagtgtgaacaaatcatgtacaataagcacttttctgtgcagcccatctacagaaataattaactttaattaagacgatcaaaaaataattaaagtgaataataggcatagtttcatattaattctttgattggttcttaaatttattatattatttgggtgatgtaattccgtcacaaaaaatgtcaattcaaatttacgcaaaaagaaacataatgccaaagaaattttttattgtaa

SEQ ID NO: 70922 - DNA, 342 bp, Heterodera glycines
atgattcgtaataaacttgaaattctacaaaaaagtcggaagaagcgttatttgtcagacatttcaaacacaactgaggaggccgtgaatttgggagtgaaattcgtcgaaccgaatgccgtgagaacttctgacagcgttgaacaaccgaatttgaaagaggctgaggtctcaacaatgacttttgagcgcggaaaaaccaattttgggggagattgcctatggttgaacggtatgtttgaagtgccgcaaaaaatttaatttccaaactattcaggatttgtttcacacacctctcaggaaatcgctgaagatgcacaaatcgagttgctcatcatatga

SEQ ID NO: 70923 - DNA, 196 bp, Heterodera glycines
atgacaatttcaccgcccgttgagcgatacattgacagtgtgtgcgatttgggaccaatttttacggaaattggccaatctctgagggcacagaatcatcagccgagttttgtgctgacaccgaccggaaacattcgaagggccgagcagcagcagcagaagagagaagtggcagaaaacagcgaagagaacgcag

SEQ ID NO: 70924 - DNA, 853 bp, Heterodera glycines
atgccccatttttgctaaattccaaaaccaacaacaagaacagtccacccattttctgcccccaccaatgacatcaagcagtggagatgaatggcaatcggcgtatgaatgtttgccgcaatggacaaagcaaatgccaaagatgccgccagaaacggcaccaaagccacaacaagatttggtaaaaaatattgctgtttaaatttcaaaagtgatactttttagtcctcctctttcccatcgttttgtgccgcgtcttttgccgagtccgtccaatgctccgtcaatctgtgcaaattccacgcatattcacgacaattggccgcaaaaagcatatggccaatgagtgattcacaagcggaaatgttccaaagtgttgtgagcgttgagggtaaagcaaagaaaataagaggaaattataattagtattaagattagtactgtaattagtatttgtgttgggttctgtcacgccgacaccccaaaatgagaggatcaaacactgacttttcgcaacccaaccccgaaagcgcttcctaattatttttaataaaaaatgtatgaatgactagtgaatttttttaatttaggaaatcaaaggatacgacccattttgaacgagtcggcaactttctccgagcatcaagcgaatgacgaagtgcgcaatttgatgggtgcctcgggcaccgtttcccccccggcgcaaatgcacacttcgccagagacacaaagtgattcaaatattaccagaaatacaacaattttaaatttggtcagatcagcaatcggtgagagtggaattcagcggacccgtcaattttttgcacgcgacaaatttaaatgtgacaaataa

SEQ ID NO: 70925 - DNA, 56 bp, Heterodera glycines; identical to SEQ ID NO: 52733

SEQ ID NO: 70926 - DNA, 408 bp, Heterodera glycines
atgtttaatttttccatcccagatgagttcgacaatgtcactctgatgtactccaagcatgagaagatcccgatgaaggacttcggctcggagatccgtgccaccatggacattgaccatctgctgaacaaggcagtgctgctgttggacttgcaggagacgtcattggaggaaatttttgcaaagtaaaaaaaagcattaaaatattattatttttttaatattcgaattaaattttttaaataaaattattttaaaaattatataaatattgttttattaaatattccaattaaattttaattttagtaaaaatgaaagattttagaaaaattttagtttacaaagaaaaaaaatttttggaaatgaaaaatatttaaagcataacttaaacacattttaaataaa

SEQ ID NO: 70927 - DNA, 375 bp, Heterodera glycines
atgtgcgtcactcttcccttgcattggttgcccgtactggatccgctggtatcaattctctgtgtcagtgactaccgtaaggcgctggccaatttcatccggtatacgatatgcaggagacaaaatgccgttgcacaacagcaaattccgatgaatatcctccaaaataacaatcaaaaagcgcaacttcctattgttgcgtcataattgcacaggtgaattctttgtctttatttaagaactaccaaataatatgagaacgattcaagttatgcgcgcaatgttcattggtcagacattaaaattttatccaaattcattgagtttaaacttcttattcagattttgaatttttcctcgtttttttttattaaa

SEQ ID NO: 70928 - DNA, 1074 bp, Heterodera glycines
atggcgcaaaaaaagggaatggaaattgtcaatcgctttggaaaagcattgccaattccgaaaatccaattgcctcgtaaagtcactggatttgagtgcatcaagatctcgtaaatacaaataaaaatcccaaaatttatgttggcggcgcctatcggcagcgccggactcaaaattttcaaatttttatccaaaaaacgcaaatttttaggaaattattttaaataaatcagtaaattcaaaaatttttccgttagaattatctatccttcaataaattattgaaaattttttagtttaattgaccgcaatgccatcgcttttctccaacgttttcgccaccttttctccgtctgtccaattaatttgatcaccgatatgttcagtgagcgtattttggagtttattttgcaaaacatttggccaatgatcgcgaaaaatatttgtgcgatatatttgatgaagtacactttccgacatttgcgtaaattcgtcccgacaattctcgacgattgtccatcacttcgcattatctctttccatgccggtgtcgactatttcttcaccgaatttccgcccgatgacagtgccatggcatcggatggacaagcgctggctaaatggcttctcattccccacccggacgatgtgccaaaggtgctcaaatgctggttgaacatggaaaagggaattggccgttgaaaattgcagcgttcaaagcggtacataccgtaattaattaaattttaaattttctcgattttatgcatttgtcaatgcttcatctcatgccaatttcattgctgtcgtttggtgtcctccgtcttttgctgactctgttgtgccatttgatctgaccaacgaattgactcgggaaaaactggcgcttaaaaaagtgactgtttccacccttttctgttggtccgttgtccaattgcgcgagacgcgagcaaatgggcaaaatgggaagaggaagcgattggctggtatattgatgatcaatggaatcaaattgacataaaaattttcactgacggcgacatcagggacgggttagcgaatgcttattaaaaa

SEQ ID NO: 70929 - DNA, 792 bp, Heterodera glycines
ccgcattttctggagaaaaagttcaacatcactgacacgcgcggtaatttttaaaataataaaatattgaattcctttttcttatttaaggagtttttaatcttcacgcattgccaggttggaaatggaatttaataaaaataaaaaataatatttcccggtaaatatatttattttcgttgccaattcatttaaattttatttgaggaatcattggcgttttggccagctcattggcacttgcatgctaccagaacaactcattcccggagaagtaagtgaatgccaaagattggattggaaattttttttatacgttatagttcccgaattgtgccgtccggacgttacaagtttgaacaggcattgtaccagctggcggggttgggcatcactttggcatttgccaccgttgttggcgccatcactggtgaataaataaataattttaattgatatgcactttttaatgaaaacaaaaatttatttactaattgtttaggtctcatcctgaaaatcaaattgcttactcatatccgagaaaaggaggtgagaattatgcaaaaaatatttccaccgtttttttctttctacattttcaaaagtttcaaaattatattttaaatggctttaaggtgtattgtgatgcggactttttcgaagtacccgaagactatgactttacaacgagggtatgtaattttttggaaaaaaaacctaaaaaaaatttattaccaaaatcttttaaaggttaccagccacattgaccatgtcgaactgactgagacaaga

SEQ ID NO: 70930 - DNA, 51 bp, Heterodera glycines
atggcgccagcagaccgagcggctaaagaaatggaatacgcactgaacgaa

SEQ ID NO: 70931 - DNA, 49 bp, Heterodera glycines; identical to SEQ ID NO: 57477

SEQ ID NO: 70932 - DNA, 468 bp, Heterodera glycines
tgattcggtggatggtggtgcatggccgttcttccttttaggagcgatttgtctggtttattccgataacgagcgcgactctagcctactaaatagttggctcattgcttctgtgggcacaacttcttagagggattttcggtgttcagccgcacgaaattgagcaataacaggtctgtgatgcccttagatgtccggggctgcacgcgcgctacactggcaaaatcagcgtgcttgtccttccccgaaaggggttggtaaaccggtgaaaatttgccgtgattgggatcggacattgcaattattgtccgtgaacgaggaattccttgtaggggcgagtcatcaactcgctctgaatacgtccctgccctttgtacacaccgcccgtcgctgcccgggactgagccatttcgagaaattcggggacggttagtgttccggcttcggtcggtatgcagactggaaccg

SEQ ID NO: 70933 - DNA, 1591 bp, Heterodera glycines
atggacaattttgaatccaaagtggtcgctcagttcgggcaagttcacactgcaaaccgcgcgaacgcaaccgtggtggcacttgaccatctgctgaacgccgatcgtgacattttcagcgccggtgctgttgttgatgtatgtaagtgccatgccggacacacattggatagccgcgactaaaaaattgaaaaataaatataaaaaacacatgactaccgtatatgtacaaaaaaagactcaatctttgaaaaaatacggtagtgaaataatacggtaatttaaaaatgaattatttcgttatataattataataataataagaatttaaaaaagaatttgcttacccggaaaatgcgccgccgcgaaagccaaaaacatcgtgattttgagcagaagatgatgatacatggaagacattgtaacagagagttaaaaaagacaatttgcacaaatctaaaaataaaaaatgttattatatatttgtttaaattaatttaaataaaatttcatcaattttaggaattatatgttaatgtttaattttatgaatataaattatttcattaaaaatagtttttgcatttaaaaatatccgaatgaaaaattagattaaattaatttaaaaaaaattttcaattttaggaattatgttttaatgattattatttagttaaaatattgaataaaaatatatttatattgtttgaaaatgaattgtctattcagaaattgaatatttatagcaaaaaaatgatgggccgcctattttcgcatttgttttacgaaatatacgaaacatttttgatgatctaacaacgctgattaatgcgattggagatgtggcaaaagcgggcaaaaaggcgcaaaatggacaaatgggaaaacattattcataaaaagagggatgaaaagtcgcaaaatggacaaatgggaaaacattattcataaaaaaggcgacgaaaaagcgaaaaataatgaatcggtaaaaaaaaagatgcaaaaatgatggtgaatcagcagcagcagaaagaaggatgaattggatgggcaaaataattttttttttctgttcttccgaagacaaaaaatgtttcgaaagatgcaaatgatttaatgggaaaatggaaatttgaaattcaaaaataatttaaaattaaatggacatataaatttaattgcgaaaagaaaaacactgctcactaaatgcttattccagcagagaaattgggaagtaattgtctcattattgttattattataattaagaaaatgtgaaaatgtggaaattttaaatgccaaaattggatttaaatatgtaaaaaaatgacaaaaatgccgtagaaaattatctatctccaattttaaaaaataatttcaacgaattttttgagcaaattcgtcttgaaactattggttcagtttaaaaagcacataaatttccagtaatactcaagactggaaattttaaaattttcagcattcgaaacacaaaaaagccgagactttaactaggacgagacacgggccgagacttttttttgaaaaaaaaatttcttaatactaaaataacccgacaaaaaaaaataaa

SEQ ID NO: 70934 - DNA, 1167 bp, Heterodera glycines
atgtcttccatgtatcatcatcttctgctcaaaatcacgatgtttttggctttcgcggcggcgcattttccgggtaagcaaattcttttttaaattcttattattattataattatataacgaaataattcatttttaaattaccgtattatttcactaccgtattttttcaaagattgagtctttttttgtacatatacggtagtcatgtgttttttatatttatttttcaattttttagtcgcggctatccaatgtgtgtccggcatggcacttacatacatcaacaacagcaccggcgctgaaaatgtcacgatcggcgttcagcagatggtcaagtgccaccacggttgcgttcgcgcggtttgcagtgtgaacttgcccgaactgagcgaccactttggattcaaaattgtccatgcgtttggacacggaacttacagtaagtccgacctctaatgtttctttatggatggtcaaagtaaccgtagaaatttgtatcagagtagtggtcccggcgggaatcaaattgaagggcaaaaacaattttttttttttttttttgggttttgccaaatttttttctcaatttttgttgaaaaaaatataccataaaaattttgcctttctcgcaacgcctattggcatccatagcccaaaaatcacactccgccccccctggccctcaattcagcaatgttttcccactttttttttttgaaaattgcgcggcgttttttgagtttgaaaggcatacattaaaatatgccgttactgggcgaaattaattttataaacaacaacaaaaaaatcctttctgccccattcagagttgtacgggaatcggccggttgcggttgtcagcggatgtgcggcaccgaaaaatggcacggccacggaatcggcagccgacattttttttgggaacggaacgatcggtgggaccgagtgcaagcaagtggcagtgtgtaccactggtgaactgtgcaatccgaaaccatcatccgcgagccgtacttcatctgctttggccattgcgtttccggttgttgtcgcgcttggtgaacaataaaatttgttgaaaatttatttaaaatttgcatattttcttttcagtctcctccatggtgtccggctatgtgcagccgttctgagatggcgtactga

SEQ ID NO: 70935 - DNA, 647 bp, Heterodera glycines
atgactaattggacagacaccctgtgtttgcttgccggagcagaaacatcagcagatgaactgtccatggttgggcggacaatacgggagccgaacattcggcggcgccatttgggtggttgaggaggaggaacaggatggtgatagggtgggacctaaactcgaattcggcattttattaaataaaaatgtaaattaaaaaatatatattccatttttaaaattttgatttaaaaataagaaccgaattagagttattgttcaaataatttttagatctagtcagaaaaagggacatgggaagctttggcacaccagcgtttcggcgccaaaattttttcttatgcaattaaattttaaaatttaattattatggaaagcacttcatttttgcttaattaaatgagtttgttaccaaaatactggcgctgaaatgccaaagaattaactaataggagggagaaaaataaaaaactaaattgagaagatgacaaaattaatcaggcggatattttgaaaaaatgcatggtgatcaatcaaagattaatttttaaatcttaattagtcagataaattttatgatttatagaaatggttgatatttggagaccgtcatgacggattacaggatttttaagagtaataaa

SEQ ID NO: 70936 - DNA, 494 bp, Heterodera glycines
atgaacactgctgttgtggtgcgcccacgggatcgtcaacatttccggcacagcaatgtgcccccggtgttaaacattcttgatcaggcaaccgatctgtacggtgatctttttcggatggtaatcgatccggaagggattaacggaggcagcggcggtggtgcgcaagtcataacatcagacgaggaggaatacggacgatgatagcagcagctggattttgttttttttactcttgattcactggggattcagtttttggcattaaaaattgcaaaattggcactttattggtgccaatgcatttaaaaatttaaaattaattaagaatatttaaaaaatagtttcgaattttgccaaaaaggaattcctgatcatcctttaattgattgtcttttctcaaatgattatgatttattattattcccatatcttttatctgttcctcattctgattttctgttctcttgtatgatctggatttttttattaaa

SEQ ID NO: 70937 - DNA, 321 bp, Heterodera glycines
ctgaaaagagttccggtggatgaatgtgaaaacattggaaaggaaaagaggccaattgcgggcggagaaacgtcgtcaaattccactggcagcggagagaacaaaatttgggcacaatcgccgcaggggaaaattggcaattttaaattaattatttttaaaatcaaaattataaaaataaatgttaatcaagccaatcgatatgaaaatgttttgcagttgttttcgaatgcggcagcagcggaactgaagaaacgaacagttcataaaaacatggaaaagtgtgcgtggtgagacgaaccgaaaatagtctcagtgtca

SEQ ID NO: 70938 - DNA, 304 bp, Heterodera glycines; identical to SEQ ID NO: 51570

SEQ ID NO: 70939 - DNA, 228 bp, Heterodera glycines; identical to SEQ ID NO: 65316

SEQ ID NO: 70940 - DNA, 1292 bp, Heterodera glycines
aatgctcgattggatgatgcgggtaagaaagactccgctagcaatatttaataaattcatattttccccaagaaaacacattgatgcctcaaaaatcgtctcttttgctttggatgaggcggacgtaatgatcggccagcagggataccaagacaaaagcattcgcatacagaagtcggtgccattagtgggaggataaattctctcccccaccccggaaatgaaaaatttaaaatttcccaaaaaatttttgaaaatttttactcaatttcttatcggacttcattaaaatttcaaaaaaaaactttcctgtcggcaccgccggaccccattgtattaatattttttgaaaatttacaccaaaatggcagcattttttgatgcaaaaccgctacaatttctgttttcgctaagcgctaaaaatcttgaaaaatgacactggagaaaaaattttctggctacgggcctagtccttgtgtcccttttgccaccaattaattcattcccccccccctcccgatttagcgcgattatctccgctaacccatcgtgccaatgtatgctgttcagtgccacttattccgatgctgtcatcaaattcgccgaccaacttatcgccgacccaacactcatcacgtatatatttttggtttaaacatttttcaatcccacatttttctttttgttttagaatccgtcgtcaagaccaaagtttgccgtacattcgccagtattttgtgcgttgcaaagatcgcgaggacaaataccaatcagtggggccattttgatgagttttcttttgtcctgcccgttagccagggagggggcttaaatcaaaaattgtcaagaaaaatgagaaaattttttgaaaagttaaacatttccttactaaattgcattaaataaatccatgtcgtcatccgcaaataaaatttttttaaaatgtgactctctaagaattaaaaaattatgttttttggtgttgttttggataccaaacccttgaagaagtcaaatctttgggatgggtccaagtgcttaaaaagctattcatcttttccgtcctttcatcctacaccgtctctctctctctttctccttctctatcatcccttcctctctctctccatttcactctccctctcttttctctcttaccccctccccccgcgtgcgtgcgtttctctttcccttcttttgcccaccatatatctcctctcaatttatcgtaaattgtggcggacgaccgtaaaagcagccatctctttctctccaccatcgttcataaaatg

SEQ ID NO: 70941 - DNA, 678 bp, Heterodera glycines
atgcatgtggattttgacccattggcggtggactggtcccactttgcggaaccgccgccgcgcatggacaccatgttgatgagtggtggagggagttcaatgggtggcggcggtggtggtggatcggcgtcgtcttaccccgtcttcaccggacttccctatcaacgcggagcgggcgggattggctcaatgtttcgcagcttccttcgcttcttggtaccaattggtagacaggcgggcgcggcgattggtcgccagggactggagaccggatcacgtgtgctctcacagatgcttgaggggcgaaatgtgaaggaggctatgacggaggagggacgtgccggacttaagaacttgctggacaaggcggcggacaatctgagcaggcagcgttccaccgcagccgctgccactaccaatcacgggggcgccggcagaggtggtcgtggtggaggcctgtttgactttaaacgttatcgaaagattgtgaataacaacaacaacaacaaacgcaagtcgtcgtcgtcgtcgtcatcgtcaacaaacaacataaaaaagaataaaaaacggcggaccggcaacttacaatcaactgttggcccctcactgtcaacaccagcagcagcggccgccgccaaaacaaaaggcgttcgttttgacgcattgggttccttctga

SEQ ID NO: 70942 - DNA, 1327 bp, Heterodera glycines
atgagaaaactacgcgtgaaaagcacaaacaaagtcaacagcaacaacaagaatgcagcactgcaggcccaaaaacgtgagctgttggttgaaaaggtgttggatgagctgtacaaggacacgcggtccaatgccgcgttcaccagtgtggagccgctgctgcttgaggcacgtcgacaacaccccgggcgacacatcagacgggccgaggtgcgccgttatttggcccgccagcgcgtgtacaccctgcaccgtcgggctgtccgtcgtttccgtcgtctgccgacgcttgcgtcaggtctgcataccgattggcaagcggatctggccgatttcacagcgctgaagcggcacaatcgcggccacgcgtacctgttggtgtgcgcggacacattgagccgtcagctgtttgtggagccgttgaagagcaagcgctcctcggacattgttcaagcttttgagaaaatattccgccgggttggctatgtgccatggaagctgatgacggaccagggcaaagagttcaccgccgccccagtgcaacgctttttggtcgatcaagaggtgcaacaccattgcatgcacacctcaccccagtggcatgccggaattgcggagcgtgccatcagaagcatcaaggtttacccgaaatgacaattttttccctttcgttgtccatcatgtgtaacaaacatttaaggaaaggctgtaccgctactttacacatcgcggcgcaaagtgttggacaggcgtcatacagcacattgtgactgcactgaacgggtcgccgaaccgtgcattgttcggtctcaggcccaacgacattaattttggcaacgcggagcgcgtacgacgcaaccagctggagcgattagctgccggccaacagcagcgacaaagcccacgcgcccgaccccctttccgtgtgggaaaccgtgtgcgtattgaaaagcacaagcacgtgttcaaaaagggctacctgcctcgcttcactgacgaactgttcacggtggcagaagtacgcacctcacgactgccgatcacctacaagctacgggatgacgacggtgaactgctcaccggctggttctatgcgcaggatttgtgccttgttcttccgcctccacctccgctacagtcaaaaagagatgaacccattgctgataaagcgggagctgctgcttctactaccgtggggcctgtgtacgacattgaacgtgtgctgagaaggcggagggggcgcgacggtgcggagcactgcttcgtcaaatggaagggctattcagctgcgcataacagctggattccggccacatcaatcatataa

SEQ ID NO: 70943 - DNA, 1571 bp, Heterodera glycines
atgcttgtcgttgctaccgtggctgctgatgcacgtggtgcgtacaccacggtcagctccccggggtatatatgcgttttgagacgcatcagaggtcgtgtggtggggtgcatgtcgatcaacagatagccaaacgggtccgctgttgcgtcatcataggcctccagaaaatggtgcagtgcacccgggcccgggaacagctgtatgcccagggagcgaacctgtagcgcccctgccgggttcctcagcaacaccaaatagtgcgcgttgttgcgcgcgatgcgcagctctcgtgtgaacagatgctgtgtgatcaacacaacgctgacgccccaattgtgggagccacgggtgaacaacagatcaaggaacggggcacgcatgccgaccatcaggtcatccaacaccaatagcagtctgccgccgcacgctttggctgcccgcttcaccgcctcctcatcgggaagcgcgtggcaggggcggacccagcgccgccgcggttgaccccccttgtactcctcctcctcctcctcccccgtctcagtttccagttgttgtagtcgcagcacgtcttcattcacttccccataacagtagagcacacccgaaatgtgtgcggggccaaccagggtgtccaggttggccaacattcgcaatacccatttcgttttgccactgcccgtacacccggacacacacattgtgaacggatgcttgaaaacagggggcacttgttgatggcggagaggttgctcttttgtctgctgctgcttcattatgccgtttagctcttgccccaaaataaaaacaaaagacatttgacacattatatatatatatatatatatatatacatatatacatattaaaaagcaactttacccccccccccccctcccgcacatctcgcatattaacatatataaaaaagtttttagcttccgagtttttgaataatcattcaatggacatgttccggttcaaagttcataacgctgtcaaagacaccgacgacgccgccgccgactctgctgcacacgatcaatgtcaacaacgccaacagcgcgaggttgcgtctcctcgcacaatgccgttgtcgttgttggttgaagagcaagctcatgtgtcagcagcagctgaggctgctgccgaggcagcgagtgctgttgaccaaaagatgtcggcagcgccaaatgacactcccgccatcactgacacgaaaattgattttatgactgatgaacaaacagtggcggcagcgccgccgcctctattcagtgagattgaaccgacgcagcagcagcagcagaaacaacaacaggtttgctctaaattggtgtcggttatttaattttttatcaagaagattcagtggcgtacagcggaaatcatcgcaccgaaagtggagctgtccgccgaggacaatggtgatgatgatgatgatgatgatgatgaggctggacaacaggtcaaacaggaggcggacagaaacggcatggatgcacatcattcaaattgtgcaaaagggccccttttgttcattgatgaacaggagaatgaggaggaggaga

SEQ ID NO: 70944 - DNA, 1567 bp, Heterodera glycines
atgcagtttgaagagatggcaagtacatgagaattcagattcggatattgtgaactaaatcatctaaatgcttaaatataattaatgtttgaatagttttaattgaaacaaaaaagttataaaaattattttttgttaattaaaaagcaagttacccccccccccccctcccgcacatctcgcatattaacatatataaaaaagtttttagcttccgagtttttgaataatcattcaatggacatgttccggttcaaagttcataacgctgtcaaagacaccgacgacgccgccaccgactctgctgcaccacatgatcaatgtcaacaacgccaacagcgcgaggcgcctccccgcacaatgccgttgtccttgttggctgaagagcaaactcatgcgtcagcagcagctgaggctgctgccgaggcagcgagtgttgttgaccaacagatgtcggtagcgccaaatgacactcccgccattgctggcacgaaaattgattttatgactgatgaacaaacagtggcggcagcgccgccgcctctattcagtgagattgaaccgacgcaccagcagcagcaaaaacaacaacaggtttgctctaaattgatgtcggcaatttaattttttatcaagaagattcaggggggtacagcggaaatcaccacaccgaaagtggagctgtccgccgaggacaatggtgatgatgatgatgaggctggacaacaggtcaaacaagaggcggacaggaacagcatggatgcgcatcattcaaattgtgcaaaggggccccttttgttcattgatgaacaggagaatgaggaggaggatagtgaggaagatgagcacatttcaacaacgcatcgaaggcaaggcatggactcgtcatttgactacgaagacgacgatgatgatgatgacaatgacgatgatgatgatgatgaaatggaatcagtcagcggatgtgcggaatcagacaaatgtggtcactgtcaccacccacatcagctaccacgaaatgctttggaggtgctcaaaatgccgctcattgactacctgtgtgcgctgaaccatggatgcagcgtgggagagctgcaggccttgttcctgtctaagggcgcacatggtcgcatggtcacccatctgcagaagcgctgcctactgcgcactgtccatttgcgccccaccgagcgcaacatcacactacatgcacacaattttagtgcacgaagcgccagtctgacctttgcctgcggtgggtatctgaacctaacggtgagtctcatccgtttatcgcttaaacaatggacaaataaatataatgatggtccatcttcggcttcaggtacgtcaatattttttcgcaaaacatggcgttcggctgcgccatccaagtctgcccactctggtggaatttggaggtggaatgcatgcttcatactacccgcttgagtgcatccaggtgcacgtcgcggtgactgcaccggaggacgctgccagcaccacctccaccaccactaccaccaccaccgcatcaccaactgcgtgtgtccgcctcacaaactaa

SEQ ID NO: 70945 - DNA, 3118 bp, Heterodera glycines
atgaaaggagtttggcttttgccgaatgaaagcattgatcagcttggagaacgtgtctcggcaatggtccgttgtgcatatcccggcctcactgaacagctgtacgacgaatattcggccatgcacttcattagggccctccctaacccagaattggctaccattttggaaatgacacgtaaacctggagcgacgttcgacgaattcatcgcacaagcggcacgggcagaggcaattcaaaatgccgcgcgaaatacgtggcgaatgactaaattgtcaagccatggaacatcccaaaatcagcgaaggcacgttgtttgctataattgtggccgagtcggacacacttctcggaattgctattcacagtcgacacaacagacgcaccaggacaacccaagcagcaatttccagccatcagaatcattcaggaaccaaaattctcactttcaacaaaatgatgaaccgccgaaaagggaaaatttgtttataggagccgtaaatttggaacaccggtctgaaatcgaacaattcttcggaaaaacaacgaatttgtcggaaaagggtagattttgggaagaaagcccggcggttggtaaaattttggcagccaaagtttcggtgtttgggcgtaaattggatgcaatgctcgacggcggctcccaaatttctttgatttcggccaaattcttcttagaaatcatggacaaagtaagccaaaaggacatcgtcacccgctctgaaagccggataatcgacataaatggaaaggaagtgaaatcttttggaattgttgctttgccaattcagagaggaccattagaagcgaaaatccgtgtttttgtggcccaatctacatttggctatgatttgcttttcggcacaaatgccatggaccaattaggtttcaaaatgcttgacgcagtgaactgccgcattgtagacttttcgccagcttcgaagcccgaaaattcgcctctgatcactttcaaaaccttcgtgtgccatggcaacaccagtaccaacagagaagggcagaaaaaggggaataaacataggtcggacccaaaaaacgacactggtaccaagaaaggtaaagtggtggagaagaaatcaaatcgaaatgctgtggacaataaaaggagcccattattcaacaaaacattcgtgccccaactgaaaaccaaagaaattccgatcaaaaattctgaaaattttggaaaaagtgcggcaaacaaacagccattgaattcggttcaaatgaaagtgggcgtgccaaacgaaaaggcgatgaagtgtgtttggaaaaggcaaaatttgggccaaattcagttagggacaactgaaaatttgggtagggggaagatgaacccaaaaatggcttcgtcgtcaaattgtaggttgggtctatgcgaccgccaccccgattgtcgttcccaatcgccattccatcgcggcgagaatgacgcaaaacttggccaaagagttttttatcgccgagaaaagcaccgaaaagagcccgaccgtggaatgttaggagacggacgccggcacaggcttaactcgccaccaccaatcggatgccgaatggattcaaaaggcaggggacgccttttctcggagggtcgggatgtgttaatgtttgattattggcattttatttagtaattatgttgtcccttcttaatttttgtctcattgcctgtcattgtagtctctcgcctaatctatattttgccactcccttcccagcagaaaatgttcccccccccccgtcttcccttcaattcattctgttggcagtgcactttcatatttgtattttgttcttattttcctccgactcttctcccattttattgttgcggttttaaataaagtgatttgtctccgtcttggaaatatttgtggaggagaagcagtgtattagcccgacccgaaaagcattatttagcacgcgtcgcatgttttgtgacgtcccatgctcggctgtacctgtacgactggttggaggaggtccgacgggtgggcggtcgatctctgtactgcgacacggacagtgtgctgtacgtgaagcagcgtggcgctgaaggtgtgcgcgagggcaacgcgttgggtgacatgaagcgggagctgcccggccgtcgcatcatcgacttcttcgccgccggcccaaagaactatgggttccaacacgtggacgcgtgcacgggcggcgacctgaaggcggagcgcaaggtgcgctcttttgagctcaactatgcggcggaccagcagctgcagtatgagcgcatgcgccagctggtcatcaaccactttggcagcgggtaaatacgccaccactcccccatgttggggcgaatggggggaggacaccgaggcactctgatcacaccatacaattaattttgatgattttcaggcagcagcatcaacaacaacaacaacaacaacagaggggtcacgcggctgatgctgctgacggaagcgatggccaggaggagcgcaccatctctgtgccatgccagcggtttgtgcgcaaccgccaggcggacatcttcacgcgccgctccacccgcgtgtaccggcccgtgtacacaaaggggcgcgtgcttcggcggggtgcagcagagtgtgttggtgagtcacaaaataaaacagaaaaaacaatagggacaatagcaactatgatgaccacacacacacacacacacacagcaacaatttaaatttttcagatgaagtgccgccgcagtccatacgcactcgcccatttggatggagctgttgtgccggtggcggggcatcacccgacagcacagtgatgaacgaggaggaggaagagcccatgcaaatggctccctctgcagctgaccaggaggaagaccagtggcgggagcatgtttggccgaacgacattggtgatgatgaagatgatgatgatgagccagggccggaacggaagcgtgccagggtcgaacagtgcgtggcgccaccgccctcaccaccacagtcaccgcttcgcgagccggatgcagagccggagccggtggccggctgctccacttgggatcagaccacacggcacacaaaacatatttgtagaaataatttttaa

SEQ ID NO: 70946 - DNA, 850 bp, Heterodera glycines
atgcaacgtatcggcttcatcggactcggaaatatgggtggacacatggcccggaatttgctgagtcgcggtgcccaactcgtcgtttacgatgttgaccaatcaaagttggagacaattcagtcggaacgtggaccatctgcgctgaaaattgccaaaaacccagcagaagttgcatcggattgtattgaaatcgtcacaatgcttcccaccagttcgcacgttcgctcggtgtttgtggacaaatttggcattttggagtagggttttgggtactctaagtttcctgacagatttcacatacattttcaaatgcctataaatgtgttttagaaattagtgaaaataagttttaaggggttttgggggtcgctgatcacgaatgcagcatccgtttttcccaatttcgaacccctgacccggactcgaacaaaaataaaattagaaaatttgtatggatgatatcctcattggcatcttacccatgagggtattattggtacaggaagcctataaattctttgtccttgtacagctcttataatgaatggtagcgctgatctgagcccggattcgtgatcagcgacccccaataccccttaaaacttattttcactaatttctaaaacacatttataggcatttgaaaatgtatgtgaaatctgtcccctaaactagacaagtaccaaaaattactcgaaaaatttatggtttgtctaaaattttcattttttttttgaattttcctaaatttttactttcccagcgagaaatatgcccatttgcgggacaatctgcgccaattccaactccatttggccgagctggacgaactgagcccgctgaagca

SEQ ID NO: 70947 - DNA, 260 bp, Heterodera glycines
ataaatgaccaccccgtcccctttccccgtttattgtctcaatttcacacaatggttctcttaatccgttgaagaagcgccattaacaaagccgtttgaataaaaagacatcgctaaagcccccatatagcgccataacacccacaaaatccaatctcaacatcaaattccccgtgatgatttatttaatgaattccgatggttggttgattaattgatcattcttaatgtgtttgaaatgaataaaggtgtcatgttgc

SEQ ID NO: 70948 - DNA, 2384 bp, Heterodera glycines
gttgcgactttagcgaagatttgtgcaccgatggcgaagtctgtttgccggacgggctgttcggccagtgctattcggacgatgagtcggctttggtcaggccgctggtcctcgaccggcccatcaacggcgtccagtcggagctgcttcgtgcggagctgactcggctggccgagctgggactggattggccggacgcacgtgcccagtgcgtgttggcctatttcaaattggccgtggcttttcgcttggactacgacacggagttctgcacggtgcgcaacccggagaacatttgggcactgattcaggtcagtcccatgctttaaacagattcaaactgtacaggccaattcagagggtacaaaacgcacttttggccgaagcggaaatcgaacgggcggaagaggaggacgaggcggaatcactgcttgtcaccgacccgcgagatgaagcgggggacggaggagcagctgccggacagggacaagctcaattccaaacggcggaagacgacggaggagaggctgtggaagtgataccaattgttgtgttggacggagggcagggggaggacgaagacggaaaagaccgaatggcatacgaaatgtacggaaaagcggagagggaagtgccgaagaagaccggcagcaaaaacgaaaccaaaggtaagcgaagaaatgaacggacggagggggcggggggaatgaaagacgaatggtgggactgaaaaaagggtggccaatgcaaaggaatgcttttaagcggaaaaggcgatggacaagcgcacaacggacgcactcagcgcgacggaggaggtcgagttggaccaattcgttcacaatttgctcgacggccgaccagcggcggagcgacagatgggcgcactaagcgaacgtcagctgagccgattggcacgattcattcgccaactgcaaaacgtagtgcaaaacggtgaaaagcggagggggacggcaaacaatggacgaaaattgaaaactcagttgaagaaacggtgaacgaagcgcaagaggaacagctgcaggaagaggcgccgccgccactgctcgcggaagccgaagcagcacagccgacggaggaggacgcggtggaccacgtgctgttgctgaagaaggactcggagcagttcaacaacgccgacatgggcctggcaaacactgtgcacaaaatcggtaactcagatgcccacaatgaattgcatttgcattttgcaatttgaagtgaaaggcggcatccaacgtgtggagggaaaccgcgtctatttgaaggtggccaaggaacagctgacggaggaggagctgtacaagctgatcggctacctggacaagaagattgcgcagccgaacaacctgtactttgacgagttcctctacgaaaatggccagttgtccttccgcatttctcgcctcggcgtgttgcaaccgaacaaagacaaaaaggacggcaacgcggacgccgcattggaaaatgcgagcggagtggcgcaggcggtgtacaaacgacggaaggacatccaaacgttggccggcatccgcgtggatgagacgggcatcggaagcggagtggtaaggcgtggatgaagcgatgattctatgtcttttacgctaattgccaaccaattaaaggacgtcgtcccggtggagcgttctcagcgcgattggctgttcgtgccaataatggctgtttccgccatgaccatcttcacccttctcgttgtgttggctgctaatttggtccgaatgcgccgtcatcgtcaagaaggcccaattttggcaccgtgccgagacggaggcggcaaagcaggcggctcagtttgcgacgatttgtgccgtcagcgaatcgcagaggaaggcaacatttcacagcgtatcagcagcggacgaagtgccggggatcgctctaaacactcaagcacttcctcgtggcctgcgaaaattgtcggcaccgaccggtgccgaccagcaattggacatcggcacgggacatgtccttctcgcatttttgaaggagcacatggaaaagccgggcgaagtcagcaaagagtgggagtcggtgaaggactacgcgaacgcagcaggcgaagcgacggtcgcacggcgagcggaaaatgcggcgaaaaatgtggacgcgacagtgctgccatgtgagtaccgaacgacttgggaaaaataatggcatagttcaccacacattcagacgatgactctctggtcactctgcacggcttcaactccacggaaacgctaattgacgtgtcctcatccgttgccgagcactctcccgcttattacaacgccagcaaaatatttgatgccaacccagagccgacatacattgtggcacaggcaaagcaacagaacacc

SEQ ID NO: 70949 - DNA, 262 bp, Heterodera glycines
gtcgtagtccaagcgaaaagccacggccaatttgaaataggccaacacgcactgggcacgtgcgtccggccaatccagtcccagctcggccagccgagtcagctccgcacgaagcagctccgactggacgccgttgatgggccggtcgaggaccagcggcctgaccaaagccgactcatcgtccgaatagcactggccgaacagcccgtccggcaaacagacttcgccatcggtgcacaaatcttcgctaaagtcgcaacct

SEQ ID NO: 70950 - DNA, 144 bp, Heterodera glycines
atgagcacaaaattgctttatttggtttaatattcaacaagttataagtcaaaaaaaatttcataaaatcttatatattaattccaggttttgaatgatgcttggcgtattaccaattttgcgattttgggcctaattttttaa

SEQ ID NO: 70951 - DNA, 1159 bp, Heterodera glycines
atgacgaccaaatccgcggccgcgacaattgatcatttgcgttatctcttcactcgtcatggaattcctgagacgctggtatcggataatgggacgcaattcgccagcacagaatttgccaaattcatggccaacaatggaatcatacacctattctcggcaccgtacaatccaatgtcaaacggacaggtggaacgatttatggacactttcaagagggcttttaagaaaataaaagggagggaacggcaaataaggaagtgatcgaaacttttctgatcacttaccagacgactcctaatgattcgctctcggaatcaaaatcaccagctgaaatgcttctcggacgcaagccgcgtaccacgctggatctgctcaagcctcctccaccaaggccaacggagagagatgagaaaatggagcgaaatttcaaccgaagatttggcactcgtactcaaaattttggacctcatgaaaaagtttgggcccggcaccgtctatcgcaaaattggaaggcggaaccatttttaaaagcgccggagtgatctacaaagtgcgatttggcgatggaacagctgggcgcttccacgcaaatcaactccgcaggcgtcagacatcaactgatcagtgcccattaaatgtttttaatgatgcatttaatttgccaattccacgggaaaatttggaagacgggcaggaccctcaaaatatgcctgaccctattggggaaccggacaatgttgtggaacaacaaattgtagaagagcagcagaacattccgcaaaatcgccgcagtcgatcgccaccgccacaacaggtgcgacgtcgttctgatcgccaccgaaggccacctgtgcgattttcacccggatgagaagacttaaaaagggaggtgttcgggtggtaacacccaaggaccaaaaggaagacattttttgttcttttgttattttcttttgatgtctcactctctctctgttccatagtctctaatcgctgtctctgttcttctcgtactctgacctattgattaaatgtccatccttccccatgatgcattcattcatggtctcaatatatttttgttgttctctcttctccaaatattgtgcttctccgtccaatttaatttatttatttgttatttaattttcttcaa

SEQ ID NO: 70952 - DNA, 361 bp, Heterodera glycines
tttttggttgctatttatagaaggggtatataaagggagtgaaaggaccatttgattggtacattgtatcaaaaaatgcaaaaaccgataatcgtaaatataattgctttcgctaatctcggtaccggaattaaactaaactctctgacgatcaccgaatgcgaatttaagtataaccctagaaaattcaatgccgcggttatcaaatgtacaactcctatcaaagccacggcattattatgggaatccggaaaaatgatatgtctggggacgaaaagtctgatagactgcgaaaatgctattaaaaaatttatagaaataattaagggcttggggtgtccgggggcttcttacaccggac

SEQ ID NO: 70953 - DNA, 220 bp, Heterodera glycines
cggagctgcgcaacgtgcatccactcggcaagtcgccggtgctgcaggacggtgagctggtgctggccgagtccggcgcgatccttgactaccttgccgaccgctacgacacccagcgccagctctcgccgtcaccgatgccggccgaaggcgccgagcgcattgcctaccgctactggctgcactacgccgaaggctcggcgatgccgccgttgctgct

SEQ ID NO: 70954 - DNA, 259 bp, Heterodera glycines
attttctaagaaaaaataggagttttgggggcgcggcggtgccgataggcgccgccggggaaaaaattggaaattttgatcatttataaacagtttttcactgaaaattagccaatttataggtaaaattttgaaaaattttatgggaatttaatccaattcttaggggtgtaaaaatcgcatttcgcgcccaaaaagcgaaatgggaaaagcgaaatgggaaacgcccaaaaaatgcgaataatgcgaaaggcgaaat

SEQ ID NO: 70955 - DNA, 834 bp, Heterodera glycines
atgacgcccattgactttgagaaggacgacgactccaaccaccacgtcgacttcgtgacgagtgcctccaatttgcgagccgagaattacgacatcgaaaaggctgatcggatgaaagtggattgatttctcgacggatttatcccgaatgatttcgcattcagacaaaacaaattgcgggcaaaatcatcccggcgttggccaccacaactgcgctcgtctcagggctcgtctgcatcgaactctacaaaaccattgaggcggatggaaggcgctcgacggctcagatcgaacacatcaaaaatgcatttatcaacttggctacgcctttcattgcgttcagcgagccgggcaaagcgcagaagaagaaggtgagttttgattctgtttgggctatttccgtcattcgttattttctccgcttttcagtacctcgacattgacttcactctttgggaccgtttcgaagttgacggaccgatgacattggggcaactgattgattgggttgaggtggtcattgcttccaccgtttaactttttgcatttttttctgttcgtttagagtaagagtggcctcaccgtttcaatgatttcttccggcgtctcccttttgtatgcgttctttcagcccgcagaaaaagttgccgagcgcaagaacatggagtgagttttaattggctttttgtttctgtttaattgtcaaacttcagtcttattgcggttttcgaggaagtgtctcgtggcaaagtgccggaccatcgccgagcgatcgttcttgaggcgttgacccagaatgaggaaaacgaagacgttgatatcccattcattaaa

SEQ ID NO: 70956 - DNA, 503 bp, Heterodera glycines
atgaaattgattttctccgtctttttattttgttcttcgtccatttttatttcgctggaaaaacacgaaaaaacgaagaaaattcagttgaattttactgaaattggcgatttcattgaagcattaaaacagcaaacgcaacacaaaaattcaatggaaataatggcgaaaaatgggcgcgaaattgtgaaagaaattacggaaaattttcaaaattccgcccaaaaagacattcaaaatttgttggatgaaattctggacaaagtttggaataccaatggattaattgcagaaaaatgttttggtaaaatggggcaacaaaaagtaaaagcgaatgaaggaattgccaatggcaatgccattgaggaggaaatgagtggggaattggcacggcacgaattgagcagaatgggcagcaaagtgatcaaagatacaatgttcaattattaccaggaaaatttgctcgcaaaaagcaaagtgtacaaatggtggattcggtacag

SEQ ID NO: 70957 - DNA, 609 bp, Heterodera glycines
atgtattgcgtgcatgggaattccgcggacagcacaccgcagcaatacgcatatccgaacggaattaactcaaccggcacagtgacaaaaggggcgggggacggcactgtaaacatcgactcgttgagagtgtgccaacaatggaaggaccagggcaaattggtgggtggaaagagtcggacgctcaattagcaaagataataaaaaaaattaattagcggattatgggaagaaagagagagaaaaaagagtcaataaattataaacgaaaaacaaattaattagactaatttaaggtgaatcaagtggtcgaaattgcaaatgtttcgcacgaaggaattttgcacacccggcaattttacgatgtgatcgactcaattcttattgcctgagtaaatgaccttatttgttagtgattgtcggacgacgattagtaattattctattttctgtaaatttggtaaagataattttgttttcaattttcattgatttatttactcttttctttagaaaattaattattattttaaatgatagttttattttttcattttatccaccttttattttttgttttgtttaaacctcattgctttaacaaataaa

SEQ ID NO: 70958 - DNA, 119 bp, Heterodera glycines
atggcgagggaggcaaaggttcggaccaaatcgcgaagcgacgaattggaaataatcagagaagcaccgttgaacaaaaaactgttgggattgcctgacagtttgagtaattgcttcaa

SEQ ID NO: 70959 - DNA, 618 bp, Heterodera glycines
atgaaaggttagttcggtgggccaaaatattgttgacctaaaacataaaaataaatgatttgctaaaaaatgttttaaaatgtacaaatgttttgttaagttttttgtaaaataaaaataaattactaccaataatatgcaaacatttttttttggataattacctcaaaaatgtcgtccgtacattgcttattctcaacaacatgtccttgtatttgttgtggcgctaaaggaaaagcctccaatggctctgtaatagctggttgattctggatgaatgtgaaacgaaatgaaaaaatataaaaacaaagaaaaatttttgattactgtatataccgtttcaaaataattttccagttcatggaaatcaaatggcaatggacttggcgtctggtgatcaagggtcggctgggccaaaaatggaaaattaaatcataatattgaaaataatttttaatttaaattactgggattgggtcaatttccatttcgttttcgattattttgtctaaattaatcaaaataatttacgtaattgaaaaatttgttttaccaaaagaaagaaattgtaaaattgtaggagaaatggacatctcaagtaaaatttggagtattaga

SEQ ID NO: 70960 - DNA, 852 bp, Heterodera glycines
atgtacgtggacggccacggctcgaatttcccgtccaatttggcttcttgcggtgccatcccttcgccgtattcgggcactttctcactgaaggcgtgggtggcctatgccttggccatttccgacccgttcgatctccaaaagtgcatcctttatatgatgtcgtacgtcaaattgaaattatttgctttgtaatttggcatatgcttaaaatctaaaacaatttcggttgaactgaaattgctccccgaaagtcggggcaaccccaaattgatgcttcacgacataaagaaacattggaaatacgtgtcggaattgtatatttttcagactgtcctatgacagtgcgagcggagcctacagaaatcggaccggaatgaatgtcacattcaccgcaagacgcccatttggcctgttgctattatacaatatataaaataaatagatgaatcttttggcttttttggttgaaattttggctgattaagcaaaatttaaaattccattaaagaccacataaccaaaccaatccatttatagggaactgctataatataccattttttgaattttaaatactttttttgtcgttgaaatttcggcactttccttttcccaatgttcagcacgtgtccgatgacttgtctgctcactgatagcaaccaaagctgcaatcccaacgagaactccacgtcgacagatgtgtattttggggcacttatcagtcacttggcccaatttggctatgtgaagggatgcaaccttttcggcgccccttacgattggcgtttggcaccgcaactgagtgccgacaatttaataattatatttgaagaatataaatgttcttaa

SEQ ID NO: 70961 - DNA, 224 bp, Heterodera glycines
cattcgttttgccattttctttggcttaattaatcaatggcactttcgccacacattcactaattacccaaatgctttgttttgccacctcaaaatgttttcctcaaagcttcgaccaattcaaaagccgatcagttccactcatcttcatctttttgctgacgattcatcttttatttgcggaaattgcttcggaaaagtcatcaaaagaaacatttaaagat

SEQ ID NO: 70962 - DNA, 273 bp, Heterodera glycines
atgagaaccctgccttattttatcattttcattacttcacgtgaaaaattgttggcaaaaatggcggaagtaaatagaaacaaggatattgttggctttttattaattctgatatataaattaaagaatttttagctcagtctttatattattttattattactaaaaaagaaaattaaaaatgtttaaatttcttattttcaatttgttattgcttggaacacgaatttttcaagaaacaaaatgtcaaaaaggttatttttaaaaaataaa

SEQ ID NO: 70963 - DNA, 268 bp, Heterodera glycines
atggctggcgccaaagtgggcagttccccaaaattgaaccctcccgggacaacttgagggatataagtgtgttctatacatatcctcaaaactaaattcttaaaaaaataaacactcatctcctgaaaacaaaaagaaagattttaaaattttaaatttacacatatacatgatcagtaaattattgataattaaaatcattaatttcattacaggaaatcagtagaaaggcgattgtatacgtatgaataatataaagcaaataata

SEQ ID NO: 70964 - DNA, 206 bp, Heterodera glycines
atggtgccgtttgaattggtgaacgaatggacaaatgaaaagctgacattggccaaagcaaatgaaaatgaattggacaaaagttggataatgaaacgatgcaaaattattggggagacagcggcggtcaattgggaagacggaaattgggacaacaattgtaacaatgtgttcttttggcttgaaggtgacactaattgcattgg

SEQ ID NO: 70965 - DNA, 107 bp, Heterodera glycines
cgtacgtttcagacctctcacagtccaggaaaaaaatatggatttccatgtaaatgatagccctaattattacacaaatgccttttttaattgctcacccaatgcaa

SEQ ID NO: 70966 - DNA, 325 bp, Heterodera glycines
taattaaatccattccttcgggggaccgtgccgggtgccgcggggtaagcagtgctggttcgtttcatcacggcaccgaaccttttggctagtcagcaatcgttgcttaacttgccagatcggacgggtgcgcatgattccactgttccaagcaccccaccaaaagcaaaacgatataaccaaaatataaggaaaaattttaaaaaaattttttctccatcttcctttttgatactaaagcatcagagtgctaaaattgacttgtaaataaaatttggtgcgctttagagcactttctgaaaaaatatttatgaaataaaaaaat

SEQ ID NO: 70967 - DNA, 263 bp, Heterodera glycines
gcgcgggcagcatcgtggcggcacccgggcagacgccaaggctgatcgctgcgggcaaccccggcatggcggtgggcggaatgggcgacctgctcaccggcatcattgccagcctgcgcgcgcagggcctggccgcgttcgacgcggccgcggccggcgccttgctgcacgcactcgccggcgatgccgctgccgccgatggcgcgcgtggcctgcttcctactgacctgctggcgccgctgcggcgactggccaatccggac

SEQ ID NO: 70968 - DNA, 121 bp, Heterodera glycines
gaaatggaagaaaatacaggaaattctggcacaaagcccactgcacacattcgcttttccatcccggcactgtttgggacaccgtcacgcattttgtgacgccagtaagcgtgccgccggg

SEQ ID NO: 70969 - DNA, 155 bp, Heterodera glycines
atgattgcacgtaattgccgaaaaaattcgagaccaatttccgaatgttgaccgactaattgcaaaacgaaagccgtctttatcaaagcgccttaccgagtcaaaaaatttggaaatttatctcatatgcaatttcaaccaataaatttgaagaa

SEQ ID NO: 70970 - DNA, 867 bp, Heterodera glycines
atgccagttcaagccagcccattagcagcactgaaacggcaccaaccgcaaactgtttggcccgttgccggtgcgtttgccgactgcaccgcgcaaaacacggtcagtcgtcagcaatagtgggtcatctcatctccttcgtttctaggaattatttccgagactcgagaccaaaaaagatgagatttttctcgagatcgaaatttttttcaaggaattttcttgtgtacttaaaaagcgacttcaactttctataaatttaatttaaaaagatttgctgaaaatttttttgcttataaaaatttttaggctcaaaacttgcgaattttttagaaaaattttagattttctttaggaattttctatctaacaataagcctaaaattttttagagccaaatgagttgcataaattttgaattaaaaaaagagaaaatttttttgaattttttctacgtttccttgaaattttattttttcattttatccacgcccactttcaattcaggtccatgtcgacgcatttctgttcgatgacgacgatgttgatcagttggccgccgatggcattctgcggcgccatttctgcacaaaatgccgctccaccgacgtggaacagttcaacttcatctcccattcgttgaccattgatgaggtgtgtgcttgtgctggtgttggttttcaaaatccaatgcattttcttattgaaaaattatagaaaaatttaaattttgtttttatgtattttgtcgcaattctcgcccaccaaagggtccgatattatgtattctagaaaaatttatgttttttttcaaaatggataaaattaggtttacctaaaaataggagccacggcgggacaaataaa

SEQ ID NO: 70971 - DNA, 65 bp, Heterodera glycines
aataaaaattgggcttcgccttcggcttcggcttcgagtgcaaagccgagcttcgcccagccctg

SEQ ID NO: 70972 - DNA, 138 bp, Heterodera glycines; identical to SEQ ID NO: 50950

SEQ ID NO: 70973 - DNA, 678 bp, Heterodera glycines
gaaaaaaatatttatgaaacaaaaaaatcgattttttcaagtgtccgtttggggtactcaaacatttatggggagcaaaaatccaacgcagaattaaagtacaggctatagggaagctattcccgaaggattcggtctccccataaatctgggcgcatcggttcggggggactcgccccgaaaacaaaaaaatcgattttttcaagtgtccgtttggggtactcaaacaattatgagggagcaaaaatccaacgcagaattaaagtacaggctatagggaagctattccggaaggattcggtctccccataaatctgggcgcatcggttcggggggactgccccgaaaacaaaaaaatcgattttttcaagtgtccgtttggggtactcaaacaattatggggagcaaaaatccaacgcagaattaaagtacaggctatagggaagctattcccgaaggattcggtctccccataaatctgggcgcatcggttcggggggactgccccgaaaacaaaaaaatcgattttttcaagtgtccgtttggggtactcaaacaattatggggagcaaaaatccaacgcagaattaaagtacaggctatagggaagctattcccgaaggattcggtctccccataaatctgggcgcatcggttcggggggactgccccgaaaac

SEQ ID NO: 70974 - DNA, 1317 bp, Heterodera glycines
atgacaccgaatgggggcaagcgcatgagacttggcggagccggtcgtccagttcagcgcccggacattgacaatgcactggccgaatgggtcaccgaaagacaaaaaaatcaacagcccgtgtcaaggagcatcattcaaagaagagcagctgaactgttcatggacactggcaccaaggtgaaaaacggcggttctattcccgcaatttaagcgtcccatcagtaaagcatcctcagtttcttaaacgccatagcttttttcttgatcaatccaaatgatgaatttcagtcgggtttctcgacgtaatttttttccgaatgcaaatattttcacttttcttgtatttatttataaattccctaaactttaagctttcgattgataccaagaatgtttggattaccgagtaagaaaacaaaaagttttggcctaagatcactgaggatggtcactgatagacgctaaaaaactgtaataaaagaaaatttttgtttgttcaggcctcagttggatggctgcagaaattcctgaggaggcatgattttgtgctgcgcaacaagacatcaactgatgattgtcagaagccgtcgtccagctgatgtagcgagcgcagaatggagtccggagatgacgcgatgcatttttcatttaatggcagttttctactgttcattttgttttgtaaaaaatggtgtcatacaatttacatttatcccccggggcgacaaatggagagacgaaggataattgggagacattttttgggaaggcatcaatcagtctttttccttcatttgcaatttggttcttcacttgaataagaaagccccagaaaacttaagcatgcaaaaaaaaaaaccgtcacaaaatgagtgtggttttactaaaataccaatatagcgtagcctccacttttcggatgtaaatttaattaaagcgaaacgtgtagtaaaaagttggatgttaggatgaaataatctccgagttggtggtgcgcaaggaaaagcatcatttttttgataaggcagcaaatttatcacacataggtaaattaatttcaattatttgtgccaagttatattggcgagcagcaaaatacttggacaaattgatcaaattaatccattacttgaattattatatgtatttgttttatttgttgttagtgttattattctctacatatctcttttcttttgtttttgtgaatttcaattgtgccgacaattaaaacttgtaatttttgtcccctttccgtgtctccttatatggttggaaacttaaaaaaaacatccacaaaaatgacaaaataaa

SEQ ID NO: 70975 - DNA, 158 bp, Heterodera glycines
atggcgtgctgcgccaaaatggccagaaaaattcacttttttgaggttttttggccatatctattcaagtgtaaactaaattttttgaaattttgtaggttaatcgggactgtcatgcgcttcaagaccatatcaagattatttaatttggatgacaa

SEQ ID NO: 70976 - DNA, 565 bp, Heterodera glycines
gtgtagccaaatggattggcacgggacgaaaggaggacaaggagggccaaaccgagaaggtactttacaaattaaactaattattaatgaataattttctaaaatatttcggcacaatttattttaaaaaatataaaaataaatgaaaaataaaaaattgatatttttaaaaagtattttaatcaaattattaaaaatcacataaactcaagtaaaaaagctaaaaaaaagaactttaaacttatttttatttttctatttatttgtttataattctattcatttttaattatgtattaaaactttaaaaaatttccatttaaatttacaaaatatttttaaaaattattttcactaattttttcagatttattttgacaaaaattttgttttgctggaacgtccgcctggccatcccgggcctggccacttcaaatttgttgcccattttgcctattcattgccatttgagtgcccattgcccagcgggtgcgagacaagctacgagagtgggtcggcacacattcgttactttgcgcgtgccattctcgagaccgagcagcgg

SEQ ID NO: 70977 - DNA, 687 bp, Heterodera glycines
gttttcggggcagtccccccgatccgatgcgcccagatttatggggagaccgaatccttcgggaatagcttccctatagtctgtactttaattctgcgttggatttttgctccccataattgtttgagtaccccaacggacacttgaaaaaatcgatttttttgttttcggggcagtccccccgaaccgatgcgcccagatttatggggagaccgaatccttccgaatccttccggaatagcttccctatagtctgtactttaattctgcgttggatttttgctccccataattgtttgagtaccccaaacggacacttgaaaaaatcgatttttttgttttcggggcagtccccccgaaccgatgcgcccagatttatggggagaccgaatccttcgggaatagcttccctatagcctgtactttaattctgcgttggatttttgctccccataattgtttgagtaccccaacggacacttgaaaaaatcgatttttttgttttcggggcagtccccccgaaccgatgcgcccagatttatggggagaccgaatccttcgggaatccttccggaatagcttccctatagtctgtactttaattctgcgttggatttttgctccccataattgtttgagtaccccaaacggacacttgaaaaaatcgatttttttgttttcggggca

SEQ ID NO: 70978 - DNA, 533 bp, Heterodera glycines
atgtttgttgtcgcccaaattgcaccgctgactttggcactgttgctcatcacccttttgatggcttctgatcgatgtgccgtggcactcaccgcggggcttggcaatggtgtgaatgtgcagcccagctactacaacagtggcaaagtgtcgcttggcctttcccagttgaaaacgttggcaacgaaagttaaaactgtgcggattgaggtggagccgttcattcccatttcgttggccaagcaatggatcagtgaggcggccaaaaacggcttttccatcattgtcacttatcataaggcgacagtgttgggctccaacgatgcaagtaagcagaaaaaatgccaaaagcatggaaaatgtccaagaaaatgccgaaaatgatatcgcgggtcgaaaattggatttttcagaaatctcggcctcgcttttgaattgttcggtcatttattagcaagacaaaaacaaaacaaaaagttaaattaaaatttttttaaatttagttagattattttttaaatttttaaattaaa

SEQ ID NO: 70979 - DNA, 438 bp, Heterodera glycines
aaaatggtctaagtaaaaatcgtaattacgctcaaaaagcttctcaatcaattttagcgcttccaattccttctacaatcgcctttatacatcccattatgagcgctaaaattatcagagtgccgaaaatcgcatgtgatctaagcctagcaaaaaatggtgtaagtaaaaatcgtaattacgctcaaaaagcttctcaaacaaatttagcgcttccaattccttctacaatcgcctttatacatcccattatgagcgctaaaattatcagagtgccgaaaatcgcatgtgatctaagcctagaaaaaatggtctaagtaaaaatcgtaattacgctcaaaaagcttctcaaacaattttagcgcttccaattccttctacaatcgcctttatacatcccattatgagcgctaaaattatcagagtgccgaaaatcgc

SEQ ID NO: 70980 - DNA, 511 bp, Heterodera glycines
ttcggggggactgccccgaaaacaaaaaaatcgattttttcaagtgtccgtttggggtactcaaacatttatggggagcaaaactccaacgcagaattaaagtacagactatagggaagctattcccgaaggattcggtctccccataaatctgggcgcatcggttcagggggactgccccgaaaacccaaaaaaaaattttttggataaaaattatttaaatgaactgactagataatatttaaaataggttatttctcttcctttcagtatccctgcaaagtttggtgcgcttctgatcagtttctgaaaaaaaagttaagcctaaactttttggcctgtttaaaaaggaattaaaaatttttaaaaattttattcatctccctttttgatagaaaaagcatcagagtgcctaaactaacatgtaaataaaatctggtgcgtttcagaaccctttctgaaaaaatatttaagaattaattttgcaaaaaataaataaaaacgaaagact

SEQ ID NO: 70981 - DNA, 323 bp, Heterodera glycines
atttataagcatttgtagggttctcagcagtttccctgcaaaatttggtgagcttctgatcagtctagaacgttgggtgataaaatgaaaaaaataattaaaaaaaaataatgctggtgtggtaagtgtgaagaactgtgttcctccaggcaaaaaattctaagaaaatttataagcatttgaagggttctcagcagtttccctgcaaaatttggtgagcttctgatcagtctagaacgttgggtgatcaaatgcaaaaaataattaaaaaaaaataatgctggtgtggtaagtgtgaagaactgtgttcctccaggcaaaaa

SEQ ID NO: 70982 - DNA, 946 bp, Heterodera glycines
atggcaaagaatgaaataattaatcaccggacacagaaaagagaagaaaaacaaagagaggacaagaaggaaaatcgaaatgacatggaagatgtgagagaggagaacattttcactttcgaaggactcttcgaagaagcggacgacgaaacattcgtcggagataaaagagaaagcggagcagctaatgggcctaagcccgaaattgcaggagaaggaaaggatatgcctgaaatggcaggagacacaacggatcggcctgagataacgggggaagaaaaatataggcctggaatggaagtggagactgtttatctcttatcgcttgcgcgggagaatgaaactctgaacgtgaaatgcgattggccttttcgttcgaaaggtatggcatcaaaaatacgaaacattcgttttgtttttttgttaatgcgaattcagaatgttgtactgttcgaattcttcaacagaagaacagtgaaagaaaggatggggcaacacaaattgaagaaggatttgaggaagacggaacgatggccacagaaaaaggggaggagggcgagggaaggcaaagggaatgccaagctacggaaaaacagttccaccagccgcgaagctccagaagagcgccccggccccacctgcgccgtgacaggccgcccccactgcccctgttcatttgtggccctacgccccccgcttcttcctcggtcgtccctttccacgacccttccgtcgggggatgctctccctctccatccaccagcacaatctccccgccaatcccttcaaatgccatttattccatccgaatcggcggaattcagcttcgcaatgtgccaccttcgtcagcggcctctcaggaaaaggacgtgcaattggtggtggccattcggctggacagaagggaagtgttccggtcgtgtcccgttcatctcaacaggaactg

SEQ ID NO: 70983 - DNA, 1010 bp, Heterodera glycines
atggacgcagaagcacgcgatgaaatgagacgacaaacgaccgatggatgggagaggatgcagaagacaaccgccgaagaggaaggaggaggaggatacattcaactgaccctattcccatatatgatcccaactgtacagattgtattattgtatctcactgtatgtacagtatttgtcgcccggttatcgtttaagcgaccataattgtctgttgttggttgatcaccattatcaatgtgttgtatctctgtgttatcatttcaaatgatttgtgattaattgttggcctaatgtgtgtaaataatgtgaagaatccaaagatttgtttgtgtttttgctccctttttcgtgccttttcatgacttatttaattttttggtgcctattatagtgcctttttttccaggcttttccatgctctaaattagtgttcagaccccgacccatcccccggggacgggacaggttttttggcctgcctcccccctgctcccgtgactcagactcccgcgaccttcgcccccgcgggggtgagtactctttcaagtttctaccgtaaactgaaccctactgattttatttatttttttatactgaggaaagtctcaagcaattagtgaattttcaagaaaatatacccttaagaatggcatttcttgggataaaaggcaaacaattatacttgtatttttttaactttttaaaccacttttgataaaattttatgtgataaatagggatgccaaaaatatgcacataaaatcgtaaaatatgcgcataacataaaatcgtaaaatatgcgcataaaatatgcacataaaatcgtaaaatatgcactaaaaatcgtgaaatatgcacaaaaaattttccaattgagggtgtaatttctcaaaattactccccttttaagcaaagcaaattgagagaaacaatcaattaatgtgagaaaaaaggaaaaacgacgacgaatgggtcgaataatcaaatgaaaggaacgaatgaataaa

SEQ ID NO: 70984 - DNA, 101 bp, Heterodera glycines
atgggtgacaaaaataaaaacactataaaattggcaatttcggtgatttgcacaggtcttctgacagcccttctgttagtcataatttggctcttaacaaa

SEQ ID NO: 70985 - DNA, 1060 bp, Heterodera glycines
atgtggcttatggcaatcttcgctttttggcttaaccttttccacatcgttttgctgacctggtccgattacccgcgtgaacattacaaccaggcgatggtcgaattggcgcttcgtgttcagcaggagacgggggtcaccgctgtcaaattcacttcgttcacttgggctgtaaatgcgccgtccttttgccatttccctcccccgtcaaaaagtgccgttttcaccctttcagcgttctttcccatggctttgccacgtggtcattatggttgtccttttctcctcctgttacattgtcattggggtgcatttgctatgccaatcgaacaaatattttgtccatttacagatttgtgccgtcaaaatccgtcgttacgtcggcaatactttcgcccagggccaacaggaaaatgccacgggcggaatttgtgccacgacttcgctgcgaaagcagaaaatgcgcgaatataataatgaaattacacgcgcactgattgtccaggtgcgttgccaaccaaaaggaacattcccaaaatggaagtgacaatggcaggccgttctgcccaccttcgaggccgctgcaatgctcacccaaattttcctgcccatactgtaccccaaagacactacagtattcatcatccttttcattgccatccctctttattttgcgccggtcggttcgctttttatgcccataaatgccaaaagctttcccattttgtcaaaggttctgaacccgttggccaccattcttctcgtgaagccgtatcgtcgtgccgttctcgcgttcattttgcgccgtcgtgccgatgttcgcgtttcaaccggggcatttgtggaacggacgaaccacagcaaattcccaagctcaaccgcattcagtacgaacatccaaggacagcagcaacagcaaatgacaacgacggaatagccgaaaagtgaacaaaaaaacatttaaataatttaatttaaaatatatatattttaggagtgtaaacggagaagcagaaggaaaaggagaacaattgaacaaaaaggcaatcatttcaattga

SEQ ID NO: 70986 - DNA, 148 bp, Heterodera glycines
atgacgacgaaggagaagaagtggaagaggaacagccaactgccagagaagggacccaacgaccagaatttgtctgagagagagagagaggtgccgaacccgaacaaaggatgccatggcgaatggacgaattgtgccaatgccaaat

SEQ ID NO: 70987 - DNA, 175 bp, Heterodera glycines
agtgcaatttcagcactttgagtgccaaaactttgcctctttttattggaagagtttggacgtgttaaaactgaacggaaatccttttgtaagcattggacggataaagcatcacaaatgcttgttggctgttcagttgtgcgattgcaaattgaaatggatggtggacatgaaa

SEQ ID NO: 70988 - DNA, 568 bp, Heterodera glycines
atgatttatttatttccattttcttttaagggaaatctgtcacggattattttgccacacttaaattttgatctgcttggcattgagttctatgtgaagtttccgaccaaccttcttgtcacgattgcttttagcagtaatgcgccatttctttatatgttagatttaaaaaaaaataaaataaaattttaatttaatttaatttatttattttattttattttatttgcagcactgaccatcaaaaggcattccgttcacaattcaaacggatctttggcaaaaacgaatcaaaacatttaattgttgcattcgctaattaatttcatcgaaatttttaaaggcgcttcaaaacaaaaacgaaaaaattgactttcgattactaatttttttgataaaatttagcgattaaaagctcttacctcaaaatcgaagctttgcgctgtctatagcgataataattctgttggttttatctttaatatttattctaagtaccggcttatttttattttaaaatagaaacgtgtgggtgctatgacgttagtcaaaaaaccatcaaaataaa

SEQ ID NO: 70989 - DNA, 519 bp, Heterodera glycines
atgtacgagatgaaggtccaggcgcagaagaaaaagaacccgaaggttgtgttccgcgactcattcaaccttatgccttgtgcgctcggacagctggtgcctgcctatggattggatgtggaagaaaagccgttcttcccgcatatggtcaatcgcccggacaactacggacgacaaatctacccgacaccggacgactatctggcacaaggaatgatgccagaaaagcggcgacaattcgaccaatggtacgaacaacaccgccaagcaccatttttgcttgacgaggcattggccagctactgtaaaaacgacgtcgacattctcacggcagcgctcgtcgctttccgccgtgaattttttgagataacaaagaggcaggctgtaaatgagacagacgaccaagaaagcaacgccggcattgacgttttgcgggagtgcatgactatcgcaagcgcctgcatgaaacactttcgcagcaaccacctccctgctgctgcaatacgagagcagcgatga

SEQ ID NO: 70990 - DNA, 888 bp, Heterodera glycines
atgaacagacggtgaagaattttttgaaaaaaaaaaaaaaaaatttcttataactttgctctaaagcaaccaaatttttcattcgtaatatcattcgataggcctaaaggttctctattgcctgaaaaattcaaaaaaaaaaattttttgttaactcaaaaaagttatggccaaaaataaataatgactccgcccccgttaatttgtttgactcaataaaagtcgattggacgcatagaatgagttcattatagccatttttcccatgtttcagctggatttgtaacgacgtgtggatggacattctgccatcctttgaccatgctcaactcggactcaaaatcgcattgctttcgccccgttttgatgcgctggtggacacgcattttgatggcaaaagcgagttgacgacttggaaatggatcagaatttgcaaggatgaagcccaaccaccaaaagcgaaagtgtctgtgccggtcggtgccaattttgtgcagcaatctccgtgggagccgatggatgccaattttgtggattttccgttgccggaccttccgctgccaaacaaactccgaattcgtttcatgattgagtaagttatgttttttttcaaaagacatgaaatcatatttccgagcgttttcgggatcactggtcacgaatctccgggtcggggcgaatttgatcgaaattaatgtcaaaatcggattaattcctaagaatttttttaggaaaaatttctaggtttgaaaattaaaaaaaaattttcggaggggaaacgacgggggaaatgaagtgcaccccctaagacaaccttagttcaagaaaaaaaaattttttttttttaaaggggaggggggtaccatcgacagtattaccattttttaa

SEQ ID NO: 70991 - DNA, 1358 bp, Heterodera glycines
atgtgtaatttgatgttaaacaatgcacaccacttggaccaattgtgccgtcgcatttcgccaacgctgctcactgatcttgacaaattgaattggatttattcgggacgtctgttcccggatgtgtgtgctgctgatggctcaaatgcatctggtgctcgccaagtgctgtacaaatggttgcacacgccgacaaaagatggcacgccaaagaaattgtattgccgtgagacgattggttttccaaataaccaatgggtccacaatttcaaagaggtgtggtggtccgcaatattggtacttgtacagaatttagaccagggatggcattacgaggccccaaaaatttttggaaaatcagaattccgggggtcaaaaattttcggaaatcgaaattccgtgccatccctggcttaccacacaaaaaatttgtttttaatgataaaaacgtatttccaaggatattctcggggtcgctgatcatgaatatgacatccattccgatcaatttcgaatcccgtgcccgaattcgaacaaaattccaaaattcttttcaccaaaatccacctttattgtccaaaatcattcaaatatactgaattattgggatggctattccaagcatttgaatggattttgaacaataaaggcggattatggtaaaattgaattttcgcttttttcgaattcgggtccggggtttgaaattggtagaaatggatgtcatattcttgatcaatgaccccgaatacccctggaaatacgtttttatcattaaaaataccaacaaaaaaaaaagaaaaaaagtttttttaaatattttttatgtggtctaatcttaatctgtacaagtaccgccatatttttcgtgtcaaattgttgtttttgttttgccaattttgtgttgttttttaggaatttccccgtgccaccacttcggccagttacaccatcaatttcaatttgtatttggtcaaaatgcgaatttggccatttgagttggtcaacgaacggacgaatgagaggatgacgctgatcaaggagccggatcgtggtgctcagctcggtgattggctgctgaatcggtgcccattggccatggcggatcagcagcagcagcagcagcagaaagtcgaaaattcggatgccaaattgaactcagtgtacttccgtcttcgtggtgattgcattgggtgagccaacagcagcagaagagatgacagtaaaattttggaaaaatttgcgacgatttttttttttttgaaattataatgaattagaaagttttcgaaaatttttcaaaagtcgccaaaaaaatttttaccttataatctcttcatataaaaaatttttttaaa

SEQ ID NO: 70992 - DNA, 1150 bp, Heterodera glycines
ctttatctgcgccgattgttggcttttggtgttcgatttccttgcgccttctcaacttggcctcggaattgcactgatcagccgtcgatttgacttctacgttgatgaacacttcaagacacgcaaatggatgttgaacaaacaattgctaattacatgggacattgaagaaaatggcacgaagaaaatgcaaattatcgatgccgacagaaaagaaacattgccaatcccgcaaaagcctttgccgaacaaagtgatcggattcagcggacgcattcagatcatgtaaaaactgattagattgagactgatttgtgaccatcattttctatgcttttcagttacatcgatcaaaatgtgctcacttttctcggccattttcaccgttttttcgccacttctgcaatggatttggacattgtcattgaaaatggtcgcattttggaatttgtgttgcacaacatttggccaatgttccgcgattcaattcgtcgcttgtttttgaacgccatcgcttttcgctgtttgcgtcaattggcgccgtcaatgctcaccgattgtccatccctttgcgctgtcgtcttcaatgacggcatagtgtccgaatttccgatcgatgacagtgccatggcgtcggatgttcaagtgctggcaaaatggctgttcacgcctcatccggacggtgtgccgaagtggctcaaatgctctgttaattcatcggtggaacaatggtcatcaacgatggaacaattcaaatcggtggattattcaccactttttatgagttttttgtccctttttaaggcattttccaatgcttcttcaccagtgactttctgcattttcttgacgctttcatccactttaattgactttgttatgccatttgatctgatcaacgaagtgactggggagcaattgacactggaacatcatgatacaaaccattgttggctcacgcgttgtccaattggatgggatgagatcaaatgggacaatgtgtgggaggaagtgagtgctgctcgaccgaaacagattatcatttggatcaaggacgatggatttgacgaggggtgaacaatttaattaaaatgatcaatgcttttttggtaatagtttagcttgatatgacatctttttcaaaaataaa

SEQ ID NO: 70993 - DNA, 49 bp, Heterodera glycines; identical to SEQ ID NO: 51181

SEQ ID NO: 70994 - DNA, 155 bp, Heterodera glycines
taagcctaacttttttggcctgtttaaaaaggaattaaaaatttttaaaaattttattcatctcccttttgatagaaaaagcatcagagagccttatttaacttttaattaacatttggtgcgtttcagagcacgttctaaaaaatatttatgaa

SEQ ID NO: 70995 - DNA, 212 bp, Heterodera glycines
atgattctggatcatactgtaaattttcattgaaataatattttgaaatttttcagcacccatacgctttattctttgtaattcttagaagtgtcgttttattgtagtcaacataaattttagtgtcccgacctacccctaattctatctcatttaaaaaattttttataagttaaccaagagccatttttccattttgttaggccattaaa

SEQ ID NO: 70996 - DNA, 601 bp, Heterodera glycines
atgcgacgaaagaaaggccaaaagaatgaaaaaggacaaataacaaaacgaaacaaagttaagttagaacatgacggcgcactctataacgacatcaataacattcacctcccccaaaatgatcacaattatgccaatgccaatgtgaatcccgaaaacattatcaattttctcactggtgtttcccgaaactatgaaatgcgaccttagtttgttctgaaatttgttattttttgttatatttttataaaattttaattattttttccgtttgacgcacatccgccaaactgacaaattattgtagaagatattagccgcaagaaataaaaaaattaaaaagttaagaaatttgtccgaatgcgggttcggattcgaaacatggatgttttgcacaaatccgaccaatttcagtcctaaacagctactcacgcgaaaacgtaccccacgcgaaaacggccacgcgaaaacgtaccccagccacgcgaaaacgtccccacgcgaaaacggccacgcgaaaatggccacgcgaaaacggccacgcgaaaacgaccccgaccgctcgtcggcatgtgaagcggcgcagaatgagaagaaatga

SEQ ID NO: 70997 - DNA, 318 bp, Heterodera glycines
atgtccgacctgctctcccaaaaacgtgctgcccttaaacgggcccaagaagagttagccgaggcagaaaggaccaaccgccgcccgactccggcccctgctggacgacccctttctttggctgccatttgcccttccccatccaaaaacccgccctcgccaatcgcaatgccacggaagcagcaccggacgatttgcgggccatactccatcgacaatttgctcgcctcgccactgatcaagaggctgccgcccaatggacagagcgccgaaagcgcgaaattgctgaggaagcggaacgagtgcttaaagggctga

SEQ ID NO: 70998 - DNA, 1017 bp, Heterodera glycines
  unsure (1)..(1017): unsure at all n locations
atgcccaatggagaagggccaagaaatgcccataaattcgactttggattcaaggaacaccagcggatagggtaagtgtttttaataaaatagaattaaaatagaaaaaaaaactaaaataaaaaaatcaataaataaatttaaaataaatacattaaatttatttaatgaagcaaaaaattctttaaagagaaaatgaaaagcaacaaaaaaaaccgaaaaataaattaaaaatattttaaaaataataatttaatgagccaaaaataaataataattaaattttaaaaaatcaaaaaaaataaataataaagaaaaaaataattaattaaaaaatattaaataaataaaaaataaaatttaaaaaatcaaaaataaattaaaaataaaataaataaaataataattaaagtaaagaaaaaaaataatttaattataataataattttattaaggattacaaatgcggataaattttgcctgttttacgcgcttgtggcgtctaaattttatttggaagtgcatcgaaacatttttaatcgatttatgaacaatattatgagacagagggacgcagctattgagcttttacataattgtggaattgatattaacgaatatagctatggtgtggagcaattgccgaatgttcagaaatattgggtgggtttaaatgaaaaaatgcaaaattaataaatttttcaggatgagatttaccccggaaagtaccgggttgtggcatttgagaagtcagctgatccgcggaaatcgatccgtgttttgtggaagggccagatggggcgagagaaggtcgtaccgatatttttggagaatggtcactggaatggtctgaagaattacgcttgcttttttaatcgagggaaaaaattttgtgttgaatgtgaatgcttttacgatcaggatgtaaaacatactttcgattgccgggcaaggtgttattattgcaaacagagtgngaggngtgccgtgtcaaanggagagtgnagtgaagattga

SEQ ID NO: 70999 - DNA, 650 bp, Heterodera glycines
gcttttccctcggcttcatctcccgtcaatttcattgtcaccattcgctttccgccgccttttgctgactccgttgtgccctttgtgctgaccaacgaattgactcgggaacaattggcattgaaaagaactgacaatagccatcgttttctgcttgtccgttgtccaattgtgcgagacgaaagcaaatggacaaaatgggaagaagaagcgattggctggcgattttatgatcagtggaatcaaattgacattcaaatttataacgaggacaaagttggggacgggtaagcgaatgatttttcagaaaatccaaatttattgcgttttcaatttttaggcttctcgacgcaaatcccggcccgagtgatcagcagacagaagtgaatgaatgatttgctgagaagtgatcgatcaatttgaattatggaataattattgacgtgctcatagaaaatgttatttttagcatggaattaattgatcatcgtatatttgggttttctatgtcttaaggataaatttagtgatttctttaaacttgaattttggctgaaaacggatgtcgcaaaaattaaggaaaattttttcttagaatttgtcatttttaattctgaatccctcagaaaatctttttttaatttattaaa

SEQ ID NO: 71000 - DNA, 194 bp, Heterodera glycines
aatcgcacattttggccaatgctcaggagcaaattcagcacttggaattttcgctggtcaccggcggcaaaggaatggagagggaattggccagccatcggttggacgacaatgtcgccacggaactgaaacttgtgctggccgccggcctctacccgcagttcggcgtcgtggacccgaccaacaatttccga

SEQ ID NO: 71001 - DNA, 161 bp, Heterodera glycines
ttttccggcggcgcctatcggcaccgccggacctacatttgccactatttttacaagttttttgccgtaaaacggccaaaatagggtcatttttagtgaaaaagtgcagttgttacccagctgtggaaaaaaagttattggttaaatagaaaaaaaaaaaa

SEQ ID NO: 71002 - DNA, 223 bp, Heterodera glycines
atgttttcaattgttggaaaaaaggtcttcaacactacctcgtgcaattttctttcgaaggcattttacgctcatatgagcaaagatgaaataatgtggcattggcctgcgcagagtaaattttggttgtttttttcaattttgaatgtttgtctaaatgttacaaattctcagaatttgaccaacatttcatcgattacttgaacaagccggacattgacgg

SEQ ID NO: 71003 - DNA, 338 bp, Heterodera glycines
attatgagccacccaatttggcaaatcggtctttttaaacgcattaaagaagattcagtcgattgcttggagtgtaagcaaaaaaacgttattaatgtttcatcttcatcattttttggtttaaaaatatatttgaatacttttttatactttgaaagacttttttattaatacagaattttttgaaatttcctaaaatccgcaatcctgcgcaggatcctgcagattttaaatgcaggatttgcaggattaatcctgccggatcctgtcctggaaaaaattttgaattccaatcctgcaacaggatccgccaatttgaaatttccgggttctattaa

SEQ ID NO: 71004 - DNA, 349 bp, Heterodera glycines
catgtaaataatttttttccatattcatacaaacgctttttttgaacaaaagttacgatttttatttacatattttggtagatatttttgaggttttgtacatatttctttcacatttcgtgatttttttaacgaagcccaaaaacgcgaagttttcgcccgtccctgggggtgaaccgccggccgacgattccctcctgcagcagaagggtgattaactttgacaatttttgagacattatataaataaatcattcaaatttatgcatcatttgtgatagtgtccccttctctaataatcccccaacattcgaatatcatccgatcactgatcaaactgatcaatcag

SEQ ID NO: 71005 - DNA, 388 bp, Heterodera glycines
atgccaaaacaaaacgaaatcgttttaaaatattcctttctggacttgacttggtttcttgatatcgaagctgttttctacgctctttctaaaacggttataccaaaccccagatttttgaatccggttttcagaaaaaatgccttgtggtgaaaacaatatttcacatttcactccataactttgtgagttcggcacggatcgagaccgggataagaccattggaaagagcagctcgagctctacaagaaggtatggaaagaaaaaatagttatttctgggactttttcagaaatcagaattaattctccaatgtggcccaaattttaggcccccagccacagccccttgcttctcccagttttaagtcttggatttgtcaaataaa

SEQ ID NO: 71006 - DNA, 231 bp, Heterodera glycines
actacgccaaagcgggccgcaaattctacccaaaatgagcgtccgaagttggaactgtgacaacaaaagaattgggatgaatgagttcgttaaatgatcgatgatatatgctgccttttatttcaatgtttatagcgcaggacagatcagaaatttgtatttaataattatttcattagatcatttctggcgttttgacaccaaataaatttttcggtcctcggaaaaaat

SEQ ID NO: 71007 - DNA, 963 bp, Heterodera glycines
atggcatctcaacaaccacaacaaagcgtgacaaattactccttgcaatttcggattaatgcccaatatatgaatgaacagttcagagactccgtaaggtgttgtctgaatggtaagtgattgttcgttctgttctgagtggttttttcatttcttatcaaaacaaaaggttctcatgaggattctttgccttttcctcactttgcattcgctgaattcctcgctgattcggcagttttatcaggtcaaatccgaaaactaaatgggaaagtgccctcgctttaggcattcgtcgtgaacttcaatccgcggcatggatgcccaaaaacaatgacctttactccctcagtcaaactgtggatttggccgattttcatgccgagcattacccaattttaaggtcccgcaaacactcttttagatttatttaatgtttttacatttagtgcttttcgtgattttatgttggaggacgtgcgaaagtggctaatgcgtgtgacgggagtgagtcttgacgaccgattggcactcaccgggtcgcgttattcgtcgggcgactgtctccttcctcacgatgacaaactcgaggttttttccccttttttcacttcgtattcgcttttatatagggccgtgcgtttgcctttgtgctttaccttacccccggctgggaagaatcagacgggggacagctttgtctgttcgactccgacccggcgaaaaattacccgggcgaaatcgttaaacgaatccaaccgcgggagaacactttcagtctgttcccagtgcagcacaactcgtggcattctgtgtcagaggtgctcagtgaacagaaacagcgcctttcccttaacggatggttccattacgctccggggacggcgaatgttgcacagacagggccaaattgcgctgtggaagagccgatttgtcgggtggagccatcgatgaatatcacggcaa

SEQ ID NO: 71008 - DNA, 663 bp, Heterodera glycines
atgcgcacccgtccgatctggcaagttaagcaacgattgctgactagccaaaaggttcggtgccgtgatgaaacgaaccagcactgcttaccccgcggcacccggcacggtcccccgaaggaatggatttaattaaattctctccttcggggatttttttccattaggtcgtccgttagcgttcgattgctctagtcaatttttcaaaatttttgttgaaatatttgtcgtgctctgaagggcgtgggagggggggggggcgaaggcccaccacgaggccgcgaagaggccgagtgagtaccttcggtgcaggaaaattattaaattttaaaaattttttaattgctttttaaatatgccaaaaaatgtaggcttaacttttttagtgaaaattcgatcactcatattttttgctaattgagcagaagcgtaccaaactttgcagggatactccccggtaaaggactaacttacactgaaatgagcgccgagctagctggctcaaaaaaatttttcgaaaatctgagtctttcgtttttatttatttgcaaaattaattcataaatattttttcagaaagggttctgaaacgcaccgaaattttatttacatgttagtttaggcactctgatgctttttctatcaataatggaggtgaataaa

SEQ ID NO: 71009 - DNA, 949 bp, Heterodera glycines
atggcttttccccccctccccttcttttttctgtttccgcttgccctcgtccctctccaaaggacagctgcggttcatccaccgctgttcaaccgaattgtccccaccagcgaacggacagtgaatctgactttgacgcgggattttggcgaggcaaaagcggtgaattttggctggaaaagcgaaattttagaggacattcgttttggaggattatccaaaaaatgaacggaaaaatttatttattaggaaataattatgcctttaattaggccgcatcaaaaaatgagcttaaggggaacgatgaaagcgcaaataattcaaatttgaccgcatcaccggtggaggcgaaaattcatcgactgaaagagctgagaaacgaaatgcgtgcattgacggcgatgatcaaagaagaacgacgacgaagtgggatggcgggggctcaaacgaaacttaggcgactcgaaaacattcaggcaaatccaaagacattcggcaccggcaccgatcaatcgcggagaaaatgcgcaccgaaatcagtgggacaattaaaaatgaaattgaaaagcataatttccccatttgtttttcgcaggcagacaatttcgaaaatggcgcaaaaaagtgctaagcaaaattcacttggttatgcaacgattggaccaattggagggcgaaatgcacaggacaaaggataatttgcaaaaagtgatgcacgacaacggccgggaggaagggggcaaatggggcgggggcagcaaaaagcggcgggtgagggaaagcattaaaattggaaaagagaaagccgacttagccaccgccttcgcattccgccgaatcattgtcagcagtgcgccgcgtgcaaatgaatcggcgcggcgaattgggcaatgtgtgccaaaaccacggggagtgcaagcccggtacaatgggatgagcaatgccacca

SEQ ID NO: 71010 - DNA, 196 bp, Heterodera glycines
tttaattacatattttaccagttgattaatatccattcgaaaagcttgctgatatcgtcgtcataaatccgaaaaacattaacagacaaaaaacctaaagtaatcatccggcggtgaagggcatcatttcagtgctttgaatgccttcggtttggcacaatgatcgaggccctccacgtagtcgatcatctcctgt

SEQ ID NO: 71011 - DNA, 429 bp, Heterodera glycines
atggataaatttgcaaaaaaaaaaaaggtcttcggaccggacccctccctttccccccccccccccgaaaatttttcctggctacgggcttgattgtatgcgaatttgagtcgaatttcgcattcttgaatgtcagttataatacaatttttagctttataatgaagtgtcggctctgtacgcgacctccgaccaaatgattgttggtgaggaacctgcgccggctcaagcaggcgctgctgcggaggatgccgccaacaaatcggcaaaacgcgcagcacttgccgctcagaaacgacagttggccctggatagggtatattcttagacgaacgttattatttggagatgttagaatggaaattttattaaagaaaaccccgaacaattattagacagccattatagtcctcatttttaagtagataa

SEQ ID NO: 71012 - DNA, 538 bp, Heterodera glycines
atgcatttctccacaattcgaagtgccacttttcctacctccggattgctttctttggaaatgttcgacgattatgacaaaatgctaagggcaatgagcgaggcaatcaaatggcttatccttcaccttccaaaaggtcgtttcgtttataatcaaaaatctttatatatatgtataagttttcagatgaatttatgtcgagaaataaaagatttaatctttttgctattgctgaagattctggagaaattctaaccgttttgaaacagttgtcgcaatttgaatataaattccgaaaagttttcaccctttttcactaaatgtcattttttaaagaaaaaattaaggcaataacccatttgaggaacaatcgtcaagattgtattaacgcacttcatgtacgaatttcggacaacttctcgcagattattgcctttttgcgcaactctttgtctgtcaaatcagaccgaaggaccggttggtttacttatacttactgaccctgacaaatggtttcactccctctattcatttttaa

SEQ ID NO: 71013 - DNA, 896 bp, Heterodera glycines
ccgcaagtccggtgaactgtgaggtgaatgatgggtcggtgttcagctgcgcggacggccgccaatgcttcccaattgcacggaaatgtgacggcaactacgactgtcgtgacctcagcgatgaaaaggattcatgcgcaacaaatcatacggtaggagatcggttcagagtacctttggtgtacggtgctatttcccctttggtattcagtatgaaaaatcctaaaaataattaattttaaaagaattgcgcggggaaatttaaaaatgaagaaaataaaaactttaaaaaagagaaaaatctaaatcctcaaaatcttaaataattatttctgcatctcctttaagcctttcttttcgtctccctattatccctttaaaatttattgtgtgttttgatgtgcttttagaagagtaataaatggccaatttgttaaaaataatttaaaaattataaatttatgtttttatttataggcttgttttccttaccaatttcgttgcgcggacagaacacaatgcattcaggtcggcctcattaaaattggacaatttaattggtttttttttcacatttcagaaggtctgggtgtgtgatggaacgccagattgtgtgagcaaaatttaaaaaaaaaataaaattaaaaatatatttatttaaaattcaggcagacaaatcggtcagtgcgcgaagttttggtataaaaatttaaattgatttgttcaaatgccaggacgaaccttcgacatgccaatttccagcatgccaaactggcgattttcaatgtaaaaattgtttgattatttaattaatttaaatttttacttttttcattcaggcaagaatcgccgatgtgttccgcataaattccgctgtgattattacgatgattgtg

SEQ ID NO: 71014 - DNA, 487 bp, Heterodera glycines
atgaaattttcaataattttattgctttccttggccttttgtgcgttaatcatcgatgcatgtgagaaaaaattaatataatgaattatttttaatattttaaatagatccatcgggaaatggtaaagatcttgaagctgacaacgaaaaaacggaagtgaaggaagagaagatggaaaaaagagaagcggaagtggaggaagggaagaaggaaaagaaagcagcagaagaggaggtagggaagaaggaaaagagaggaagtggaggcggaacatggggcaacggaggaagaggaaacggaggaggaggacacggaggaggaggacatggaggaggacacggaggaggaaatgacagcagcggcggaggtgatgattagaagccatagctaaaaagaagaagcataatatggaactaagaaaagaacgagcacacaatgcttttagtcgcttattttttgctgcatttaaaatgttaaattttaaaa

SEQ ID NO: 71015 - DNA, 255 bp, Heterodera glycines
atggacgaccaatcgcttgaccattctgctggtgatctgaaagcgcaatatcgccgtctgaagaaggaaagtgccgaacaggatgagcggattagccagctttatgaaaagaaattgaaacaggagaagcaattggcggaacaagatgagagattggctcggctgagaagcaactctgagtttcaggtggaggaaaaggggtcggaatgcacgaataatggagcaatgtgccaaaaatggtctcagtttatgtga

SEQ ID NO: 71016 - DNA, 451 bp, Heterodera glycines
atgaagcgtgcgagacaatcggaaaagttgggcgccttccctgagattgagttcgccgtcaacacaatgggcgtcacggtgtattgcccaaggcacctgcaaacgcctcggtttgtgccatgggaccagcccgggcggtgctcgagctgcagaagcggaactgttgagctggactacatcatccagcccgagggggtgaccatcttttcgaatcggctaaagacggacggcgagaactttgtgccatttgacgcaattggtaagcttctgcatgtgtttgccaaaaacctaacccttttcttaagtggattttgccgatcgtgctaaattccgcataagggcacgaaataaggtgttcactttgccgctgcgacacccggaggtccatgccgcaggcccgagcttggaagaagccgtaaaaggacagaaggaaatgacgcagatgccataa

SEQ ID NO: 71017 - DNA, 221 bp, Heterodera glycines
ccgcataagggcacgaaataaggtgttcactttgccgctgcgacacccggaggtccacgccacaggcccgagcttggaagaagccgtaaaagaacagaaggaaatgacgcagatgccataagcacttgtccatttttccattatttttgttcttgttctgatggattacccaagaataatcgaaagtgaactcgcttttcccatcccttcggggattattg

SEQ ID NO: 71018 - DNA, 733 bp, Heterodera glycines
atggatgagctgaaaaaagaaaaattttcccctcaaaatggtgatgacgtcagcatcattggagacaacaacaacaacaacatcacccaaacactgcttgacctacaaccgggcccctcaaaaaggggacggaagcctcgcctggacaaaatccatgaggaaattgcttctgcagtgaagaaagccaaggccatggaaattgaaggtggttagctttttctgttaatttgctcaaattcgcaaaatttagtggatgaatcgcccaaaaaacaaccgaaaaatgtgtttgattacccttccatattttggaaattgggtcgcccaaaggtttttaacaaaattttgttaaaaattagcaaaatgtttagtatggtgtgttcacgttcatgtgcgatgagtgtcgtggcgaaaatttccggcagggaaagagcagtttcaaactcatcaatcagaatggcgagcaacagcagcgacttgtgttcgcccaatcgttttgccaagactgtgcaaagctgaactttgactgcaccgatctgatcatgaagcacaaaaagaaggatgaatcggcaacgacaacgatggcaaagagtttccgatggaccaaggatgcagaaaaatgaaccgagttggcacaccacatataaggacttttttgaaaattttatacttgttgatcaaatgacaaactttttctttgtaattctgccgagcaatacgccaggctttgttggaa

SEQ ID NO: 71019 - DNA, 730 bp, Heterodera glycines
atggatgagctgaaaaaagaaaaattttcccctcaaaatggtgatgacgtcagtatcattggagacaacagcaacaacagcatcacccaaacactgcttgacctacaaccgggcccctcaaaaaggggacggaagcctcgcctggacaaaatccatgaggaaatggcttctgcagtgaagaaagccaaggccatggaaattgaaggtggttagctttttctgttaatttgctcaaattcgcaaaatttagtggatgaatcgcccaaaaaacaaccgaaaaatgtgtttgactacccttccatattttggaaattgggtcgcccaaaggtttttaacaaaattttgttaaaaattggtaaaatgtttagtatggtgtgttcacgttcatgtgcgatgagtgtcgtggcgaaaatttccggcagggaaaaagcagtttcaaactcatcaatcagaatggcgagcaacagcagcgacttgtgttcgcccaatcgttttgccaagactgtgcaaagctgaactttgactgcaccgatctgatcatgaagcacaaaaagaaggatgagtcggcaacgacaacgatggcaaagagtttccgatggaccaaggatgaagaaaaatgaaccgagttggcacaccccatataaggacttttttgaaaaattatatttgttggtcaaatgacaaattttctttgtaattctgccgagcaatacgtcaggctttgttggaa

SEQ ID NO: 71020 - DNA, 546 bp, Heterodera glycines
atggccaataaacttattctgctgccgtacgagcactacaaggggctggttgcagcgagggagacaaagaatgacgacgccgacgacattgctgagcggacaaacttgggctttgtcaaacgacaggtgaccgctgcagtacagaagcggaagggaaacgtcagcgaacggaacgcaatgtacaaccagcacctgcgccggtacctgaagatgcgcaaggaacataaggagcggcccgtccgagtacagctcagcaacggcgctcaactgctaaataaaacagtggagacgggtgtgcaggtacggcctggtccggacgaaccgaaggacaagtccgtgatggttaccgacgaagatgaagatgaagaaattgaagtgccaaagtttttaaccccaacaagccagacgcagggaagcaatcgatcacccaggaccaataagaaagcagcaaaacagcaaaaattgatcgagaagaaggaccacctgttggccatcattatgtctgatccgcagagattcggcgcaaatgaaaatgtgtcacattaa

SEQ ID NO: 71021 - DNA, 1315 bp, Heterodera glycines
atggcccgcgctcacttggcggcgctcaaatggctggcgctcagttggccatgcacccctcccacacctatggggggctaccgtaatccggtgaaaaagtgatgtgtaactactgaggcttccaaagagaacggagcgagccaaaagaaaaagaagaaattcttcagaaaagacggacgtggcaaaaagaagaatttcttcgctgtgggagcgaatgtgatcgccagcttgggtgatgagccatggcgtgccggacgtgtgatcagccgaaaagaaggcacttacgacgttcaatttttggacggcacgactggagaattcccggcaaaaggtgtacaaccgtacaagccggatgaagatgaaaatttgaattttcttcttgacgggtttggtctgaagagagcctcatccgtggatctatcgggaagcacggcagcgatggccgacgagatcaaacgaaagatgatcttcgagaagcttccgactgtggacacaaggcataagaacgccgatctgaggatgcggatgatggacggaggcccggcacttttcaagggggagatgttagggttgggacccaattgtccggtgcccattttgaccctttgtttcatttgtatttcccttctcccttcgttaagtcacgcccacttttccgcccataaatacccgcgatgttgacccttccccatcattcttttgcttcttctccatttatttgttccctttgctcccaatcgatatttgaccccgttcgccctgtcccttctttttgaataaatatttattttattcctcttcggactttggggcgtaacacaaataccgttccctctacagtaggttctttctatgaactaactcacccttcttttttggcggtatactttcggaatgtaccgtatgcaaatggttgtttagtgcggtcagccgtctgaagcgcatttggcacccgaagaacacacagacatgcgtttctgcttttggcaaatggcaaacaaagacgtggttgagaagccaatcgatctgagcgcagaaaatcaataaataaaatattaaataaaaaatgtatattaatatttatatcagaattattaacgaaaaattttccaaaataagcaaatcactggtcaaaaataagctaatttttgatttaatataattcaaaaaaaaccagtgttaatacaagaatgtttttcatcaattttcaataagcttagcaattaataaggcatcgagaaggaagtcagaaattttgactctgcttgtaacaaattttacaaaaaaatgaccatttgtggggattttcaacaga

SEQ ID NO: 71022 - DNA, 797 bp, Heterodera glycines
aaagtgtcggaacatcatcaagttttgagcggtcaatttacgaaagtgctgacaatgagtcggcatcatcatcatcatttgatcattgtggtcagaatgcgaatggagaaacagaagaatcggcaataatggacaaaatatcaaccaaaattgatcatttggacaatgattgggaggattttgctaattggaagaaaagcggtgggataaaagttgaaatggtcgaaaacaagcaaatagaaaacaaaagttgtaaagaacaaatttggatcaaagaagaagtttcggagtttgatcaaatggtggaaaatgatcagaatgccaaggaaaatgaaaaaataaaaagtgccaacgatgaaaatgaaaacggtgccaaagaaaacaaaaaatttaacagaaacaaaaaaattgttgtacaaaatattataagaaagtgtgaatgggctgaatgtgaattgaaatttgaaaatgacaacaaattgtatgatcacctcaaaacagtttagttttttaaaaaggaaatttaattaaaaaaaaattaattttaaacaattaaaattaagacacatattgacgaactaattgaaaaaaacaaagaaaaaatggatgataatgatcttccgaatttgaagaacactgatgacgaagaaaaatttgcttgtaaatggaaggactgcgatttgcctgcccggcggaggaacactcaaagaaaggttacacaaatttatttattttgaataattaatatatattttgccatgccaaatcgtaaaagcgttaattggtatgggaataaa

SEQ ID NO: 71023 - DNA, 2636 bp, Heterodera glycines
atggttacaatggccactgacttttgcaacagattgccaactgaagggtacaattaaaaaattaaattttatttagccggggtgccaattttatgaaaaacgataacccaaacgctagcccattttgattagaccttacaaattttatggctttaaaattcaatttccgaaacatattggttggtgccttctctcaattcatatgcgcacatataattcgtggccaattttttgccaagcgatgaaaaagctgacaaatatggccaaatgatgctcccctcttacaattagcacaaaaattaactctaaagccgaccatgactggttaatgctttgaccttttttgtctgctcttagccggaaattttgttattaaacacaaaagtttatgttatgttaattctatgctttttaaatttttagtggtttttaggcccgttgttttttcgcgcataggtgatgagaaaagaaaccctaaattggctcgaattaggaaaaatttttcaaccaggccgccattacccaatcgcaaatgccgaacccgcaaatatcggttaaaccattcattatattaaattattatggaataattaccgctttttcactattttatgccaaaaatccgggcccattttttatttaatgccctacaaaatgccaattttagtgaaaatgtttcatctggatacttgcattgtgtgcagtttttgctttaccatcatatgcaaaagctggtgtggcgccttgagaacaaatggggcattatttctgatcaaaataatgacaaaaatttggaagcaaaaaatcatttattgcaaatttacacggagaaaaaaatgatcgcatgggaacaaatggtgaaaatctatgggaaagagttgaaggatctgacagaggtgaacgaactgattcggaggaaattcgaattttgtctgatcattgagggcgaaacgcgtgagtttttttttgatgagatttgtcacaaggaatagttttgtcttatgtgccatttatttttcggggtccggacaatccgtcagtggtcaatccgtcagtggacaatccgtcagtgaaggacaatccgtcagtaatggacaatccgtcagtaatggacaatccgtcagtaatggacaatccgtctcagcggataatccgtcagtggacaattcgtcagtaaatttttttttgagcaatcattaaaaatcttgcaaaaatgatcgttaaatttaataacgtaatttcttatagattcataacatttctagttactttataattcaattaattgaccatctcaagaaattatcatttaattcttttaaaatgattatttcataatttttataaaaattattaattcacatttttagcgacttaaattaattttcacatggttacaaataaatctgggtgttttaaaaataaatttgcttatggattagttactgacggattgtccactgacggattgtctacttactgacggattgtccactgacggactgaccactgacggattgtccgggagccttatttttctatgttatgtttttgtcgcattagtcttttttttttgaaaaattcgccatttttacattgaattttttattaatttctcctggctgtgactattggtgccgccggccgttcccttaaaatattcagtatttgacctaaaaaagctacaagtaattcctgaagaatattttttaacaatgcacataataattccaaattttcccgctgcgcctttcagcgccggcgacaaaccagtaataaattaaaattttatcacggcaattccacaagttgttcataaaagttaaaacagtcacagacatatatgagggcaaacaacttttaaaggattttaacagtttgaaaaaagtttagatattttttgatatttgggtagaagtaccaattttagtcatgttttttttttaatttatctttgtatagatattgttacaataagactatcagattcagaaagctataaaatcataaattaagaattgaaatgcaatgcaattggtgccgaaaatgcgcatttgttcctcaaaaatttccacaaaattgtgtttgagccagaatatgaacggaactggtcaaaaaaagcagaattaattggaacaaacattttcaattcgctgagaaaagaattgcggaagaacgaacaattgaagcagaacaaagggaatgaggaccaaaaagaaaaggccaaaattatggccaaaaattggaaattggccgaaacatcgatgcgtgtacgagtccaagtgttggtgaacacagcggagagaaagtgccgaacattaccgaaaaaaccgtttcgacagatccaaaaattgggaagaaatttatcgaaacgactcgaaaggtcatggagttcgaaaaatagggaaattaaccaaaatgaaagtggaggagataaatttgatgagttgacgttggaaagtgaaaattatacaaaaaatccttttcgaaatggagagagaaagtcaattaataggacgacacgaagggaaaatgaaaataccacgaaaaatccccttcgaaattttcaagaatttggtagaagcatttcaaaacgattggaacggtcttggagttttaaaaataatgaagagaat

SEQ ID NO: 71024 - DNA, 234 bp, Heterodera glycines
atggacaaaagctttgatgagtttttgttccaatgtgctggacaattcattgaggccgttgccgaggaacaattcagttataaattgtttgtcaatcttaacacaatgcaattggacaccgaaatggactttccgccatccatgaaagatgaaataatggtatcaaaaaatgttggaaaaaatgccaggggcaaatggttcatgatgcggtcgatatcctaaataaatttacta

SEQ ID NO: 71025 - DNA, 930 bp, Heterodera glycines
atgggcagtcagaggaagcactcggcggagaggaagctgtacaaggcacagacaatgcgccggaggagacgaaaacggacagacgacaacgaaatttttgggggacaaaaaacgttgggtgaattaatgagtgaggaacggcagctacgaaaaagcgaattcaccggtgagagtttagctcgatgaaatgaaaaagtgaatttaacgggccaaatttaatgaccatttaacgttaaaatttatttaaaaaattttaaacaattaaaataaacggatagcataagttttaacacatgagccttaatgggtattgtaaacataaattagaaaatgaaaaaattaaaaacatttatataaaataacacaaaaagccctaaaaaattattaatagcgccgccatggaaattttaatttataagtgagatttgttaataatttttattaaaaaggaagaaatgtagatattaatttattagatgattaaaaaaaacatttatagccctccagtcaaaaattttgaaaatctatttctgtaaacatgcagatttttaaattcctgtctcgaacataaaatttttttttgaaaataataaaataaaataatttatgttatacacaatggaatttagacacaattgttgcgatccgatgcttacaagaagaagacgaaaccagctcaagtgaacagcagcagacaaaaacattgggagaattatttgacgaagaccattttgaagcaccggaaattgtaatggaaaaaattgagcggaaaatggagaaaatcagacaaaaaattgcacaagaatcattgggaaaacggttaaaggattacgaaatgtttatccgcgctttttacatcgctttggcatttgaactgtttgagcgaatgcacggcgaggagggcgcaatgacaacaaattggcactttgt

SEQ ID NO: 71026 - DNA, 823 bp, Heterodera glycines
atgaagctgaacctggaccagttcactatgagctacgatggtacgttcccttcattagtgcttttgttcaagagtcttggtctcgcgttaaagaatgcgggtttttaaggagcctcctcggtacctaatctcagtctcgatgctaaatcttgaccggattcttgggaaatgaacaatcaaacagcaccaaaatcatcaactcattttaataaattagctaacgttgcaataaaaggatcggtcatttgctaaatgatccacctacaaattcatacaattcaaaaaatacaaaaacaaattaaactttcaaagaatattatatatatctaaaatttaacaattaaaggacagtgcgatttgaccaatgatttaaacgattgttttgttgcgtcggatggcattgactttgatgcccaagttgaaaaagtgtcgctatttggcaaggaaaccagtgaaatgagcacattagaaaaggcagcggaaagtctgttcaaaaagttgaaccgatggagctacaaatttgggcagagaggcaaacggcaccgaaatatactgaagcggtatttcagcggcaaaatgaaagacattttgggagtcattcccgaaatgatgactgacaaagtgtcaccatttgaggtgatttggtcgagtcaggacatttcaaccccatgaacattttacatttcataaatgatttcttagtcaagcattttattgcttaaatttgtatggcaatttacaaatatttaaaaaaagttttcgttttaaattttagaactcattcaaaaaattgaggcatatacacaattgaatatttatttaa

SEQ ID NO: 71027 - DNA, 504 bp, Heterodera glycines
atgtctcgttttttgactcggtgtgtttacctgatcttaactcatataagccttaacttcaggttggaagcgcctggatatcattcaatcgttgattatccgatgtcattttcaacaatcaatgacaaaatagataataatatgtacttgaatttggatcaattcaaatctgacatttgtctggtttctgacaacgcaatgctttacaataacacaggaagtgtttattttttggcagcgcaaaaattgaaagttttggcaaaatattatttttccgagaagtatcttttgttcctcgtctattcgttgccctttggaaaagccttaactgaggagcaacttggaatacgcttacggaggaaagaggagcaaacgccgagacaactcaaagagaaaagtggcagggaaaggccgttgccttttctgaggcaaagcctggcctttataagggtgaaaataatgaaacttattttagtgacagtcaaaaaactgaggaaatactaa

SEQ ID NO: 71028 - DNA, 192 bp, Heterodera glycines
atgaatgataaaatcgactggctcggccttcgcggcctcgcatccttttcttggctttttctccaatcgccgggactcaacccaccagcatttcaatcactgggactcaacccaccatcattccaatcactgggactcaattctcctgcatttcaatcactggcactcaacccattttcatcagctcttctt

SEQ ID NO: 71029 - DNA, 819 bp, Heterodera glycines
acaaaaataaatcgattttttcaagtgtccgtttggggtactcaaacaattatggggagcaaaaatccaacgcagaattaaagtacaggctatagggaagctattccggaaggattcggtctccccataaatctgggcgcatcggttcgtggggactgccccgaaaacaaaaaaatcgattttttcaagtgtccgtttggggtactcaaacaattatggggagcaaaaatccaacgcagaattaaagtacaggctatagggaagctattccggaaggattcggtctccccataaatctgggcgcatcggttcggggggactgccccgaaaacaaaaaaatcgattttttcaagtgtccgtttggggtactcaaacaattatggggagcaaaaatccaacgcagaattaaagtacaggctatagtgaagctattccggaaggattcggtctccccataaatctgggcgcatcggttcagggggactgccccgaaaacccaaaaaaaaattttttggataaaaattatttaaatgaactgactagataatatttaaaataggttatttctcttcctttcagtatccctgcaaagtttggtgcgcttctgatcagtttctgaaaaaaagttaagcctaaactttttggcctgtttaaaaaggaattaaaaatttttaaaaattttattcatctccctttttgatagaaaaagcatcagagtgcctaaactaacatgtaaataaaatttggtgcgtttcagaaccctttctgaaaaaatatttaagaattaattttgcaaaaaataaataaaaacgaaagact

SEQ ID NO: 71030 - DNA, 832 bp, Heterodera glycines
  unsure (1)..(832): unsure at all n locations
taattaaatccattccttgcgggggaccgtgccgggtgccgcggggtaagcagtgctggttcgtttcatcacggcaccgaaccttttggctagtcagcaatcgttgcttaacttgccagatcggacgggtgcgcatgattccactgttccaagcaccccaccaaaagcaaaacgatataaccaaaatataaggaaaaattttttaaaaatttttttctccatcttcctttttgatactaaagcatcagagtgctaaaattaagttgtaaataaaatttggtgcgctttagagcactttctgaaaaaaatatttatgaaacaaaaaaatcgattttttcaagtgtccgtttggggtactcaaacatttatggggagcaaaaatccaacgcagaattaaagtacaggctatagggaagctattcccgaaggattcggtctccccataaatctgggcgcatcggttcggggggactgccccgaaaacaaaaaaatcgattttttcaagtgtccgtttggggtactcaaacaattatggggagcaaaaatccaacgcagaattaaagtacaggctatagggaagctattccggaaggattcggtctccccataaatctgggcgcatcggttcggggggactgccccgaaaacaaaaaaatcgattttttcaagtgtccgtttggggtactcaaacaattatggggagcaaaaatccaacgcagaattaaagtacaggctatagggaagctattccggaaaggatcggtctccccataaatctgngcgcatcggctcggngggactgccccgaaaacaaaaaaatcgattttttcaa

SEQ ID NO: 71031 - DNA, 522 bp, Heterodera glycines
atgggcgttagtcaaaaaaccatcaaattaaaaaaaaaatttttgctaaaactttgctcaacagcaaccaaatttttagttttttttttaaatattaatcttagcactaaatttcttttgttctccttcaaaatttttcaaatttttcgttaagttttaaaaatgttatgaccaaaaatcttcaaaaaatttttttttggtttatttggatgaagttatgaataatttctgtcaaaaagtttccatttgatggttttaatttaatttaatttttttttcgtacttttttccatattcttttagagtccgcctgctgagaataaggaacaggtcgaagaattgcagaaagccatcgaaaatactcgcgaatttcaagcgatgaaaaaggataagcaaattaaagagatcaaagaggataaggatgttcggcttgcttggtttggtccacaaatgtgggattttattacgaaaaaagaagaaggaacaacgagtgaagcagcagcacagaaaggagatttgtga

SEQ ID NO: 71032 - DNA, 469 bp, Heterodera glycines
gtttcaaatatcgtaagattgtttgatagggccagacaagagaaggcaactgttggtagcaagtttgcggtaaaaaaatgagaaaaaagagatagctattttttggtcaagaattttttttgtttgcgtttcaaatatcgtaagattgtttgatagggccagacaagagaaggcaactgttggtaccaagtttgcggtaaaaaaatgagaaaaaagagatagccattttttggtcaagaattttttttgtttgcgtttcaaatatcgtaagattgtttgatagggccagacaagagaaggcaactgttggtaccaagtttgcggtaaaaaaatgagaaaaaagagatagccattttttggtcaagaattttttttgtttgcgtttcaaatatcgtaagattgtttgatagggccagacaagagaaggcaactgttggtaccaagtttgcggtaaaaaaatgagaaaaaa

SEQ ID NO: 71033 - DNA, 49 bp, Heterodera glycines; identical to SEQ ID NO: 51181

SEQ ID NO: 71034 - DNA, 774 bp, Heterodera glycines
atgcacctttctcctttttgtgcaacagttccatttttatttttcttcggtaagaaacggtgggagcgtactgtactcaattcttgaaataataaaaaagaagatctttgataatttcagagaaaaaaaaaataatatttttaattttatttattgtttagtcgttttttgttttatcatttttttaaaacggctttggtggttttcatgcccaaaaatcataaatcaccaagaattttctggagatttgaatattatactttaattaaatttaccttcaattccaattttgaattatctttgccacaaatatttcctctaatttctcaaatttactaggcattttttggcgatcctgatcataataatacacattttcatgacctttttaattaaattgtcacaattttattcattttaataacttaattaataaaattatggccccaatttttacaacttaccaaaccaaatttcgttctccaatcataaattgaacgtgaacttgcgcaaagtttctcgcatatttctttaaattggtcagcatattgtctcttatccccactctcaatgagttccttttttattttataaaatttttcacattttcagaaataaaaatgaaataatttaaatatattaaaaatttatgttcatttttatgcataaagaaattttaaatcattataaaataatcatataaataggaaatccgattgaatttgaattttatttttttgccaacataaatcaaaagtacaaaagtcaaataaa

SEQ ID NO: 71035 - DNA, 165 bp, Heterodera glycines
ggctggggtggctacggctatggctatccctacgggttttatggcaaacggcaagccggttttggtccatccggaaatgctggcacttttggtgacggtggagaaggaaatgccaacggaggaggagaaggaagaggagggccatcgtcaccaaacaatttttga

SEQ ID NO: 71036 - DNA, 3513 bp, Heterodera glycines
aaagagatcaaaattcttcaggtccgttacttttttatcggtggttaatgaaaattaaaaaaaaagaaaataatgtctccattttacaataattgttttcctaggaattgaaagggttacaacatgaaaatttggtgtcactgttgcgctgtgttgagaccagtacccacgtgtacttggtgatggaatattgcaaccacggggacttggccgagtatctgttcagcagacagtcgctcaacgaactcaccattcagcacttttttacacaaattgcgcgggcgttggaggctctgaatagaaaagcgattgtccacagagatttgaagtaaggcaattaaaatctgtattaatggggctatatttgcgctattcccattctttccttactgaaaatcgttcgcaggccccaaaacattttgttgtgcaatccgcgacatcccctcgtcccgctgccttctcagctggtcgtgaagttggccgacttcggcttcgcccgttctctacccgaagggataatggccggcactctctgcggctctccgatgtacatggcaccggaagtgatcatgtctcacaattacggagccaaggcagacctttggtctattggcaccatcatttaccagtgtctaaccggaaaggcgccatttgtggtatgttcagcagaaatatttggactaattagagaaaacgtgatgtacacatcgaattaaggcacaaacgccacaggcactaagaaattattacgaaagacacgcggagttgaagccaaacatcccggatttctgttcagccttgttgtccgatttactaatgagtcttttgaaaaagaatccattggatcggattgaattcagtaagtctgtgccttcctgtcactttcactcttaatcagctaatctttgcaatttatcagactctttcttcaatcatccgtttttcaccaccgaattgccaacttcgaatgtttcaccttcgcgtcatttggtgcgtcgcccatccgctgaagttcaagcccaacccacccaaaatcggcctaaattttccgggagtcccacacaaacgcaaaatgggcccaattgcaagtcaccacaacgatacgcaacttcgcaccaacgaattccttctgcggatggccacagacatttagtaagttggcctttcgttgatttctttttatgcggttggccttacgagaacatttgcttttactcattcattggcttttcagcctcagtccgtgcgaaatgcgcacgccccgggcgttttgcggcgccaagtgccgccaccctcccactcacgtgccccctcctttcccctggcgaggccgacttcgcttgaccggtcccaaaacgcagccgcgatgaatgaatcgactgacttcacttttcttccgcctctgcaagagacccgtcatcaatttaaccaaatccaacggacaaaagcgaattccccgcaaagccttcaacagtcgggcggttcttcgaccggttcattggaaaacccggtcaaacaagtgcaagttagctactgatgcattgaatttattgtttgaattgcatctcccaggttcacagcagcattcctcgccaaaaaccaaatatcgcaaaggctgtccctgtgccgaacaaacggcacgcttttgccaaaatggaagaaagacgaaatgcgtcaaacagaagtcagcagtcaatagagcgacagacgagtttagaggagcagcaacggctcgggaagggaacggatgtatttggggaagagaagaagctcaaagaaccgattgcattgattccttcggtggaagagattgaattgcctgaaagtgggaattgaaatttagagacaaaacctttttaaggcatgtttagcccgtttcattgtctatgaccagcaaaagacgagtggtgctgctgcttcacgttcctctcttccggtctctggccgattacgtcgcaatacgactgcaattgatgagccgtccacttcgaatgctccttctcaaacaacagacggaaatgacaaattcccaatgatggcaattccaaagtctgccaccttcgttatgacttcgattggaggccaacaacaaaaagaggcggagaagacggctaaggagttggacaacatccgatttcagaacacaacgccaccacccaccgtttccggattaaatgcgcacaatcagaagaaaatagaattcaaagtgatcaatgagacgaacgggacagaaaggcattccaatttttcaaattgtagttaatccgtttattttaagtgaaatggacgaagatgaagtcggaatggaagacccgatccaattgccgttcacggaagaatacatgggtaaaaaagcaacggcgtaaggtcaactcgtttttttcgtgtttcagaagaatctgatgttatttcgcaaatggccgaaagcacatgtgctggcgaaagggaaaagcgaattgaaagtgtcggcgatggtccgtcaccgtctatcaccgacaacagcgaaatgattatccaaaatgcagatacgaatgacaaggcgccgtccaccacagatcgttcccctgacaattttctattcgatgcacccgacccgccccccgaattggagcaggagacactcctcggggccggacacaaacaaaccctggctaaattgcgcttcgtgttggacctaattgaagcaattgcgagcgtagcggagaacaaaacgaatccgatggcaattgcgatggagggaaacaagcggaaatcggtgccctttcacggaattatcacactgacaaacctttactcgaacagcgccaacatcagtcggatgcctaccgccgggcggagcaattggtgctttatgtcagagctttgcatgtcctttcttccgcactcgtaatggcacaaaaacaaagtacaaacgaaaatgcaaaaatgtggccaactttcacaatttcttttagttaacgcgagcattttgcacccatcgtccgccgttcaaaatgtgttaaatcaactcaatgagaaataccactatgtataaatgatacatcacaaaatttgcaataattattctgccctagtgtttggcccggtcacaagagttggcttcgttgggaattcccggccaagacccccaggcgatggttgtttctgcggaacgcattatgtaccaacatgccatcgacttgtgccaatcggcggcgctcgacgaactgtttggaaacccgcatttatgtccaaaacggtaccaaactgcttatatgatgttgcacactcttctttacacagtcagtttttggatatttttcatttatcatattacgttaattttaaggtgcaaaatgagcaggacaaaactgttttgttaaagtacaaaaatgcagtggaaaaacgacttcgcattctcggtttcatattgggaaatattatactgataactaactattaaattgcttacaattagtttttctaagtcggaaaactttagagcgccaaggcctatgtgcatctgtgatcaat

SEQ ID NO: 71037 - DNA, 508 bp, Heterodera glycines
atgaatgtcgatcatttgcagcgcacctcacatcgcaaattggcagatcaaattgcggatgtaataagccgcgacagatcacgttccgccagccgggcgtccctcgaagggatcagtcgggaagttcggcacaaatttgcccattacacgccaaaaaagaaggagcaacaacaaacaagacaaaacgattcggttgacccagaggatgctcttctgatcctcgggcttgtcggtacacagaaggcttacagacgactaaaaggcactattcgtctgatcaatgccaaacttgatgtgtttccgccactcaaaaaagtaaaaacatattttagcattttttatattatttaaaaattccattgattattgttaggtgcttgacatcaaacgccgtatctgtgggccattgcaatacgcaccaattgagaccaatgtgggtgttggatttgtgtcactgatgttggggcagctttggaggcgcgtcttttgtctgccaaagacaatctga

SEQ ID NO: 71038 - DNA, 264 bp, Heterodera glycines
atgtccaaagaggccgacaattttaatagttttgacaaagcggacgcacttatggacgttcccgagtcgtcacgcaaaaagaaattagtaaaactcggcgcaaaagtattggagacgaggaaagaggcacgaaaagtgctacccgaggagcaatatgtgcagaatttggagaagttgattgtgcgcgattactttccggaattaccgaaaatgaaggtcaataaaagcgatgaaattggcaattcgaaatttaattgggtttga

SEQ ID NO: 71039 - DNA, 805 bp, Heterodera glycines
atgcagttgtcgcaggcgcttcgcctcgtcaatgaacggacgcttgtcagcttcgtccaacagcttccactcgtggcccaactgtttggagatggtcgaattgtgcattttcggattgtccgccgccattcgctttcgcttcccgcgcgaccacaccataaaggcactgacaaatgggcacacttttcaatgattaattcaagtgaaataaaaaatcaattattttattgtaaaattcaagaaaaaaccaacaaaaattataaattttgttacttcatcggccttttcacgtgctcatccgcttcttcgctgcagcgatggcttacaacagcagcagttgctggtggtaagcaattcgcttaaaaaaccgtaatatggacattttctcccactgttaaatgtcgaacattccataaactccgcttccttgggtctttttttgacctcatctagaatagtatttggtggcaaaaaatcgcctaaaaggcactaaaattaaaaaaagatgaaaacggcaccaaaatggaaaaaatgcataaaaaactgaaaatagccaaaaggcaaaaattcttttggaaaagggaaaaattttaacatttaaaaaatgatacggaatgtttttttaatttgattaatattattgtttcataaaatgttcactttgagcattgtccggttctttgattactttttccattgccaaactgtacagttgtgccgcgactgatcgaagacaatggaatttgtttttgatgttgtgtaatgagtggtagcattaaaatgacaattaataatcttaaataaa

SEQ ID NO: 71040 - DNA, 346 bp, Heterodera glycines
ccagcaactgctgctgttgtaagccatcgctgcagcgaagaagcggatgagcacgtgaaaaggccgatgaagtaacaaaatttataatttttgttggttttttcttgaattttacaataaaataattgattttttatttcacttgaattaatcattgaaaagtgtgcccatttgtcagtgcctttatggtgtggtcgcgcgggaagcgaaagcgaatggcggcggacaatccgaaaatgcacaattcgaccatctccaaacagttgggccacgagtggaagctgttggacgaagctgacaagcgtccgttcattgacgaggcgaagcgcctgcgacaactgcatat

SEQ ID NO: 71041 - DNA, 1019 bp, Heterodera glycines
atgctcaagcggcgtcaacccgctccgcttaacccccagcgagttattcgcgaaaatcgaaaaacgccaaaaatggttttcaaattttgccaacgtgtacaggccaggcttttgcaggtaggcctgccaaataaacgccaagttttcccaaacactccaacttaaaatcctcccaccaagcgtttttcgctcccgcttcttcccgcaaagatacaggccggcaaaaacggacaaaaaaatttttgggccgtttcagcgccgctggcgctcagttggccaccggaccggaaaacccgtatttttcccagatgcgccgtcaaaagttggttaagtgatgtcacactcccgcgcccctcccggcgcccgttctcgagattttggttttagaaacgaaacccaacattattgtatatagagtagaaactagcgggtgcgtgaaccgtcggatatttagctgggaaaaagcgcttcgcgctttcggagcttcgctacctaggctgttacgggggaagaggtacaaccacgggtgggaaggtacaattgtgatcagaagagatacaactacggttttttcagggatttttaggccgcttcgcggcctcgaacgggcgattcgcgcccgttacaacggtgattagaagaggtaaaatggtgattagaagaggtacaacaatgattagaagaggtacaaaagtgatagaagaggtgtaaatttgatgaagaggtacaacagagattagaagaggtacaaacaatgattagaagaggtacaaaagtgatagaagaggtacaaatttgatgaagaggtacaacagagattagaagaggtacaaaagtgatagaagaggtacaaatttgatgaagaggtacaaatgtgatttaaagaggtgcaaaagtgatttaaagaggtacaaaagtgataaaagaggtacaaaagtgattagaagaggtacaacagtgattaaaatttgaacgaaagtgattagaagaggtacaatcatggtttaaaatgaaataaa

SEQ ID NO: 71042 - DNA, 253 bp, Heterodera glycines
atggagaaggcctgcaaaatttggagagattatatcgatgttagtgcgctaggttcgatgaaactttttaaaatataagcctaaactttttggcctgtttaaaaaggaattaaaaatttttaaaaattttattcatctcccttttgatagaaaaagcatcagagagccttatttaactttaaattaacatttggtgcgtttcagagcagtttctgaaaaaatatttatgaattaattttgctaaaaaaataaa

SEQ ID NO: 71043 - DNA, 665 bp, Heterodera glycines
aaaaaaatatttatgaaacaaaaaaaatcgatttttttcaagtgtcgttttagggtactcaaacaattatggggagcaaaaatccacgcagaatttaaagtacaggctatagggaagctattcccgaaggattcggtctccccataaatctgggcgcatcggctcggggggactgccccgaaaacaaaaaaatcgattttttcaagtgtccgtttggggtactcaaacaattatggggagcaaaaatccaacgcagaattaaagtacaggctatagggaagctattcccgaaggattcggtctccccataaatctgggcgcatcggttcagggggactgccccgaaaacccaaaaaaaaatttttttggataaaaattatttaaatgaactgactagataatatttaaaataggttattactcttcctttcagtatccctgcaaagtttggtgcgcttctgatcagtttctgaaaaaaaagttaagcctaaactttttggcctgtttaaaaaggaattaaaaattttattcatctccctttttgatagaaaaagcatcagagtgcctaaactaacctgtaaataaagttttgtgtgtttcagagcactttctgaaaaaatacttatgaattaattttgcaaaaaataaataattaatgaaaaagt

SEQ ID NO: 71044 - DNA, 174 bp, Heterodera glycines
aaaaatttttaaaatgagaattcatgcgagtttttctggaaataagcttaatagggcctagttaagctgtaaaaaaaatttgggggcgatttgaaagagaataaaaggacccaggttcgatgaagttttggtaagccaaaaaaaattccaaacatttaaaaaatctataaaaaa

SEQ ID NO: 71045 - DNA, 697 bp, Heterodera glycines
  unsure (1)..(697): unsure at all n locations
gtctgcccactcttgcctcgcccgtcctcctcgaccgccactcatttctgactcggctaattgtccaagaaatccacgccgacctcagacacgccggcgttgactggactctgactgagttccttagccgttattggatgcctcaagcacgacgaacaattcgcggcattcttcggggctgtccatcctgccggagaatgacggcacctccctttgcaaggcccactatgccccctctgccctcaatgcgcttcaaaccggccaatccctttgagtttgtcggtctcgattttgccgggcccaccccctctcggctaagcgacggatcactgaccaaggcgtatttggtcatcatcacttgcttcgtcacccgcgccgtgtacctcgaggcgaccaccgacttgtcggccccaagcttcattaatatcttacgacaattctttagccgtcgtggccgaccacggcgaatcctgagtgataatgccctaccttcgtccaaaccagcaaagccctcgacattctgacctgccccccgtccgaaaccgacgtcgtcacctttgccgcgcgccgaggcattcagtgggacttcattcccgcctacgnccatggnatggggtctttgtacgagcaattaataggcctcgtcaaatcgtgtatcaagaggacaattgggtcgacggattctcgactacgacga

SEQ ID NO: 71046 - DNA, 930 bp, Heterodera glycines
atgatcaactgcagaagtgaatttgtgcgtgttcaccttgaacgaattgattttgttaacgaatattttgacaattccctaaaattttctcaatgaaacgaataaataaatgttaatgaaaaataaatttttcgtaaggaaaagccatttccaaatgcaaaactagggatcgatatttaatgggaaaaatccaaaaataatttactaaatggaacaatacaaaaaatattgagaaaatgttttcatgggatctggatttacgtaatgataaaatatcaattttcaataaaaaaaagagtgaaatggggaagaattgaacctgagaaataacgcacaaaatccaagagactaaccactaagccatatgagcataaatttagcccctttctaaagtaatattaattaaattgaaaaaatttcctcgaacttttgtcaacattttgaccctgacccccatttttaccagtctattttaatacccggttggacccggacccatcgggtggggtaccgggtattggattttccaaaaaccgggtccgcgtagtgaaaaaaccgggtatcggggtctgggacccggtcgggtacccggacccggcctaccctaattaaaatcatgaatgatgtcaaaatttgtactgtgtattcgacacttggccaccatggcaacggaaaaatctctcgaacaaaaagacgaagcgttttttgagtgcaagatgatggctgagttttgaaaaattattatttaacattaccgtcgaaaaaattcaaaaataagagacaatttttttaatttcaaatttataaaaataaaattattttacttgattatcactgcttcagcgattgcgtttaaaacagaataaagaccaagtctactgcaatgatcatgcttattaatttcgcatccgttgtccatttacaaataaa

SEQ ID NO: 71047 - DNA, 769 bp, Heterodera glycines
  unsure (1)..(769): unsure at all n locations
atgagggcggagagacaaatgcaaatgnagcagcagcaggtggttgggcgtaattagttttnaaaacaaagccccctagactcaattagcgggtaatgattccaattagactaagtcggaacgggggtgttaatgatgtcggttttttgaagtgagattcaacacaaaccccttttcagtatcagcgattaaactgattattttaattgttttagctttgaaacaatattattatttttcttttttaccgtttagaaaaggtcccatttttccaaaattacggtcccgattaattctaattattaataatagcatttttaagggaggaaaagcggttgaaaatgaatcgtcacaatcagcaggaaaagaaaagatcactctgggaaagtaagtaatcctttcaaatttagcgttcaattcgattaacctttggtcggatttgaggctatttgaatgtgcggataaagcggatgaagcagatgaagcggatgaagttaatcgggcacttgaggaggtggaactcgactggcgggagaaggtggacgaaaagagacgccggaaaatggaaaaggacttccgcaggatggagaaggagcgtgcggagcagcagcggaaagcgggcgatgtgcagcctgaacagctgagcggggcggagaagcgcaagctgtacgggccacagtttgacgcggccaaattcagggctgacgtggaggcggaaaagccgtgcgacggggagccgctccaagttgcggagtattaccttttcagg

SEQ ID NO: 71048 - DNA, 181 bp, Heterodera glycines
atgctgatgaatggatttgagacgggtaaattttattttttttattaattgggcataattcccttaattgaggcttattgtccattaacggcgcagttttctgcacttatcctgacttgatttacacatccggatcagttggtttatgtaagaattttttgtgaaattttggtttttttaa

SEQ ID NO: 71049 - DNA, 1601 bp, Heterodera glycines
gcacaggccgattttgcgttgaatttgctgcgtgaagtgtccacggacgaccgttcgtgcattgtttcgccgttttctgccgccgtcactttgtccatggtttacgcgggcgccaaggaaaagaccggcgaagaaatgggccaactgctggcaaatggtggaaagtttcgaaatttcataaactgaaaattatgtaaatcatttttagaatttcggttttttgtttaaatttgggtcttgaattcgaatttggccggaataaatggcagattcgttatcaaaaacttagaaaacccccagaaacattatcctcctacttttgaaaacaacaatttctcttcttttcagtgcctttgaaaaatgcctcacctaaagtaatgagggacaataatcatccccttccccttttaattaccctcccccaccaatcccccgtttttaatcccctccctattcctaattgccccctaggtgcgcccgagtcggaggtgcacaaatacttcggcgctttgctcaaatcgatcacaagtggaacgaacagcagcaacactttggagacggccaacaaagtgtacgtgaagaaaggcatcaaagtgaaggacgcgttcaaagagcaaattgagggaaattacggtggacagtttgagacggtggaatttgaggacggcaaagggacggcggaggtgggaaatgttttattggcgtaatgcgaaatcagtcccaaaaataggaaaatttcagctaaaaatgtcaaaaattgcttcatttttaagccattccattccgttagaataataactcttcataaaagtcaaattttggggtttttttttaaattctttttgaaataaattctgcgctacttcaaagtgcccgtttttgaaatttcttaaaaggcatacggacagtggtgaatccttttggtgcaaaatttttttgtttcattaaaagttgggaaacattatttttcgccttcagaaaatcaacaagttcgtgaaagaagcgactcataagaaaatccgcgatttggtcacgcccgacaattttgacgagaacactcggtaaaagtttttaaattttgtttctaaaattctgtggcaaatctaatcttattcaatggataacatacttttggcccgaaaacgtcgccggacaaaacatcgttccgcaaaaaaatatcaaaaaaaaaaaaagaaaaaaacgtaaaaaaaaatcataaagtttttgaattaggctgtcttcggccttctgcggcaatttcaaaagtccgaatatttatttttttttaaatgttatttgatggaaatagcaacaacaaaaaaattgtaaaagtttgaaaatagttatttatttttttgcagtttggtgctgatcaacgcgctttacttcaaaggcacatgggcggacaaattcgactcaaaattcaccaaaaaagcgaaatttcatgtggacgcgaaaaacttcaaagaggtggcggagacaaacacattttaaaatcctagcttcattttcattttgtccgtaaacgaccaattttttagctggaaatgatgcatttggaggcctatttcatttactacaagaacgctcaggtcgtttag

SEQ ID NO: 71050 - DNA, 128 bp, Heterodera glycines
tatggcacggaaagacttccggtttccgacatttttggggtcggaattccgacttccgaaatttttgatgaaaagtcggaaattttttaaatttttttttcaaaaaactagtaagtttgtacaatttc

SEQ ID NO: 71051 - DNA, 539 bp, Heterodera glycines
  unsure (1)..(539): unsure at all n locations
atgtntcatctggatacttgcattgtgtgcagtttttgctttaccatcatatgcaaaagctggtgtggcgtcttgagaacaaatggggcattatttctgatcaaaataatgacaaaaatttggaagcaaaaaataatttattgcaaatttacacggagaaaaaaatgatcgcatgggaacaaatggtgaaaatctatgggaaagagttgaaggatctgacagaggtgaacgaactgattcggaggaaattcgaattttgtctgatcattgagggcgaaacgcgtgagttttttttttttgatgagatttgtcacaaggaatagttttgtcttatgtgccatttatttttcggggtccggacaatccgtcagtggtcaatccgtcagtggacaatccgtcagtgaaggacaatccgtcagtaatggacaatccgtcagtaatggacaatcagtcagtaatggacaatccgtcagtggataattcatcagcaatttttttgagcaataacaaaaatctcgcgaaaatgattgttaaaatta

SEQ ID NO: 71052 - DNA, 219 bp, Heterodera glycines
taagtggacaatccgtcagtggacaatccagtccagtaactaattcataagcaatttttttaaacaccccagatttatttaaaaacatctgaaaattaatttaagtcgctaaaaatgttgattaataatttgtattcttttataaaattatgaaataatcattttttaaaaaataaagattaattgaagtataaagaactagaaatgttaagaatctat

SEQ ID NO: 71053 - DNA, 785 bp, Heterodera glycines
atgccaacattacggtcgaaagcattatcacttttctgtcgggctgccaagaatgcaaaacagggacaaaaaacgaacgacggatggccactctggtgagatcatatgcgcacaaaacacgggtatatattttattttattttttggcaaaatttatgcagagagggccaaaatcgaaagaaaaaaaaaattaaattataaagtcaaaatactgatttaaaataattgtggctatttttagcaaaattggcacttatttccaataccgtaataaagtttgggatgttcagagaattgactacgcacagttttatctgttcggcccggatgtgatcgaatgtcggcattgtgcctaccggcgatggaccaattcgccggggaaaccgaccaacgcgctgaggaagtcatttgaagaagtaccatatgaatgtgctgaaacgataccgtatagccatcctggagagagacggtgggcacagcaaaacggaggacgaagaaagtgaccaaaatgggggaatgattgacgacgatgacgacaatcaaagaataatgccaatgccatcggaaaaagaaagtgacgaaaatagggggaggaacggacgataatcaacgaataatgccatcggaggagggagtggagcacaaaacagcagaagaagcagcagcacaggcacggaatgatcagttcagatcagctaagtccctcaatatcacctgctgatatatttttgaaatgcgtatttttatgggggctttataattttttgttttgattttgtaataaa

SEQ ID NO: 71054 - DNA, 544 bp, Heterodera glycines
atgaagagaacggagacgattttgcgagtgttcaaaacgtttgccatggatggaaatgcattggaaggaggtgcagcaggtaaaacactgtttgtaataaatgcaaatggtaatccaatgggaaggaataccgtaactttgtaccgtaactttttccccgtccataaaagcgatgaatgtctaagaattttcgtacaattttttcccatttgtcaactttcttcaggactgaaaatggggagccgacgtcaaaagcgttcagccgtggctgccatcgctatcattgcgtttttgggattcattttcgtgtttgcccaattatcagcagccacaggctcttattaatgatgaaactttggagaaagaatttgttgacttttatttttttgattttccgttttatttaccttatattagtttttttcgtaattttagcataaacaaattgactcacgttcaaatagaatttgaaattttatgctcgaaatataaatattttactaaaaattttaaaatttgacacttttacccaggttcaaataaa

SEQ ID NO: 71055 - DNA, 535 bp, Heterodera glycines
  unsure (1)..(535): unsure at all n locations
atgagcttaaacntaattgagttattatattttattaccaaggttaattataattttttttctcaaaattaatgataacaattaaaaccaacaaaattcgaatntaatcgtagaatttttattcagcttttccccttaatttcatataatttttttactcattttttgtgtaatttcttttggcagaacattgaggaattggctatcgaggtgaaaaaaagcaaagacaaaattcgcaaatttttggacgaaaaattgcccaaaggagctacgctgatcgacgaaaagcaatatggggaaattaagaaaatgcgcaaggaattggcagacgcaattgacaaagtggcggaggaggagggaaaggacggaaacaccaaatcatcaaccgtaaatttaccatttccaaaaaacagtggcatttattggacaataaatgctcataatttttactaaaaggcaattccaaatttaaattttattcatcatttcatgtaatatttagtcggggaatttcaaagaatttcattgggtttca

SEQ ID NO: 71056 - DNA, 202 bp, Heterodera glycines
atggtggaagatcaacaacaagaagggatgaacaaatggaagagaatgggggaccaacaaaataaaaaggaaaatttcatgcattgtactgaacaatatgctgcgccggagctgattgaagttcaataatatttgtaaatgaataatttaatgttcattttaattccagaatttatctgatggcaaaaagatttatgatgag

SEQ ID NO: 71057 - DNA, 231 bp, Heterodera glycines
atgggacagaaaattgaaaaaaagccgctgtccctggacgagaaatcggtgctggacgaacagacgcaacttggcaatttgcgggaagaatttgatcagaaaaggaagaattttgaggagttgaccaaatctttgacgagtcaagacgaaaaggggcgaatcaatgaaatgaataagctctggaaaaatcttaaccagcagatcgttgacaggggcaatttgctgagcagt

SEQ ID NO: 71058 - DNA, 778 bp, Heterodera glycines
tcaattttacctgtcaggtcgaagtgaacccgggccaaattggcggccccggggcggctactgccgtttcaaagtgccaccgtaaaatgctggacaaggtggagattatgcacggcaaaaaattgccaattatggcgaaggcagttgtgccagaaaatcgcccggggccaggaattgcgcggaccctttaccaagcctggtaaacaaatcgcaaaaaagaatttttaaaaccgattaaactcaattagcacattcattagtctggacacacttatgttaacagggttcagatgaatttcaaggacagataaaagggcaaacaagacaatttaataaacatttttgtccattttcaagggcgtccttgaaatttaagggggccaaaaaagggtgaaacaatcttaaaacattattttcaaatttttcgatgacagctaaacagataacaaaaatgctcaagattcatctgttttcaaggacgtccttgccatctgagagcaactgaaaggagcaataattgttttaattttttttttgggtttttctcatatttttataaaaatttgttcattttcaaacacgtccttcccattcgaggggaccaaaaatggacgatgaaaagaatattttacaaaaaatttatttagaattttatttcgacaggaaaatgttcggcgacccaaacgcaatcattttgtatgtcaatcaacccgacctgttcccggtgtgccactttgagcagctccaatttgtgatgttccaagtggaaaagctggcc

SEQ ID NO: 71059 - DNA, 56 bp, Heterodera glycines; identical to SEQ ID NO: 52733

SEQ ID NO: 71060 - DNA, 108 bp, Heterodera glycines
gtataaaatttctcaaaaaaagagatagccatttttctgggatagagtataaatttaaaaattccctcaaaaataaaaggtctattgcgcaccgccctccctatcatg

SEQ ID NO: 71061 - DNA, 275 bp, Heterodera glycines
agaattcctccgctccgccttcgagctgtacaagcaagtggtggagttgaacgccaccgttttggattcggatggcaccacccaacacaacgtcacgctgaacgacatttgtttgaagccgttgtatccgcaaaatgtgcactgtgccgtaatgagtgtgttcaactattttcaagtttgccaaaaatgggaaaaaaattttttagatttttttaaaatttccatttttcaggacgacatttcaaaactggacttggaggatgacagcacattga

SEQ ID NO: 71062 - DNA, 2792 bp, Heterodera glycines
atgacgatgatgatgctgcgggaggaggaaaagccaccccgaggaatggtcgaagaggcaaagtcaaagtttgaggaaaagcatctgcccaagaaaaagcctcccaacggcacccgccttatgaaagtgaggaaaaaccggggaccaaacagtaaatttttaatctatattataaatcacggcaaccgttttttaaatattagcttttctctcggcatgagtccaacgatagctcagttggctttagtgcgttaagccctccctgccccagctcctctgggcatgagtccatttgatcggaatggtggtaggaacggatcggcttcatccggtcatcccccgttgggtggcagttgcgtaacagataatccattcacattctttctgctcccacatgctgtgttgctgctgttacccatcccaaatcgcccaccgttgggttagcttttgtgtgcattccgtccccccccccccctccccccccccgcgtcccccgttcccttttttgtctcctccataactcgtttttgggtgcgtccgtccaccaaatccttccaggcgccgcttcatcttttgctgcttttcctgcctggtacaccaattagcgcattggacctctttgataagcaaaacaacaacaacaaacagacaaaaaacggaggaggaaaagcaaaagcaaaatgaaactcaatttgatcaatttgaacggaatgcgcagaggcggaccaagaaattaatgaggcaataaatgtaaattagccaattaaggggtcaatcgcatcgtcccctttggaatgagcggcgtttagtgccgccgaatcaaatgggcgatttttaatggtgcgcgattggatgatgttcacttttctgcttatactttgctgcttccgctgatcagttcagtgttttataatcactttcacctttctcttttaattataaaaagtgaaacaaattaaaagggaaataaaggcgaaaaacagaaaaatataaaataaaaactaaaataacttaatatgtcaatgattaatcatcaaaacattaacaaaatgaattgcccgctgtaaaattattcttcatttttaaaagcaaaatttgaaaaaaacaaaaacaaaatttggtataattaaaatatatttaattatcaattttgattttgtttcctttttgtgttaaattaattcgtctgtatttcatccgttttcccattggcttcttttcttctttctctcccatcactttttgttctcttcatcatcacccttttacctgctgatcatcacattctgttctcaacaaaagcattgtgggaatgaatggataaatgcgatcagtcgacccaaaagacaaaaagtggcgaaaggtgccacgaggggggggggggaggacggagtgatcagaagcaaaagtcaaagtcgggcggaagaagaagcagcaaacgaattgatcggaatttgctaccggtgaaagaaaatgggggcggatggactattttaagaagcattgggaccacagacagcagaagcaacacagcaaaggccaacacagctgccgacggatggccccgagaaatgggaaatattgggggaggggaaggaatgattcattggcagtgctttctgcgtacacccaatttttgctgactttcactgccgatcgatccatttttgtttttgaggatgaaaatggcacaaatttaggaaatgacacttttggcctaatcccccaaaagtgccaacatttacaaatgcattttcagaccttggcagtgcaacaagttctctttgccctcctccaccaaactgcgttgtactgcttgaacgtgtcctccccacaccgtttcttctcctcgcaccccagcaaaatgtaccgctccccgtcctcctcctcctccctctccttctctgccccaaacccgttcctgtcctctgctgaccagcagctgatcagtgaccgtacctttgacccgacccgcgtctaccgtaacgaaattgctggcggaaaaatgagcgaaacgtacgagtcgctggtgcgaaacattttccggcccgaacaaagtcgccaggagagctccgtctttctgccgccctcatttgcgccgccgagtgcgcatctcagccagcaacagtttggcaagcatcggcaaaacaccgtcaacgggcagcaatcgacgctgggcggagtgccgtcgccatcaacgaacggcagagaacggccgcgcatcagcgcagcggcgatgaagcgcatcgaggatcggttgggcgaggacgtgttggacgattcgcgtaagcggacggagggaacgggcgcggaggggaattcgaaaaacacgcgttttgctggcccttaactttttgaagactgtgaattgaatttcgccgaatcaggcttgggcattggcattttggcccattaattctcgaaagtaaaaatccattggcaaaatcaggcaaaatttagtgccgaaggcaatcacaaatttctgttcttttgggcagatgatgacgagctgtggaagtcgccgttggatgagatttacgccgagttgggcattgactcgtcctccgcctcttctccgttcgcgccggcgcccttccattccgcgctttcctccgcttacacttcgccctcctcctcagacgcgtcgcgacgtcgtcgccccgcgcccggcctcgtgtccgaatattccgtctacgtgcccaagtgttccgcggaatatgcccaattggccaactcgtcgcctccggcacaaccatcgtaccgcagctcaacattgggcgcgtatcgcgtaa

SEQ ID NO: 71063 - DNA, 443 bp, Heterodera glycines
atgaccatcatcaacactacggttttgtgccaatccaacaccaatccggcgtcccgtgaattgaaaatttttgtggacccacccggggtccattacactgtcagtgcggttgtgataacggtgaaccgtgatggcacaatgccaaatatgcccagacacattttccatggcacaaagacgtggacccaactggacggacgagaaatgttcattttggaaaagacaaaattggatggacgtcgaggagtcgtattcgaatatgggccagaaaatgcgactgaagaagaaatggtatgggttcttcggtatagaataattaaaataaaatttgaaagaaaaattgtaaaagcatcaaaatttatttactacagacaaagagatatagagagacatgcagagagacagagagagggaaatagagttatagcaaagagaaagaaata

SEQ ID NO: 71064 - DNA, 605 bp, Heterodera glycines; identical to SEQ ID NO: 43385

SEQ ID NO: 71065 - DNA, 295 bp, Heterodera glycines
atgagccaaaaccgtgacgaaaactcgcagccacctgtactcgatggaccgtacccgctggcccaagagcgcaatgagtttgtggaagatgaagcaccggtgctgcttgagatgttggatcgtctgtcacaaggagtgggttttgttttgaattatttaaattttttaatttttccattttggcttatgctaattgttgattttgtttagggaatttgccaagccatgggcctgttttcgtttgcacttgccgactgtttggccacatttcatacatttgccatactgttcgact

SEQ ID NO: 71066 - DNA, 1926 bp, Heterodera glycines
gcaaatgcacaatcaaggcagccttaaacggcgaaaagggaattttattggatttttatgttgttgaaaaaggttcattcgaccttctcggattggcatggattcgagcttttgaacaagcatacagcaaaccagtggcaacgacattgaagtttgaccaaccgacgcacagtgttcagatcaaagggacggagtgcacgccgacacaactcaaagcagagttacaggctcagtttccaaatgttctttctgatagtttgggcttgtgtacgaaatttgaggcacaccttaagctaaagaaaattcaagcccagtcttttgcggctctcggcctgttccccttggtgttcaaagtgaagtggacgccgaattggacagaatgattgagttgggatttctgcaaaaagtcgactatagcaaatgggcagcaccaatcgtcgcggtcagaaaagccaatggcaaagtccggcagtgcttcgacttcagcaccggattaaacaacgcattggaaccgcaccaccacccacttccacgtcccgatgaactttttgccaaactcagtggtgccaaattcttctcacaaattgattttaaggatgcttatcttcaaatttgtgttgatgagcaatcacgtcagcttttgggcgtgaacacgcaccgaggcttgtaccaatgtcaagtttagcatttggcatcaaaagcgcacctgacattttccagtggatcatggatcaattggcggcaggaatttcaggagttttaggctatatggatgattttattattgcgtccaaaacaatcaccgaacattttcaacaaattttcaaattctttcagagaattcaacagtttggttttcacgttcaaatggaaaagtgcaagttcttggtgaaggaaatcaaatttttgggtcagattgtctcggctgatggaattcgtcccgatccatgcagaacgcttgccttacaacaaatgccgccaccacatgacatcaccactttgcgttcatttctctgcgcaataaactactacgggaagtacatcaaaaacattcaccaactccgtggaccgttggacgagttgttaaagaaagggattaagtgagattggaccgaaaaacaccgacaagcttttgaaaaggctaaacaaattttgttgtcattcacatcgttttcccgatggaaaggagaaagtttttcagcacgcggcccgcacattgacaaagacagaacaggcctactcgcaaattgaaaaagatcaaagcggcacaacaggaggatgagttgattaaggaagtaatcaaattcacacagaccaaatggcctaatcaaggggttaatgccgaaatgaagctgtatttttcaggcaggcacaacttttcattgatcacaggttgtctagtgttcaacggacgttctgtcatccccccgtcacttcgaagtcgcacactgaaggcgctgcacttggctcacccaggcatagttcgcataaaaatttagcacgatcgttcgtctattggccatcaatggacaccgacatcgaaacgattgttcgcgggtgtagccaatgtcaacaagcagccaaacaatcacccaaacagccactccaaccttggccaacaacgacttccgtgttcgaacgcattcacattgacctggttggtccatgcagggatggcaacatttacctggtggtcatcgacacattttcgaaatgaccaaaagtttttcttctccgtcacacatcgtcacgggccatcatttgatcacttcagtggttatttgataggtttggtagttccaaacacgattgtttcggacaatgtgccccaattcttttcacaaatttcaaaaatatttgttccaggaattcaatcaagcacattttttcacctccgtaccacccgcaatcaaacggagcagctga

SEQ ID NO: 71067 - DNA, 569 bp, Heterodera glycines
atgagaaccaagcctaaactttcattattaacaaaatgtgaacaaagattaaagatgctaaaagatactaaatttaagtgaattagttaaagtttttctgtaataattatatttgatgtctataagaaaatatgaaattcttcaataaaaaattaaatacgattaagaaaatttaaatttaaattcattacataaaaataaaataaatcaatattaaaacaataaataatattatcatgcagaggctttgagtctattagagatcggtattttgaaaaaagcctggacctggacctggattccatgttgggtctggacctggatttcctggacaaaaatccaggaaaatccaggtccaggaaaaatccaggctcttcgagacctggatccaggcctggacctggattttttgaaactcatcttaaaaatcaaaaaaaggtttgaaaaaattaattaattgcttagaaacacctaaaaatatctaattaataataataataatgtatttttaaatttatttaatctgtttttgaaaacttgaaaaaacatcggtcacttgaaaaaataaa

SEQ ID NO: 71068 - DNA, 80 bp, Heterodera glycines
gtcctgcccataatatctgtggcatggaataaattttggaactgcgctgcctaacggcggtgcttaaagtgccctaaaaa

SEQ ID NO: 71069 - DNA, 490 bp, Heterodera glycines
atgagcaacggatctgaagaagatgaacataatgatgacattatgccaaatgatgcgctacgaaaccgtcaaaaatatggaaagaaacgtgcgaattttggtatggagacaaaagagtcaacatgtgtctacgaatattttatttgatttttaatgctaatgttgaaaattaagcaatataattaggtttttaattttaaatattataaccttttaggcagagaattatcagacgaagaaaaaataaaaattgtgaaaaagtttatgctaattagagaacgcattgacaatggaaatttctcgaaaaaaataacagcagaacaaattgtaaacaaattaggagtcacaatgcatcaaataaaacattggaaatttaaatatggactaagtaaatcacaaatacctaattaatgttttttggaatattttaaaatttaggcaaaaaaccaaaaaatttgactgatgaacagcgtaaaaaaatcctaataaa

SEQ ID NO: 71070 - DNA, 583 bp, Heterodera glycines
atgccggcggaaacagccgctgcaaacaatcattttgtgctaatggggcagcccaagggcgaagggagcccctttctggtgccaaacccaatgtacacgctcaacttgaagcaacaacacttcggcggagtgcctttgcccgtccatcaccagcaccaaatgagcttatctgttggatctgcggaggtgtgcccattctgactaattagtgcactaacccccactctcattgtcagtccgccgctgatcaccaccagtgccgtccaagacaacagtcgttgtactgctccaactcctcgcgacagtccgagcctccaccccagcaaagtgcagcagaacaacagcaacaacaacaacacctttacgctgcccaacaacagcaaatgcgcacttctccgatggaagtgaaaagccaattgttggcacaattggccaacgaattgggaagcccaacggagcaacgcaattaggggaaatacagcagaaacagtcgaaaacaatcactgcttttgttgtttcacttcaattattggcttcgcccatcaaattaccttcaaattaatgactcatcaaaattaaaaga

SEQ ID NO: 71071 - DNA, 122 bp, Heterodera glycines
cctcaacagcattcggcggtttgttctgtgtgtgcaactcgtttttctcatattttgggctgtgagaggaaattgggggaggcatttgataaggaaatgatagtacaaagcacagcgacagg

SEQ ID NO: 71072 - DNA, 282 bp, Heterodera glycines
taacttctgctaaactcaacagtggtggttttttgagtaaggcacctgatgcttacgttgaaatcattgttgactcgaaggaggaccaagcgaagaaaacgagtgttaagaagaaaacgaattccccgcattgggacgagtcattcactctgaatgtcactgagaattcggtcattgagttcaaaattttctgcaaggccaaagtgttcgatgattctttgctggcttctaaatcggttaagatgtcgaattggttgcgaaaggagtccaacaacggaaaat

SEQ ID NO: 71073 - DNA, 484 bp, Heterodera glycines
aaattgttggagttttaccgcaaagagcgcgacatgttcacagagggactggagaaggcttccgtcaacgtggaggagttcaaatttccgaccgaaaatgttgaacaaatttttgacggacttttcgcattggaaatcaccggcaaacaaatgaaggccaattacgaaactacgaaggaggcgcagcgagagcatcagaagcaatccaatgccgaagcaatgcgcgcacaaaatttggtcaaggcaaagccaacaaaatgccaaagtggtgggttgacgagagtctcgaagcccgggtttttagtgtgcccgatgccgttccacccggaataaaagccgagaatttttgaattttaattgctttcatcatttagcgtccaaccaaaaagcgattcagtgctatttggacgaaatgactgagaaaggccaacaacagctgggccagggttggaaagcggacggaagtgccgagtgggtggataaa

SEQ ID NO: 71074 - DNA, 923 bp, Heterodera glycines
gggctattgatgtgattgttgtggaacaacctgacggctcattggcctccactccatttcatgttcggttcggaaagtacggcgtgttcaactacgagaacaaagtcaatatttatagactaaaaaaaacatatacttacgcatttttcagtacgtcgacattgaaatcaacggggaagagattgacctgaaaatgaaattgggagagaacggagtcgcctttttcttggcaaatgacgaagagggaattggcgagacaaaaaacgcggagggaaaggtaaattgaaaaacttattttaaattggctaatgctttcgagaattaaattgctttttttggggagggggagggggtgaaaatggaaattcgaattttggcatgtttagaaaaagcaaactgttagtattttaagccataaaatcatcttttaggagtttttgagagaatcgcaaaacaaaaagtggagcgaagacacacaacagaacaatcggccgtcagcaattgacctggaaaaccaacggaaatgctcttttgcgagcagtagcagcagcaccagcagttgcacttcccaaccgcagcacaatgaatgcccaccaacggcgacgacaacagccgaaagaaagtgcgctttaaaacaatggaaaatggattaagttcacaaaagtaaaaacagcttataagaagcgtccggcggtgccggcgatttctgccggaatttctatggcttcagaatttgcaggcaatccgacgccgccaaagcggtcaaaaatgttcaatccgtcctttctcaaccacaaggcgtccgtccaacagaaccgtcagcgactgcctttttcgtcgtccatttattcgtgccgaaggaatcgctctttgcccgatttggccaatttgttgtcgccttcgtcgaacatctacgactctga

SEQ ID NO: 71075 - DNA, 477 bp, Heterodera glycines
atgcccgtaaaatttgatcaacgcctcctattcccactctgtgaaaagtgcgccaaacacatcactgcaaaatatcccaatggcctcaaggacaacatctactcctgcccacactacaacccaaatgaccgcgccttcgtgtccacttgcacccatcttgagttaaacgcagcattggaggccggctacacagtccgcaaagtcttccacgtcctccaatacgaccaatggagtaacaatgtcttcaagtcttacgtgagcgaaatgatggccataaaaatccacgcaaccgggttcccgtcgtggtgtgagagcgaagaggagaagagtgaatacattgaggagtgctggatgaaatttgcaattaaactcgacaaagaaaagatgaagtcggagcctgggaagcggtacatcgccaaactttgcctcaactcactctggggccgcttctccatgaggaatcttctctccaaggcg

SEQ ID NO: 71076 - DNA, 648 bp, Heterodera glycines
atggtttaattttattatttttggcactttagaatttggacggcaattctttgttaatatgaccgttaaactgggaaagccattttaattaaagtattcaaattttgtttcattttgtagaattctctgctctgtgagaaattgaatgccgcagcagccacgatggctgacatttatggtgcactgcttctgcatgcgattttcgatggcagcaaagtgtgttatattgaaaaaaataattttttattttcagttttgaaaaacagtattaggcgcaggtgttccatattcgaacccaaagtcagcgaggggtggtcagccatcacatttattaatgggattaaccctcgaaatacgaccttttttttattacttttcgcaaatctatgttcgtgctgtgttttgttcaaaaaaatcacgagtatggttaggcggcgccggataaatttttgataatttagccccaattatttgctaacttgtccagaaaatgaccaaaatgcgctgcatgtttttaatcaaaattgtcataaaactttcttgggagcggggtacgtagtacgtatctatcccgcttataaaatcagcatttggccgataaaaaattataatttgcggtaattagaattttgaattattccaaataaa

SEQ ID NO: 71077 - DNA, 928 bp, Heterodera glycines
  unsure (1)..(928): unsure at all n locations
gttcttgccatggcaatcgctaggcagttccgctactcaatttatcttctgttagttttggttcgtttttctctccatcaaagtgccgaattgggtgagtcgattggcatttcccccccccccccccctccaaccattttaattgttgctttttctgaagaggacctccaacgcctttgccccgacttaaaaggcgctttctgttcccattgtgaccacaaaagtgttgagcaaatttgtccaatcgaatgcaacttttgctcaacttttcgctcaaacgaaacgccaaaattcttcggaaatgccgcagaaaattgaagtcatttctttctttnttgtcccattttcaaattcaaatttttcttcnagttgagctgaaaaggcaatgcgccaccattcgattggccttttgcaacgttgntaaggtgagaagcgcaaaagaaaagcgccaattcaaaagaaccaaaattaaataaaattagaaatgaaaatagtacacaaaaatgagagggttcgaaagaaatgagaaacgaagagatagtccaagggttttctctgggttgacccattgattgcgttatgcttttttgatcacttcgatcaacgaattgtgcgtggaagaatgtttggactgcgaagcgggcctaagagacgaagtgggcccaaacagcagcgaaatgccggacagataagccaattcagcagaaagaagtggtgccattggtacagacctggcaacagtcagcgggggatggactcgcaattggcgacgatggcacaaattcagcgggagaagctgccgaactgagcgagtctgaggccgaaggaagagaggtgccagcggaagtgccaattgaaatggacagtttggcacttttttgacgataaaacacgaacaaccaaaagcatttgtttattggattgacaa

SEQ ID NO: 71078 - DNA, 2223 bp, Heterodera glycines
atgaccagcaagaacaactcgccacgaaatggcagccaatgccacgggtgccaacagcagacgaatgtgaacggcacgaaatgcgacaacaaacgcattttggtggtccaaacgacgggcgacgcgaacggaggcaatgccaacggcggaggagtggcgacggtgctgacaaacacaacggcaatgccaaccacggcagcggcaaaggagcaaccgcaaccaaaggaacaaacggagcaacaaatggcacagtcgggtgagtgatggatggcacagactgataatgccaaatggaaatccaaaggtcattcgtcgaagaagagcagcacacattccaatttgcagcagcagcagccgacgggcgacacggcgacattttcaaaatttgccaatttttcgttggccaaacgtttcctgcaacaaaaattggcggacggagaaagcaaaacttctccagtcgaaaagtcttgtgaaggtaacgacactttctcaagattatttttgaaccatagaagcatcactttgaaggagagaatatgacggaaactgtcacttcacaagactcaattcccttctctcccgtcggcatttgcccaatggcgccaataaaagcggcggataaaagggcatggaccaatgccataaatgtgggccaaattgaggggacggagggcaattgcagtcgcaaacagtcggagatggccaaacgaagttcagtctcttcgacactgaccaacagccaatgcgacgcgtttctctgatcagacaaagcaaaggaaaccaaagctgtgatcactggtctcatcaatcgttctaattgctcatctccgtcgggtcgtgatgaattggaaattcaattatttttttgccgaattatttggattttttaggcttttccatccaaattgttcttaagagttgtttagtgcgaattgtcaaagaaaatactttttgttttggcatttgtccccctttccttctcatctttcattttattaccactggcatatcattttcatttaacatgaattaaattttgttaaatttaaaattcctttagtcccctcgccaataatccatcgcccattccaatttttctttctttcccttacaattccatcccaacgaatcgatcgaatgggcacgtcagcagtgactgtgctgacaaatgagaaagaataaaaataataatgctcgtttatataacgcattaataatattttttatatttagtgtaattaattaattgcctaattattaattaatttataattgattgatcattaaaccccgtttctttccaaaggcaatgattcggcgacggtctgtcgtcccaaatgtttcctccccctccttttgctcccctttaattgccgtcactttctccgctcttttccttttggtgaggttaaacagcgcccggggggactttggaaatgaagcgacggaaagtgaagcgaatgggcaaagagagagtgggcaattcccacaggaggacggcatttttatgctcagagacggcactttcgattcttttctttcccaaaacccaacggtgctggtcgagttttacgcgccatggtcagcagctgtcttaaatgatcatttggcaaagggtcacttgctaattgaaggtgtggccactgcaaacaattgacccccgaatatgcaaaggcagccgcccaattggccgattcagtgccatttgccaaagtggacgcgaccgtggagacaaaagtgggccacagcaggaaaacccctgcatattaagtgcccaaattaattttagcttgctgagcgttttaaaatccaaggctatccgacgattaaactgtggaaggatggacagacggaaccgacggactttgacggggagagagacgccgaaggtgtaagaggggggggggggggaggaattggccaaatgacaaagaaatattgaataaggaaaatggctgactggattagctgaataatttgcaggaattgtgcgatggataaagctgaagactgaccccaattacaaaccaccgccggaagaagtggtcgcactcactcgcgaaacattcgatgaatttgtcggcgacaaaccgctcgttctcgtcgagttttacgccccatggtggcacaaaatccaagttcccaaaattaataattgcttaaaggtgcggccattgcaagcaattggcacccgaatacgaagaagcagcaaaacgtttgaag

SEQ ID NO: 71079 - DNA, 1126 bp, Heterodera glycines
  unsure (1)..(1126): unsure at all n locations
gttcaaaattgtgaaccatgtcaattggctgcaaaggcaccgatcaaaaccgatctccattcatggccaaaaccaactggcccgtggcaacgaattcacatcgactttgctgggccattcttcgcaaaacatttttaattgtcgttgattcattttccaaatacccggaggtatttgagatggccaattcaacagcatcggccacaatcgaaaaattgcgttatttatttacgcgccatggcatcccagaaacaattgtttctgacaatggcacgcaattttccagttcggaattcgccaaatttgttgcagccaacggcatcacacacttattttcggccccatataatccaatgtcaaatggacaagtggagagatttgtcgacacatttaagagagcattcagaaaattaaaaggggaggggaagccgaacaaggagatcattgacatttttctgatcacctatcggacgacaccaaatgattcacttccggatttgaagtgccctgctgaactgctactcggtcgaaggccaaggacaacgattgatctccttcggccaccgccacaccaaccatttgaaattgatttggagatggaaaggcaattcaacaagaaatttggcaccaaaaatcgaagatttattttgaatgagaaagtcttcgctcgccatcgctcctcgcaacattggaagacaggagtgatcagcggcacatctggagtgatttttgaagtcaaatttcacgacggatcattcggccgttttcacgccaatcaactgcgctacaggaaaacagccgacaattttgatcagtccttggccatattaaatgaggcatttgagttgccatttcctccggccctgcccaatcaaccacccgacgcagaaaatgccaatttagggcccaatcaattgtaaaacgaggtggcagaacccattcagggacaatttggctgctccnnattgaggacgtcccaaattcaacgacgctatcctcaacgccaacgtcgtaaaccgaaccgcttttcaccggggcatgaactgatcagcctaaaggggaggggtcgggcaggcacattttccccccgattattatttccctttctcatttgcatcactggttt

SEQ ID NO: 71080 - DNA, 139 bp, Heterodera glycines
gctgaagctccatccgaaggatttctcacttattttggacgacgaatatttggtggccgtcgctgtccatcgctacagtagtgcaactccacaggaattgacatttactcgagaaattatacgccggacgacggctatt

SEQ ID NO: 71081 - DNA, 261 bp, Heterodera glycines
atggaaaatgcggacgaaaagccgccgccggtgaccagcagcggcggcaccaatgccgccgccgccaccgctgcgttagcaatgcaaaaaattgtccaacaacacgcagcaaccatcgcgaaccaagtgcagcaacagcagcagcaacaaacaggcacagaatacaaacaaacaaatgcatattttgggagacaaattatggaaaaatatcatgtgtacttgccggaaaaatgggtacttccgtgttttttgctggtactt

SEQ ID NO: 71082 - DNA, 153 bp, Heterodera glycines
atttaattaaaaagagccccgagcttttcttaatttgtcattttgtttatagataataagtattattatgcgttcctctttttttatatacacaaattgtgcgttccttttcaatgtaaaaaaaactaatttttctgcccatgggcaaaaaaa

SEQ ID NO: 71083 - DNA, 710 bp, Heterodera glycines
atggaaaaggaacagcaaaagcacacagcggagagacaacagccgaatatgcaggggaggtgagaaacaaaaaaagcaagggaataatgcaaaacgcagcagaatgattccattcaatccgattaacttttggcaaaaaagaagtgccaacaatgttttagggtcggattaatcagtggagggtcggaaaacaggaaataccgacattttggtaacaggtggtttgtcgtcccctgccctattttcacaaaatgttgttttaaaaagccacgaaaacactcccgggagttttctgggtcgctgatcatgaatataacactcatttcggtcaatttcaaacctcggaaaggaactcgagaaaaagcatttcatttatgtaaaacggtttgacttttaaaattggatttgaaaaagttgactcttcgacttctgtttgaattcggcaacgatgttcgattcgtgatcagcgacattttcatgactttaaaaaaagggggagtgggcaaacaaatatatcgaatttttaccattcgtttaacagtttcgaagtgttggatagtggcaaggcattttcgccgtctatgacgccaaatccgaagaattgtcgcacgtccgttgcccaaattcgtcacaaagcaatggcacaaattcaagtggagccggcggaggtgccaatgccatcgtgccaaattaaaatgatggacaaaagg

SEQ ID NO: 71084 - DNA, 962 bp, Heterodera glycines
atgtttggcccaacagccacaacatggacaaattcggccgcagcgttgggctccaattcgtcctcccacgcctgggggtgtgaaaaaaaaatcaattttattcttttgatttacatttagtggcgctgagggaccctcgccgaaagcgaaatcggcaaatgcttcatctcattccggaggaaaatgagccgccaatgcgccgcaacaaccaagatcctccacagccgccacctccgggagttggagcataattttgagaattagcggatttatggtcttgtgatctgaattatgttttgttgaaatttaatattttgtaatattttcattttttattctgagtttagtgagtgttttaattggaaaatctttaaatatcttaatatatcaaaatcaataattattttgttttcatttagatcatttatttttgtttaaaaatggagggaaaatcctttttgaaaaccccaaaagaaaaacgacaattgagaaataaaaaaaattatttcagtaataaaaaaaatattccaaatgatagttattatacggaattagcaaacacccaaaaagaaaacaagaaatttggcatcaaagaaaatgttataagatttatatttaaaaattccgaagaaaattcaaaagaaaatttcaaaaaaattattgaatatttaacagataaagcaatggaaaaaaatgaaaagggttgggtaatagaaaaaatttcgtatgatttatattgtgaagctctgagtgatccgctaataattccgcctagggatttggtacaaaataacgcagatgtagttttggaatctttttaccacatacaacagagttttagtgaaattgatttattgaatgaggaaatctctttgattataactacgtatgctgccccaaatggatctggtattaagaaaaattcagtataaatcatttttaattttagggcaattaataaa

SEQ ID NO: 71085 - DNA, 958 bp, Heterodera glycines; identical to SEQ ID NO: 43418

SEQ ID NO: 71086 - DNA, 1210 bp, Heterodera glycines
agtgtctgccttatcaactttcgatggtactgtatctgactaccatggtgatgacgggtaacggaggataagggttcgactccggagaaggggcctgagaaatggccactacgtctaaggatggcagcaggcgcgcaaattacccactctcaacgcgaggaggtagtgacgagaaataacgagaccgatctcttatgaggccggtcatcggaatgggtacaatttaaaccctttaacgagtatctatgagagggcaagtctggtgccagcagccgcggtaattccagctctcaaaatgcatagaattattgctgcggttaaaaagctcgtagttggatctgtgctagccgtccggtgcacactttgtgtgttactggtttggttggcttttctgccggtctttccccggcgttggcctttaccggtcggcgtcggtgggctggcgagtttactttgaacaaatcagagtgcttcaaacaggcgtttcgcttgaatgttcgtgcatggaataatagaagaggatttcggtccgattttattggttttgctgaccgagataatggttaacagagacaaacggggccattcgtattgctacgtgagaggtgaaattcttggaccgtagcaagacggactacagcgaaagcatttggcaagaatgtcttcattaatcaagaacgaaagtcagaggttcgaaggcgatcagataccgccctagttctgaccgtaaacgatgccaactagcgatccgccggcggatttattcgccctggtggggagcttcccggaaacgaaagtcttccggttccgggggaagtatggttgcaaagctgaaacttaaaggaattgacggaagggcaccaccaggagtggagcctgcggcttaatttgactcaacacggggaaactcacccggcccggacaccgtaaggattgacagattgatagctttttcatgattcggtggatggtggtgcatggccgttcttagttcgtggagcgatttgtctggtttattccgataacgagcgagactctagcctactaaatagttggctcattgcttctgtgggcacaacttcttagagggattttcggtgttcagccgcacgaaattgagcaataacaggtctgtgatgcccttagatgtccggggctgcacgcgcgctacactgggaaaatcagcgtgcttgtccttccccgaaagggg

SEQ ID NO: 71087 - DNA, 1194 bp, Heterodera glycines
cccctttcggggaaggacaagcacgctgattttcccagtgtagcgcgcgtgcagccccggacatctaagggcatcacagacctgttattgctcaatttcgtgcggctgaacaccgaaaatccctctaagaagttgtgcccacagaagcaatgagccaactatttagtaggctagagtctcgctcgttatcggaataaaccagacaaatcgctccacgaactaagaacggccatgcaccaccatccaccgaatcatgaaaaagctatcaatctgtcaatccttacggtgtccgggccgggtgagtttccccgtgttgagtcaaattaagccgcaggctccactcctggtggtgcccttccgtcaattcctttaagtttcagctttgcaaccatacttcccccggaaccggaagactttcgtttccgggaagctccccaccagggcgaataaatccgccggcggatcgctagttggcatcgtttacggtcagaactagggcggtatctgatcgccttcgaacctctgactttcgttcttgattaatgaagacattcttgccaaatgctttcgctgtagtccgtcttgctacggtccaagaatttcacctctcacgtagcaatacgaatggccccgtttgtctctgttaaccattatctcggtcagcaaaaccaataaaatcggaccgaaatcctcttctattattccatgcacgaacattcaagcgaaacgcctgtttgaagcactctgatttgttcaaagtaaactcgccagcccaccgacgccgaccggtaaaggccaacgccggggaaagaccggcagaaaagccaaccaaaccagtaacacacaaagtgtgcaccggacggctagcacagatccaactacgagctttttaaccgcagcaataattctatgcattttgagagctggaattaccgcggctgctggcaccagacttgccctctcatagatactcgttaaagggtttaaattgtacccattccgatgaccggcctcataagagatcggtctcgttatttctcgtcactacctcctcgcgttgagagtgggtaatttgcgcgcctgctgccatccttagacgtagtggccatttctcaggccccttctccggagtcgaacccttatcctccgttacccgtcatcaccatggtagtcagatacagtaccatcgaaagt

SEQ ID NO: 71088 - DNA, 1005 bp, Heterodera glycines
atggagattttgttggaagtaattttgggcagttctgacgaagaaatgacagaagttttggaggtttattctgaacaatatggtggaaatttgtcggaggatattcaaaaaattggggagaaggcccaagggaaaaactcaaaaggaaaaaatgacactgaggaggcaaaagctgtccgagaaattttgggtgatcggcttcaaaacttgaagaatagagcggcaattaaagtaagtacaagtatttttggaaaagcatggcgttttgcccaaaacttattaacaaaaatgcatcaaaaccgtaaaacacaccgcctaaaaatgaccctaaatttaaatatttttaggttttagcttattttttctgagctccagtggcttaaaatgcacgaaaaccaagttttttgggggattgttaagctattttcgagttattagagcatatgccaaatcccggcggggccccggtccaatccgggctcgaaaacaaacccacgaattgttgggtaatacattaagtggtacccacgtggttttggcaattatttaccttatgagttggctgtcgtaaacattcaatataaaattcattcgaaaaatttaaacactaatacaaccgtttgatttctaaattcgttttgtatataaaataagtaatgattagggttcgaaaaaatatgcacataaaattgcaaaatatgcgtataaaaatatgcaccagaagtaaagcgatgtatttgtgacgccccccccccccaatgtctacataaaaataaaggatatttccaatagtaatttttgaaggatacgatcaaagaactcggaacaatttgcgggcattggaagacgttaaacaattcttcaaatgagcgcgatgagcatttggagaccgacgaggatatagaaaacatgtacgggcttgccaagaagattttggtgaatttcgagcccgacacagcggacagtgcggaagttgcctccgtttggtctgaaagtgttccgtga

SEQ ID NO: 71089 - DNA, 609 bp, Heterodera glycines
atgcttaaaggatgtctgtacgttatcttagtgctgattgctgttagtttgattcggttgggcaaatgtttgaggtgatttaagccttttggcccttaatttctcctgaaaacttagaaaattcaacataactctgcctaaaagacatatttctgttcgcaaaataaacagaaatgtgaaaaaagatttgttctttcttatttacatagtttgttttatctgtttatttttggtagttgttgagattttgttcgtttttatcaagtgtctctattttaaattaacacccctttttcgggaaaaaattcataaaatttttttccgtcgtcatttcgccttctcctttttagaatcttaatattttcagaattgctacgtacagttaaaaattcagctcgatcggttcatgggaagtggtcaaactcccaaaaaacagggtgtctttattttaaattaacacagtgtacaaaatcagaaatctaaaccctctcgttgttttatcatctgttgagaagcagtccttctcttatcacttatcatttccatctccttagaattgttttccgtcaattccctgtttatgtccgtcttttttactatcttgaaaaa

SEQ ID NO: 71090 - DNA, 3592 bp, Heterodera glycines
  unsure (1)..(3592): unsure at all n locations
gtcttcaggtatttccgtcgttgagcccaatgttcccgtccgtgtggtcgtttttggtctctttttggaccgtatcgctttggttgcctttacaacggataactgcttgaactccggtcttttttcaaaaatttctgtcaatgagctaacaacatggtttttttgtatttagttttcaacatttcgcacaatgaatttttgtctcattcggagaaaatgatcgaaatgagtgcccaattcaaagagttggcgcaacatttaacaattttgaaaaaataattgaaacaacagagacgaagacgcgtaccgaatgtgtttgttggagaaaatagacgaactcggcgaaggcgaggaagaccttattttggtgggtgtttcaccctttttgagttttttcagagttttttcttggcctgaggggctgtattcaaaaattcggtttttatggagtatggttttcgtatgttagaaatggtttcttcatctcctccccttccatttcctagattgacgaaatgcgcacttggatccgtgccacttcggaccccccggtgcattacatgcctgaggaaattcaggtagttttgttcttgtcattgtttttgcagctttttcaaaatttcagcttctgttcatcgtatgccatttttcttttttttggttttcatttgccaattctttcccttcagttcactttgtttcttctgtccgctttgttctccggtctaaacctcggccttatggctttgtccccccaggagctcactctcatcctaaattctcggtgatttttcccccaaaatgatattttattttccccattatccatccgaccgtttgctttaaggctctgaacgcgaacgaaaatatgccaaggtgattttgcctgtccgcaaagcggggaacatgctgctgtgtacgatactcatcgtaatgcacacaattcgattcttatttgatgcccttctcattgtaagatgaatgtcatcgtcaactcggccatctccattctgatggaggacctcacttccggcatcgtcgcctttgtactcgcctcattgggaattgtcgtttttggtgaaattgtgccccaaagtgtgtgcattaagtgagaaggggaaatgttgtaaattactttggcacgtaaattttgttaattttagaaagggtcttcaagttggtgccaaaactatttggctgactcggtattcattgagtttttcaattaattttttccataattagacaatttgtataagtttcttcatgttgatcacacttccactcgcttggcccatcggaaagcttttggattgtattttgggcgaagatttggttggcatggatcacgaaaagttgttggaaatgctgcgaatggcacaccaacacagcgaacaccacgaagaactcgcggaagatttgaaaattgctgttggagcgatggaaattgcggagaaaattgtgcgcgaagtgatgacaccaattgaggtgtggttaattggacaaaaagccaacagtctgttgaatgtgtaatgatttggtccgtaggatgtgttcatgctttccgacgaggccgtgttggactcggattgtgtggcggacgtagttcggcgaggctacagtcgtatccccgtgttcacgaacaacgaccgtaaccaaatcaccgggtgattctttgacccaaataattctaaatttctatggtttattgtcttcatggctttattcggtttcagtttgcttttcatcaaagatttggcccttttaaagcccaacgaacgactgaccgtttccaccatttgcgacttttatgcacgcactttgcgtttcgtcaccgacgacacaccgttgcaaacgatgctcgaggagttcaaggaggtcgaaacgctaaactgactcaaaatggagctaatattcaccattcccagggtgaatatcacttggccattgttttgtcggagaatcacaatcgcgtggtgggcatcatcacattggaggacattgtggaggaaattctgcagtcggaaattgtcgacgaaagtgacgttgtgtacgacaacaaataccgcaccaagcgcctcaccaaatggcttacggtaattaatgatggactaataactacaaaaaactaattacatttaatgacttccagaagggaaagctccgacggattaccgattctgaggacagagagggagacaaatgcaaatggttgtccgagtcactggccaaagtcactgcgcaatggctgagtgccatgcgaccggcactttttggggacaaagctatggacacgaaggctctccatttgctcatccgtctgaatgcgcgcaaagtgggattttggaatcttaaataaattcaaatttctacttttaaaaataccaactttgcagataaaagtaggccaacgctgctcaaaattggacagtgaactgaatttggcaccccaagagcctaaatacctttacaggtaaatacaaaagtacctttttctaagttccatttaatttaaagagctggtcgaccttctgaccattttattcttctcatcgaaggaaatgctgtcgcccatttcccgaaggttcactttcgatttcgtctggtaaattataccctttcagaatcagatgaaatttgacgttggagcatgggaatgtttcggtactgaaattctcgaccaaatggaggcacagatggttaacaattatcagatggacaaaaacatcgggaaaatgcaccaccaaaagacagtggccacaaatggactgttagtccatcgacacagtgcgttcaaaaattcatttttaattttgtccgtttcgacaaatgagtcaggtgcattcgttgaactgagtgagggcattgagtttatttctgactttgacctgctggtgaggaaagattgccgcttcatcgaactcactccctcgtcctatgccaccgcttctcgactttcgactttgcttcgcgctattaggtggggaaagcaattagtaaatactatctaaagcatttttcgctttctatctatgaccatgttttaaaaaatgttttttgcagagatctacgtaaaacggatgggtctcggtttgagcggcgccgaaaactgacaaagcaagactcagtaaagactttggatttggtgaccgaggtagaaacggctcatcataattaattggtggtcattggcatagagtaacgagcgattgctttttggaacgtatataatatttgtgaagcctctcgttacctctactgatcatcagcagataaattaattttccgatccgttcaaacagggctctccgagggtgcagaagcaaaagcgatgcatctcaaccgtcgaaatgccactgctgaagagattaatatagtcatcggcagaaatgacatcggaagaatatttgcaaaataacattttgttattaccatccacttttctttcattgccaacataaaaatgtttatatcattttcaggctctattgcatttaggcgtccaatcaaattttatgcatcagcagattaattattattttttttanattttattcttcgtgtaaaacatattagggcaaatgttaatcgg

SEQ ID NO: 71091 - DNA, 621 bp, Heterodera glycines
atgcaaaaactgtcctgtcttggagactttaacacacaacaacaaaaccagcagcacaacaatgcttctgtttcgtctctgatgtacaacagtaactaccaccaacagcagcaacatcagaactcgagcggcgccagcagtggcgtgtgttcgcccgcgtcgccgtttccgcctgccggaaggacgccgatgcaatcgcaacaacaacagttgcgaatgaacccgcagcaacaaagcaacgggggcaatgagttcactccgttggtccgaatgggcagcggaaacggtgctgttggacaacatccgtactcctttcggcaacaacatggtggtgggggtacagcggcagcagcgacaaatgcgatggttgcagcatcgtccccaatgatggccgaaaatcaccaccattctcaattggttattaaatgcacatctccgtgttacttactggtttaccataaaataatttaagcaaaaacaattgccgtcacctgcctactcagtccatgggatgaacaacagcaacatgaacaaccatgccaattcggtgatgtcctccaacccaggctcgatcatttccgcgttgcccgagtcgccgctgtccactcattccgtcaataa

SEQ ID NO: 71092 - DNA, 1386 bp, Heterodera glycines
atgacggcgacaaattcatcaacagcgcgagtggccggcgccagcacttcagcaccgggcgggtcgtctgctgacactttagccagcacaattgcgtaagggcatgttaaatgaatgactgcgtgtgtaataattgttttgtttattaatgcttttaaatcgatcctttgtttaggtctgtggcttccggaggtggcagttttgaatttgagaaggccattggcacttcgccccttccgtcgtctctgccaaccgccggcgattcctccgccgctttattgacaccgactgttggccctgctgttggtccgagtacttctgcccaaccgcaacagttgacctcttcgcccggtgtgaagagacgaaagaaccaacaaataacgcagacggtcacagccattgtaaatgcattggaacagccgccgattgccgtggagcagcagcagtctcttcccgcttatggcggcggtgcgttgtcccatcctttacaacagcaaacatcacttggcatgcaacagcacgaacaaatggttagttgcacatggatgatgatgattaatgtcaacaagcaacaccattgctgcttcgggagggctaaattcaagggcgtagccaaacccttggcttcgggggggattaaaaaaatccgtttttagaagtgtttttttcttttgttagaaatcccgaattaggaggtgtatttacaggaatttataaccgttttttcgcaaaaaaatgactattttcataataaataattttagaaaataaaagttttttcaagactgtcccatcacaatgtcggatccatgtgcaaaacccgccccaaacgcacggcgattttccgcccacaggcaccaaaatccaagtggtgcacatgcaaccgccagcagccgccatttcacaccatcttcaacagcaaatgtccgacaatctttctcctcaacaacaggttttttgccatttgaactgcttgagtttcgactttccttcccccagatttccgtcgctcgaccgatttcaacgcgtctttcgacattacaacctgaccacaatttgaattcgtcctcctcttctgctctgtgcgattaccatgtggccaatgccaacaacaacgactccattaatggtgttcaccaaattgggccaccatcaattgccgaactgtcgtcctctgccgaaatgagccatcactccacgccgagagttgctgctgcaccgccttactcgccatatcatcaccaacagcaagtcgctgccgcgtttgtttctcctgcgccacaaaatcaacaccatttttatggaagcacaatgccgcaacagttgtcaccatcatcagcatacaaatataataatcaacagcagttgcaacaccattcttatcat

SEQ ID NO: 71093 - DNA, 677 bp, Heterodera glycines
atgcaaccaaatttccattttctaattgttctgattttattcggtgtttccatttgtacggcttcatcttacacttggaaatcagagcctaatttggccaacaatgtacaaacgtttgccaaatttatggatgatctttatgtggaatacaagaagactgtaaaaatgggtcagttcaatgcaaaatgtaaaataaaaaatatattttagtgaaatttaccagcaaaaaattattatttttttggatttggtttttttagatgtaaatacactttcagacacaattctaagaaatccgtcaacgatattattgactaattactcagacaagcagaaaaggacagtgttcaatttgacatttgtaaaatgtgtggcggaaattgcctatttccgagtgattaacaaaaatgcaaattcgaatttttcatatcaaaaatttaaaatagtgcctggattagatgctaaagatgaatttgttggttttttgcattttgaccaaacacttggccaacaaattgctgaaaaattcaaagacgaaattttttctgagaaaaaacaaattcccgaagaagttgtgaaccaaattctgcagttggccttctcatttgccgcccgagtcattctcagcatagtgtaaaacattgaaaaaccttgaattaatttaaattatctaaata

SEQ ID NO: 71094 - DNA, 824 bp, Heterodera glycines
atgaaattatatagcaagcgtattggttctaaaacagttatgacaactgattgctccgaaaatccgaattattgctacaaatggacatctgcaggagtcaaaaaagatgacggtcaacgctttgtatgtgctggttgccggaaaatcaaggaccggaaagatgttccaagcgacagaaaattaccaaccagaaaagtgcttgaaaatggatcatgggccagcgatggtgcaaagtaccctcacttttgcgaaccgattcgaaaaacagaagttcttggagttgaggtgtaaataatatgtagagaatgatttgacttgaattttaggaacgacggaaagtgcaagcagaactggcacttgggtccagagaaaacattgcatcggcgaaagtgcgcattgaatgcatagtggaagaaaattacaaacttttacctactcaggaaaaagcggaaatcagggacagcgcttgtggtaatgcagtggcaacaaagaaggtaggaactcattttaagtccatttaatttttaataatatgctcgtttaaatctcaataggcgttgtactatgcccaatcaaagaggacgatgaaaatccggacattacaggaacttcagcaagaaataagcaagcctctatggctgacttatcgtggaagaattgcacacgaggaaagcgatcacttccaagaactttttttgctagagtgtacggacgtgatggcactcttttcttcgccccgtcagttggcgctttttaaacgaacggaaacgattgtttgtgatggcactttcaaaatggcaccgcgaggcatttatcaagtttaa

SEQ ID NO: 71095 - DNA, 1609 bp, Heterodera glycines
atgaacacaaaatcccaagagaaaccacctgctgaaatctacacatttctccatgatcattttgtctcattggcatcaaaacaacaatcatcatcaacatggatatggaggtattatggcgttactcaaaaacaatcaaaatgggttactcaaaaacccattcaaaataaaaatatttatattaactgatcggaagcaatcaaagttttaatatttgatttcattcgatagtgctaaattttctctattagcctttaaaatttaaaaaaattttgttgactttcaaaaaagttgtggtcagaaggacgcaaaaaacaatgtttttcaaacacattggtcaaaaaatttttttaaacttaacaaaaattttttgaaattatttaggctaacagaaaaaattaaggcaatcggaaaataaaaatcaaaaatttggttgtttcttaacaaaattatagtcaactatttttatttggatggtttttgagtaacgcccaatttggaggtttatgagaatgacctattaaatacagacacggacacggtggatatgaattgtcggaacaataaaagccacggcttctctaggccaaaattctcataaattttcttaattattttacagtgaaaaaaaagcgcgaaataaactgtgcatttgtcaattttggacgagtgttggcaaaacgtttgaaatttgttcatgaaaagtttaacacatttgctgatggtaaagaaaaagaatgtggtggcagagaccctcacacaacaaattattatgattataagcatcatcatgctttcatcagtgataacaatacaccggcggaagggtaattaatagggacgcgacttttagtgacgaaaaagtgccaaaatagttgactaaaatagttacgaaaaagtgccaaaatagttgactaaaatagttacgaaaaagtgccaaaaaagtgacaaaatagtgaaaaaagtccgcaatagtgacataatttttagccaaaaattgagcaaaaaataatttttattcactgattgcagttgcaagtgagctacatttcctttataaaattctcttagcaaatattcacattttttaaattaaaaattttgtcaagaaaaaaaaatttggtggaagaatttttgaaaaaattttccaattcttagtggtgtatttttaaaaaattgttttgtcgattcttaggggtgtatttttttgaaatttttttagatcgattcttaggggtatattttttgattttattgcatttttgttaacaaattttccaaaaaatgtagaaatagtgaaaaatagtgacaaaacgccaaaaaagtgaattttcatttaagtgacgaaacgccaaaatagtgatttctctagtgacgaaaaatgacgtccaaattaaaaaattttaatgcataaatgcgttttttgagcacctttcttcaaatcaatcgagcaaaaaaaagtttttccactagaaatcgcgtccctagtaattaaattgataattaattaatttgcagacaaggattagggttcatatcttttggcccggaccaggccgttttcgcgtgggcccagtttttgaactgtaatttttttattgtcaactaa

SEQ ID NO: 71096 - DNA, 611 bp, Heterodera glycines
atgctaatgtttgaagagccgttgtggaactatggccaagtaattggaattgatgccaacgaagcacagggtaaagaattgaacataattaaaactttaattaataaaattcattaattaattccagatgttgtgaaattctgtgaagaccttcagcagaatgttgtcagtgcagcactgaattcacccatacgaaaagctatgacagttatgaaacttacagaattggaggaatttcaatatttgaactccattatcaatagcttaagagatgaggaaaatatggatgaattgaacatttttgctgaaaattatgacaaaaaattaatgattgacaagcaacaatcattaaaggaactgttggcaattttaatgaaaatctacgcggactatagcaatgccagcaaaagagaaataagcaaaaatgccattcggttgacacattctggaaacgaaattttacgatttggacaaattttatatgaaacgttagagaatttggaaaatttgccggaagaccgcgtgaaatatgatgaaaatgaacaattgctaaccattccattattatttgtcaatcatttgcttgagcgactcaatgaattcattgaaag

SEQ ID NO: 71097 - DNA, 376 bp, Heterodera glycines
atgataattcgctctccgccattgacacgacaaagagcgttgaatttgcgaacctttgcgcaaaaccaaaacgcagcggttgaagagcagcagcaacaacaacaggttgaaggagttcatggtgaaaatgaaccattggttaacgctccgatctcgccaggacttaaccgaaatttgagtttgtcggcggaggaaaacgaacaccattttagtgaaatggaagcagcagcagcaaatgacgatgaaattcggcggcgccttctgcatgtgtccatccaatcgaatttgccgccgcgagcaaacggtggtggtaacaatggtgccgaacagcagcaaattcgcaatgcaaatgttggtcacgaggactttgttgaag

SEQ ID NO: 71098 - DNA, 282 bp, Heterodera glycines
atggccaaattggccgagggattggaaattggcgagcagttcagcagagagtggggacggacggattatgagggagggaaaggtgggaaaaatttaaatatttaaatttgaattgacattttgtaattttaaataattaaagatgaagaagacgaagaagacgacgaagcggacaacacgtcaacgacggattcgatgaacacaattgttgaatttggcatttgcgaaccatcggaaaatgggcaaaatcaatggcaaagcgaaacgatggagaaacgaaag

SEQ ID NO: 71099 - DNA, 582 bp, Heterodera glycines
atgaacaaaggcaaaagcatcgttatggctgactccaaaaaggaaggtgaaaatattgttaattaattattaaaattatatttttaactgaaggcacaacgacagtgaaaattccgcaccgttatggagcagtgtcggggatgagtggccaaaatgccagtccaaaagcctctcaaattggcagtccaaaaaacagtccaaagggcactcaaattggcagtccaagatccattagcagtcctaaatcaacacaaattggaagcccaaaaggcattcaaattggcagtccacgaaaagaaaagaccaaattatcttcagctgttggctcttctgatttcaatgttatcgacgaatgtaagaagtcataattgaagacaattccaacattttaattaataatttagcaaaagaagcgaaaaaaccaagccaattcaaaccgagtccgtccagaagccaaaataaacgcgaacagcagcgactcaatgttactattggagaagcgggaagaggtaattaatgaaataattattaattgttctttgttatggcctaacgacatatttgggaacgtttatttaaaaa

SEQ ID NO: 71100 - DNA, 1021 bp, Heterodera glycines
atgccaagtgcatttgaaagaatgccaaggaaaaggaaagagtgccaaggaaaaggaaagagtgccaagggcgaggaaagagtggagtgcctgagagagagatatcaaatgggaaagaaagtaaaaaagagtgattgcaagggatggacattaacttttaatggacccgcctgcctcatttgccgcttttctctaaaaatgattcccttttgtacagtgtgccaacacagaagataaaatctattctgaatgggactgtccccaggcgttggctgtgcataattatgccattcaacaggaggacgaattgagcctaagcaaaggcgacgtggtgaacattttgcggaaaatgaccgacggatggttttacggtgaacgaacgcgcgacgcacaaatgggatggtttccctcttcgtatgttcagcaggtcgcactttttaattcaaatccattaaaattcatcgtttttttaatttaaattttaaaaggtccaaggccagcaaagagttttgcttttaaggtgctgaacgaccacaacaaggccaacagtttcagacagaagctgagcctcgtccagcagcgttcctccgccggcgatgcgaatgtgttcagacgcggctcctccctgcaggcgatagcccacgacggaggcgagctgtccttctcccatcctccgcaccaacgcgaccacccgccgtcgatgagtcggttgagacgcatgagcagtcccttcggcgtgctttcccgtgacgcataaatggcgcattggcaacggagttatcccattctttgacggcgtcgttaatcatttcccccttccccttcccttcatcagatgccccttttaaatatgcttttctcagtttctcataatgttcccgttcccattgtttctttgtaaatattattctaaaatacaaatgctcacttcattttatttacaattcgtttttgtatcgactcatttttttatattttctgtaggagtgccgaagaagttagatagtttatttattcaaaa

SEQ ID NO: 71101 - DNA, 965 bp, Heterodera glycines
atggccgaaaggcacacggcacacgcgtacaaagcagccaatttgagctgctcagtcgagtcacgcgtcccattcactgttttttggcttttcgagggaaaaaccatcggagggcccctcttttatgagtaagaaagtggcaaaaagccgccacagtcggcataataccggcgaaatgttgccattttgcgaacagttccaccgacacttccctttggacaattgacgcggttacgccaaagcaccgcggattgtacacgtgccaagtgaggaacgaatgacagcagattatgtccgtttgatagtttaattttattttcaggtggtcagtccccagggcaatcactcggctcttacctttttggattctcgaggtgattgattttgccgattgcttaacaccggtcattaaactccgttcagagcctccgccgcacattgtcgcaattcgcaacgaatccgtggccatccacggcaccgcttttctccactgccgcacccaaagcattgagcaagcgaaaatcacttggctgcacaaccaaagcaaagccgtgggcaattcggccaaagctgtgctttttttgcttttgtttttcattgcttttgtaaaaggcgcggggatactgtatctttcgattggacttctgtaattcgatgagcataatttaaaacgcagcaattaatacgattgctcgctttttaagaaaatatttttgagcccagtcaatccaagaatccttaatcacattcttccttaaacatttccctttttaattggttttgaatggccatctcattaacttccttttggcattcgcccgtttcagtacactttcggtaacaacggcactttgcgcatttttgacacttccatcgacgattcgggcgagtacaaaagccaagctcgaacatcgggaggcctatcggaagctgtaggaaagctgaacgttctgcaggccccgcgg

SEQ ID NO: 71102 - DNA, 1348 bp, Heterodera glycines
catgtcactacaacaccatatcatcagcagtctaatggaatggctgaaggggctatgcgaatcatggcaaatattatttctcaaatggtaaatgaaaaagggaataattgggatgaaattctgccgcacgctattttttcatacaatatttcaatacattcagctaccaaattttcgccattttttatcattaatttacgacagccaaaattgccaactgatcggttacttaaactcccatcccccgatgagcttgtgtccgatatttcggtctatacaagaattcagactgaaaaagcagctaaagcgtgggaaattgtgcgaaatgaaattctaaaagcgcaggaaaggaacaaagaagagaatgatcaaataaggaaagcacatgaaagagaatttgaaatcggtgatttagtgttggttaaaaaagaagttttgggccataaatttgatcaacgttggttgggaccaatgcgttgtgtgggagttgaaaaggagaaaaaaaatgttgttttacagtcaattgatggaagcgctaaattaagaaaagtacatcaagaaaaagtgaaacattttaatggaccagcaattcttcctctaaggcagtcagacgaaccattaaattgggaaaagtacgtagatgatccgaatttagaacaggaagaaatcgaaggtgaaagttgcgaaagtgactgtgaggaaacgcaagaaaatgaaaatgcgcagtcaaaaaacaaaatgggattaaaagtttaaaaatatggctttgagagttctgacgatgagaatgattggagtattgttgcgtttgtaagagaaaaccaaaattctgaggatgatgaaggcccggaagttataatggacagaaacccccgaaatcgaaataatgccaattttcacaatactcgaagtccttattgagggttcatttactgaagtatacaccggatggagagaccccgtaacaatctcattaatctcaagcatatctgaaaacctagtaagggaaaattgggaaatttatgttaatggaaatggctcaagatttgttatggcatggatttttggcgaaagtttcgaaattttcattgtcaacgaatttgatcaaataatgttgggaattgatgcgcaaatgttgttgggtgaaagatggcgaataaaaactgaaaatgaaattgagacatattgggaaatctacttcgatgaaaatgggcacgaatttgaaattcccagaattcctgaaatccttttttcagaaaaggaaaatttggaaattgggtatgggccaaactttgtaactctccgagattcagaaggaatgataagtgatcaggatgatttagaggaa

SEQ ID NO: 71103 - DNA, 922 bp, Heterodera glycines
atgccaaaagaaggacaaagtgcccgaaaacgattgcgagagggatcgccaaacaaaggcgaattgtttacgaacaatcgttgggatgagaagatgcgcgagatcgaagaagtgaacaaaaactcaaaagaagtgcgtaatgccttgaatagacttttgacgatgcgtcaaaaaatctttgaaatacaggacgaagcccaagtggcgacgaaggaattgcaaaaagtgttaagaaaaatggagggaaaggaaaaaagtggaaatgaactggaggatgaagttgggttgccgggaaatttgcgtgaagctcggtgctttaaatgcggacgttctggacattttgctcgtgaatgccgtgatggtggagacgggaaccgtggaagcagagtttggcgcaattggggcgacgctcgaggtcgaacgggacgtggaacgtggcgaaatagcgaccagaaccaagccgatgagggcccatccacttcgacgtcatcagctcacttgacggacttcggcacgttcttcaattacatcggaggaaaccaataaacgcaaagtgattggacattttcatttgatcggacattttcattaattaatgctaaattatattactctttaactttcattacttctctatttttgaattgtatcagtcaggaccgatgacggtctattcggagggggccgatgatatacttaatttcttatttctctttttctctctcttatcctctgatcattgttcgcccatcaatgtcatcccgggggcggaccttcttttcactaatcgagaccctttataagtgttcatccgcctcttctctctctcagtcttgcccggggctcccgcccatcagtctctgtccccgagaccgaatcgggttgggggttgcccattgtatcctgaacattggacaccaga

SEQ ID NO: 71104 - DNA, 699 bp, Heterodera glycines
tttggtgcgtttcagagcaatttctgaaaaaatatttatgaaataaaaaaatcgattttttcaagtgtccgtttggggtactcaaacaattatggggagcaaaaatccaacgcagaattaaagtacagactatagggaagctattcccgaaggattcggtctccccataaatctgggcgcatcggttcggggggactgccccgaaaacaaaaaaatcgattttttcaagtgtccgtttggggtactcaaacaattatggggagcaaaaatccaacgcagaattaaagtacaggctatagggaagctattcccgaaggattcggtctccccataaatctgggcgcatcggttcggggggactgccccgaaaacaaaaataaatcgattttttcaagtgtccgtttggggtactcaaacaattatggggagcaaaaatccaacgcagaattaaagtacaggctatagggaagctattccggaaggattcggtctccccataaatctgggcgcatcggttcggggggactgccccgaaaacaaaaaaatcgattttttcaagtgtccgtttggggtactcaaacaattatggggagcaaaaatccaaggtaaaaataaagtagaggtatatcgaagctattcccgaaggattcggtctccccataaatctggcgcatcggttcagggtactgccccgaaatc

SEQ ID NO: 71105 - DNA, 226 bp, Heterodera glycines
atggtgattagaagaggtacaatggtgattagaagaggtacaatggtgattagaagaggtacaatggtgattagaagaggtacaatggtgattagaagaggtacaactgtgattagaagaggtacaacagtgattagaagaggtacaatggtgattagaagaggtacaatggtgattagaagaggtacaatggtgattagaagaggtacaatggtgattagaagag

SEQ ID NO: 71106 - DNA, 788 bp, Heterodera glycines
tccgcaatggcacttttgccaatggctctttttctcatattgtcctcccaaaatgccaattctgttgatcaccaacggagtcaccgaatgggcaggcaaagatctttcaacgaaggttcgacaagaaaaccacgaaaaatttgaaaattattagcggaattatatttaaaattgattatctcataaatactccaagttcagatctccaaatcaacgtccacccgcccgaattgagcgtccgcgaggggcgcgaagcatcgtttgaatgccgcgcacggacaacggacaacagtttttacccggaagtgaatttagactctcgaaaacccataaaataccaaattcgagatttaattaattaattttgtgcaggtgaggtggacacgggtgggcggacgattgcccgacggagtgcgcgaggggggcgggagactgaccattccgcaagcgcagctgcagcacgcgggacagtacgcatgcgtggccatgcacaacggacggacagtggaggcacacgcgacgcttcacgtccaatcatgtgggagacacgagggaggaggacatttgaaactaagaaaatggggacacattcggcttaagatgggccccaagagttgcaaggggacaccaacgcagtcgcagccggttgcatggcggacgagcgcgcgtgtggcagcaacgaatgtgtgaagttggactacgtttgtgacggggagccggactgtcgggacagatcggacgaattggagggaaaagggaaaggggcgaagcagaagcaatgatcggaa

SEQ ID NO: 71107 - DNA, 503 bp, Heterodera glycines
atggcacttagaaagtttttaaaccaaaagaagaatcaacaagtgtgcttcaacgacgaggtcgaacggcatgagtttgagcaggagcttagtttagacataatcggcgaattcatcaaagtgccatttaaagatccgagaaaaggctacagtttgagcatccgatcagcctcttttttgggcgtttatgatttggtggaggtgaaaatgagtaaataaaagagatgagccaaagttttttgaatgtttagcgtattattgcggaggatgccaattgtgtgaatgtgccaaacaaacacggctggactgcgctgatgtacgcggcgcaaggcggcaacgtcgacatttgtcaacttttgctgcaacacggggcgcgattggatgtgaaaaatgggcagggacaagatgcttacgaattggcaaagaattggggccacaaaagggtgatggatctgatcaaagcgaaaacgtatctgagacagtccaacaacggtaaaaagtga

SEQ ID NO: 71108 - DNA, 170 bp, Heterodera glycines
agttgcaatacgtggattacatggacgagttggccaagttggtcggctgcaagccgaaattagtcggacgcattttcactgatccatgcctggccaaagttctcctcttcaacggcctcgtgccgtaccaattccgattggatgggccccaccgatgggaaggggcgcga

SEQ ID NO: 71109 - DNA, 553 bp, Heterodera glycines
atgggaagaggtggaaagagcgttagacgaattgattgagcaacgccgccagcggggcgtactgcccgaggtaaccgaatgggtaccgcccgctggcggagggaggaggagagggaggaggtggaggggaagtcgacaacttcgtggaagtgctctgttggtttgtcgtgggagattggacggggcagtctcaccggatacatcatccgcagttctttcgttgacccggtaaaattttcgattagatattctccctattttaaacctagttttacaaaaatgcaaagccaggagaggaaggagaccactttagtggcctagtgggtggacctattaaattttgttaaattcagaaaattggctgatgtggtttgtcccccacaaaaattttgatttcaaaatttaaaaaaatcacaggtcaacggaaagctgaccaaacatggccaccggcggataaacaaattgatcgaacgcaagaaacaatggacgcaaaattcatgatcaggctttttcaaaccaaaattcattgtaaaaattttttaaaaataataaa

SEQ ID NO: 71110 - DNA, 314 bp, Heterodera glycines
atgacagaaggaaaggcgtattatcgcgacgatgaaggggattacgactacgggctgaaggacgatgagtcggactccgaatgttcgattggctatcgtcctaccattgtcagctcaaataacccaatttctttgcttaatctccgacttaaggtgattatggggctgaagcggagcggtaaaacgtcgatcaggaaggtttgtcaatccaaatttttaaatttttcttattttgtctttttaggtggtcttccaaaaaatgagtccgaatgagacgctttttgtggaaagcactgctcgggtgaccaatgaat

SEQ ID NO: 71111 - DNA, 568 bp, Heterodera glycines
gtattgcagatttgggaaactcttttcgagaaactcgaaaattcaaaaatgccattgacgaattgccaataaaatcagcgcaagggaatgcttcaaagggggaaagtttttctggacaaagtaacgaagataaaggtaaaaaaagtacagaaagcatgaaattctgttttatttatttttggcgtaatcgtcgcagcaggacacgcaattaatttatattaaactttttctaagtgcttatgttttacatggattagtggctaagctttcagttcatcttcatttttgccttttcattttttgaattattatttaattactaacgcataactcaactttgcacctttggttttcaaaattatatcaacaaaaaattatacttttatgaactttcttatttcattaaaaaaaagcttcgctttgaacttttaattttgtaatttctttttttctgtcagaaaattttttttagtaaaaattaaaatcacaaattccgttggcaacaaagacgtgcaattaggacgaagcagaagcacaagtataattggaagatttgccaaggaaaatt

SEQ ID NO: 71112 - DNA, 828 bp, Heterodera glycines
atggacaaatggggaagaattaatttttatgtgtttgtggtcacattagttgtaagtttagaaattttttattttggaataaatttttttttattttttacgctcgaaaaaaagttttttttattgaatttgtacgattgatgctcaaaaaattttgcttttgaataattttaaaagaaaactgaattttttctaataatttttagttttataaaattttatggctgcggccattggcatcgcaggcccataaattctttgttttttttaaatatgcccaacaattccaaaattagagatgcttacatatctcgaactaagagagcagaatttacacgaatattcgtggcttttcagctgatgatgagtgatgagatgatgctctcggtgggcttcttccatttgccatggatttggtcgcccgcttttccccgcggggcgccggaggcggaagagagtgacgacccggcggttggcacaatttctgcgctttctctctcgctctttttttcttattgacctttaatgaacacactctctctctctctctcgctccctccctctgtccctgagctttttgtatatatccactctcttgttccatgtttttctcggcctctttcacacttgctctctctctctctctctctctcatttctctctctctctctcatttctttctctctctctctcttatctctctctcactctctctcatttctctctttcctctcaaattgcattttcgtgtatactttttttcgctcctttctcttatgctctctttcttcatattagaaaacgaagaaaaacaacgaaatgagcaga

SEQ ID NO: 71113 - DNA, 142 bp, Heterodera glycines
ctttctcaataatgaggtaccatttcctgtgaatatccggttattaatgactttgtttatcttaatcagcgtgcagcgtgaattttgtcatgtgacattaagctatgccaaatttagtaattctgttgacaaagacggaaat

SEQ ID NO: 71114 - DNA, 396 bp, Heterodera glycines
atgccaccacagtacaaatggatggaatttaatgcatcgttggctcatccatcagacccagtcgtatttctggtaattttttcttttttcctttctctcttattttttattattatgtttaaggacattgaaagtgactcggcttcttgcggtaattttttgtttaattaatttcgaaaaaatgagtcgtggccagttcggcgcttaaaataaaatactaaatttttttggaaaaaagtataaaatttcaggacgtataattattgacctcatggttgctgctgtgccacagacgacggaaaatttcaaacaattgtgtgcaggagcattgtaatattttattaaaattttataaattaaatattatattcgaaattttcatgctattagaataaa

SEQ ID NO: 71115 - DNA, 119 bp, Heterodera glycines
tgtccgtttggggtactcaaacaattatggggagcaaaaatccaacgcagaattaaagtcagactatagggaagctatttccgaaggattcggtctccccataaatctgggcgcatcgg

SEQ ID NO: 71116 - DNA, 678 bp, Heterodera glycines
aacaaaaaaatcgattttttcaagtgtccgtttggggtactcaaacaattatggggagcaaaaatccaacgcagaattaaagtacaggctatagggaagctattcccgaaggattcggtctccccataaatctgggcgcatcggttcggggggactgccccgaaaacaaaaaaatcgattttttcaagtgtccgtttggggtactcaaacaattatggggagcaaaaatccaacgcagaattaaagtacaggctatagggaagctattcccgaaggattcggtctccccataaatctgggcgcatcggttcggggggactgccccgaaaacaaaaataaatcgattttttcaagtgtccgtttggggtactcaaacaattatggggagcaaaaatccaacgcagaattaaagtacaggctatagtgaagctattccggaaggattcggtctccccataaatctgggcgcatcggttcggggggactgccccgaaaacccaaaaaaaaattttttggataaaaattatttaaatgaactgactagataatatttaaaatatgttatttctcttcctttcagtatccctgcaaagtttggtgcgcttctgatcagtttctgaaaaaaaagttaagcctaaactttttggcctgtttaaaaaggaattaaaaattttaaaa

SEQ ID NO: 71117 - DNA, 1207 bp, Heterodera glycines
atggcatttccttgccatggacgcatttccgatcaaagagaagggacattttcgatggacattgagaaattgtcggaatttgcgcgagaggaagtgaacagcaggcgattaagcaaacacttttacacaaaaggattgccatggaaaatttgggcacaaataaggacgaagaaaaacagcactgaaaaatatctgggcgttttcctatggtgcattgctcaaataattggtggaacaaaccaatttaaatttgaaatattttactttatgattaagatgaaaattggagttgcaaatgttcgtcaactcttcgaattgtttcacaaaagagcggaacggaagatgtaacgagaaaatatgaccatattttaaacaacaaagtgaacagatggggatttccatttttcattacttttacggtcagtggcagtaaaaatattccttttcttcgcttaataaaattgcgaaattaagcaattgatggacctggacaaaggaatttacgacaaaaatgaggacaaagtgacattggccgttaatattaaagtggaagaagaaaaagggacaaaaaatgcctgaagaaataagcgctcattcacccacccactcattttctgttgataatatataaatatcgaattaaacagtttcactgatccaagacaattaattcatgggttctttctttggtttgttgggaaacaaaagcaaaggcctcacttttacactttcgcttaattaatattagggttggaaatgtcggggtcagcaaggtcggggtcggggttgaccaaattgttaggtttttcaatttttctccttataccatatagtcaaaaatctttatattattttagcataaaattttttattattcataataataattttatgtgtttttttatttctttttatcataaatatttttgtataaaataattaaatatgtataggcatttttatggccaatttccagtgaaaaactgtaaaaaatagtcaaattttcaaattttccagcagaccattgacaattcaacggttgggcaagataaagaacattggtcgcaaattttctcaagctctgccggattttctttattttattttatttttcatttgcattacccatcgacaggatggggattcgaaaatttcatttcctttgcggtgaatgccaattcaaataaatgagcaattgacattcaca

SEQ ID NO: 71118 - DNA, 1277 bp, Heterodera glycines
atggcaacagctaaattaaaatattgggttctgcagaatgaggcacaaatggaaccgtattgtgagcggagtgtcgcggcacaacagaagttgggctattcaacaaaagattctgaagagatggtggcgattccaatggcattccgtgccaatttgaagatggcggcgattcaaatggcattccgtgccaatttgaagatggcggcgattcaaatggcattccgtgccaatttgatgggtgtgcaccgtattggaagggatttggcactcgcggtatgtttagttggaggagtggcttttgcgcatgcattaaaaggcgagtgagcgaattgggccgattgtgaactgccgacgcatttgtttggtacatttcgttgaatggcatttgttgccgcgggggcggtgggcccataatttgccctgtgaaatatgcaacattagctgttttttgatttattcaataattcaaaattgcgtaaatgaagccaaatgacggattactgtcagtttgtacggtagggacgggttccatttgcgaattcattgaaaatgcaaagtcgtccatttggccaacagtggaagtcggtagtggcggaaacatctgagagagggaatgccaatgcctagtaatcatcgcgaatggcacttccttaaggcgttttaccccgctgatttggttggattgactggccgaaatttggtgaccagcagcagccgcggaattgtcggcatggccttggccaattccgagagccatcggaaggagtacatcatcgaaagtttggccagccatttggtcggaggaggacccaaatggtagcgacgagtggtacggaagctgatcactgtgctgctgccaatggtccgacgaaatgaacgcttcggtctgttgctgaaacagttggtcaggccacagcatttgttctgaatgaatgcgaatggcacttcatcaataggcctaagcctttttttgtcagtctgaaaagctcaaaaaccgtaccaaatgaaagtgtttcaaaaccttttggcctatattttaacatttttttccgcatatcgcatgatttccaagaataattaatgaatttggtgcttctaagtaaagttacgataaaatttgtcaaattgactttttaactaaatttcattgcgtttaccccaatttcaaaatttaaatgcattaattttaaattttattttagcctccactcacccctcgttttgccttcgttcgccgtcgttcgttgttcgtctttgcctatttgcagatcgaatag

SEQ ID NO: 71119 - DNA, 952 bp, Heterodera glycines
atgaaaccaaaaaaatcatggacttatgcggctgtggcacatactggtgccggccaaataagggctatcgtggattcggctgttgcccgagtgactacgaattcgtctgttgccatgttggcaatgtaatgggaaaatgacaaaataaataaaattatattacaagaattttttaaattatttttttatttcatttagcaaacaattcaaatgtcaacagtgacgacagtgacgccggttggacatagcttttatcaaaaatatattaaatatgttaaatgaaaatctttaaattggttgagtttcaaaaaatttattaatggtcaaaaaattagtccttgagtattttgttaatttatatttttgtaggaattgaccaccacaacggtaacaacccttaaatttttcagaaaaattcttttttatatttcttagactttgccaacgacgccaaatcttggcaaaattgagaacgatcctccgcttttttgcgcgttgaaaaaaacctgcaatccgtcgtacttttttattattaattaaacaaaaattttaatcaaaacttttaaccagcaataatatgacgggctcggcgaaatttggccggcgtttcaacgcacataaaaaaaaatgtgccgcattgatcaaacggcagcagtcggcaccatcgacggagcttaaatcggaattgcgtcaggcgttcatggacgacatcatggaaggatcctttttgatggattacattcgtgatcattgatcagtgctagattccggcctcctcccttccaaaaagccacaaaatataattgctttaacctccccccccccccccccccaaaaaaaaagcccaccaaatttaattcctttttttaattaaactttatttattatttatcaattttctttttgtaaattatctgaatattttcctattacgcattattatgctaataaa

SEQ ID NO: 71120 - DNA, 1050 bp, Heterodera glycines
atgtcaccaactcgcgaactcgctcttcaaacatggaaagaggctaataaatttgctcgtaacctcggccttcacgtggtttgtgtatacggtggagtcggtatttccgagcaaattgcagagctgaagaagggagccgaagtaattgtgtgtacacccggtagaatgattgacatgttagccgcaaacaatggtttctaaacgcaaatgaccattccttattttattattgttcaggaaaagtaacaaatcttcggcgagtcacttatttggtcatggacgaggccgaccgaatgttcgacatgggttttgagccacaagtgatgaaaattgtcaataacattcgtccggatcgacaaactgtgcttttttctgccacatttcccaaacaaatggaagcattggcgcgaaaagtgttggagaggccggtggaaattcaggtggatatatttttacaatctccattagcattaacggcataaataagtgactaattagttagtaatttatgatattttcagtgaattttggaaataaccattcaatacttcaaaatatttaaagaatcttattgtttagtcttttaacatgacattttaaggttggcggacgaagtgtcgtttgcaaggaagttgaacaacacgcttttgtgcttgaagagcaccaaaagtttcttaaactgttggaattgcttggccaatattgggagcatgggaatgtgttggttttcgtggaaaagcaagaaaaagccgatgatttggtgtcccaactgatgggcgccgggtacaactgcgccccattgcacggcggcattgaccaggacgaccgcgactttaccattttggacttcaaaacgggacgtttgaagctaatggtattattgcttcgtcaaaataagtttcaccatttttcaaaattaaggtggccacttctgtggctgcgcgtgggttggatgtcaagaaactgattctagtggttaattatgatgcgcccaaccattacgaagactatgtgcaccgcgttggtcgaactggaagagcgggcaataaa

SEQ ID NO: 71121 - DNA, 739 bp, Heterodera glycines
atgtgtgtaggttgttatcttgcgatttcaacaatggagaaagtatgtgtttgtatagcaggtacttttttaaattaaatatttatttattttaattatttttttttttttgctaaatgtttcttttttttaatttgcccttttgagtgaataaaaaacccttttttgtccatattttcgaagttgacttaaaaatgctttcaattttaaattcacagttattaaaaactttgtataaacagcaaaatttttatctttttcttactaaaatcttctcatactttctaaattttttgaaaatttggctaataaattaaaaggattaaattgaaaaaagaggtcgccaaagaaattaatattaatttttttaatataaattatttgagttaataaagccttttgtttgctcattcttaaaaatcttgcgaattattctattttgttttacttcttttttagtacgcgtatttcttcttcgctgtccctttttcgttcttttaatcggagtgctttttcaatgctttttggaaggaatcgcgttacaatgattgaggcaaacgaccaaaaataaaaataaataaaataattaattaattaattcaaattcaaatttcagtcatctcagttccatttgaacgcgcctgctcgactacattttgacttctcaattacggtgcatatttgctcgaaaatattaaatttcatagtttataatcctgctgatcctgtctgagctcga

SEQ ID NO: 71122 - DNA, 622 bp, Heterodera glycines
atctccctttttgatagaaaaagcatcagagtgctaaaattaagttgtaaataaaatttggtgcgctttagagcactttctgaaaaaaatatttatgaaacaaaaaaatcgattttttcaagtgtccgtttggggtactcaaacaattatggggagcaaaaatccaacgcagaattaaagtacaggctatagggaagctattccggaaggattcggtctccccataaatctgggcgcatcggttcggggggactgccccgaaaacaaaaataaatcgattttttcaagtgtccgtttggggtactcaaacatttatggggagcaaaaatccaacgcagaaattaaagtacaggctatagggaagctattcccgaaggattcggtctccccataaatctgggcgcatcggttcggggggactgccccgaaaacaaaaaaatcgattttttcaagtgtccgtttggggtactcaaacatttatggggagcaaaaatccaacgcagaattaaagtacaggctatagggaagctattccggaaggattcggtctccccataaatctgggcgcatcggttcggttgaagagccccgaaaacaaaaataaatcgattttttcaagtgt

SEQ ID NO: 71123 - DNA, 851 bp, Heterodera glycines
atgtgttgtgatcaccggaggagcatctgggcttgtaagaaaaagcaaaattcaaattgactgctattaaaattttgaattttcaaaaatttgcacgtttaaggggcttcggatgagcgaaatttttgccgatccgtccggtttgggggcaagagttgccataattgatcgaaatttggtgattaacggcattttttaaatgtacttttttatccatttatcatttaaggacgaagctgagaaggtagcagaaacaatttgtggaaagggcggaattgcaaaagcgtatataaaaatttatttaaatatatataatttaattctaaaaaaatcaggggtttactataaaatttagaattaaaaaaataatgataaattttttatttaatttatacatgaaataatgaattaaattttaaaaaacagttggtgctgtgacattgtgaatgccgaggaattacgacagtgtgccaataaaattcgacaacattttggtataatgaaaaattttaaaatttcatttttaaattaaaaaaaaataaattattttttttatcgttttaaggcaatgttgacattgttattgcgaatgctgccattttgttttttgagctgacccaaaatttgaaagacgatcagatcagaaaggcgttggatgtgaatgttcttggcacaattaatgtaaaaattctgattttaaatttagaaattttaattaggaataattaatttaaaatttttcagacaattcgctcctttttgcctgccatggaagctgcgggccatggtcataaggttgcaatttcttccattgccagctattttggcgaaacaatgggaatggcatattg

SEQ ID NO: 71124 - DNA, 443 bp, Heterodera glycines
atgcaccaccatccaccgaatcatgaaaaagctatcaatctgtcaatccttacggtgtccgggccgggtgagtttccccgtgttgagtcaaattaagccgcaggctccactcctggtggtgcccttccgtcaattccttaagtttcagctttgcaccatacttcccccggaaccggaagactttcgtttccgggaagctccccaccagggcgaataaatccgccggcggatcgctagttggcatcgtttacggtcagaactagggcggtatctgatcgccttcgaacctctgactttcgttcttgattaatgaagacattcttgccaaatgctttcgctgtagtccgtcttgctacggtccaagaatttcacctctcacgtagcaatacgaatggccccgtttgtctctgttaaccattatctcggtcagcaaaaccaataaa

SEQ ID NO: 71125 - DNA, 450 bp, Heterodera glycines
tgcatggccgttcttagttcgtggagcgatttgtctggtttattccgataacgagcgagactctagcctactaaatagttggctcattgcttctgtgggcacaacttcttagagggattttcggtgttcagccgcacgaaattgagcaataacaggtctgtgatgcccttagatgtccggggctgcacgcgcgctacactggcaaaatcagcgtgcttgtccttccccgaaaggggttggtaaaccggtgaaaatttgccgtgattgggatcggacattgcaattattgtccgtgaacgaggaattccttgtaggggcgagtcatcaactcgctctgaatacgtccctgccctttgtacacaccgcccgtcgctgcccgggactgagccatttcgagaaattcggggacggttagtgttccggcttcggtcggtatgcagactggaaccg

SEQ ID NO: 71126 - DNA, 831 bp, Heterodera glycines
atgagcgctaaaattatcagagtgccgaaaatcgcatgtgatctaagcctagcaaaaatggtgtaagtaaaaatcgtgaattacgctcaaaaagtttctcaaacaattttaacgcttccaattccttctacaatcgcctttatacatcccattatgaacgctaaaattatcagagtgccgaaaatcgcatgtgatctaagcctagaaaaaaatggtctaagtaaaaatcgtaattacgctcaaaaagcttctcaaacaattttaacgcttccaattcttccttctacaatcgcctttatacatcccattatgagcgctaaaattatcagagtgccgaaaatcgcatgtgatctaagcctagcaaaaaatggtttaagtaaaaatcgtaattacgctcaaaaagcttctcaaacaattttaacgcatccaattccttctacaatcgcctttatacatcccattatgagcgctaaaattatcagagtgccgaaaatcgcatgtgatctaagcctagcaaaaaatggtctaagtaaaaatcgtaattacgctcaaaaagcttctcaaacaattttagcgcatccaattccttctacaatcgcctttatacatcccattatgaacgctaaaattatcagagtgccgaaaatcgcatgtgatctaagcctagcaaaaaatggtgtaagtaaaaatcgtaattacgctcaaaaagcttctcaaacaattttaacgcttccaattccttctacaatcgcctttatacatcccattatgaacgctaaaattatcagagtgccgaaaatcgcatgtgatctaagcctagcaaaaaatggt

SEQ ID NO: 71127 - DNA, 599 bp, Heterodera glycines
atgccaaaaaaggcatttaaggtggcaagacgtttcgtcactgaaataaatttttttttaaaatgccaaatttccagggctttccagggtcgctgattacgaatccggcatccatttcgacctatatcgaacccggactcgaaatcgaacaaaaagtcgaaaattcaaaaaatttcagaattcacttttatgttcgaatctgtgcagaatgattattttctaatgttgcaatggtttctatttaattttgctgttttaatctattttagaacataaaagtgaattctgaaatttttcgactttttgttcgattttgagtccgggttcgatataggtcgaaatggatgccggattcgtaatcagcgaccctggaaagctctggaaatttggcatttttaaaaaaatttatttcagtgacgaaacgtcaggtagccggcatttacggcacaaaaaccccgaaaaaggcaaaaaaaaaaggacataaaagtcaacgtaggagcttcaaatgaagtgtaaaatgcgtttttttatgcttatatatcgaaactattgcgcagaaaaaaggcatattatgcctcaaaagtctctctatcaataaa

SEQ ID NO: 71128 - DNA, 262 bp, Heterodera glycines
atgtttgtcatctttgaatttgcccgctgctttggatgacgtgacaaaacaggagcagtgtcccgagtctattcgcgaaaagtcggccaaggtgaaaaacaacggcggaatctctgcaatgtcagcgaagataaacgaacttccatcgctttataagagaaacgatgagattttgaatgaggtagaagccgtgctaaaacaaatgccatctccccattcattgtcagacttcacgacttatcaaagaggaaaaggaaaatga

SEQ ID NO: 71129 - DNA, 675 bp, Heterodera glycines
atgaaaaaaagttatattcaaaaaattgacaaaagtatcaatgaccttaatatttaaatttaattattattttaatttttttttttctaaatcataaatcataattagcttagacttagtcaaattaatcaatcttggtattagaagaaagctctagctctacgaatcctctaatatataataatgtttttaaaatctagcaaaaatttacaaaaaaatgtaacaaaaaaattaggaaaaattatattctgaaaaaaagttaccaatgaattaaatttgtcatattttatggacatataataattaaatttaactattactgtcattgatacttttgtcacttcgtcctagcaccgtttgcttcattagtcactgtccgtttgcagttccaaaaatattttttcagtgctccgttcggccgatggcacaaatgccatgaagggtttgtgcaaattgttcgaccagcaaacaattgtcgaactgttccgacttcttcacattgacccgaaccttttgggctgtcctcttcctccccaaatgcgaattgtgctaatcgaagcgaaaagtgaagaaaaaaatggcagcagcagcagcaattcggagacggaaaaagaaaatggaaaagcaaaaaacggcacttttgatgaaatggcacaaaaaatggtggacaattag

SEQ ID NO: 71130 - DNA, 430 bp, Heterodera glycines
atgccaacgcccacacaccaacatgtggcactcggaggatggaagcgcgagcgtgttcggctccgttcccaacagaacctgaaccgtctgttcgtccgtccggcgctgtccaaagaacaactcaaagaggaatacgaagcgcgtctccgaaaacgtcaacaaaacccagctccaccggcacctccaacccagctcccaaaaacgacgaatgaccagactcccattgttgcaccaaaccagaaggaggccagcgaagacatgtccaaaccgccggaagtttttgaccaaacaatcatcgtttgttatgaagcattaaaatcattgccaccaaccgacaaaatttctcaccaaattcaatcactcaaagaacaataccctcatcttttcaataaatagttctttcagacctccaaacatttcctcaaataaa

SEQ ID NO: 71131 - DNA, 297 bp, Heterodera glycines
atgccaacgcccacacaccaacatgtggcactcggaggatggaagcgcgagcgtgttcggctccgttcccaacagaacctgaaccgtctgttcgtccgtccggcgctgtccaaagaacaactcaaagaggaatacgaagcgcgtctccgaaaacgtcaacaaaacccagctccaccggcacctccaacccagctcccaaaaacgacgaatgaccagactcccattgttgcaccaaaccagaaggaggccagcgaagacatgtccaaaccgccggaagtttttgaccaaacaatcatc

SEQ ID NO: 71132 - DNA, 710 bp, Heterodera glycines
atggaggagaacattgaaaaatttatcactaaaagattattggaagacattgagaaaatgaaggaaaatgcccgggaaatgatggaaaacagtgaaacattgaaggaaacctgtgaaaaactgaaggaaaatggtgaaagattagaggaaccaaaaaattggaggaacggtgaaagattggatgaaaatggtgaaagattggatgaaaagggtgaaagattggatgaaaagggtgaaagattggtggaaaatgccaaaaattggaggaagacggtgaaagattaatggaaaatgccaacaaaatagaggaaaacggtgaaagattgatagaaaacagtaagaaattgttggaaattgatgaaaaattggaagaaaacggtaaaaaattgaaggaaaacgatgaaaacaataatgaacgcaaaaaaaaatgggaagaactcaaaaagtggagggaaatcgctggctgtgagaaatagctgggctttttcctattgtacgacgctccaaaagatggtaaatgaaaattaattgggcaattaaaagtgctaattaactgattaattggtttgaagactccaatttgggctgcatttgttcggcaactcttcgctttgtctcacaaaagagcgatgtgcgcgatttccagcacaaattcgacgacgtaacgatgaaaccgggcaactaactgctggggaatccccgaatttgcg

SEQ ID NO: 71133 - DNA, 366 bp, Heterodera glycines
atggaacattaccaacaaaaacgtccttcgaattctccattcgttgatattcttcccaaaaaaccccgccaagacttagtcatcaatcaaattttgggtgttgtccaacaaggaggaggagatacatcaccttcaaaagaagctccaaaggattatgtgcagaaattgggtagctctgttgaacatgtcgcccaattccactacaccaaaatgaaatctcgcttcagtatttcggatgttcctttttaccccgaaaggcttttggctggaattattccccattgtattgatagtgctacaaaggccagccggggacgggggaatcgagccactcccccttggatgtttgataaccagtcttctttg

SEQ ID NO: 71134 - DNA, 343 bp, Heterodera glycines
atggaacggccgctaccactgcctcagttgattgaccacggcggtgccctttttcacacttcggccattgataaaagcattatcggagaaaagaaaacgcagcggatttacccgattttagacgaccttttttacacaaacacaaatgagatggacaacgagaagtcgaattcggcactcgcacagacaatgagttgctcttcgaccactgccagtgactcccattcttcagaaaacagcacttcttttatcgcttcttcaattggccttgagattgcgccttctccttccaatcccttctcgtcgtattgcgagcctttcgatggctatttaaaatttgatg

SEQ ID NO: 71135 - DNA, 1606 bp, Heterodera glycines
  unsure (1)..(1606): unsure at all n locations
atgctttcaanacgcaacggaagctctgttcaatgcggaccgtcgaccaaaaaatgggatttccgttcaatcgggtaagcgttaataaaatatttaaagaaaatattaagagacaacgtaatcgttttctaccaattaaaaaataaataaattttaggaacaattttactgaagaaatggaaaattataaattgctggattatcaaacgactacttgccaaaaatttggatttacgaagaacattacggaatttcgtgtcaacccggacgggggacgccctgatgaagcaatgagggaagcgatcgacgacatgataaaggtggcttttaagactacggaagaaaaaatgaagcgaaaagtgcggatgtttggagtggcaattacgggtgccgggcttgctttcccggtatgggtaccgtacagggcgtacccgcagaacaatgcggatgttatcatgcaggagattaataagctggggcagagcggggacggggatgaaaataagaaaatgcttttattatcggaaccagttactatgaaaattacttgcgtgaccatgcccagtggagaggggccgaggaatgtccacaaatttgactttggattgaaggaacaccagcggatagggtaagtgtttttaataaaataaaattaaaatagaaaaaaactaaaataaaaaaaaatcaataaataaatttaaaataattatttctaaaaaatttaatgaagcaaaaaaaaatttttttttaaagaaaaaaatgaaaaaataataatttaatgaaacaaaaaaaaacacagaataaaattaaaaataaagaaagtaaaaaataaatttaaaataattattttaaaaaattttaatgaaacaaaaaaaaaaaaaacttaaaatatttatttttaaataatttaattaggcaaaaaaaaaaaaaaaaaaaaaaagtaaattttaggattgtgaatactgataaattttgccttttttacgcactggcgtcgtcgatgaattatttaattatggataaatattcgtttattcgttttatgaagaacttagcaagacaaaaggaagcggctgttgaacttttacggaattgtggaattgatattaacgaatatagctatggtgtggagcaattgccgaatgttcagaaatattgggtgggttaaatgaaaaaatgcaaaattaataaatttttcaggatgagatttaccccggaaagtaccgggttgttgcgtttgagaagtctgcagatccgcggaaatcgatccgtgttttgtggaagggccctatgggacgtgaaaatgtagtgccgatatttttggagaacggacattgggatggtctgaagaattatgtctgctttttcaaccgggggaggaagttctgcgttgaatgtgaatgcttttacgatcaggatgtttatcatacgatggattgccgggcgagatgttattactgcaatagagttggaggaatgccgtgtcaaaaggagagtggagtgaagattgaatgcccgaagtgccaccgttacttttataattgggagtgttacaactatcatcagggacatcagacttgcaaattatggaggcgttgcgtgatct

SEQ ID NO: 71136 - DNA, 72 bp, Heterodera glycines
aatcgaacgctaacggacgacctaatgggaaaaaatccccgaaggagagaatttaattaaatccattccttc

SEQ ID NO: 71137 - DNA, 735 bp, Heterodera glycines
atgcggcagagcagtgccacgccttacataaatgtgcaactgctgcagacactgaacatcctttttgagaacatcagaaacgaaacatcactttgtaagttatttatttattttaaaaattcctttcctaaaaaaacaattttagattttcttctgagcaataacacagtgaatgtaaggcatttgttaatgttttgtcaaaattcataatgaaatgttatcttatttcagctgataatcacacatacttttgattttgcaaacgaagaaataattgcttatttcatttcctttctgaaaacgctgtcttttaagctgaatcccaaaacggtgaactttttcttcaatgaggtgagttgtttattttattattttttaaattcattccattatttgcaaattgggtaattgtgaagctggtgcccccccccttttggaataaaaaatttttcttctaataagccatgaaaacacgttttatggggttttgagggtcgctgatcacgaatatgacattcttttcgaccaattccaaatcccgggcccgagttcgaacaaaaagtcgaaaattcaaaaattacgatttccatttttagtctaagaatggtttaaatgaccttttactgaagcactgatgatattcagaccattttcgtgtatttaaaccagggctcggatctgttcttatttataagaaatgttctgatttggagggtccaaatcttacaaaataaa

SEQ ID NO: 71138 - DNA, 150 bp, Heterodera glycines
caagaatcgcccaaaaatgatcaaaacgaagcgatgtcgaataagttagaggacatcaattctctgatgacgagactaacccttcacaaccgttctttagccaaattattcgcattgaaccaaactggttctcttttttagcatttcact

SEQ ID NO: 71139 - DNA, 358 bp, Heterodera glycines
atgggtgccgttgtctgtctcgcctcctttttggcgctgttctccgttttcccacagaatctcttcgggtattcttgcaaatcgttgtcgggaaaggaggtcgattggtcagttcgactgattggttagatttcttttgcttcccttgccattttacaggtttgtcgcttacaaattgcccgatttggggtccgatggcgacggcaccgcctttctttattcggacgcgaacaccgccgcttggcgcctttccgacaaaaatgtggaggacaaaagttcagcaattggactgaccgtctcgcaactgttcacagcaaagaaaaaaaaggcaagcagaactgtctcaactgccttctga

SEQ ID NO: 71140 - DNA, 410 bp, Heterodera glycines
atgccaaattaccattcgaatattttgacagttcgtcggtcacgcaacgaagcgttgccgcctttgccttcttatgaagacgcgaccaaacttcccgcgctgatcccagcggcacaagaaaatacggacgaacagagacacgggattgaggagagagcaggaagagagacagaggaacagagacaaaggaacggagagagagcaggaagagagacaggggaacagagacagaggaacgaagagagagcaggaagagaggcagaggaacagacagggggagaagacgaagcagtaacagaagcagcagcaggacaggcggaggaaggagccatcggccgaccaatcccccgttaattttgatccccctccccatttgacacttatactttactttaaaagggtcagccgaa

SEQ ID NO: 71141 - DNA, 578 bp, Heterodera glycines
atgagtctgattgtattgcaacagcagcagcgcaaaaaatcgctgtgcgtcgtcccccggggcgcgggcggcggcgattatacgacaagcagtgagacagagagagagaaaaatgatcagagagcaaaatggaaaaatgaaaattaacaaaactttaaatatgtacatagtttattaatgagaatccaagttggcataaactattcaaaaatagttaattagaaaatcaaaaaaatttattttaatttttttaattaaaatcgttaaagtaaatctaaaaatatttaatttctcattttttaatttaaatgattaaaataaataaacttaatttttcgattttttctgaatcattttttctaaacacaaatttcaattaaaattaacatttttttaaaccaattttatcaatatatattttttttcaaaattttagtcgccaaagcggctgtcctttcatcgccaatgtttcaacaaacaaaacagcagcaacaagccggcgcttctggcgcaaatgccacggcacaacagcaacaacaacagctgagaccaagtacaaaaagctaatttaaacatga

SEQ ID NO: 71142 - DNA, 371 bp, Heterodera glycines
atgtacaaacagttggtaaatgtggagcaacaaggagatccaatggaaaaggagcagaaaaaagtcgaattggcaccaacggtcgcggaaataggcattttgatgcttaaaaaacaaaacaggaaaattaaaatggtaaaaaaaatggtgcaaaatggtaatgccaaaaatcgaagggcacttaaattttttaaaaatatatccaattacgaattgttttcaaaaaatagtaaatttttatagagggatacatttaattatgctgattaattttagtattaacaaaggtaaaagcaaaagaaaatgatcaaattaaaaaatggaaattatattaaaaaactaattaaaaagacagtgtttttaaaaataaa

SEQ ID NO: 71143 - DNA, 3994 bp, Heterodera glycines
gtctcaattgggagactattagccaatttctctatttttaatgtcagcagattgccgaccttttggccaccacgtcacttggaagcaccaagaaattgccgaaagcaagtgagttttttggcacagagaaagtgaatttggtacaaaaaaagaataaggcacaaaattgaatttgaaaaaacaagtcataaaataatgactatggcataaaacagggatttggcatggcacaaagcaacgaattttgcacataatcgctgttgaagtgtgtgacttagagcagaaaattcaacccaaagtttcggtgttttgcacagaataaaggaggaaggttccaatctctgagaattttgcttattttatagtttttgaaagggtcgaagagggaattttttaaattaagatagtctgtttttgtattttttgaaaaaatcagggtattttgacagaaatcctctaaaattgtaaaatttttacacataactcaataggatgtgtattaattaaagaaaattaattgctgatttaatgaccgattttcaatgtttgtgatcggaattctttcgcctaattatgtatataataatatttttgttcacttagccattctcgatcggcccttggctgatcgagtgctgaaaatggtgtgcttattgtcgctgatcagcgtttgcatgcacaccccgcgcaccctgcagctgatcccgcacttcacctgggtactgcttgtgcttgacgccaatgtggtggccattttcacgtgggaagtggtgctaaaggccaacaacatgggctacttcaggatgattaactatgccgtttagtctaattttttattttattttatttttaaaaacactgtctttttaattagttttttaatataatttccattttttaatttgatcattttcttttgcttttacctttgttaatactaaaattaatcagcataattaaatgtatccctctataaaaatttactattttttgaaaacaattcgtaattggatatatttttaaaaaatttaagtgcccttcgatttttggcattaccattttgcaccattttttttaccattttaattttcctgttttgttttttaagcatcaaaatgcctatttccgcgaccgttggtgccaattcgacttttttctgctccttttccattggatctccttgttgctccacatttaccaactgtttgtacattccgagctgttcgcccaatttgggctcgtctattacgattggttgggcgtgattcgatgtgttcgtccattggtgcgttatgaaatgcctaatgaaaacccaaaagtgggaaaaatgccattattaaaatttagaaaataattaatgtgtcgaaaaataagggtcaaatcagtctatttttaaaaaatgtactttcacaaaaaaaattatcaatgtcaaaaaaatgttcatatttattttttattatttttgaaatttttgagttaaaacttgttgacaaatttcattaaaattttcaaaatttttcccccggcgcctattggcaccgccgggttccatcgcttgaatttttcattttaccaaataaatctacattatttttttgtcaaattcattattaataataatcagcctaatgacttggctgatcaacaagatctttccactctttcttccaggtgattatccgactgatcagactgatgctgacattccaagtgccgcggcagcgaatacaacagctgttgaagtaataaattttgccaaaaacggacacatttaattaaaaataattttttgaaattattttttatttacatttggttttaattaaacagacgatcgagcactcaagtgcaaaatgtgaccgtgttctttttgttttttatggcattgtacgccatcatgggcattcagctgttcggccgaatggattaccattgtgtgatgcccggtgagtttaacaaatgtgcagaaattttatattcaaatgccagaatgattcatttaatgagatttaaaaactgagaaattaaaaaataattgtggatttattttctttttatataatttttattttaaaatgttattttaaacaaaaaaatagtttgtctttaaattcagggaccgacccgaagaatgtgaccattaacgatttggccattccggacacaatgtgttcaaaagaaggccaaggcggttacgagtgtcctgacaacatggaatgcatgaaggtgggaaagtttgtagttaaatcttaacatttatatttacaattttttttaaatgaaaaaactaattatttaaataaatattttatataaatttacaattataaaattagattattctaaccttttgtctcatataaaatatttgttcagctagttctgagtgccaaaagtgaaggcttttacggcatgtttgaccatttcggtaagttttagaatgaaaatattttctaaaaataattttccattaaattcgttttatttctgtaaggcgccagtgtgtttactgtgtatttggctgcctcagaagagggttgggtgtatgtgatgtacgactgtttggactcgctcccgtcacatttggcatttttttattttgtcactctgatttttttcttggcttggcttgtcaaggtgtgataaaaatttaaattttacgaatttcatacacatttagaatgtgtttattgctgtgattacggaaacatttgctgaaatacgggtacagttcagtgaaagttggaaaaaggaggaaatgacgacaattgaggacgattttagtcaagtgattgattaattgatatttattaagccaggagataattaattaatttctaagaaaattgagtcaactgatgacgggtggaggctgatcagactggacacggaggacaagctgaatccacgcataaagcaattccaaacggtaaaaaatggtttagttttaaaatattctgttaggtctaattaagggattatttaatgtgctgaaaaattaaattatgaattgaatagctatcatcaatttttcagattcttcgttcaactggtttccaatgtgccatcatttcgttggtgttggctaatgctgcgataaatgcttcgtttgtttatcggcacgacgaaacggatgcgaaacggcgcaatttgtattatttgattgaagtgagaaatggctggttgagaatttacttaaacaacttcctttgttcttttaagtgtgactttttcattgtttttgggaaagaaaagcttaccaataagccacgttcggaagaatttcgagcaaaatttatgatgcttaaatccgaaacttgcatttgctttgctaaattttatatgttttaccaaaactgataagttcaaaaaatttatttattaaggtgtggaatttagaaaactaaaaagcacataaatttgttagtaaggccatttatgtttttatttgtgggcagttgaatcccttttcgtctctccgcttttcatttttttttcgtctgtatgaattcagcttgaatatggatggcttgcccttacactgattatcggggagatatattttggattttggcgtttatgaatcattgtttcccaattacgcatttttattcgattttattttttatttttagtgtgttttcactgttttattcgatgtcgaatgtttggtcaaattgttttgttacgggcgccaattttttaagcgaaatatcttcaagttcgaattaattttggccattggtggcacttttaacattcaacggcatttgtacaaccaaaattacttcacttattttcaaggcaagtcaatggaaagctgtaaaattattattattcataaaaatatgttttttattttaaaagaatttaattaattttatatttttagtttttcgtctcttccgtctaatcaaagcatcgccaatgctcgaagattttgtgtacaaagtaaaatataaatgaataaaattaaatataatatattttattt

SEQ ID NO: 71144 - DNA, 770 bp, Heterodera glycines
  unsure (1)..(770): unsure at all n locations
atgtattttatttttntaatgtttttcacactttcccgacttttctggcccggtaagtcccggtctgggtttttgtcaaaattcccggcnncgctcagttctagtaaaaatacatcaatatattcgaaaaattttatgatcttcaaaaattaatagtttatatggagaataatttcacaataatataatatatcttgttggaataaaaaatctttaaatatttaaagtgttttattaaataattttcttttcagtcaatttttggccccatttgaaagcaggtgtatcccctaacaaattaaaatgtttcatttattttattaattgttatgccaagattaaattgaattttttcaaactgctcttcttgactgattattatgcattgatattaagtaatcgaatcgatttttccctttttatttaattattttttaaattgtgttagagaaggaagtaattattgattaggtgtatgaccccacgccacttcgccatcttcaccctcccattcccctcattcagttgttattgtgcccaccaattttgacctcccaatttattttctctgcatttatttattattttattttcttcggcaaataaacttatttaatttgttatcttcggacataacaacaataatatttatttttttgttttcagctaaaaagtattgcatcgatggattggttaatgaatgtttgcaaattccaattcctcagctgtccaatgctttcttggcctctacccagtgcccgactgtttga

SEQ ID NO: 71145 - DNA, 776 bp, Heterodera glycines
atgccttgtggtgaaaacaatatttcacatttcactccataccatggtgagttcggcacggatcgagaccgggataagaccattggaaagagcagctcgagctctacaagaacgtatggaaagaaaaaatagttatttctgggactttttcagaaatcagaattaattctccaatgtggcccaaattttaggcccccagccacagccccttgcttctcccagttttaagtcttggatttgtcaaataaattcaagacttcaaaataataatcaaaaattctcttaaaatttttttgaacccaattcaaaaaaggaaaaaaatttgcagtcaaaaaattattcgaatttctccaattttgtttccataatttccgaaagttattcggtatcataatgccaaaacaaaacgaaatcgttttaaaatattcctttctggacttgacttggtttcttgatatcgaagctgttttctacgctatttctaaaacggttataccaaaccccagatttttgaatccggttttcagaaaaaatgccttgtggtgaaaacaatatttcacatttcactccataacattgtgagttcggcacggatcgagaccgggataagaccattggaaagagcagctcgagctctacaagaacgtatggaaagaaaaaatagttatttctgggactttttcagaaatcagaattaattctccaatgtggcccaaattttaggcccccagccacagccccttgcttctcccagttttaagtcttggatttgtcaa

SEQ ID NO: 71146 - DNA, 779 bp, Heterodera glycines
atggatgcggaaaaacagcagataaatgcgggtgaaacggactttggaaaaatggcatacagtgaaggaaaccggcgcacgaaggtagggaatttaaagaaaatattaattaaataataatttaattcagtttttaaaagagatatttccgttttcatttaattaataaatttgtttttgaattttgcgtagaaataatgaaaaaaaatatttataaatttatttaaaaataatgtaaactctgccacttttttttaactttttaattaatttttattgtaagacaaaaaatattaacaaaacatgcaaaaaaataaaagaaaaaaaaccaacagaaaagttgcaagtaagaaaatcgtatgcttttgtcaaaagaaaaaaaaattcattttttgaaataaataaattatttaaaaatacaaaaaaatatatatggaagatacttaagaaaagttattagagctatagaaactttaaagaaagaacaaagataaagagaaaaaatatatagaaggttattctccgtttttccatgtttgatatttccataaaatataccgtattccttgaaatacatccctccccctgaaataaagccacccttttgagggagttgaaaaataaagagccaggagacttaatttcaatgaacacggtacttccaactacaggagaagcatgctttcattgagctcagctcacttgtaccattgccaccgccaatacgtgatcagctcgacaaaacggccacccttcgctcgacaatagcatttttgtaa

SEQ ID NO: 71147 - DNA, 990 bp, Heterodera glycines
atgaaactattctcaatgtttcttctcctgactttggcattcgccgcttttgctgagagaagcagcagtagcagtagcagcagcgaatcgtccgaatcatcggaggaatgttcttcagaagaaggcaatcccggcacagaaccggagacgacaacagttgttgattcggacgaaaattgcaacgcgacatcagatagtccaaatgacgagtcatcgcctgtgccatcgtcggacagtccaaatgatgagtcatcgtctgtgccatcgtcggacagtccaaatgatgagtcatctcctgtgccatcgtcggacagtccaaatgatgagtcatcgcctgtgccatcgtcggacagtccaaatgatgagtcatcgtctgtgccatcgtcagacagtccaaatgacgagtcatcgtctgtgccatcgtcggacagtccaaatgatgagtcatcgcctgtgccatcgtcagacagtccaaatgacgagtcatcgtctgtgccatcgtcggacagtccaaatgatgagtcatcgcctgtgccatcgaccgccgacccttcctccccccaatacactctgccggtgactgaagaagacaaaaacgcagctgtccaatgccacaacaaattccgttccgaattggccctcggcaattctttcaacaaaacggggggcaacaaaatgccatcggcgagcaacatgcacaagatggagtgggacgacaatttggccaaatttgccgcggaatgggccaacaaatgctcaatttcgcactcgtggaacggctgggcgggcgagaatttggccatgaatggcggaacattcacgaacagttcgcaattgactaattaataccactaaatgcctgattgactttaagaggatgcttttgagtacgcttgcggtcgctggtggggcgaattggcggcgctcggcttccccaaggatttgattctgaccggggaaaacttcggaggcatcggccattggactcaa

SEQ ID NO: 71148 - DNA, 580 bp, Heterodera glycines
atggcacaggcgatgactcatcatttggactgtcggaggatggcacagacgatgactcgtcatttggactgtttgacgatggcacagacgatgaatcatcatttggactgtccgacgatggcacaggcgatgactcatcatttggactgtccgacgatggcacaggagatgactcgtcatttggactgtccgacgatggcacagatggcacaggagatgactcgtcatttggactgtccgacgatggcacaggagatgactcatcatttggactatctgatgtcgcgttgcaattttcgtccgaatcaacaacagttgtcgtctccggttctgtaccgggattgccttcttctgaagaacattcctccgatgattcggacgattcgctgctgctactgctgctgctctcagcaaaagcggcgaatgccaaagtcaggagaagaaacattgagaatagtttcatttttgataattataaattaaaattaagcttttaattttatgatttttctgtgttatgcgttcgctttataaaggctttttcctccgctttttgtcaaaattttcaaaagctgagcaa

SEQ ID NO: 71149 - DNA, 456 bp, Heterodera glycines
atgaaactattctcaatgtttcttctcctgactttggcattcgccgcttttgctgagagcagcagcagtagcagcagcgaatcgtccgaatcatcggaggaatgttcttcagaagaaggcaatcccggtacagaaccggagacgacaactgttgttgattcggacgaaaattgcaacgcgacatcagatagtccaaatgatgagtcatctcctgtgccatcgtcggacagtccaaatgacgagtcatctcctgtgccatctgtgccatcgtcggacagtccaaatgacgagtcatctcctgtgccatcgtcggacagtccaaatgatgagtcatcgcctgtgccatcgtcggacagtccaaatgatgattcatcgtctgtgccatcgtcaaacagtccaaatgacgagtcatcgtctgtgccatcctccgacagtccaaatgatgagtcatcgcct

SEQ ID NO: 71150 - DNA, 373 bp, Heterodera glycines
tatacatcccattatgaacgctaaaattatcagagtgccgaaaatcgcatgtgatctacgcctagaaaaaaatggtgtaagtaaaaatcgtaactacgctcaaaaagcttctcaaccaattttagcgcatccaattccttctacaatcgcctttatacatcccattatgagcgctaaaattatcagagtgccgaaaatcgcatgtgatctaagcctagaaaaaaatggtctaagtaaaaatcgtaattacgctcaaaaagcttctcaaacaattttagcgcttccaattccttctacaatcgcctttatacatcccattatgagcgctaaaattatcagagtgccgaaaatcgcatgtgatctaagcctagaa

SEQ ID NO: 71151 - DNA, 439 bp, Heterodera glycines
aaaatggtctaagtaaaaatcgtaattacgctcaaaaagcttctcaatcaattttagcgcttccaattccttctacaatcgcctttatacatcccattatgagcgctaaaattatcagagtgccgaaaatcgcatgtgatctaagcctagcaaaaaatggtgtaagtaaaaatcgtaattacgctcaaaaagcttctcaaacaattttaacgcttccaattccttctacaatcgcctttatacatcccattatgagcgctaaaattatcagagtgccgaaaatcgcatgtgatctaagcctagcaaaaaatggtgtaagtaaaaatcgtaattacgctcaaaaagctcctcaaacaattttagcgcttccaattccttctacaatcgcctttatacatcccattatgaacgctaaaattatcagagtgccgaaaatcgc

SEQ ID NO: 71152 - DNA, 659 bp, Heterodera glycines
gttttcggggcagtccccccgaaccgatgcgcccagatttatggggagaccgaatctttccggaatagcttccctatagcctgtactttaattgtgcgttggatttttgctccccataattgtttgagtaccccaaacggacacttgaaaaaatcgatttatttttgttttcggggcagtccccccgaaccgatgcgcccagatttatggggagaccgaatccttcgggaatagcttccctatagcctgtactttaattctgcgttggatttttgctccccataattgtttgagtaccccaaacggacacttgaaaaaatcgatttttttgttttcggggcagtccccccgaaccgatgcgcccagatttatggggagaccgaatccttccggaatagcttccctatagcctgtactttaattctgcgttggatttttgctccccataattgtttgagtaccccaaacggacacttgaaaaaatcgatttatttttgttttcggggcagtccccccgaaccgatgcgcccagatttatggggagaccgaatccttcgggagtagcttccctatagcctgtactttaattctgcgttggatttttgctccccataattgtttgagtaccccaaacggacacttgaaaaaatcgatttttt

SEQ ID NO: 71153 - DNA, 166 bp, Heterodera glycines
atgacattgatgccaacggcagaaacaacgacagcgaatttgggcactccaacggaacaaaatcagccgcaggagcagcagcaaaaggcagggacagcagcggggacaacgacgacagctgcagcaactgacgctgcttctgctgcggttgtaatggaagaacaga

SEQ ID NO: 71154 - DNA, 308 bp, Heterodera glycines
cagtgcagcaacaaaaccctcagcagaaagacacaccggcggcactttctgttaggtctcaactgccaattaagccaggcccaaagccgaaaaaaccacaaatggaaaagaaacagcgaaaggaaaagccgccaccacccccccccaaacagaaggacttgaaaattacgtgcagtccctgcggagagattggccacatgaaaacgaaccgtcactgtcccctctacggaaaagaggaggatttggcatccaaaacagtcggcgagatttgccaggcaataatattgctggttgacatcaatgtgtaa

SEQ ID NO: 71155 - DNA, 595 bp, Heterodera glycines
  unsure (1)..(595): unsure at all n locations
atgaatttttttttttgcatatacaatcttgttaattactggtattttaaactgtattatattccttgtgctaatggccaaacgaacgcacaaccaaaaaaaccattcgcagttgtctctgtgtgtcggcaccgctcgcacaaatggccgccaccgccgcagcaaaaaaccgccaacaaagggcggccacgaaaggacgccgccaccgacgccccaaacattggccgaccaaacggacgacagcaaagcgacaaaacagacgaaaaagcgatggacaatgaacgaatgccgaaggctgaaggtttgttgtgggagaagtgaaacgcccgcaaaagaggagggagctgccaaaaagcttttaaaatacaaaaaaatgggttttactattgcctacttaacaatcaatttgattgtgttttttcagcttgctctcaaaatctgcaacccatcgaccgactcggaatgggaggccatcagcaggtcagcagaaccaaatttcataaaatagggatcgcatttgtaatatcaatggaatttctaagaattggtaatttaaaaatgaatgccgtanatgtttatggagaatcaaaagaat

SEQ ID NO: 71156 - DNA, 323 bp, Heterodera glycines
atgtctgacaaatcgttgtatctcaacgcgcaattcaacgtggactcgaacgtggcgttgcctgtggctgacaatacgaacccggctgggcctgccaatccgaatccggctgggcctgccaatccgaatccggctgggcctgccaatccgaatccggctgggcctgccaatccgaatccggctgggcctgccaatccgaatccggctgggcctgccaatccgaatccggctggggctctcaatctgaacggtgccgcgttcgatgatacgctgagcctttatggggaagaacgccttgatcgccattaggcgagtccccgtga

SEQ ID NO: 71157 - DNA, 93 bp, Heterodera glycines
atggacgtatgggcggacattgcgaaagcggattttatggatgaacgattttcgagggttattacggctaataaggcgtacaacctcttccag

SEQ ID NO: 71158 - DNA, 93 bp, Heterodera glycines
atggcgagcgacggacagaacgacaacggatgcaaaatgatccaagctgatcagcaaaacaacaacaaaataacagtaacacaaaatgtgatg

SEQ ID NO: 71159 - DNA, 468 bp, Heterodera glycines
atgtcaaagaaaaatttccaagaaacttcaaaagaaattcgccgctcgaaaaatacaaaaaattatttcaagaacagttctaatttgggaaaatgttttgaagaagtggaaagtcacacaaacgaaaataaaaaatttgggataaaagaacatgtgactactttctattttaagtgcccagaaaacgaagaccccgaacaaatgtttaaaaaaatcctgaaaaaattaatgacggatgcgatgaaccgtgaagctgagccgggctggaaaattgagaaaatttcagtcgatctgtattgcagtgccctgtcggacccagtgatcatccctgcccgccccttccaacattcgaacccagacattgttttcaatgagttcatgcacagacagcaatcatttggggaagtgaatttgttagaccagagaatttcgataattattgccacttattcctttcctgttaaataa

SEQ ID NO: 71160 - DNA, 6635 bp, Heterodera glycines
  unsure (1)..(6635): unsure at all n locations
ccccaaattcccccccccccgccaaattccaccccaaatttggccccatcccctccgccttttcctaccctttctttctgcttttcaaattccggcccaaatttggtcccaagatccccccaccctccctttcatctgacccccctaccgcgattccctccccgcatatttcgatcagataagattattcacattttcgtttgttgcgaaatttttgtgcggggcgcaccaaaaatggtgccatccacgcatcaaggtcaaaatagtttttatgttcgcgacctgtcaatcaaattctttgggcgagaaaacttaaaacgctgcggagatgcaaaaataattgcggccactttaccgcagtttttatgttcgtgacctgtcaatcaaattctttgggctagaaaatttaaagcgcggcggagatgcaaaaataattgcgtcacacaaaccgcagtttttatacacgggaactgtcaatcatataaatgaagggaaggccgaagcgacttcatttcaattccatttcgcttaaggcggggggtcgggggccattcttgcccctcggggcgcttgcccccaaatattcaaattttccatcgatcatctggatctgtcaccgcagcacggcagaacggcatggtagtgggaggagtcagcagcggcaccatccccaagttctcttctcatcatttgccactttcgcccacttttttaatttgtcagcagcggagacgcatcccaaattcacttttcaccagttgccattttcatccactttcatcatgccttttattgcccccggcactttcgcgttcctttcaaaagactatggggaattttcgactgggcattttgacccaaacagagcatacgacccaaattcactcggacaactttcgtaatggcattcattttttccaatcttgatttttttctttgtaggaaatggagaaaagattttctggatgccgatacggatccaagcaaccaagtcctccttccacaccccgttcaccatcgcgcagcttcccaatcccggtcatcgttggtagtttaaatttcagtttttttttggattttgcaaatattccgtttgcaggaaatcgtccacaggatgaaaattgtttggttttccacaaatatcttgtctgattttttccattttagggcggcagatgttccccgatgacgatgggtacgaatcggaagatgatgaaattctcttgccacctccgccgatccccccgcaacttggccaccctccgccaaatgtgccggtaatttcggtctcgcttttcgttgctttttctaaatttccgagtgcttttttcaggctgttcgtgttcagccaatgcatgttgggcagcagcggctgccgctgagagacttgccacaattcgaggaccatccgcaaaatgtgccggtaattttgagtcgattttcgctgcgttttctcaaatttctgcgtgctttttttcaggctgttcgggtccaaccgatgcaacaaccattgccgctgagagacctgccacaaattttccaccctccaccaaatgtgccggtaattttgggtctttctttcgattgctttttctcaatttccgagtgtatttttcaggcaattcgtgttcaaccaatgcagcaacccgtaccaatgggagccgtgccacaattccctaaccctccaccaaatgtgccggtaattttgggtctttctttcgattgctttttctcaatttccgagtgtatttttcaggcaattcgtgttcaaccaatgcagcaacccgtaccaatgggagccgtgccacaattccctaaccctccgccaaatgcgccggtaatcttgagtctcgttttcggttgctttttcaaaatcccgagtgcattgtttttcaggaaattggtgtgggaccaattcatgatgggcaacaaccgatgccgctgagagttttgccgcaaattgcgcatcggccactaaatttaccggtaatttgggctcgcttttcgttgctttttctcaaatttccgagtgcttttttcaggccgttcgtgtccaaccagtgcaacaaccgataccactgagagacgtgccgctatttgtcaacccaccaccaaatgtgccggtaattttggctcgcttttgttactttttttcaagatcctgaatgcattttttaggtaattcgtgtccaaccgatgcctcaaccgttgccgctgagagacatgccgcaaattcaccatccaccgcgaaatgtgacttcaatttggatcaaattgtgtttgctttttctcagtctctgggtgtttcttcagggaattcatgttcgacaaattcaacgtgaatacgccgtaccgcaatttgcccatccgccgccaaacgtgccgtatcatccaccagaaaacgttccggtaatgttgggtcttgtttttcgtgcgtttctcatattttcggatgcatattcaggcaatccaaccatggcaacgaccgcggcagctgagagacgtgccactattcgaccacccgctgccaaacggaccggtaatttcagaccctgtcttttacctagcaccgaaacatcttttcttaagcaaatacatcccaaccccccgagagtgttggaagtgatccgacggctgggtgagtggagaggaagaccaagggacccaagacgtccgcctcaatgaatgaatggaatttttgattttgataaaatttgttgttttttaattttttgaattgataagggttaaatcccgttacctaaattgtttgaaaatcataaaattttaagaaattagatgctaaacctaacctttgacaaagattatgaaaaaatgaaaagaaatgacgaaatttttggaatgttccttctttttattatatatggattttttttcatgtgcattattttggtgctagtaagatattgtcgaatgaattaattggttttttctcttcattttaaaacatttcacgtccccatgccctgcccgcttcccgcggaattgatcaaggaaataattgatgctcttccccctccaaaaacacatcggcttttgcgcgtaaattttgttttggcatactttgttaaatgtcggttttattccatgatgagaagattgtttcgcccagatcatatatcaataccaatggcccgaagaaccggaatttatttctttttcgatgttagtactccccccatttattttccactctaccaataataacatttaaataaaattataattttttatttcttatttgattaatttcgatcaatattttttgataattaaacaaattgtatttttcaaaaaagacctttctcacagtaacaactcatcggctttttttttactcccttcataaaatgtctcgcttttgtcctatcacccaaatcaatgaatcgggccggcttaacacaccaaaggggaaaattagtgagtttcaaatcccgtaaattccgcataaatttagaaacttttacttgtgtttaggtcttttttatgctttggaaattgctcgaagctaccaacttataggcgaaggtataacggaaaaaacttttcgttatctcatgaaaacggaaaagaaacaaagggaattggccatcgaattaatggaaaaggcaggaattagcacagatgacaaaacttttggtatccaacaccttgaggccgtacaaaaatactgggacagggaatacccggacaactttcgcatcgtcgcttttgaaatggtaattattcgcataaaaaaatatcccgttacatatttttagaagacccgacttaagccaattttcaagggggaaggtgttcgaagaaatgaaatcaacgtgataagagagggggaccactgggatgggttaaaatcggtgtcctggtttttctgcgttcgcaacttttgcgcggcttgcgaagtgaattatcaaacaaaggaacggcacagaatagaatgtaaagaaagatgtaagaagtgctgccggatggggttcggctttccatgcgcggatgtctgtgaatagatttactgcggcgaatgtaatcgcaagttctacaacccggaatgttttgaagcgcacaagaagggagcttgtaatgagtacaaaaaatgtgaaaaatgtggagaagtctaccaaacacgttcgaaacacgtctgcggggaaaagttttgtagactttgcaaagttttccacccaggacggcaatgtttcatcaaaaaaattcaagtgcggccgcagaaagcatatagaattgtggcatacgacctggagacgactgtagaggggggagaacatcggcctaatcttgttagtgtggcactaacatgcagcatttgtgcgggagaagagcggaaatgtgaaatttgtgaaggacccaagaaaatcacatggtcagtagcggatggttttgagccaatgagcgagtttatcgtttggataatgggttttcaacgatttgaaacgattgctttcgcgcattatgctgggaggttcgattcacactttgtcttgtccgagctaacaaagaaggaaattgcgacggagttgatgatggctgatttgaaaatttatcaaataaaggcgggaagagtgtactttcgggatttttggatgcttagtcagaataaattggcggaccttccaaaaaccttggggttaaaaactgcagctaaattgtattttccacacaaatacaataagaatgagaattttgggaagagattacccaacctgccttctttgggagactactgcccggacaatatgaaggaggaagaagccgtaaaattggaagcatggcacaatgagaattttcaaacggaatttgaactaggtagggaaaataacatttttttctttgaaaataaaatttaaggggaacaactcaagacgtattgcgaaaacgatgttgaaattttgatggaatcaattttgaagtttcggcagttatttttggggataacaggagatttggatgtgatgaaggacagcgtgacaatcgctggtgttgtgataaagatatttagggcaaaatttttgaaggacaggcatattccgatcatgcctgagggagggtatgagaaagctgagaatcagagcaaaattgcagtgaaatatttcgaatggctggcccaaaaaaagggagtaaaagtgcggcatgcgtgtaacggaggagaagtggaatttggtgggctgaaggtggactgtgtgattggggcagagaaaaaaataattgagtttcaggtaaaagaaaaaatattttctttttaaacaatacttaaggggtgtgcatttcacgggtgtccgagatgttttttaccttggactatagcgccaaacggacggacaatggaagagaatcaaagtagaaccgaaattcgcatggaaattttgagggaaaagtgcaaaaatttttcaatcggagaagtttgggtagaataaaacatttagaaatatttattaattgttagttttaggagtgtgatgtcagagaggaattgaagaaaaataaggagatgaaaaagttctttgaaagtgtgccggacaagggaccgatcaatccgagggatgcttatgccgggggaagaacgatgccattttgtttgtacgcaaaggctacggaagaaattgagatatcaatgttcgacatcattagtttgtacccctttgttaattatggtaaaaatctgcttaatttttgttagtttcctttcgcttaagacaccccataccccgttggagtcccgaaaattgtagtgagcaggaattttaatgtgaattggacagcacccgacgacgtaccctatgatggacttttgaaagtaaaagtgatcccaccgaaaaatcttttgtaccccctcctccctgtgcacatcgatgaaatgctcctcttccctaattgttggtcttgtgcgagaagggccaagaatgaatttgtgatgacaaaagatgtgaaaaaatgtaaccatcgtcccacgcaaagagcatttttggggacattcacatcaattgagttgcggaaggctttagagctaggatatagaattgtgggattctatcgagcgtatcattttgaacagtttgacagtcaactgttcaaaggatatgtccggatgtttttgaagataaaggtggaagcgtcggggtggccggcggaggtgaaaagtgaagatgaaaaaagagcattcatcgaaatgtacaaggcaaagtatgacatcggtttggattatgataagattgggtttaatcccggactaagaatgattgcaaaattggtgagaaattataaaaaatctctaaaaaatgttcgaatttaagggattaaacagtttgtggggaaaattttcgatgcgcaacaccctttcaagtacggaaattgtgggcagcatggaacgttggatggaattggggagagacaatacaatttgagttgggcgcccagtaaaaataagcgaagagttaatcagagtcgtgtaccggaaaaaggaggagttcatcagggagcataaagtgtcgaaatattgttttgtcattgtggaccacgagtgctgcgaggctanagctgtacgagtacatggnagcagtctacaggaaaggaggggtgtaaactgctctattgtgacacaggtg

SEQ ID NO: 71161 - DNA, 5976 bp, Heterodera glycines
atgaccgagagaacatggccaacgagtacaaacaataatgtggagaagcagatgacaaagtcgcgcaattgcaggcgcagctcaatgcggccgagcattgtaagttgacagaaatatttttaattgagaagaatttttttaattttttcaactatcaaaggtcgggacctagcagtaaaacgggaagcggaagagcacttgatgaaaatggaggaggtggtaaagtttttactttaaaagttgctcatttcctgggccaagaatattatattgtaagggcttaagccggcttgctcattatgaaatttttacaagtaacaaaaaaacatttcttatcaaaattcgaaaagtaatcaatatttaaaagtccctgatcagtccgcattgatcactgtttatgctatcaaatccagcttccaaatatgttttattttattttaattttatttattcatagagagagggacgcaatgaaacggaatcggtcagccgaattgcattcaaaggcgccggcggagagcgggcggaagcggagcggccaacctatttccacatttttcgcggcgaggtccaattggcgacggagactgtggcacgggcggactacgaaccgaagggccgcggtgatcgcttcccggacaagaagcacgtggaagcgggtgagtgttgtgtgtttgttttgtgcaattgctaatagccgggacagagtccgcgactgaactgggcggtagcgattaaatttcccaaatatttttatgaccgagcgaggcctgagggtctgggattaaattcctgaaaatttggagccggaacaacataacatttcttgaaatatgttgtcgtgattgagctttggactgactgggacgaacagcaattcaaattagcaaataaaaaatataggattgaattttttagacgtaggcctggcctgagcgaggtccgggcttaaattcaccgaaaaaatttgctaaaattgttataggaaccaattctaaaatttagttgattctcagaaatgactaagtactaccgtatctagtttttaaaaatatagtgtactcctgcattttgcgctcatgatgggatcggacctaccaaattcccggcagattccgtttccatctgggatattcatgaaattcaaggagagtcggtcttgacactcactcaagaacaggataagatgtttagagctgttgcgtcgcgatggaacaattcgtgctgaagggacagttaaccgaagcgactatgccaatgatggaaagcggggggaagggcacgagatcagctgggtcaatggccgcgaagcgtcggcaccgctgtttggtaaagcagctaatattcgaaaataaaactcccatgctgtgtatatatcattaatgttcattagtgagctaatgatcgaaattcggcttttatattgctcatttctcgggtcaataatttttctagattatgggttaattagttgatttgatcacctttaattgcccccctttcagccggacctagatccaattcagcaccatgccgacaacattcatcgtgctgaatttgtcgcgcacgaaagtgggaagcgcaaagtgccgacggaggagggtgctgagcatactccggcgaagagatttatggcaataatttaaataattgtggcaaaaattgtgaaaatacaaaaaggcaaattaaggccacggccacaactaaaaacgccctgaatcaccagcaccaacgccggagccaatccaagctttattgtcccaacgtttgatctacacgatcgcgtatattaatggacgcgtgtgctttgtcttggtggacaccggtagaaacaataattattttttgatttttgttgttcaaggcttcgttggctctctgttgagcgacgaattctacctgggagtcaattatacgccgcgctttggtgcgacattcgacgcgaatgtcgtacgaatttttttttaatcatttttgggacgacgcgcgcgttgtcgggtcggtaagttattggattttaaaaatccaatggcattggacactgaaaatttgtgatggtgatttaaggtttggaacggattttttttcttcattttggtgtcaacgtttgttacgataacaggctgcttcgttttggagaggatcaatttccatttttgttggtaataaccccaattgcgcattgcttgaatgatgataattggagattttttagcaaactcaggcaatggccgctcttggccaagcacatggagaccccaatgtacaacaagcataaagacgtaaaaaaatcataattgtaatttcaatgaaatttttgcagattgtattttgctttttctgctacaattaccatcaatatttgatcattcagtaaaataaagattttttcgtaagtttttgttgcaaaagcaaatacatataacgaaaaaatattaatacgttttagcattcggttttccatattcatcaattgtgcccaaatcggtcggttgccaacgcaataaaatgccaaatatttctttgaattcgtagtcaatattttggtaccactgcgcactttcaccgcttttcaagtccaattggagtccgcgcatctcttgcacgcggcccttgttgaaagaatgccaaatttgagaatttggacccgcaggctatttttgacgaatccgaattttaggaatggaccaaatttttggatcgagaatttcggctttattttttcttttttacatttcgagtattgatttcgggtttatgatttcgctgtccatttgaaaacttaaaaccaacaccataagaaatatttataaaaattatagcttgatattctcatttagaattaaaaaaaacgatatgcctgcatactatttattattattttttttaatctcagaattttaaaagtatttttttggttctggtcggttttatgcgtctcatgccatattatgcgtcccatcacatattatgtgtcccaagaatgatcattcttagtttcttagtttatatccttttttcttacttggtcaatacctatattttggtatcaatcgatagcttaatgactatagaagcttttgtataaatttattttttaactaaaggcaataaaaaaaaattatactcggaaaagttgaattcatatattctcattgtaattttcctttttaatgcctgttattattttttcttgcattataaaatcccgagactttcgtcttcgattgataccaagaatttaggtattgaccaagtaacaaaaaagttatggcctggcctaagaaactaaggattaagatcatcttcttttattacggtccctaatcggattttgtctagacttttttttgagaatgcactcggaccagcagaagaaatccaaaaaaattttagttggttcgtttccttaatccatatatccacataatatggatcagaagaaactctgctgatccgtcctgatcagagttcagaaaaatgtgtaaattttccgagtccaattttaaatgtcatcatttttcaattttattgactcactcgccactcaatgtgaccgttatattatggaaaacagctgaagtgtagtaattaatgggtcccagcagtgtcggctttttgacaccacgggaaaagtgaacggcgaaacgccactcataccgtacccatcaacggatgctttgatttggatactgtaaaccataaaaatattattttaaccaaaatcatgttcggattcggacccgtaatggttaattaaataaattcttttcaatcagaatgcgtacccctattttttccaattatgtaaatataaaatataatctattttattatgaacaaatatgttatacatatttatggtatgctctcccaattttatccaataaatccgtatttataaaagtttcatttaatattcatctatttttggatttttgcaccttactaattcatcctaattatttaaagttttgaatttttccaatttatgtgccttcaaaaactgatttttgattgagtacaatccgtaattaacgacctaaaatcatgaaaatcgttaatcaaaacacagttacattcatcaacttatggatattaattaaatttctacgatattttgcgtgacatcaatcataattatggattgtccttaatcgaaatcaattgtgcccattcattctgggaattgcaacccaacaaaaacgtaattatgtaaaaattaattaaaattcaagatttcccgacttacgtgcccttaaaagctgttcggcgcctttctccccaaaaacatttggacaattgaaaaatctcttcgtaatcaattttcacatttgccgtacagtttttgcttaccccagtgaaacatccgtcaaaaagtgcgagagtgccgaaaatgggaacaaaaatttggcacaaaaaatattcattaattacggcgttttttcggaggatcttctttagggtttttgtccgggtcattttcataaaaataaacctaagaatttcaaaaaattagcagaggcatttttatattttttacaaatgcaattttttgcaaatccctcagacaaatcctccgacttcaattgaatgtgccaaaaacaatgccaaacttctcgttcggcacttgacctttgtactgaaagaaggcacagcttaacagttttgccgtatcaaatgcctaccgtacacgcacagtactcttcccccggtgccatgtcattgctcgcttttgtccccttataacatgcgtagcacgtgttttctccgttgttccgttcattgtcaatgaaaagcggcgaattaagccatggcgggcgcaaatggcgcggcacgaaacccttctgtttgaccaccgccgagtgccggcactgctcgtggaacggagtgccatcgatgggacggcacaattcgtcggcgccatcaatgcattaaattacgaggaataattaaaaatttcaatttcaatgaatttttaattttaatgaccatttgttgtgttgtttttggatgtaaccgcaaaataaatgaacattctgatggccatggcaaagatggaaaaattcggatagaacattttgatgagcaaatatttatttattaaattaattatttacaaattcgagtttgtttaaatcgaaataagaattataattatttacctttactatttattaatttgattttaaaaatctttgaaaatctcatgtccttgaaatttcctcgaaactctaattaattattcaattaccaataaactgagagatttgtcatgtgtaatgatatgcttctgtgaattattttgtttttcaaataattattcatcatcactaatcaaaataattttactgacagctgaaaagtcgatttttttttctgtagtgaaatgaatgagtcaccagatgctgagaaccacaaaaattttttgcttttatttaaacaaaccataatcattctcattcagttgtccatcttttagccaatttcatccgatcattttcattttaattgtaaaatttccaaaataaatattttctttttttttgaacagtaactttttctgatgttgtcgaaccaactcaaactttttattcttattcttgcaacattttccatcacctctgtggagggcgactttttggcttttttttataaaaaagtaatccaaccaatcgtgagttgaagcattttatttgttgaaatttgtaaaaaaaaatatttaaggaaaatgaagttgggaaagccgtggtgacagtcgtgagttgaagagcattttattttttcaaatttgtaaaaaaaatattaaagggaaaagaagttgtcaaagttgccgacaaaatcatcgatcacatccctcttcttgcccaggcgcgcgcgattgcgagagttgccgccaaccgaatattgggcaacaaagaaaaatgggaatgcggacctgaccatgaaattaaagtggttgacgaactgttgcac

SEQ ID NO: 71162 - DNA, 903 bp, Heterodera glycines
atgaccccatttttcccagcagctggtttgcagggaaatcaaatactccgtatcaagcttaaaacggtaaataattaggaataaattaaaataaactcacgtgcaacagttcgtcaaccactttaatttcatggtcaggtccgcattcccatttttctttgttgcccaatattcggttggcggcaactctcgcaatcgcgcgcgcctgggcaagaagagggatgtgatcgatgattttgtcggcaactttgacaacttcttttccctttaatattttttttacaaatttgaaaaaataaaatgctcttcaactcacgactgtcaccacggctttcccaacttcattttccttaaatatttttttttacaaatttcaacaaataaaatgcttcaactcacgattggttggattacttttttataaaaaaaagccaaaaagtcgccctccacagaggtgatggaaaatgttgcaagaataagaataaaaagtttgagttggttcgacaacatcagaaaaagttactgttcaaaaaaaaagaaaatatttattttggaaattttacaattaaaatgaaaatgatcggatgaaattggctaaaagatggacaactgaatgagaatgattatggtttgtttaaataaaagcaaaaaatttttgtggttctcagcatctggtgactcattcatttcactacagaaaaaaaaatcgacttttcagctgtcagtaaaattattttgattagtgatgatgaataattatttgaaaaacaaaataattcacagaagcatatcattacacatgacaaatctctcagtttattggtaattgaataattaattagagtttcgaggaaatttcaaggacatgagattttcaaagatttttaaaatcaaattaataaa

SEQ ID NO: 71163 - DNA, 659 bp, Heterodera glycines
  unsure (1)..(659): unsure at all n locations
atgccaacaaaggatggcaccgagttcgagttttttaatgttagaaaaggaataatttgcccattgaaaaatctgaggtttttttttgcaattgcaattttggggtaaattattcattttatgccatcaaaaaacgccgtgcattttgttggcatattttttaaacttttggggtgcgtgcacaaataaatttgtataccaaagattggcgttctgtttacgatgttcgcgcacgaattgtcgcattgtcgcaatggtgttgatcactgtcaactttgaagaggtcgacatagttaagaaatttgttaaatacagttgaaagagttaattttaaaataaaatttatttatttattaatcgaaaatttgttttaaaaataggaaaattatttttgtttataaagaaatgatattgttaataaccaaaaattgtttatcattttataaatttggttcattagaatcaatttaagataacaaattaatagatattaatatattaattaataggatgttcgtgtcatgtgatcagtcagtcagtcagctggggacaactcagccgacagaagacaaactcagcntgatgggacaattcggctgatggacaactcagatttacgagaattaacaaaaatataaaaaaaaatgaaaaatgattaa

SEQ ID NO: 71164 - DNA, 1008 bp, Heterodera glycines
acaaatttcttaactatgtcgacctcttcaaagttgacagtgatcaacaccattgcgacaatgcgacaattcgtgcgcgaacatcgtaaacagaacgccaatctttggtatacaaatttatttgtgcacgcaccccaaaagtttaaaaaatatgccaacaaaatgcacggcgttttttgatggcataaaatgaataatttaccccaaaattgcaattgcaaaaaaaaacctcagatttttcaatgggcaaattattccttttctaacattaaaaaactcgaactcggtgccatcctttgttggcatatttttgaaaattttggggtgtatgtacaaaaccgaaaaaagtaccctttcattaagcgtggcattggtgccgacaatgggtgcccttcaccaaggccatctccgactggcacaccaggcacgccaatggaataatgacaaaaaagtcaatgtttatttctgctattttttcactaactttttaatttcatccaaaattttaagaagcattagaacccagttttctgactttaattaaatcagaacttcaattttttaaacccacccaaaatgccgattgaaacttttttaattcaaattttcattttgaaaaatactgaaaattttgtctgattaacaatagtttgccaagataaaatccgtgtatatcctgaggctgacactgtgtattcctgaaatctgacctctaatttttatatcccattgtataaatgccaaaaaagtcatggcaaatacaaggaacaaaatggcaccactgatcagtgcgcctctccgcccctggtgatcgtctccatttttgtgaatccgctccaatttggcgcaaacgaggactatgagcgctatccgcgcacattggaagcggacttggccaaattggagggcgtcgtggattgtgcatttgtgccaaatgccgtggaaatgttcggggaggaaaagcaaccgctgaatcacaaggatgaggaggatggcatcggcattaaa

SEQ ID NO: 71165 - DNA, 416 bp, Heterodera glycines
atgatgttctttttgtcggcatttgccatcattctccaatgccaaattgctgttggacaggtgccaacgtttcggaaatttttaattttaattaaaatgtttttgctaagctcgtcgcaccgcttcttctccatgctcaaacaggacccgatttcattgttcatccccatgttgagcccgaacatttggatgatgatgatattgatgacgcacctgtgccacactcggcacggcttggccttttggaacactttttgggtggccaacgcactttggaactgattgagcaagagcatcagttccatgaacgggagaagtaaccaaatgagctattataaaattcgacgacaatttcttggcggaatggagggagtgggttaattaggcggcactaattagccagattagctcaatta

SEQ ID NO: 71166 - DNA, 1319 bp, Heterodera glycines
atgtgttatgcggatgcgcaagacaacggcgattgttgcgcaaagaaaggtgtgccatcggaggtatgaaaaaatgccggaaaaaaaaattgttttcacccaaatcaaatcttttaaaggtgcaatatatgttttggagcgccaattgccaggacctttgccgaggcctcagtgccaaattgaatgccaatccggcgtaagaaaagaattaataatttaaaaaaaatcctttttaagttttcgaattctttagaaaattttagaaaaaaaattataattttctctgtcccaaatttaataaatagtagtgcaaattagcttttcccatattgtttaattgagcgctaattaaaaaaatggctaaattgaattaagctgggacaaatgttcgccctacaaaaaaagcatttactactgtaactaccaaaatgtccaaatgaaaaagccgacggccgcgactgtgcgcggcttttgcaacaacgccaaattgtgcaaggtaacatggatgatgatgggcaggcacttcttggataaaacctgttaaaattttaaaaaattcgaataattttttaatcaaatttcattaaaaatttcaaatttaatccttatttctcttaaaaaattggctcaaaagtcgcaaaatttggtcattttttggacaaaatctgttaacaatttgttgaaaaaatcttcaaaagtgtttttttttcttctaagaatgaaattttctaaaaaaaagtctcgattctcgagtcgaaaaatttcaaggattttttcgggtaaataaatataaatacaaaaaaactcaaaaactgaaattttgtgaatttttttttttacaatcttttcagaatccaatgggatggagagacacatgcagcaaggcctaaagagcagtgggtggtcagtgagagagagagagagagaaaaagcaaaaaaaaaaaatgccaaggaaattggagaaaggacagaaacaacaaatggggggatacggtagacagtgttgaaaggatgatacggtaaatggagaggggagaggtactctgtacagatgtattgggatgtggtgtaagggctgtgcgaagctgaaatttaccgagacaagattaacaagaatagagcttaaatattcggaaaatacagtaactggctcggtaattttacggtacagaacaaaaaattacagtatgttttaaaagtttaaattgtaaaacggcggaaatttgatttgactcctgagaaagttgatgtttaagctttcgcatagcccatgaaaattggaaaatatgtaatgacgatggcaattgtttaaaatggga

SEQ ID NO: 71167 - DNA, 588 bp, Heterodera glycines
atgttctgcttcaacacgatgcgtgccatcattttgctgacattcgtcgtcatccaatgccaaattgtccaaatgtccggcgggtaatttttttgttaattgaaattaataataattaaattgatgcattaccgttataagccctgatcacttttacttatgtttatcaaatagaaacaattgtgacagtaaactgagagatagttccaaattatttggacattgatctccttaatcacttactgatcaaggcgactcatattgttagtttgatcaccaattcattacttatcgcttattaattaattggtcaattaaactattaagttttgtaattttatagacgctgctacaacccaagcgacaaattccacggatgctgccagcaaattggtatgaccagcacaatgaccaaccttcaatcactgatcagagatggtaattaattgccctgattttgatcattccgatcagtttgcatgctttaaattcctttgaagcttgccgttatcctccggccgatctggcgatgaaccagaaaatgacgctgggatcatacttcaacgaagtaaatgactcaaatttgaa

SEQ ID NO: 71168 - DNA, 669 bp, Heterodera glycines
ttataatagtgattgaaaggtttctcaggttaaaaattcgagttcaaactttagattttcatgatcggatcaattttttgaaaatccgatgatcgatcggatcgatcagtttgtgtttaaatgaccaattgttaagtgttctgaatcggacgtgctgccacacgacgacattgggcgacataaccgtggagaagggcaccgccgtggtgtgcgatttgctttcgctgcaccacgacaaagccgtgtggggagaggacgcggacgaatttcgaccagaaaggcacaaaaaaaaacccaacaaaataatcataataatgggccaaatggaattgaaatggcaaatttgtgcacctttgttcaaacagggggacacattaggcattttggttttggagaataagatttttgcaattttttaatcaaattcactgagactgaagccaggcaaaagccattaaaattggaagtcgtttaaatccaaaaattgtaatccaattgaaactgttttcaggtggctcgaagcagggcatcaattgccgccgttttacgcgttcggcggcggtccgcgcatttgcattggcatgcgattcgcaatgattgaggagaaattggcattggtccgaattttgcgcaaatattccattgtccaaactgcggacactgaggtga

SEQ ID NO: 71169 - DNA, 49 bp, Heterodera glycines; identical to SEQ ID NO: 51181

SEQ ID NO: 71170 - DNA, 255 bp, Heterodera glycines
atgacggaatggcatttgttggaattggcacttctcgaaaaagggcaaaaccaaaaatgggaaaaaattgaacaattaaaagaaaaatggaaagaagcatttgatcatcatttaataaatcgagaagaaaaaagtcgaatctttaaacaaatagtggagaagctcaaagtgatggtgacattttcgattgattgttcaacgacattatacgaaagtttaaaaatggcaaaaattgttagcacaagtcgaattttg

SEQ ID NO: 71171 - DNA, 296 bp, Heterodera glycines
atgccaacaaaaaatggtctttccaattacctaattggttccggtttgaaattaaattttaagcttgtgagttgtgatcatacggggattaacagcggcttaaaaaaccccaaaaaataattttaaaaattttttacaggcaagtggatttgaacccacgcgcccaaaaccatttttaaccatccgagcaattcgtctcccttccttacgttaagtcgagaatgggcccgcagcaccaaaatttccgatttttgaggccctgtaacttttgaactaggcgcttgacaccgctaaaa

SEQ ID NO: 71172 - DNA, 416 bp, Heterodera glycines
atgaaaaagctatcaatctgtcaatccttacggtgtccgggccgggtgagtttccccgtgttgagtcaaattaagccgcaggctccactcctggtggtgcccttccgtcaattcctttaagtttcagctttgcaaccatacttcccccggaaccggaagactttcgtttccgggaagctccccaccagggcgaataaatccaccggcggatcgctagttggcatcgtttacggtcagaactagggcggtatctgatcgccttcgaacctctgactttcgttcttgattaatgaagacattcttgccaaatgctttcgctgtagtccgtcttgctacggtccaagaatttcacctctcacgtagcaatacgaatggccccgtttgtctctgttaacattatctcggtcagcaaacca

SEQ ID NO: 71173 - DNA, 452 bp, Heterodera glycines
gtggtgcatggccgttcttagttcgtggagcgatttgtctggtttattccgataacgagcgagactctagcctactaaatagttggctcattgcttctgtgggcacaacttcttagagggattttcggtgttcagccgcacgaaattgagcaataacaggtctgtgatgcccttagatgtccggggctgcacgcgcgctacactggcaaaatcagcgtgcttgtccttccccgaaaggggttggtaaaccggtgaaaatttgccgtgattgggatcggacattgcaattattgtccgtgaacgaggaattccttgtaggggcgagtcatcaactcgctctgaatacgtccctgccctttgtacacaccgcccgtcgctgcccgggactgagccatttcgagaaattcggggacggttaaataagggcttcggtcggtatgcagactggaacc

SEQ ID NO: 71174 - DNA, 505 bp, Heterodera glycines
atggagaaggcctgcaaaatttggagagattatatcgattttagtgcgctaggttcgatgaaactttttaaaatataagcctaaactttttcgcatatttaaaaagcaattaaaaatttttaaaaattttattcatctccctttttgatataaaaagcatctgagtgccttatttaacttttaattaacatttgatgcgtttcagagcagtttctgaaaaaatatttatgaattaattttgctaaaaaaataaaatagtgaagctttaaaaattaataaaaaattttaaattcagaattactggtgttagcatcatagcagtgcttttccttgtctttttgatgctctcgcaaaatctggttcgcttctgatcagtttctgaaaaaaaagttaagcctaaactttttggcctgtttaaaaagcaattaaaatttttagattttttattcatctcccttttttgatagtgaaagcatctgagtgcctaaactaacatgtaaataaa

SEQ ID NO: 71175 - DNA, 217 bp, Heterodera glycines
tggtgcgcttctgatcagtttctgactttaaagttaagcctaaactttttggcctgtttaaaaaggaattaaaaattttattcatctccctttttgatagaaaaagcatcagagtgcctaaactaacctgtaaataaagttttgtgtgtttcagagcactttctgaaaaaatacttatgaattaattttgcaaaaaataaataattaatgaaaaagt

SEQ ID NO: 71176 - DNA, 66 bp, Heterodera glycines
gtttaggcttatattcgtctggacatttcgaagctaatcacagcagagagccgaatgacagaggag

SEQ ID NO: 71177 - DNA, 355 bp, Heterodera glycines
atgggagctgaggcacaattccatcgcaagggtcgtgagcttggacgcggcaagtttggcgttgtcaaaaaggcactcttcacagaccaacagggcaacgaaacggcggtggccataaaacagctgcattgtgtgaagagcaacaaggaacaggtaaagtgggagtttgaagaagtgcgaccgcgcattcacacattaccccgtttcgtttcaggtcacggaattcatgaatgatgctcggatcatgcgaaagcttagacagaatgtcgtccaattctacggcattgcagttgagcgggagcccgtgatgatcatcatggagtctgtgtcgggcggcagcctcaaggacttctga

SEQ ID NO: 71178 - DNA, 772 bp, Heterodera glycines
atgtgtggagttttgggatattgtgctcgggaggttttgccaaatggcgcaatgccattccaattcgccggctacagactcccacatcatgtcccctcgccctcgagggtggagacgaaaagagcgtgagtgaaaagcccaaaaacgtgttttcattttttttatcattttcttttttgcaggtctcaagggacagcgcctggtcttcccgccgaagttcgtcatgcagcacgtctgggccccgaatcacaacaaccgatactcaatgggcgcggtgtacgactggatgaagcgaacaccgaaggaggaagaaggcgccagtagaactagtgcatgtgatcggaatgtgtgtatattgtatatatgtatattgttttttgtaaaatgtttttgtctttttcgtgtcaccgtttagcatattttatttagatttaaggatctctttattttgacaaaaacaaaacaaattggaacccttaaaattcaacaatgcgtgctttgggtgtaagagaacgggttagacacgtttatattttgtaggccgaacccaaaaaacttggaattttttaatggaattaattaagaataccgaacactggttattttccaaaaaagctacaaagggtatcggaaaagggaaggcacaaacaaccaattaccacggaaacgaaaaccaccctgttttttttttgccgggactcccgatttttttttagtctcgccgagggcccgatttcaatccataccaagatgtcacaattaggcgaaaata

SEQ ID NO: 71179 - DNA, 517 bp, Heterodera glycines
ttgtacctcttctaatcactgttgtacctcttctatcactgttgtacctcttctaatcacttttgtacctcttctgatcactgttgtacctcttctaatcactgctgtacctcttctaatcactgttgtacttcttctaatcactgttgtacctcttttaatcaccgttgtacctcttctaatcactgttgtacctcttttaatcaccgttgtacctcttctaatcacagttgtacctcttctaatcactgttgtacctcttctaatcactgttgtacctcttctaatcactgctgtacctcttctaatcactgttgtacctcttctaatcaccgttgtacctcttctaatcactgttgtacctcttctaatcactgctgtacctcttctaatcactgttgtacctcttttaatcaccgttgtacctcttctaatcacagttgtacctcttctaatcactgttgtacctcttctaatcacagttgtacctcttttaatcactgtttacctcttctaa

SEQ ID NO: 71180 - DNA, 341 bp, Heterodera glycines
tagttgcttcgtgctccggtgccgctgcttcatcatcaacggttggctccatggtggtgtcccatttacaacaacagcaacaacaacatcatgctcaagcagttcagcaacaacagcaatacgttcaacatcatcagcaccatgggacaaatgcggatatgacggctactgctgttgttgttcagtcaccaccaccaccgccttattcggcaggtgttgtttctgttccgtcgcatcaattgccttccgggatgagcggcactgctgcgcatgccgtggccggcggtgccgtgccgattgcgtcaaacgccaccgcagcaatggttcagcaaacgcagcag

SEQ ID NO: 71181 - DNA, 397 bp, Heterodera glycines
taattaaatccattccttcgggggaccgtgccgggtgccgcggggtaagcagtgctggttcgtttcatcacggcaccgaaccttttggctagtcagcaatcgttgcttaacttgccagatcggacgggtgcgcatgattccactgttccaagcaccccaccaaaagcaaaacgatataaccaaaatataaggaaaaattttttaaaaaattttttctccatcttcctttttgatactaaagcatcagagtgctaaaattaagttgtaaataaaatttggtgcgctttagagcactttctgaaaaaaatatttatgaaacaaaaaaatcgattttttcaagtgtccgtttggggtaaacgaaacatttatggggagcaaaaatccaacgcagaattaa

SEQ ID NO: 71182 - DNA, 483 bp, Heterodera glycines
atgcttggtattacatctaggcaatcaaaatgcacaaaaataattatgagtatttctgatcatgaaattgtggagtgctgtagtgggggtgtatatcaggtaatgtgttattcttttcaaaggtaaattaaagcttttgttttagtatggtttgaaactgaggaggctgtacgcacctgcagatgcggagtttgaatatgtgctgaaggtgcgagggatgacgctgaactacgacgtcatcaacaaccaaggactgcgctacgattcaagcagcaggtgctgaacttcactgcgacgggtgactatgaaccaatcatcgtcacatatcccaacttcctgagaccaagcattaaagatggagggaaagtggtgtcgggaccccttcagaaatgttataggccatatgtaggaaaaggaattgttaactctaattttgatgttttgaattttggtcacacattgtaaaacttacttttgaataaa

SEQ ID NO: 71183 - DNA, 49 bp, Heterodera glycines; identical to SEQ ID NO: 60106

SEQ ID NO: 71184 - DNA, 1394 bp, Heterodera glycines
atggcagccgaaaaatattccacggagagaattgccaccctcggagaatcgctgcggcacgcaaaaggacgtgcgacctattacaagcaggaagtgagtttggacagactgtaatgtggcggttgggcattgtttggaatccaaaaccctggctgatacccacttgaccagcgcccatttgtcccaattcgttctaattgattgcctgtggcaatcttgtccatttgtcagtattagaaagatctacaaattggttcggcgcacagtacagtcattgctgttgtgttttgtttcccatatggctcattgggttttgcgtagttttgctttgtctttctcatgggttcggttcccttccgcgtgcgtcgctttgtttgccctcttttggtttccgtgcgaagaaacgtcagctgtcagtctctgaccttcggcttacagtacttactcccttcgcaaattgtccctgcacttttctcgttggccttttctgtcggagatttcctcaaaaaggcctccaataaatgtgcaacattttttttaaattttttcaacatattattttgagattttttattgtttaagtgtgaggaattgctcagaaaggcaatctgtgaccagcagcgcatcgaagcattggagcagaacattttcgagttgacgagcaaatgccattcactgaatgtttgtcaggggatttggcattttcactttcatttgtcttgctttttttcattagccaattttcaggatgctcttgagaccacccaaattaattacgaagcgcaatttcgaggcaaacattaaaaacagacaaatccaacaacactaaatttgttccctttatcagatttacatgagcatttggcagaaaatgaagcaaaaatgacgggccgaagtgatcggacattggcactcaatgggacggaacggagcgtggaaaacggcggagaaagtgcgttttgagacgcatggaaaggggcgaccctaattttttaggcaccacatggaaattatgcaaattttaacaaaatttttcataatttttgaaaaacgcactcatttcccacgaaagtcttacaggtctctcctccccccctccctttccaatgtttttatgggctttataaggcttcgctttttcttcagaaactaccaattgtaagaaaagtgagaaggtccgttcccattggttttcgtcctcgtccaaacagtcgaaggaatgaatgactttccccgtgccgacttctgtgattttcactctttgttaagttcgacttgttaaataacctatgcaacagtggacttagtcgaccgaatcgtcaaaatcagtcgaatcgaatgttaataattaattgtaacgcttgtgccatggaaaacactttttcatctttcga

SEQ ID NO: 71185 - DNA, 1879 bp, Heterodera glycines
atgtcgagccgagcgaagcggaagccgttgagtgtgtcggtgtctgaaagcactgctgggctcgagccgagcacgagcagtcccaaaagtgccgcttccgccgctactgccccctcgcgattgccgtcgagcgtcgcctctgccgaagtctcggaaggacgcggcggcgattcgcccaagggaatctctggcacggacggacgcgcggcattggccgatttcacttttatcaaagtgctgggcaaaggatcatttggaaaggtgggaatgggatgggaagtgacaagcaaagccaaaacattactgattggcacgcgacttatttgatggtttatccgatgattgatctatttactcgtcaaactcttaaattggatgatttactcctatcgattgattacatttatttattgattgattgttggctgtgtcggttccgatcgattagttcggttgatttgcgactgtttcaggtgatgttagccgagcggaaagggacggacgaagtgtacgcagtcaaagtgctgaagaaggacgtgattctgcaggacgacgacgtggagtgcacaatgtgcgagaagagaattttggcattggcggccaaacatccttttctcaccgcacttttctgttcctttcaaacgcccgacaaactcttttttgtgatggtaaaactgaaatgcaaatggtcgatgcatttggcattttgttgtattacaggaatatgtgaacggcggcgatttgatgttccaaattcagcgagcgaggaaatttgaagagccacgggcacgattctatgcggcagaggtgccattcttgggctttaaataccgaaaatggagaaacaacagcaagggcagagaagggatgaaaagggaaatgagggagaaaagggagaaagaaaatgagagggcagcagagacgagaaaggaacatagaggggagagggagaagagagtgccaagacagggagtcagagggagggaagagagagggtgccaaggggagagagtcagagggaagagggagagggtgccaaggggagagagtcagaggggagagggagaagagagtgccaagacagggagtcagagggagggaagagagagggtgccaaggggagagagtcagagggaagagggagagggtgccaaggggagagagtcagaggggagaagagagtgccaagacagggagtcagagggagggaagagagagggtgccaaggggagagagtcagagggaagagggagagggtgccaaggggagagagtcagaggggagagggagaagagagtgccaagacagggagtcagagggagggaagagagagggtgccaaggggagagagtcagagggaagagggagagggtgccaaggggagagagtcagaggggagagggagaagagagtgccaagacagggagtcagagggagggaagagagagggtgccaaggggagagagtcagagggaagagagagagggtgccaaggggagagagtcagagggaagagagagagagggtgccaaggggagagagtctcggttctcgaaagtccatattgacaaatcttcctcaaaggtcacttgcgcgttgcaatttctccatcggcacaatgtcatctaccgtgacctcaaattggtattttgccaatgttttaatttgagcagacatttttgggagtcccgcgcaattgcggctaattgaatgattggcctaatcaccccatatttaggacaacattttgttggatgccgacgggcactgtcgtctggcggacttcggcatgtgcaaagagggcatcaccaaagacagcctcacgtcaaccttctgcggcacgcccgactacatcgcgccggaggcatttttccaatga

SEQ ID NO: 71186 - DNA, 592 bp, Heterodera glycines
atggtgagaatgatcagctaacaaaagacgaagagtcgaaaatcggcggaagaggggaggaggtcgaaatgagacacaatggagaggaagaaagaaagaactgtttgtgatgagttttggaaagggcactcgcgcgggagggaaggctaacaaatgagaaaaagggggggggcaaacgcatttataatgagaggggggggggacattgaggaaagggaaaaaaaggggggacaaacgacggggaaagtgctgcacggacaggcaaagaatgggcaagaaacactcacggagaaaaatgggcaaattattatttgcgaaaatcaatgccccgcgttatgtcaccctccctgctaaaaatttgtcctaaaaatgcttttacaaatttcagaatgacaattcaagagaagaaattgagaaaactgagaaagtgttcgagtcaatggtgcaaaatatgaagagaatgattgggaaaatgatcaaagtggacgattctgactccacagaaattgtccaggttaagatcaaacccatagaagcattttaattttattttcacaaattctgaagaaaccttggattggccaaagatata

SEQ ID NO: 71187 - DNA, 599 bp, Heterodera glycines
attctcaccatttcctctcgtccttcgcttcctttcctttcgctctttcgtcgcttttcctccgccctttcgtccgttgtcttacgccttttctctgctcattgaatgcggggattagcctccattgatcagctgatcacctcacaacagcaaaaggccaaaggacaaagggaccgacgggggaaaaggccaaacggaggccgaaaaagcgatggttttgttcaacggaacggccaaaattcgggtggtcgaagcgcgcgaccttcagcccacagaatggtcgaaaaggtaaaaaggggaacaaaatgttcagaaacattctgattaaaagccaatcctttttttctaaaaaaaggaaaatctaaaagggggggggggagggatatagtacatccatcactcccactccaaaggctctgatttatcgcaatcacttcatccgttgatcgctcccttaacccctcagattcaaccagtcggacgacccggacagccaattggtggatgcgtatgtgaatgtcgactgcgatgagtaccacgttggcaaaacggtgacgaggcccaagaccaaaagtccggtgtggaacgaggactatcag

SEQ ID NO: 71188 - DNA, 136 bp, Heterodera glycines
atgctgggcaagccgaaaatggacgagcagggaattgaagaggagttcaaaaagcggatggaggagcttaatttggaggaaagtgaagtgaaaaaaatggcaggattaagcgaggctttgggcgaagtgattgaaa

SEQ ID NO: 71189 - DNA, 553 bp, Heterodera glycines
atggcctatgttgagctgagcaaagacatggccgaatacaaattggtggaaaatggcatcaaagcaatggcattggtggaacaaacggtgtacgatttggacactttcgggttgaggatggaaccgcaaaatatactcgatttggaccgacaatacctcgaaagggccgaacgaattaccaggaacgaccatttaaaaagacattttgggctgaggaagagaatggaagaagccatcaaaagtcagctgggaaagcaaaatgccaattgggctgtgcttttcagaattaaacaatgattttgacataattgtgcaaagaaaaacgtcactgatcaacggaaagccgaaaacgctgtgggaaaagctggcggaattggacggaaaagctgatctgaacttattcggcaccccttcggactttgaaggatttgactcggaatatattcgcaaaattgaggagatcaaaacggatgcggcttcattggtggattacaaagggctcaaaatgcgatcggaaatggcaaaacaacgtgaaaatacgggcagaaaataa

SEQ ID NO: 71190 - DNA, 797 bp, Heterodera glycines
agctattcccgaaggattcggtctccccataaatctgtggcgcatcggttcggggggactgccccgaaaacaaaaataaatcgattttttcaagtgttcgtttggggtactcaaacaattatggggagcaaaaatccaacgcagaattaaagtacaggctatagggaagctattcccgaaggattcggtctccccataaatctgggcgcatcggttcggggggactgccccgaaaacaaaaataaatcgattttttcaagtgtccgtttggggtactcaaacaattatggggagcaaaaatccaacgcagaattaaagtacaggctatagggaagctattccggaaggattcggtctccccataaatctgggcgcatcggttcggggggactgccccgaaaacaaaaaaatcgattttttcaagtgtccgtttggggtactcaaacaattatggggagcaaaactccaacgcagaattaaatttttggataaaaattatttaaatgaactgactagataatatttaaaataggttatttctcttcctttcagtatccctgcaaagtttggtgcgcttctgatcagtttctgaaaaaaaagttaagcctaaactttttggcctgtttaaaaaggaattaaaaattttttaaaaaattttattcatctccctttttgatagaaaaagcaatcagagtgcctaaactaacatgtaaataaaaatctggtgcgtttcagaaccctttctgaaaaaatatttaagaattaattttgcaaaaaataaataaaaacgaaagact

SEQ ID NO: 71191 - DNA, 700 bp, Heterodera glycines
atggtaagaaaacgaacagacatttccgtccctaataataatgtacgaatttcggctgatctctcctctggtcctttgtcctcaaaacaaaaatttctgatcgatggtccgcttgtgctcatcgatacggtgagctatcgcagagacatttcgggatatttcgaaattggaaagcccacttttcgcactgagttgaagcattttcgcataatttgtaaattctcagcaattttataaagtagaatcattcccgattaaggacaaaggcatttctgacagtaaatggcagaaagtctacagcttgttcaagttgtggtatcccctctctttccgcgagggtcagaatgagcacacgcactccttccacaacattggttggtttcccattcttttcaatttaactttttgcttaaggcgaggctttctgtgccgtccttcacctccacgcgttgaatttattcggcggtttggatttgtcgaaaatcggttgtattacgccgtactcggcacaggcggaaaagattcaaaagttaatggccatgggaagggacgagggaccacgcttcgaagtcagctctgtcgacgccttccaagggcagcagcgagaagccattgtgatgtcattggtgcgcaacaacaaaatgcgcgacatcggtttcctgagagaacaccgtcggacaaatgtgagccattctgacgg

SEQ ID NO: 71192 - DNA, 329 bp, Heterodera glycines
aaggccaaccatttgcctagcatttttttggaacggcgacgcgacgaactgaacccaaagacaatggacttcgaatatgtggaattggtcattctgacgggcatcgacggcgacgtatttgtgagatttgtcttgcaatttgttacttcccctggtccaatgtccccccccccccccttcaaaaggcgtgcgagagggaccttcgcgcgtattgtgaaaagcgattgggccacccaatcgccacccacgtcgacgaactcaaaggaaagatcaaaataagcggcgccgatcgcaccatcgccgagcagttcgtctacgactatgaaacg

SEQ ID NO: 71193 - DNA, 321 bp, Heterodera glycines
atttataagcatttgaagggttctcagcagtttccctgcaaaatttggtgagctttcgatcagtctagaacgttggggatcaaatgcaaaaaataattaaaaaaaaataatactggtgtggtaagtgtgaagaactgtgttcctccaggcaaaaaattctaagaaaatttataagcatttgaagggttctcagcagtttccctgcaaaatttggtgagctttcgatcagtctagaacgttggggatcaaatgcaaaaaataattaaaaaaaaataatactggtgtggtaagtgtgaagaactgtgttcttccaggcaaaaa

SEQ ID NO: 71194 - DNA, 321 bp, Heterodera glycines
atttataagcatttgaagggttctcagcagtttccctgcaaaatttggtgagctttcgatcagtctagaacgttggggatcaaatgcaaaaaataattaaaaaaaaataatactggtgtggtaagtgtgaagaactgtgttcttccaggcaaaaaattctaagaaaatatataagcatttgaagggttctcagcagtttccctgcaaaatttggtgagctttcgatcagtctagaacgttgggtgatcaaatgcaaaaataatatataaaaataatactggtgtggtaagtgtgaagaactgtgttcctcccaggcaaaaa

SEQ ID NO: 71195 - DNA, 131 bp, Heterodera glycines
atggaacgcaacaccgacaaaaccaccggcgcaaaaaccatcgccaagaagtgcagcgggaaagcatcagccctggctatgtgtgcttgtccgactcgtggttcatctctacagtggtctccatgtccatg

SEQ ID NO: 71196 - DNA, 2380 bp, Heterodera glycines
cgaacgattggcgctggcggacagagaaaaggcacaggcgggcgaattggggcttcatctgttgagggagaaggagcaattggagctgacccacgaagtctttgctgccctttgcctgctgttattgtcccaatgcttagaatttgctcaaagagttggactctgtcaggacggaattggagcgaacacagaaacaattggcatccattcggtcaaaccaacgccatgcggcggcgaccgaattggaccacgagttgggactgttggaggattcggccaaaatggaggcgcaattcgttgaccgagtgaccgctcttgaaacggaagtgcgccaactgatggaagtcggtggccaaaggcgggggggggggggtaaaggcagcgaaagtaaattacaaatccccggaatgacagtcagaaataccatcccttaaaaaggcttattccttttagcaattgaacattttcaagtcggagtctgaacgattggcctttgaattggaaagtttccaactccgagtcactgagttggagaccgagaaaaggacaatgcgagaagaggtgagccggggaaagcgaaagggacggaaggaaagaaaaactccgccgtttgttaagctcaaagaattgaagcaaagggagcaatttgcgttgaatgaaaacggagagctcgaagaagaaaacgtgtccctccagaagcaggtgctttttggcatttgttttggtcaattcttttgcaaattgtttttaggtgtccagtttgaaatcaacccaaatcgaattcgaatcgatgaaattgcaactcaaaaatctgcttgaggaagtggtcattttgcagacggtggccgacgaggccaacaaggtcagccggggcacggtgttgaccattggtatgacaatgaaaaaccctgtcattttctttattttaaccccttcaactaatttttggttttaatgttccattttcagcttcgatctcttgccgaacgccaagaggcagaagcattggccgccgctcagcaggaaagggaacagcgactggcactgaaaaaggaattcgagcagttgcgcaaccagggccatctgtccacactcaacagcctttacttgggcatcaaaggggcggaccgggacattgtcaaacaggtgaataagggggggggggcaaatggatgggagacacacggaattcccacttttcagttggaaaattcgttcatttccgacaacccaattgaaacgttcgccaatggcaatgcaaagggaccgaaagatttgttttcggaactgaacggcgatttggaagatcggctgaatggtgcacaagcggagaacgaacgactgaaagaggccaaacaaacgcagccaagggtgggcgaagggcaaaagatttcttatttttaaatgaaaatgttttcttattttgtcttcatttacccctccctttatgatgaaaattgcttcagtttttgtccaaatgcttcttccgtttttccatcggttggacctcaatggcaatttcggttggcttcggttttacttcacttttttcatttacattttcagaagagtgtgacgtttccaaactgaaggattacatggttttggcattggaacgttttgacgaacgaatggaactgaaaaaagaagcgaaagagacggagaaacgggagcaacggatgagaggtgagaaacgcgcgttatctgtggaaaaaaaagaaaatttagaagccctcagagaagcgattcttctcgcgggacgaaaggacgcgcatttgaccatcgccaggggaatgatagtcagactgggccagacactgcacactttcttcaccgaactcaacggcacggaggaaggccaacagaaccaaagcgaacgcagacacatcgccaatgggttggccgaccgtctcaacgccgtggcacaacgcattcaaccatttgaaaatgggatgaaaaggtgggcaaaagggaggagcatgagggatagcaaaaaagggagtgaggggggaatacgcgccaaaaatgaaatgttttttattacttttaaatttgcaaatttctcgacacgaaggattttatttttcgtaacattgtctctttcaagccaaatcctgtgttcgttgatgctaaaaatgccaagattttccctctatcttttgccactctcttcccttcttcagactcggttcgcctcctccaaatggcggcggtgagtcgcctcctccgaccgacgtttcgtcattcgtctccgtcgaaacatctgagtccgactcgccacgcgttttgctaccctcgccagaattatgtcggccaatgctttcgcagaatttcctaaaagaattggagggcataaaaattggtgcggatgcgcagaaag

SEQ ID NO: 71197 - DNA, 246 bp, Heterodera glycines
atggccaaactcttcgccattttggtcttttcctttttgctgctttggtgtccctatgaattggtgcgtttttcgtccctttttctgctgaatcctccaattgttcagttattcgccgtttccagcgatctttccgttggatggacgcccctccgcctcaaaattgtgctcaatgtcatttttctgctcgccatgagttccaccgtagtgtctcccatcgtctattaccatatgagtgaacggtag

SEQ ID NO: 71198 - DNA, 776 bp, Heterodera glycines
atgagcatacaacagaaattggcactcactcagcgattggaggagttggagatggacagggaacgacagatgcaacagttgcgcgaaaggggggcgactggggacgcgggggggcacgccaacgcacatcagccacaacagagccaacagccgaagaggacgggccccggaggaggccaacgcagcggtggaggggccacgtaccatcagccgacgacgcgggcagtgcgctacccgggtaaaaaagggggacggagtcagggaacagttcggtaccacccccgcccctcctttttccccggtacgttgtcccctttttaagggtcgtcgtcactgcctaaccatcacaacggcggaccacgggggaagcagtgacagcggaaagaagcagcatttgccttataaaataacatacttaatcactaatggtcggaaaagacgggtcccttaattaaacaaattacaaaattagtcttccaacccatttcccataaccaaaaatttaaaacttgttaaatggtttttgtttctcatattttcatgtgtatttgtcattatttgtttgtccatttttcggaagtaaatttcgttgctttttgtcagtacaattgcagcgacagcgacgcctttgcacttgcgacggtcgtttcgcacgtgcggcgacggctttcgaggcattctttgtgaaaattatggaaaacgagcgaaatgcgcggcccacacagtgcgaatgcttggcgatattcgtcctgggagacacggacacttttgggtag

SEQ ID NO: 71199 - DNA, 478 bp, Heterodera glycines
cttcatcctgcacagcaaaaagagtggcttcattgttgagcacgattttatcatgtccacttatttggcggaccgcgtcatcgtttttgacgggtgggaaaagcacagagagatcaattaaattattactactatttaattataattaaattaaatattactattttaattgtccttttttcagacaacccgccataaaagccactgcaaatgcgtaggaatcattttaatatatttttttattgcatttttttcaatttttcttagccctcaaccgctggtgaacggaatgaaccgttttctgagccaactgaacatcactttccgaagggacaacgaaagtcatcggccgagaataaacaaattgaattcgcaggtgcacaaattaattgagactaattaatttggttttatttgtccttttcagctcgacgtggaccaaaagacgagtcaaaattacttttatttggacaattga

SEQ ID NO: 71200 - DNA, 574 bp, Heterodera glycines
atgcttaatttgattgacaatgaacaaagttatggtccaaaaagtcttccgacgacgttttggggtgcatcgaattaagaagccaaaaagtccaccaaaaatgaaagaagacccgccaaaaattctgtaaatttaaatatttgtgcaatttctgcagatggacaaaagaaacggacggagagaaaagtgacggggaggggaaaaagtggggaagagagagagagcagcagagaaggaaagagagaagatagagtagaggaagataaaaaggacggaaaagagtgggcacagagaaaacagacgaaaccatcgcaggcgaaagtgacaaattttaaaaaatttggataaaaaagaggcggagaaatggaaagatttggtggagtttcggataaattttaatcacttttttcatgaaaatgtatttggcacgcgaattgtaagccaaatccattcacatttatgcacttttaagaagttaaaaatatggtaatattatcaacaaaacggcgcaattgaacagcaaccaaaaaaacaagaacaacagagaaaatggtaattcaattgtccaaataaa

SEQ ID NO: 71201 - DNA, 1147 bp, Heterodera glycines
atgcaccaccatccaccgaatcatgaaaaagctatcaatctgtcaatccttacggtgtccgggccgggtgagtttccccgtgttgagtcaaattaagccgcaggctccactcctggtggtgcccttccgtcaattcctttaagtttcagctttgcaaccatacttcccccggaaccggaagactttcgtttccgggaagctccccaccagggcgaataaatccgccggcggatcgctagttggcatcgtttacggtcagaactagggcggtatctgatcgccttcgaacctctgactttcgttcttgattaatgaagacattcttgccaaatgctttcgctgtagtccgtcttgctacggtccaagaatttcacctctcacgtagcaatacgaatggccccgtttgtctctgttaaccattatctcggtcagcaaaaccaataaaatcggaccgaaatcctcttctattattccatgcacgaacattcaagcgaaacgcctgtttgaagcactctgatttgttcaaagtaaactcgccagcccaccgacgccgaccggtaaaggtcaacgccggggagagaccggcagaaaagccaaccaaaccagtaacacacaaagtgtgcaccggacgggctagcacagattcaacttcgagctttttaaccgcagcaataatttttatgcattttgagagctggaattaccgcggctactggcaccagacttgtcctgtcatggatactcgttaaagggtctcaattgtacgcattccgatgaccggcctcataagagatcggtctcgttatttctcgtcaatacctcctcgcgttgagagggggtaatttgcgcgcctgctgccatccttagacgtagtgaacatttctcaggccccttctccggagtcgaacccttatcctccgttacccgtcatcgccatggtagtcagatacactaccatcgaaagttgataagacagacacttgaaagacacgtctccggtacaagaccgtgcgatcagcttagttgttctgagtcaacactggacgcccggagggcgcttggttttgtggcgaacaaatgcactccgctctggggagattggagctttggtgcatgtattagctctagaattaccacagttatccaa

SEQ ID NO: 71202 - DNA, 1463 bp, Heterodera glycines
tgatgtgttcatttcaaagattacgccatgcatgtgtaagtttaacctgccagacagggaaactgcgtacggctcattacaccagctataatttacttgaccttgacttcttacttggataactgtggtaattctagagctaatacatgcaccaaagctccaatctccccagagcggagtgcatttgttcgccacaaaaccaagcgccctccgggcgtccagtgttgactcagaacaactaagctgatcgcacggtcttgtaccggagacgtgtctttcaagtgtctgtcttatcaactttcgatggtagtgtatctgactaccatggcgatgacgggtaacggaggataagggttcgactccggagaaggggcctgagaaatgttcactacgtctaaggatggcagcaggcgcgcaaattaccccctctcaacgcgaggaggtattgacgagaaataacgagaccgatctcttatgaggccggtcatcggaatgcgtacaattgagaccctttaacgagtatccatgacaggacaagtctggtgccagtagccgcggtaattccagctctcaaaatgcataaaaattattgctgcggttaaaaagctcgaagttgaatctgtgctagcccgtccggtgcacactttgtgtgttactggtttggttggcttttctgccggtctctccccggcgttgacctttaccggtcggcgtcggtgggctggcgagtttactttgaacaaatcagagtgcttcaaacaggcgtttcgcttgaatgttcgtgcatggaataatagaagaggatttcggtccgattttattggttttgctgaccgagataatggttaacagagacaaacggggccattcgtattgctacgtgagaggtgaaattcttggaccgtagcaagacggactacagcgaaagcatttggcaagaatgtcttcattaatcaagaacgaaagtcagaggttcgaaggcgatcagataccgccctagttctgaccgtaaacgatgccaactagcgatccgccggcggatttattcgccctggtggggagcttcccggaaacgaaagtcttccggttccgggggaagtatggttgcaaagctgaaacttaaaggaattgacggaagggcaccaccaggagtggagcctgcggcttaatttgactcaacacggggaaactcacccggcccggacaccgtaaggattgacagattgatagctttttcatgattcggtggatggtggtgcatggccgttcttagttcgtggagcgatttgtctggtttattccgataacgagcgagactctagcctactaaatagttggctcattgcttctgtgggcacaacttcttagagggattttcggtgttcagccgcacgaaattgagcaataacaggtctgtgatgcccttagatgtccggggctgcacgcgcgctacactggcaaaa

SEQ ID NO: 71203 - DNA, 346 bp, Heterodera glycines
atgagctataaaattctgtcgatcactcagcttctgatcgctgttgttcttcttgtcgcaacatgtttggcatttcatgggccaacaatcgtggaaaagcccggattcaacgcagaaaaggaagtggaaaaattatacccggccattatgaataacaagatggtattaaaaaaagaaaataaagtttttaagtaatttttttttagaaaatgaatttttttatattaattttataatgtagaaaatgaaaatttttaatattaatttagaaagagattacagccatcatttgctcagtcagcaacagccaagagtagataatattcccaatcaaattatcgattga

SEQ ID NO: 71204 - DNA, 692 bp, Heterodera glycines
atgtggtttgtgctgtgcgcgttcgtcatcccatcagtgttctgtgcactgctcggcctctacctgtgcatttaccaaactcgcgtgccccctgtcaggtaaattgttgttggcatataaattggatatacatattttttggcatttaatgcctttttgggcattttgtggcatcaaaagccagaaatttaacatgtttatcagggtcgagaaaaatcccactgagtttcgtgccgtggcatgggtcaattcctcgatctctcagccaagtttaagatgccatatatttttttttaccattgctgaccaaaccccaacaaaaattaatcggattgaaacggataaaaagataaaatatatttacactgcttgaattgttttgaattttagggatgagtcagcacatttattatatgccgcaaaacgacaaccgccttcaccaccgccggcattgatgaagtgaacaattaaaaaaaaatgttgtgcaattaaaggagaaataatactgagggctattaaatgatgccaattagagatcattaaaaacaatgtaaaagccgtgcgaaattccatcccgtgccgatctctaatgccaactttgccgtatttcctaattatacagcccctcaccctcctgaattagtgccccccccccctcttaatcacccttttgaaggtagttgaaaaataaa

SEQ ID NO: 71205 - DNA, 536 bp, Heterodera glycines
atggagcagcaggtgttttacataattcttaaaatgattttcagttaattgtttgatacaaaaaaataaaaaattcaaaaaccaattaaaaacaggtgagaattcttttaattgggtttgctttataaatatatatttctaataatattaaaaattaaaaaaaaaatattttaatatcacaaaaaattcccgtgttttttccgagtataaattccaatgttcgtcctcataaaactgaatttgtttcactcatcattttaagcgaggcttttcccgctaaatttcatttggccaaatgacaaaaaatgtccattttaaaagtgactcgatttagaaaaaaaatgtgcgttaaattttattaccaaaaaagggaaaattgaattgaacgaaagaacaatttaaattgggcataaaatttaaaattaaatttttttttgaaaattcagtctttcaacagttcaacttttgcaacgcgttacagcaccggtggtcgctgtttttcaacgattccatcaacgacaagcaaattggcttaa

SEQ ID NO: 71206 - DNA, 534 bp, Heterodera glycines
gaaattctcgactcctgctcgctgatagaaaacccttccgaagcgaaaaagtgccgtgatggagtgaccgatgccaaagtggcgagactgaggaaggaaggaacggaggaaatgtgcgtggcggagggattttgcggaaagggcgagatgaaagagttggagaagaagatggagcggatggagaagagaatcgacgacacgaagcaaaagttcgagaagggcctgagcattattccgccggttgactcgaacccggtagactcagacacagggatcaaaatggataacaagtgaaatagcttgaaaatgagccctcaagcacacaatttcgatttttgaagccctgtacctctagaagaaagcaaaatgctactctaaacttaaaaattcacactagaagtcgaccctgctctatccaatgatatgtcatttatacgcattttcctagttacagctcggaatgttcccttgtaagtataattccaacgaaacattcacaattcgaaatatttccttgtgaacagcgccagcata

SEQ ID NO: 71207 - DNA, 262 bp, Heterodera glycines
tctaccgggttcgagtcaaccggcggaataatgctcaggcccttctcgaacttttgcttcgtgtcgtcgattctcttctccatccgctccatcttcttctccaactctttcatctcgccctttccgcaaaatccctccgccacgcacatttcctccgttccttccttcctcagtctcgccactttggcatcggtcactccatcacggcactttttcgcttcggaagggttttctatcagcgagcaggagtcgagaatttcct

SEQ ID NO: 71208 - DNA, 313 bp, Heterodera glycines
atggacccgaataatggattttatgataaaagcaaagacaaagtgacattggccattgatgtcataactgatgatgaaccaaaagtcgaaaaattcactttggatcaacgcaaatcgactgggacaatttcgatggaaattgaaaaagtgtcggaattttctcgagaaatctttttgagtgaacgtaaaagcaaaactgtgcacatcaaaggattgccatggaaaatatggacaaaaatagaaaagaacaatgaaagcactggcaatgagaaatgcttgggcttttacctttggtgtgatgctccaaaagaag

SEQ ID NO: 71209 - DNA, 348 bp, Heterodera glycines; identical to SEQ ID NO: 62244

SEQ ID NO: 71210 - DNA, 497 bp, Heterodera glycines
tgtacaaagaagggaagtgagtgggaaattggcgaacggatccgatgtcttcatcaagcgattgaatacgaggcaaagattacgtacaaatggcacaacaatggagtgaccttttacagaattcactacgttgtaagtggctgccaattttatgataaatcccccaaatttacacacattttttgggggcggggagaaaaaaatttttttttttttttgaaaaaggcaaacttttcatttttgatatttttgggcagttttttgcaataatgaaaattgtttgttttaagggttggaatcagaagtgggacgaaacggtctgtgagacggaagcggagagccgtttccgcgcctgggactcgtccccgctaccgcccggcatgttcaacgtggagatgttgtgcgggaagcggttccaaaagcggcgctgggagtaccgggtccgctgggaaggctttgacgaaacggaggacacatgggagccggagtacaaattg

SEQ ID NO: 71211 - DNA, 1402 bp, Heterodera glycines
atggcaactgaagcgtgctcaaaaagtacacttcagtaccaggtgaataccgcgccagggtttgatctgagcggggggtggtcagcgaacttattgtagagctttcaaagctcgattttttgaaattttaaaatttcgaaaattttcaaaatttttcgagttaggcctaaaaaacggttttcgggtttttgaattttaggattttttaacgatttttcccagagaaacggagaccacttccaaaacatagtttttcgagctctatcgactggtatttttttcggaaaaatttcgattttttcccggaaatagaaaaaaattttggcctgagcgggacatttgagtcccgggcccataactcgtcaggcgtcggttttagacaaaaaatgccttagagcaaaattgtagagctttttaagctctatctaatggtatactatatgtagggaaattttcaaaaattttcgagctaggccccctagaaattttcaaaaatttttttggggtcgaaaaagggtgtgaaaaatatttttctggggtaaattagggtcctgagcacgaatatgatgtttatttttcgtttcaaaatttttggaattttttaaaaattctttattttttggcaattttttggcccttggaaatttgggctaatattggaaaattcataactcggtgatggtttcatcgatttaactataataaagctttaaaaatagagaaaaataaggagaattttttgggatttatttgggttttctaacttcaatatgaaagaagttattccagaaattctggaaattttagatttttcagaaaaaaattcagaactcgcttctgaaaagtcattctgtaaaagtaatatactacaaaaatccgcaatttttttctctataatataaattttattttacatttttatctcttttttgcgaattgttataaaaataaaagtgatttttggtttcgggaccaaaggggggtgaccaggatttttgagtgaaaaaattttttcacccaaaatattcaaaacatgtctttagagctattttagggttctgatcacaaatctgaaatcagatttcagttattacatcgttaagccctcagaatccctgtgtgattggggattctggtacatgttctgaggggggggggggcaggttcggaccctgacggtgtaaattatttttctattatttttgagttaattttcattacatttaatacatttaaatgttttagttttattaataattaataaatttttaaatttgctttattatttttagagaataatgattttcatttacataattaattattattttttaattaaagaatttcagctattcttttaaaattgaatttgtcaaaattttttcatttcaatttaaataaa

SEQ ID NO: 71212 - DNA, 381 bp, Heterodera glycines
atgttcaacaatattttcttcttctttttaattgttgcgccatttattgctgcttataaaccaagttgcaaagtgagtgaaattataaatataaattgaataatttaatttttaatttcaatttccaattaattcagtgtcccgaaaatgagcagccaggccaattgagttgtaacggatgtgagccgagttgtgacaatcggaaaccggaggtgtgcaccaaaatggcatgtgaatgctcatgcgactgtgtgccgggattgctgcgagacaaaaagacgaaaaaatgcgtgccgaaagagaaatgcccttattaaagaggacaattgagtgataaaaaatgataattaatgcatttggagataattagcgcggaataaa

SEQ ID NO: 71213 - DNA, 451 bp, Heterodera glycines
atgtttctgaaaaggagaatctccgagcctagcgacgaagatgaaaaacaacggacaaatcaaattcctatcgataacaattcatgtgttgacggtattccgctgaacatccaatgtaaaaaagaaatcaaataatttttcatcgttacgacaaaattagtcctttttagcattacgaaaaacttatgtggacagagaagagccatttttactggaaaaggacatgctttcctgtccatttgaccaattctctatttggttcggaaatgcgatcacgcaaaccgacctcaaatacgaagaagtgaatggctttgctttgtcaactgtctcgaggcttgtttatgttttctgtattaacttgaccacacccaatagtgatcaaatcatcacaaaagtacactttgaacagacggcaaaatatgctattttcatatctttaacaggaatttaa

SEQ ID NO: 71214 - DNA, 2328 bp, Heterodera glycines
atgttcgttccacaagttccgctcaatttggtgatcagtaagtgcaaaaatcaatcatttaaaaatttatctaatccaattgcatacgccaccaaaaacaacatattttcaattataaaatctattatttttttaaatgattatagataagttttcaaaaaattattttctgttttataaaataattattttatttttttgctgatattttaatttttattagtaactttgagatgattaatgcaaaataattcgttaatttaattttcaatattttaattaattattcccccttttaattgcttttattttgaagagcacaatggtcaatttttgccaattgcgccagaaaatttggcgtgccgcgaggcgaccaatggcagcggtttcaattgcgagctgagcgtcaaccaaatggtggtggacgacgagtgtagggacgtgtccatttgggcacggatggacaacgacacgagcacactccaactgttgggcgaacaggtgaagaagaagaagaagttgaagcagttcagggaaaattggataagggtaacactggagaattgaatgatcaaaaattcttggaaaattggcacggattttcataaaaaatggactcaatggattttttgggcagttgggaagctggtttttcgaaaaatttaaataccaaggatttttgggaaaatgggcactggaattgatgaaaaattacacagggtttttgaaaggatttttggaaatttgtgagatcggcatcagggatgtgcgaaaatcacaaaaaaaattttcgtatacgaaaacgaaacgaaaaagggcattcgacacgaaaacgaaacacgaaacgaaaaaagaaattttgaaaaccgaaaacgaaacacgaaacgaaaaaattttgacggacgaaaacgaaacacgaaaacgaaaaaatagccatttcgtacgaaacgaaaaaaccgaaaatttttaaatatattcaattttaattaagaactttaaaattgtatcctctaactgagggaattaagatcatagtaggtggaaaagcggatgtggctctaggacaggggtatggccgaaaaattttcaaaataagaacatcaaggacaaaaaattattgaaaaattttacgaaattggaaaaaaatgttttttgtgataaaaactcaaaatttttacgattttgaatagcatttcgttcaattttttatgaaattctatttagtttccaattcgtaaatttcataaaatatggttttattgattaaaaaacttttcaaaaaaccctgatccgtatacgggtccgtattttcctgcatacggacttatacggagtaagggttttccgggtttttagtccgtaagaaaacgaaactcaaaaagtgccgaaaatgtaggacgaaacgaaaacgaaacgaaatttcgtccatccctgatcggcattgccattttcgagttttcagatcaccatgaaagagtgttctgatgaacatggtgtaattgacttttttttttttgataagcttcaaaacttaagctaaaatgaacaattatttcaaactttttggggcgactttttggatataatgaagttttcaaagttgaaaggatttttgaaaattgggaattaaattttcggaagatttttgtaattgtggatttaaatgttttcgagttttcaggacttgtccaattgtaccaaaacggatgatcacatgaattgtgtcgccgaattggtgatcaagcctgatcagattggacaattacaacgagtgccaaccgcggcgattagcaaaatgatcaaaatgccgaaaagcaatttaacagaaaagaatcgacgacgattggatgagggtaattaaaaatttagctcacatttatatatttagcctatttttcatcaactttttttggaagaatttttccgacattttagcgaaatttccttattttaagttttatttttaaaaaatttggtccggcggtgacgatagaccatggaaagaactttttaaatgaaactttataaagaaaaattttacggtttcaaacaagttcaaatttcattttaattatttaggtattttcacccaccctccaaaaaaaaaatttaaaaaaaaaattattattatttaaaaaaaagtatatttgtttataaaccagtattcccagcagggggtttgttttcaagctcgctaatttatggatatgagaattattctgaacaaatcagcagaaaccctacccgcataacatttatggttttgtacaaaatatgcccgaaaattaaaaaatttaaaatacaaaagtaaaggataatttcaataaa

SEQ ID NO: 71215 - DNA, 272 bp, Heterodera glycines
gcgaaaccaaccgcactcacactgtctcgaagacatctgccggcgtaaaaaataaaatgcttaatttgcatattaaactggagtttaagcccgccgcacgtcgttcttctcgcttctctctgcctcagttgtttggaacgaaaaagaaaggcggcaagggaaaaccgaaatagaaaagtggaacgggtcaaatgatggaagcaaaaagaacaaatttgatggaaaattgagatgtgttttttatccaatttttttttttgctcctatacata

SEQ ID NO: 71216 - DNA, 312 bp, Heterodera glycines
atgatcacaggtcggtgtgtttaattttagaaaaccaagaaaaattctcaaaaatttaaatacctagcccaatacgaaaaaatctagaaaaattcgaaataaaaaaaattttcaagttttttttgttttttttttctagaaattcagcaattttagtttttattgacacttagattttcaaaaaagctaaaaataagttgaaatttttttttttgcggcgacgttatcacccggcaacatttcggccggcgatgttttggggtgtacccggaaacggcaggggtgaagatctgctcccgcctattaaataaa

SEQ ID NO: 71217 - DNA, 1065 bp, Heterodera glycines
atgattacgccagaaagctattatcccacattacaagtcaaggacattggcaatgcttccaagccaaatgaggagcgattggcacaaattattcgttggaattggggcgaaaatggggcacaacgaatcgttgaagtaagaaatataataaatgatcaaaaaagtgaattaatcaataaaatgttttagacccatacgcttaacaagggcagtgagcttaattaccgtagatgcgacaatgcttcatcatttgtaatccgaattctcaaaaagcgggagacaaaaaagtaaatgtgattaataataattaaaagtggtcgaaacaactgattttttggttcccgtttttatcagtaacaaatgctctaataatgtgcagtgttttttttacttgataagaaattttaagcaacaattggaagacaaaaaacaatgccaactttctctaatttcgaatttccatatatttttgaaaaactaaatgtgactgacgcgttttttactgaagaatttttgggatgggtcctcccgatcactaattgatttaatgttccattttttgttattttccccatttttttaagtgcgttcccggcgtcttccaacagtttaccggacgacgatttgacggtggaaattggtgacaaacaggtgaagaaaaaacattaagctttaaggcctgttctgtcaaatctatcacaaaattcgtccgcaaatgtccaggatttgtaattagaaaatgggtgcggaaggggggagggctcgactttatagggtgggggcataatcactgacaaatgattttgatcagatcatataaatctcaaatcgttgataaattccggtcagatcactgataatctatcccgatcagatggccgtgtccgcccattggctgatgtccgtttccccggtgatcagtcgcatgctcagcgtggagatgaaggagaagcagcagcgaatgatcactttgaacgaattgggcgtggacatggaccaattcaaagaatttttggaggccatcacttatcttacaatgaacgaaccttttctgcccaaccgtaa

SEQ ID NO: 71218 - DNA, 1017 bp, Heterodera glycines
atggatcccgatcccgaggatttgggccaaataacaatcagtcacgaactaatcgatggcaaaaaagtaatttctggaagtgtgctgccatttttgggtcaaccgttgccacaacgacttgcaacatttgaaagcatcgaaataaagttgaaaggatttggaattttctaaaaagcatttaccaaatttttcagattcatcaatcggatgtcattcagttgttgcaaaattggaaatcaattttcgagtcgtgcccgctgaatttgtcgatccgtttcttgtctgatcgagtttggcgcctcattgagcgcgacattttcccattgatgtcaaaaaacattgaaaatttggatttgtccgacaacatcgttcgtatatgcccaaccatccttagccaatgcgccatacttcgcactgtcaattacactctcaactcgtcgatctatgacccgtctagttggcaaccagtgcaagactggttgatttcacctcgtgcagacaatggcacgccgttaagaattgtcaatttcttgtgcgaatcagaggccgtcaatttgcagtgcattcaagaacttaaaaaggtaaataaattaaatacattcttaattttcattttaaatggtttttgctaattgctttttcgaaatttataggccttccgtttggccacttcacgtgcctctttcattatggtattttttgatcaacatcgcctttcccccttttcgatcaacaacaaatgcactggagaggaattgacgcttattcgccatgacagagttttcaacaattttaaattggtccgtcatggccgtccaaattttttgccaaaagcaacgctcgatcgtgccgctgagtggcttatggaagatgaaatgcatcggattgtagttaatttgagagatgacgacgttggcgatgggtgagaatgaaaactcatttttagggatcaatttcaatttaatttttaggctgctcgattcatttccatccgccggtccaagtgatcgccactga

SEQ ID NO: 71219 - DNA, 1180 bp, Heterodera glycines
atggccgaaatgtacaattggtcggatattgcgcagcggacggaacgcgtttatggcaattcactgaaagagccggagggcagcattaaccacaaattgcgaaagtgaggcaaaaattgaaattttaatgctcgtggagttaaatttcaatgccttttatctttgatcaaaattcgaaaatcggagaaaaaatcctttaaaatttccccgttcattttttcagtcagttgaatgccggtttctggttcgggctgatctgggcatgggtaacagcagtgaacatccttttcgcctcggtgttggattgggtggacccccgggatggcattgagacggttgacaacaaggcgaagacgaacaactgatcgcggttgatcggactgggatttgtgggagggaatgcgcgcataccttttcatcggtttgccaaattcaaacgagggactcataaaagtgttgggggaactgacggaagccaaactgatcagaatgatcaaaaatcaccactgattagagttgaggtgatcgataaatggcacatttccgttctttttttttgctcattttttaattcttcaggtctttttgccaaaattcaaaattgagtcgactccaactttggaagagctgttgccatcgcttggttttaaatgtgagttttcgcaataattgttattttatgaaattagactcaaaagtcattagcataggtaacttacattggcactctctttccactcattggaacttaattgcatcatgttttttatctgcccaaattttccggcacttattgtagattttgagtcgacaaaatattcgattagtgattacttttgataatttaagtcgggactcttgatttgcaaatttttttttttgaaattagttaattaaacacatttttaagaatgctgatcattaatatgctaattgctttggtcatttttgtttttttttgaattctttttccaaatctaaagttgtttccccattaaattagcaacgaaaaacttatttttccaccctaatattttttttgtcaacctctaatctacagaaatgctttttttcctgtataaaagcacttggaaatcgtctaagtctatcactttcgactctttttttttgatgaatctactcactctacataatttcccacacattttccccaaataaa

SEQ ID NO: 71220 - DNA, 287 bp, Heterodera glycines
atgggcaaaagcagcaaaaatagcggaagaaaattgaaccgcaacaaattgatggcacaaaaagatgaagaagagaaggaagatgaagaggaggaagagaaggtggaagaggatgatgatgaggaggaggatgaggaagagcagggggaagaggaaggggacaacggccgagagacggagccgtacatcgacggatggacgaacggaaggaccaaaggaaaggcgacaggcagcaatttttttttaacaatctgaacggttttctaaaaagaaactgtccgaataaa

SEQ ID NO: 71221 - DNA, 1320 bp, Heterodera glycines; identical to SEQ ID NO: 9389

SEQ ID NO: 71222 - DNA, 1764 bp, Heterodera glycines
atgaccgatgggctgagtgtgatggtggcggagcaattagtggacaatttaacccaggggttctcgggattcaccaaccatcggctgatccgcgagggcgccatgcacgaatacgtgtggacgagggtggacccgtcgctgaaagtgtcggcgttgaacgagtccattttggaggtgcactcgtttaaattttgaatgccaatttcggaacggagaaattgcctttgggtggcgcggggggaggggggacacagcggcaaaatgatcggcttattttttctaattatttttccaattaattaatgctctcttggagatggattaaatgccctctctctctctcttctgctcggatcggtactgattgtgattagaaagactaatgacgggcatttgtcggttaggcattttattttgtattgcccccctcaaaagataagggttttccgatcggatatattcttggggacacaaagttcaactttatgtcaacgtttcaaattctttggacccaattcgcagatgttttcccacttttggttcgattcgcccgccgcccgtttggccaattattattctcgtcaggcggtgcccgtctttttgtattcgtttgatcacgtcagcgaaaacttcgagacccaaagtgatcacagcgttactttactttgtttttttgcaattgactaaaaaataccactcttttggccttcgacctataaatttacctaaaaggcccaattttgttttatgaaaaatttaggagttttccacggatgtgacgaaatgtttctgttccaattggagcggcgctttctcgagacgcgcaaagaccgaaattggcaattggacaaacgggtgaccgaactgtttgccgaaatggtggtcaactttctcaaatacgagttcggcactcccagccgccccccccccctccaaaatcgttcatttttagtgaccccactcccgaattgggccgtttcccattcaattggacttcgtccacctcttcaaagttggactttctgtccatcaccgactctcccacaatgaacgtcggcttccgatggcaggcccacgtattctggaacaaatatggtcattcattttgctattttttgcaattgacagtttgcttactgtaatttgtaatacaatatccattctccgttcaaatggcactttatcttttgtttcagtcgaacatttggactccgtcgatgtgggaaatttgcaaaagatcgcttatttggacaagcaactgggcgattatcaggtgcaaaaatgcttatggcacaaatgagacgacggccaatcggaaaaatgccgaaaaagtcgtaaaagcaacagaacactaaacataggcagaacctattgatatgtacatttgtatcttttttatgatcactgattagagggtacgaaggtgtgggttgtttttatagctcacaattttgcgtttttgcgcaaccaaaaccaattgtgtccctcctccgccgccgctaatgcttttcggtcggttattccactgatcagtgatcactgatcagtacagcatcccttttttccgggtttgagtgggttttctttttatcatgccaataaatgataagggcacgtcccatccatttgtgccgtgccattttctgctcccattttcagttggccacttggatgcttctgttctgttcacttttcttcttcgccatactcgtcggcttggcctgctattgcactcggaaggaaactgacgaggacgaactttga

SEQ ID NO: 71223 - DNA, 978 bp, Heterodera glycines
atggacggctcctccaaagaaaacagcacagagcaaaacaacccggacgccgcagacaatcaagaaggaatttcgcccgaaaaagtggagttgatcaactccacgcttgacaaactgtacaacgacccatcctccccagcggcgttcgcaggtgttacagcgctgtggaaagaagcgcgaaaaaagttgaaaaatttacggaaaaaggatgtgcagcattatttggaggggcaccgcacctacactctgatgcgctcccgaagggtgcgctttccaagagccaaaactgttgcggctgggttcatgaccgatgttcaagtggatttggccgattttcaggcgctttcgcgccacaatcggggtcaccgatacctgcttgttgcggttgatgtgctgtccaaacgcctgtttgttgtaccgctgaaaaacaagagagccgaggagatgttggaggcattcagacaactcatcgaccaaatgccaatggtcccacatcgcatcttctccgacaaaggcaccgaattcaagaaccgattgttgaaggaattctttgatgagcaggaaattgagaagcatgagccagtgcattcatcagtcaaggcatcggttgctgagcgggccatccggaatgtgaagcagcgactgtaccggtattttgctcaaaaggagacgctgaattgggtggatgcagtacagaaaattgtggacggaattaacagcgctccaactcgtgttcacgggatgcgccccattgatgttgacttttcaaatgcgcagaaagtgtggaagcgattgtacggacaccctgcccttcaaaagcggacgccacgcttccgtaaagatgaatttgtgcgcatgagcagagagaaagggcaatttgagaagggatatttaccaaattatggagacgaaatcctggagattgatgatgtgttgaaagcggtgcgcccaattcggtacaaactggggatgagcacg

SEQ ID NO: 71224 - DNA, 947 bp, Heterodera glycines
atgcaattcatggtatgaaagttactttatatacaatcttcaattttgcgctctggaggattggttatcgcgcaccaatatttgccaaccccccctccccctccaaaatatttgcaaaaattgaaacaaacaatttaaaaatagtgatttcacaaaaattcttattttttatccctttcgttagcacaagtgtaaaccaaaatcataatgctttttggcgtaatattttctcgctccctaaggttgacttatttttcgtaattttcttcgataaaattcaaattttgccttaaaagtcaaaatgaaaataaaattttgaatatttcggacattttggcaacaatttttacttttttaaatttttttgcatcgaaaacatgaaattttaccgactttccaataatgtcctaatcttgactattctgaggtcaactatttaaaaaatatggattattggtccaattaaaagtgaagctacatattcataaaaagctactttttagcaaaaatctgtgggtcacattcgtacggctaatttttcgtgccttagatcagtcagacatacagaacccgttacagtatgtattcagcaattgacactttgctacctaatgcaatattcgccacaagttggagctgttgttgtagaacaaccggacgatttgtatgacaaatgcactcgcgtgatgcagtgcgtaaagttgcgtgaggctctcaccaatttggtgcgctgtgtggacaccgacaaaagcattcggttgcgtgctgagcacatgcgcaccatgagggggttggacatgggcaagtttaacggtcgctttaccaaatgcgaacagtggaaagtgatgtgatgatcaaaacattaatcaaacgatgaaatgtgttcattgcaactaaaactttacattatatatttttcattaaaatttgctgtatccgattaacaa

SEQ ID NO: 71225 - DNA, 625 bp, Heterodera glycines
atgaccacggaagagaaaagacggccaattgagacggattcccgcagatttgaagagaccgggatgttggagagcaaaaactcgcggaccgcctcttgcgcatgccccggcgacgcggaagggcacggtgagcgattaaaggcaaattgggaattggcatttgcattaagccagctttttatctgcacattttttgtccttccttctttgattaaatttttttccgtcccttcgatttttacaaattttactgttttaatccatttttttaaaccaaataaatccccgcttagacccgcgcatttgtcggcacgcccgcttcgtccatttcgccgcttcgtcctcctccacccaattgccttcgtacgaaatgaataaaatggcacccaacagaaaaccaatcattcgaagcgatttgccgaagaagttcagcatcgaatggtttttgatcacttgaattgcttagtaattaataacttattaactcaattaatttggcttattaaacgttaaattctttttttaggattctcagtgatcattgagcacctaccgtaagcattggtccatcatattgtattttttgtctcaatttattatttattgcttatcttttggaacttta

SEQ ID NO: 71226 - DNA, 811 bp, Heterodera glycines
gtcattgccttcgcgttccgatctgcgcgaagaatggatgaacattcgcaagaatgacgtcttctttctgcttaagcttaagcccatccatccagttgggcataaattcgacgtccgaaagccgttcaaatcgcaatttgaaattgaatatttgcgggggtgtgaggtggaaggaattttggggccggacggaagagttttggacgaaatgggtgggcacaggaatgcaaatttggaagttgattcatactttagagaatcgcgacatcatccgtaaaattccgggcgatttgcgcatttaccgtgtccgttttgacgccaaccaatacagagaagacgcgttgaggggcgtggaaaccgacgtttatttcaccttcaatctcgtcatccgacgcgaccccaaaactaacaactttaaagccgttttggccacaattcggcagctgctcaacaccgaatgcgttgtccccgattggctgcacgatttgatactcggttatggcgagcccgacactgcgcattactccaagtaaaatgggcgaaattagactgggtcaaacaaaagagttggctggtttaataagtgatcactggctttcgtaatagagttccaatacgacactcctgttaaggatgaatagcactgtggccagcgtggatttcaatgacactttcctgtcatttgaccacctgaaaaagtcatttcccggcaaaaaacataatttgtgaagaccaaaaaccggtgccgcctttcaggtcatttcccttttactactactgattgttgttgcatttgtcatttttaaccttc

SEQ ID NO: 71227 - DNA, 327 bp, Heterodera glycines
atgtgttatgtgcctgccacaacaaccgctcaacgacgcacagatgccagcacagccgttaggtcgccccacgagcgtgcatcccacattggcgcagcgaaccaaccaagcgaggcggcccgccaccgacacattgccacgcagcagccatacacaggctttcacacgtgcagcactgagcggtataccacagctccaacgtatggaagcaccccaaaagcatggatcgtgaggcagctgccccgtaatgttgggcagcgtccacaagtcatctcgaacgacctgtgcccatcagcggacgggggcatttggtggtgccaacgctag

SEQ ID NO: 71228 - DNA, 378 bp, Heterodera glycines
aaatagttggctcattgcttctgtgggcacaactttttagagggattttcggtgttcagccgcacgaaattgagcaataacaggtctgtgatgcccttagatgtccggggctgcacgcgcgctacactggcaaaatcagcgtgcttgtccttccccgaaaggggttggtaaaccggtgaaaatttgccgtgattgggatcggacattgcaattattgtccgtgaacgaggaattccttgtaggggcgagtcatcaactcgctctgaatacgtccctgccctttgtacacaccgcccgtcgctgcccgggactgagccatttcgagaaattcggggacggttagtgttccggcttcggtcggtatgcagactggaaccg

SEQ ID NO: 71229 - DNA, 3627 bp, Heterodera glycines
atgagaaaaagaaaaatgaaagcaatggtttttcgcccgagaaagtgggacaacaacacaattggcacagaaatcgaaattggcacaattactcaatgcatagtgatatggagagaaaccatggacgctgaactgttggcagttctaacaaaagttgaagaaatatgttacgaactgctatgcatttgggttgtccccaaaggagtgccaattcatgttatgaagaaaaggtttccggcaattgttcgagtaccggaagaagaaaatatcaacaatttattaacgaagttggagcaaattggaatgccaattgagaaaaggggcgaacaaaaatggcacgagacagtggcaacaaacgcacagaaagtgaattggaaccaattggggaatggacgcagagagaaggccgcgggaagccattcacacaattcatttgtgccgacacatttttcatcatatttgccaacaactactaaaatgttcttcccaactccggaaatgccgaaaaaaggtgaaaattttggaaaaatccaatcagaaaattttgatccctttgtggtattgggagtaaaacgaaagtctcaatctccagaatcaaattatgaatatgaagacatttttgaaggccctttgtgcacaaaacgaacaaaattttgggtaaactcaaaatgtgaaactacaaaaacagaaccgttggacgtcaaaacatttttcaaaaatgaaaataaggaaatttatcagccacattggaaaccaattgttttaagttcaccttcaggcaaaaaaggagctttctttttcgggaaaaattttgttttttccaattttcatccgtcttcttttatgatggatggctttaaatgggataatgtggaacaaaaatattgctttgaaaaggcctcgtattttggttattttaatttggcaaaaatgatcaaattcaaaaatgggatcacagaacccagtgaattcaaaaaatttacagacaaagacatggaccaatataagtcgcttgaagaaaatcccaaatcttttgatcagtatgaatggaatagagttcgagaaggtgtcattcgccctattttatgggcaaaattcacacaaaacgaaaaatttggtcaaatgttgttggaaactggaaagcttccattatatgaagcctcagtcaatcttagctggggcatcggaattgacattagagaaagacagctaattttttcaaacatggaccaaggatttaaaggcaaaaatatgtgcggtcgtctgttagaagacattcgccaaaaacttaacccaatgggtacggtaaaccaaaaaaggcccacaaatcaaataaatgaaaaagatttagaccaaattttgaaaaagattgaaaacgacaggaaaatctctgttttcaaaactgaaaatattttgagacaatgtactcggattaaagaagttgtcaaagaaaattgggacatgaatgtatttatccaagggagcatatacaatggccttggaagaaaagaaagtgatttggatttagttatgataaactcaaaaggaataccgaatgattggacaaaaaacgacagttgccaattttttgacaaattgcggaaaaagttaagagaatcgggaatggcattaacccggactctgataatcccttcccgaaatgtctctattttggaaatcacaattgattctgatgaccaagaaattaatgctcaaattagttgcaataacttgattggattaattaattctaaatggttggcatgttatgtgcagttggatgcacgatttaaaactttatattttgccattttggaatgggctgactattttgaaattcatcaaagtgctaatggaggcggcaccttaaattcttatggttggacatcgctcctaattttttatttgataaaaattcctaatcccgttttaccaaatttaatcaaaattttaccagaaatttttgaaattcgaaatatcacatacacaaagaaacaaatttttgaaatactgaaacaaaaacttatttgggagacaaccaattcccagagcatttcatcactgctcattggattttttgaattttatacaaaaatcaattttgaagagagccgattgaatatgaaagaaggaaaaatcgatttttgggagaaaagtgctcaggaaatgaaaatgcatttattcattttagagccgtttggtgctttcaatgtcgcaaggagtgtgacacaaaatggatttagcaaaatcaaaaatgcttttcatgcaacttgggaaaaattaaaattcggtattcaaaacccaaaaaagctgttagaagcaataaaaggaaaggaaaatgacgaaattatcgaagaaaaattgaatttgaacagaattttaatatctgatcaggaattagtccaaggacaagaggcaaacacaccaatggacagtgcgagtaagtcaagaaaatgggttcttaattcacaaaaatatttcttcaacgctttaatgattatcaatataataaatttctgtgtagccacccaaccaatgatttgccataatagagcccaaacaaaattggtccaattcaaaagggacacctcttcgtgcggaaaaatcagtagatttcttgaacaacccacccgagctttaatgctagatttatttcggccaaacccagataattttcaatttgaggcctggagatgcataaaaactagacaaacacaaaaatacagaactgatttatttgggtacaaaattgaagaaatccctgatcaaattcttttaccaaccacttttgaagattgtcatcaaatggcaatttacaaaaaatgtgagtttggtgttttgtcaggagaaattggccaaaaacacaccaacaaaaaattaatcattgaacaatcatggtggaaaattgggttccaaaaaaccgagtccgaaaattgttttttgtcaaaaatcactttgtttggaaccccagggtcagacataatacattcaccagcagatgatacaaagaattgtaaatactcagatggacaatgccagttagaaaatggtgtttatcttttatgggagattaagaaaaacattaaaaatctttttgatgaaaaaacttgtgtttataaaagggaagcaaaaatcaatggcacttatgtcccaggtatttggatgtcaaatgataacaatcgggctttagtttttgatcaaaattcaaaaaaggtagagtcatgtggtgaaagattgcgtgttagtgcgcaaggatttgcaataattgaggaacaatttaaggaattaatgaaaaatgagaaaaattcgtttgatcaaaacataagaaacaaaagaaaaagattcaaacgttggaatactcctttctcaagtgaaatagagaagagtctgtatcgtttcggcgcaaccgtttcggcgcgaccgtttcggcgcaaccgtttcggcgcagccgtttcggcgcagtgtcgtttcggcgcaagggtcgtttcggcgcgaaaccaaaaaaagggtcggaaaaagtcttgactcaaacttgaaaaactatttcacagcttacccaaaattctgaaaaaattcctatttatataacttttgataatgatcaaaaaagtctcttacatcattaaa

SEQ ID NO: 71230 - DNA, 732 bp, Heterodera glycines
atgtgccgaagagattgccgaagaccaatgggacggtctgatcatttccaagcaccaagacggagtgatcagctacgaatcgaggcaaatttcaaatgaaaaatattttaaaatttggatttaaatttaaaattaagccatggattcgacgacattttcggcaccgaacaaatgaaaaaaacggaaaaatatttggaaattaatttgaccaaaagtaaagccaaattaataataatattttaatagtaattaccattttacagatgctgaaccacttggaaatgaacttcaagaagcgctttcttctgcagcattttttgacgattttatgccatttgttttggcatttgaatttggcgcaacattttgcggagaaaacggcggtaccaccaaattgtgcaaagagaaagttcaattttcatatttaaaattcgtaatttataaataatttcattttttagtgcctttcccaaacattggtcgccccaaaaacaaaggcaccgtttgttggcacaaccaaattccatggcacaacgccacgctctgtgccaaaaacaacttttggcattgtgccaacaactgaacaaacttttgcctttaagccatttgtgcggcatgtagaccattttggcacgaattgtacccacattttcttcacgtcggaagtggacaaattcttgttgaatatcaccgcgacgccctacgaaattgcatgcaatgactatgaaaaac

SEQ ID NO: 71231 - DNA, 819 bp, Heterodera glycines
aaaaaaaatcgattttttcaagtgtccgtttgggggtactcaaacaattatgggggagcaaaaatccaacgcagaattaaagtacaggctatagggaagctattcccgaaggattcggtctccccataaatctgggcgcatcggttcggggggactgccccgaaaacaaaaaaaatcgattttttcaagtgtccgtttggggtactcaaacaattatggggagcaaaaatccaacgcagaattaaagtacaggctatagggaagctactcccgaaggattcggtctccccataaatctgggcgcgtcggttcggggggactgccccgaaaacaaaaaaatcgattttttcaagtgtccgtttggggtactcaaacaattatggggagcaaaaatccaacgcagaattaaagtacaggctatagggaagctattcccgaaggattcggtctccccataaatctgggcgcatcggttcagggggactgccccgaaaacccaaaaaaaaatttttggataaaaattatttaaatgaactgactagataatatttaaaataggttatttctcttcctttcagtatccctgcaaagtttggtgcgcttctgatcagtttctgaaaaaaaagttaagcctaaactttttggcctgtttaaaaaggaattaaaaatttttaaaaattttattcatctccctttttgatagaaaaagcatcagagtgcctaaactaacatgtaaataaaatttggtgcgtttcagaaccctttctgaaaaaatatttaagaattaattttgcaaaaaataaataaaaacgaaagact

SEQ ID NO: 71232 - DNA, 541 bp, Heterodera glycines
atgaaaatgaaaatggcacatccgatgagcaaaatggaggtcagtcagtcattggataaatgaatgatttaaaatattggatcagcaaaagtaaatttgtaataatatttggattacgaatttaaaatgtattttatatcggtttatctcagttgggcgccagcagatttttggattataacttttttctttatcaaccaaatccaacaattttagtatcattcgaaagtcctccttagtgtctgtcttctattatcctgcaaaattacaaaaaatttcgtcagggttaaaaaaaagttatagccagaagaattaaaaaatcatattttccaacttttttggccataacttttttgaaccttaacaaaatgtatcaaaattttgcagataattgaggacacttagggctttatttggttgacaaagaaaaaagttttagccaaaaacgtgccggcgcccaactgatgggttccgatttaaatttttatttaaattttctttttggtgcctttgtttttatgagtaaatgtttttggcacaa

SEQ ID NO: 71233 - DNA, 441 bp, Heterodera glycines
atggacacagctcagcgcaggattgccatcagaagaaaattgaaaaaggacgaggcttacgatgatgatgatcaacgcaaaaaatataggatttatcaaccaccaccactgcctcgcgcaaaagtaaaagttgagcacccgaggcctcctccaccccggccgcgtcctaacgtcaagagagaacaacaacaaaagccaaagtcagaattcaaaccgccggcgacatcaaagaaaaccggtcaccccactccggcaaaaagagtgccagagtttgttgatctcgatccacgaccatccacatcaaggcaggccgggtataacccgcctcccccgacgcccaaaataaaacatgagccgacaacaaagagacctatgccataccgtatcccaaaaagagaaccaaaagtcgaggaagcgccacaacagcaacagcctcagtag

SEQ ID NO: 71234 - DNA, 169 bp, Heterodera glycines
  unsure (1)..(169): unsure at all n locations
ttgtgccgcgaagcttgcattacncatcgcgttattcttttccgatttataaattcgatctgattttttcaatgatctgggtttaggagaccgcccaaaaagactcgcattttaaaaatttgaaaaaatttacggaaatatttttgtctgccattaccaattaatcaaa

SEQ ID NO: 71235 - DNA, 3546 bp, Heterodera glycines
atgaagtgctgccaaatctgtcatggaataatttcccgttatattctaaagtaaaattaaatggagggggcgggagggttttgccgaattttcaaatttttactatattataattattgagagaactaaaaagtcggcacatttttcctccccggtacattcttccaacaatgccgttttgtcatttttaagccggcagtcggagttcgtcgccaggccgcgctcgtcacccgcctccacgaccgcctcctgtcgctgctgctgctgctgccgctgcccatcacgcgccgattgcggccgcgcgaaagctgcagaacggacgcgaccaccacgacattggcaatacgccaggcaattttttgttttaaaaatcctagcaattttaaataacgaaattattttagtaaaatcggccgcttcacatggacaaccaattcacaaagactttgttcgtgctttggtcgtacatttttcgattcctttctcttctgatttcgctcctttagaaaaacgtggacactcaggcgagggatgtccgaccaaatgacatacggttggtcatttttggtttatttgggccatttattcctggacatatttcaattaagaaatgatgatctgcccgcagcaaatgtccgttctccgccgaccgtgcaaccttcgcatcattttgcacgtaattctttgtcaaatatgccaatttgattaatttaggatgggataatcttatgcaatttgggttaatgtcttgaaatgggatcactgttcatcggattcattaccacttctgcgttcgaaaaattttaacgattttaaaccggtttttttaaaaaactttcatagctcattaaaaaggaaaatcgcttgaaatttttttttggaaactttgtacatccatcgaagtcccatccgccattttcagcccgccccagcggcagtccgtccaccgatttctacggactctcacaacggcaggaggcggtgctgcagcggatcagttccgaggagcacaacacatcgggcggcagtgtggggccgtttccgcgaaagtcgtcggccaacaattcgttcgtcagcgacaacaagcgcaacctgtctatgcgcgacagtgggggcaacactcttcagaatggccaacataaggcgagcgttttaaacggattgtcagtctgtcacactgcaatttatgtcgaaattcgttttataattaccagtttttagaaatgttttcccatcttttggtatattttgatatttaccgaggtccgaagggtgcacttataaaaaaatttttatgatcggcgggtgggaaacgaattgctccgaggttcgaatgctttttacgagtccattttactctgtttttcatttcttagcctatttactttgacttttttaatttatataagacaccaatttgcagtggtccttcctgagctccgaacagttggccaatgaccacgagcagcaaattgcattcatccaggaaatatgtgacacaattggggccaatgcagtgacgtaatattcacattttgtttcgttttttaatttgtcaaaatttagcaatgaaaaggaaattgaggaggctcttcaagtgttgtcgcgaatggtaaggaaaagcaacatttgtaagcattcacaatcacttctctgttttttaagatccgcgaaggagggattacgctgtggaacgattattttaacacaattttcttcgccatccaacagatcatttctcaagatttggagcgtcactttaacatcatcaaaatctcggcacttaaaacactcaaagagttgtggtgagttggcatttgttgagggggggggggtgattaattagggaccatttgccaaaccaattatgaatcatttcattaggcactcaattaaattaagagaggcggcatttctttttctatcccttttttcagcttggtccagccgaagcgtttggttgccaaaactgaacttttggtgatgatcattctgaatgcgcacgaatgtgaggatgccaccgtggtcagagcgggtaattctcacagtgatttgtccacttttttggtacaacggctcggcatatccgaactctgccccccccccccccgaaaattaaaaaatcaaataaattaggcgaaacgtatttgcttttccgttttgatgccgtaccccattatcctcaaatgcagactttgtgtcgcttataattctctcgccagagaaatttgcataaatatgaatgcgtcaaacgtttgataaaaaaacggggtgtgccaccaaaacgtaaaagtaccgaaacgtaatgcacccattcgtagattggtcaatttcgtattatgattgcatgcgttgattacatttgttccccatctccgttcttcagccgaggattgcggtgctgcggttgccaaccatttgccgaccaacacgtgcatgcaccttttgctgaccgtcatcgacgacaaacacagcaaataccaccaactgtcgggagcgatcaaaatgcttggaagtatgctctccaaactgccgccagaagaagtgagagagggaaacaaagaattgtttattcgtttcattttaacacatatttcaggtggttgaactgctccccaccgttgtgcctcggatgactcaggtaaaaaagaagcaaattggacacaaaaggagcaagcacttcatttaccccacgaaatttttatttttattttcaaaaagattctaaaaagttatgaaattttcagtcacggaattttctttaattttttctttttttgaagaatttctaagtgtatattttttaaaagttttttggatcgggaggggtggaaacgaccggctctgacaaaaaagtaccagcaaaaaaaggggggaggccgaatgggtggaattgccagaagagcatataaccaaccagtggcaaatgtttttcccattttctacaattttttcttcattttaatttattttggaaacggaaaactcatttacacttcccatttgatttttatgtgaataattcgttgattttcctccaaatgctctctcagtgctacgacaattcccagtcgatggtccgacgttcggccatcatttgtttggtttccatcagtcattcgattgggttgaatgtgttaaagccacacctaaacgcagcgacggttcgtttttagggttggggttaaatgagtttctattttaattttatttttgattgtgtccgttgttgttaagcttaaacttgtggacgtgtaccgcgaaagaatgcttaagcgatcggacggcggtgcgaacgcatgagaagcgaatgaatggataacaaacgaataatccgaacacagcaaaaccgtccaatcaaatcacttaccaaaagcacccaaaatatatttattttcccaattgcttttcctttttcttacgttgtgttgtattaattcaattcttgcattattttattttttggtgggaatgtccgttgattgtgagccgtgctcttcataatgataatgaccatcatttgtcttcactgttttgtctggttga

SEQ ID NO: 71236 - DNA, 383 bp, Heterodera glycines
atgccaaaacaaaacgaaatcgttttaaaatattcctttctggacttgacttggtttcttgatatcgaagctgttttctacgctatttctaaaacggtgataccaaaccccagatttttgaatccggttttcagaaaaaatgccttgtggtgaaaacaatatttcacatttcactccataactttgtgagttcggcacggatcgagaccgggataagaccattggaaagagcagctcgagctctacaagaacgtatggaaagaaaaaatagttatttctgggactttttcagaaatcagaattaattctccaatgtggcccaaattttaggcccccagccacagccccttgcttctcccagttttaagtcttggatttgtcaa

SEQ ID NO: 71237 - DNA, 49 bp, Heterodera glycines; identical to SEQ ID NO: 51181

SEQ ID NO: 71238 - DNA, 510 bp, Heterodera glycines
atgtgcggagacggggccaacgactgtgccgcgctgaaggcagcacatgccggcatttcgttgtccgaagcggaggcgtccatcgcggcaccgttcacttccaaagttgcggacattcgatgcgtgccaacggttggaaatgatttaatattatgcacaaaaaagtcaacaaatttttggcgaacttttcggcacaaaatgacaaattctattagtaatgaattcggtgaagcggtgctgactgacgccgccgcaaaaaaaaaaatatatatatatatatattaggaaactgcaatttttcaaaaaaaaagttattaaaattttttatttgcctataacccccctcccccccccccctccgttttacagatcattcgcgagggtcgtgccgcgttggtcacttcgtttggcgtgttcaagtacatggccggctattccctcacccaatttgtgaccattctgcaactgtactggctgaacaccaacctgaccgacttccaagtaacttag

SEQ ID NO: 71239 - DNA, 774 bp, Heterodera glycines
atgtttagggtcactgcacgctatttggtaagacttggattaatggggaaccgcaccacacacatttgcagtctctgctctgactgataattactaaatatcgacgatactgatagaaccatttactgttacagtaacaacacttaaccgtaatgctctaccggcgaagcgtcagctgaaagggggagcagcccggaaattagcaccagttcaccaccatattcatacaaattgtctaattaaagttaataatttataaggttttagttaaaaataaattttagatccaaaattttgatgaggacaattactgtttattttacgctatgcaagcaacactggttcgatcaattagttacttggatcgtcgtcgctttcatgattacgtcaatggaaacagtgaaatgagaggaaaacttaaacatgatgctttggaaatgatgaatgctgttaattcaccagctggccaaccaattacgatgcggaaatatatgtgccgagaattgtggactggtggaatgggaaaaaattcgttggtcaatggaatttcaaaacatttgtcttcggatcggcaggccattacaagcctttattcaaatatggaccagaggactatgttgtaccgatcatcctttacttcgaagaggggcattttaatggtgtgcagaaaagtgggaatttgttcggcaagccatattgtctaagttgtgaaaagacctacgatcggccaaaacgtcacattgttaattgcgaagcccgctgcgttaaatggta

SEQ ID NO: 71240 - DNA, 676 bp, Heterodera glycines
atgcagaaaacagaaccagttcacttttaccaatcagcatgtatgatttttttacaattaatttttttctattcattaatgagattaattaagtttggaaagaaaacatctttgcacaaaaactttacctttaatgtcgacgatcagagagaatatgagtttacactcattttcaatgacacatataaattctatgtgaatagaattttgttttacgaacagaacacaagcattacgccggcttgggcaataaattttgtccgggtaattaacgtactaattgggcaattaacacttttattgaaaaggtggaaggcaatgtgaatctactcgaagagccatcagtgaatttcacggaagtaattaaagggaccggatattcattctccaaaataatattagcatttttattgtactaatgagagatgagttttggtttcattaataaatgccattaaaaaggggcggggtggggcttaaagcaagcaacagattaaatttgaaaatattttttaattcagtgcgaatccgaagatggcatttcaatggaactgtattctttgcttaattatggagaattagtgaaaattgaaggacgagtggatcgtaatgccacagtaatcaaaatttatttgtttcatgaagtggcgcaattcaccgaaatgagttaattaaa

SEQ ID NO: 71241 - DNA, 430 bp, Heterodera glycines
atgcttttacttgaggagccgacaaccgttgaaattgatgtaagaaaacataatttgttaaaaaattaaaaattgaattaagcttatgaacccagtgaagctcaattacagcaaattctaccaacaaatttgtatcggaacaaaatttttgttccgtgtccaattgttggaaaacaacgccaaaaattgcaaaaacgaaaacaattttgcaatcagtttgttgcacaaccgaccagaacagcacatcagaggtgtttttcatatgaatgaaaatctaatcactgatagtcggaattaaaatggtttcttggcataacaaaaataatattttgtaaattctatttaaatttcgaaggcgccttgccgaagcaaaaattgccttttgtttactccttaaataattttggcccaaattttttgagaaaataaa

SEQ ID NO: 71242 - DNA, 1112 bp, Heterodera glycines
atggacccatccgccgtattccgcgcacaaagacgcgcagggaaatatttacgcccgggggcacaggtaaagcgcgtctttttgtaatttttattattttttttgtattaatttaattaatttcttgaattaaattgttgaggatatgaaaagcgttggtgtccaatacattgaggcattgcgattgcttctcaatgccaacgggcacaagcccttcctgcgcactgtgcacgttttgttcgggccgggtaacagaaacaaaaaatgccgaaaaaaattggcaatgaatttttttcccaatttgagacgaggaaatcggaggccacgatgggatggaaaagtttgttcagacagacaaatttcgggcgctgaatgtccggctttgcattggacgaagggttggccagcgaaacggatgtcttccgcgtgttttacggcgaaagggccgtttggtgtaagttttaattgccgaaaaggggaaattttgacaatttcaattcaaattcaaatccattttgttatttttaagtttgtggcacagctttaacacattcaaaagaatgtaaaaaaatgtacaaaaaagagcataaaaaagtattaataaataatttagttcatatattaaaaaaataaaagtaaaaaatttggtccaattttccggctttcattgcttatattttcgcaacaatttgcccattttgtgaacatttttcatatttttattctgattttatttgttttttcagggatgaaaatcatttgtcgtgtaggtttggcatgttaagcatatgttttcttgatttccccattgaaaagcccctggacacggatcacgatttatcgaagacacagctggggccttatgctcgtctcgcggtttagagctaaaccacggttaacggcgttaaccgtggttaaaaatccttaaccgcggtatgctcgtccttcccttcttccccgtggttaaggctaaaccacggttgagttaaccgtggtttatttccaaccggtatgctcatctaaccgtggtttaatctttcttaaggaatcttaaccacaactcgagttgtggttaacgtaaatttatttaataatttaaatagtaaaataaa

SEQ ID NO: 71243 - DNA, 850 bp, Heterodera glycines
atgcttacgactctggaagagctcaaagccacaccatgtggcactcagcttgcgtaagtgcttgaattagtaatttgttttaagtaaaattgttaaggtctttttgtgggcagattgtaagcattttaccgtctgagaagaagttgacggctttgttggcgtgtgcttctgggaagaatgttgttctcacagaatttaagagcgtgtcgtccaaattttcaaaaatttgttcccttggaattgtaagtttgctgtttctatttacagatgcttaccttactaaatacaggtcgtcaaattttacatgctgaaagctcaacgctttcaagagcgtttcgatggaaagacaatttacgttacgccactggattatgaatttgtggtgatgactttcacaagaatggagctgattcaatgtgccattgcgactgcggattcatttgagaaattgacttcgggttgcatttattgtgagttttaatttttttattaatttataatatattacttggtttgtaaaagtgtttataaagcaataatatactcttcgtgcttttgataaacattactgtttgttctgtgactttcgtgtgagacacaaatgtgtgtcatgcttttgataaagcataagtggtttgttctgtgactttcgtgtaagtcactaatgtgtgtcatgcttttgataaaacattagtggtttgttctgtgactttcgtgtaagacactaatgtgcgtcatgtttttgataaacattagtggtttgttctgtgactttcgtgtaagacactaatgtgcgtcatgtttttgataaacattagtgtttgttgtgtgactttcgtgtgagagataa

SEQ ID NO: 71244 - DNA, 1443 bp, Heterodera glycines
atggcttcttctccttcttccccctctccgttgttctacgttttgtccgttttggccaattccaatttgttcccttttttcttcgccctttccattggcattccgtctgctttgctgtactgcttggagttggtggtaatcgtcgccaattttgctgatttcaattccgctttttttgttctcgtcgcttttagggtggtttcggtaaatatttaaaaatgaaatgccaataatcaatccgttcactttagagtttgatcaattttgttttttcattttttgcccaacgcttcggcgaaattggcctctttttggcgctttatcttaatttgccccgctttgtgttggcttcgtttttcttctttttttattacacattttatattgaaaatttgctgaccacttttttgctgcttaatcgtttcacggccattttattcccaacaaaatatgaaaaggtaaactaaattaaatgattatttagaataatttctttttcagttatggcgccatggattgccactttttttggctgtcacttttattttgccgttgcccttaacaatcccaattttaaacaagggcacatatatccatgtgcaagatgacaatgccacatttacattggacaattataaaacagacaatgttcgctaattagcctaattagaaaatgatttttaattgttgattaatcattcgtttagaaatttgattctagtgaaattgccacttcgttttccttttttgttggcgtcgtttgtcttctgttaaatttggcctcaattgtagcttataaattgaggaaagttggtcatcaaaatgcaaccattgaacacaaattgactattttcacaatgattacattttttggccatttcatcgccacaatttcttgggtaggaattttaaaattatttaattttccttttaaattctttaattgcaggttttggtttccctgacttcaataaatgaagtggatgagcaaaacaaaccttcttcatatgtccaaatgtggtttggcctcactttcgaggaaaacgaaaccctttttcaagcaaatttcaatcagtttccctgggtcaatgatttgtccatgttggccatcccggcatggtaaaaacaatggcaacttttcaaataatttattaatttaaaaatattttacactgtctttcattttaggcttttgctttgggcatcgtcaaaaatgagggaaattattgccaaaaaatttaattggataagaagaaatggacaacaaaaaaacattgcaattgtaacagtgaaaaggaatgttgtgccaatgtctgccaaagttcagccccaaaagcatttattgaccaaccaacggaattaatgttgtaatttaaacgtatcccaggaatattaagatgaaatccattcaaaaagagcaaatcttttcctaaaattacataa

SEQ ID NO: 71245 - DNA, 1480 bp, Heterodera glycines
atggagcaaatgggtgagcatttggtgcacgttctgaatgccatggatgtgcagaattgcgttggcattggcgagggcgctggcgcggacattctttgccgttttgctgtaaataaaaaatttaaaaaacaaaatctttttctaaaaatcgaatggctaattaatcccagatggcttggccaaaccgtgtccttgggctggttctgatccattgtttggccacttcgcacggaatcatcgaaagcctcaagcaaattgttcgtttgccattgacacaatgacagaatcaatgaatggtggcaattaaaatagctattaatttgcaaatttagttcttaaatttgcgagtggaggacgggaacatgaacaatgccgcgtgggattaccttttcttgcacaaatttggattggtcaatgtctaaaatttaatgcgaaataaaaattgaaaataattaattaattcttttaaaatatttcctcaaaatttagcacgaaaaaacgttgaaagaagcgttcattgccgagctgagttccgtgctgaatacgaaaaatttgagccgttatctctacgcgtacaacaaacggacggacatttgcggagcaatcggcgaaaaattggcaaagtcaaaaaggaattaaatttcttttttaaattgactcatttgcttttcagcattgacattcttctcgtcaccggttcccgagcctcccacattgaggtaaaaaaggcaaatgattggcaaaaccagtggaaaaatggcttttcccagaatgtcagacatatgttcgagaatatgcgccgagaaaagagcactttgctcgtcattgacgacaaaatggacgttttgatcgaagcagtaaattcaatttaaaaaatgcacttttttaaaacatttctttagcccgatcgcgtggcccggtcgctgatccttttctgcaagggacttggcgcactgagtgcggtcgaaacgccgggcatcggccgagtgcgatcggcgagtctgtgagtgatcggaacttttgtaaaagttcaaaattaatccggcatttatttgcaatgcttttgtgttgaaaaaccagctgatcagtgccaaatttaagaagcatggaaaaggctgaccgaccaacgcgcaaattctcgtcgcctgttgccaaagaaatcgcaaagaaagatgcccgtgacaccaacaaaaacatttgcacggtgccgttgagaaaagcgaaagcaaattaatgcagtaatttgacaacaaattttttctaatcattttacatttattttgaaaaataataatctgtatgaaataatttacaaaaatccacctgcgtaaaacaaatttttggttttaaaaatgaattactacttatgctttatatttgaagtaaattatcttcattattatagccaattaattttggtctcacaaaatcactgaaattgaaatttttaatgaacggaacaatagaatgaaaaaataaa

SEQ ID NO: 71246 - DNA, 1145 bp, Heterodera glycines
atgcaagaacatggcatgatttttgacgctgttcatgggcgaactgttcacaaattcgatgaacgattgggaggtggagccgacgtcatggacagtgagaaaaacctttaaataatatttaatattaattctaattaaattatgccagtttatatagttacagttttgccctccaaattctctctcggtttctgcacataaacagtgaaatgacaattcggtggcacatccacagtgaccagctaaaatgatcaaaatattattaggggcataaaacagtttaaaattacattaatttcgtcagtattcgccatttcctcaaaaatgttgtggaataaaaaagcttaatttacgtattttatcttttcatttgattaatttttatttgtgtttgtatttgaacgttttgtggcttttgaatttagtcgttgatatttaaaaataaaaattcaaaacaaattctctgtttcgggaatgaggttattccatagtcgaccaaaaatgaagaaaaacaatgagtgacgagaggcacttttagcaccaaagccattcccaacgaccgctcgaaggtggttgttgtttacgcggatgttgcctcattttaactcaattctctctctcccatgaaactcataacatttgtgtgtccctttcccgtcgccgcccctccccccggggggaggggtgcacatttatatttgtacaaatattccatttaaataatttaaataaataaaattaataccatcattgttaaaagttaaatagcgaattatttatttgttagtattgattaaataattcaaagtgattgggccaaagatgaagagagtgaacgaacagtaatgactgagactttggggggagaagggaatttggtgcaaattttatgagttttaaaggctcccgactcaaagtactgacaaaatttaaaacaagaaatgagagaagatagaaatggaaaaaagaaaaacataaattattgagagtttaacagcaaatgagcaattaaggaataattgaaacatttttgtatgcctttgaatttgaatggataagtttgataaataaaaaataaaacaaaaatcaaatttagatattcgaatgctctatttaagaaaagacaaaacataaaattgcaaaaa

SEQ ID NO: 71247 - DNA, 627 bp, Heterodera glycines
atgatttcgcgtttgttagaacaaaaagaagctatttaccaatatgctttcgaaaatcggagttttgatttgaccttaaccgaagaagagtggaagcttattgaagaattaatttctttgctccagccaattgaggaagcttcaaaaatgctcatgaaatcgcctttgtcgggttaacaaaagatttaattttaagttaagtcgcatatttcagctcaaattcccattgctgtaacactccacagcaagctctttagtgcaaaattaatcaacaaagaaattgacagtgttcggtgttcgctggtcaatgagatcgaaaaatatttctttggtctacgcgaaaaacggttcataaacacatatttatttagttaattccattttttatgttttagtgttcattgtctatcaacattttttgacgttcggtttaaagacaaatttttgctcgaacgaagaaacatctttctggcaaaaattttatcatggataagggaagaaaatgacgtgttcattagcccaccaattacggaaattgatgagcttgactgtgcgccgccgcctataaaaaaacaaaggccttctctgttcgacgatcttgatgaaatagcgtcatctagcaataaa

SEQ ID NO: 71248 - DNA, 1587 bp, Heterodera glycines
taagcgtcgtcgctctcgcagtcgttcgccattgcctcgtcggtcgcgcactcgctcaccaccgcggcgctcgcgttcccgttcgcgttcacctcgacgccgcgacgatgacagtcgttcacgttctcgctcgcctctgcgccgttctcgctcgcgcagtctgtcccgttcgcgttcaccacgtgactgacagagtgaacagccaacgaattggagagaaaagtcgaatgatgaatattttcgattacaaaccactttatattattgtttgcatcattcgaatgcattcatttccgtggtttcctttaattgtggacatacatttttaatgaattaaacgaaaatgaatcagcgcaaccgaaaagtcgcatttaaatttctttgttgatgtattttatgtttcaattaggccgtgccttagtcgggtagaaatggtttcgaactgatgaagacggtacttgtctgatttcgttgggtttcgaaatggttaattggtgctgcttcaaattttggttttgctttcgacttttgcttgcttccatcgcgcacttcaattggtagaaaaattcctcaatttttgataagacgaccaattgatgagtttttttaggtttgccgccatttatgtcaattgcattttctttacattggtctgttttttgttagtgaccggtattattttgcacttcagtggaaatcttatgacattttgtggttttggactcatttggctctttgtgtttgttttcctgcgcttcgaccgaacaataatttaattgtcttcgtcaaattggttagagcaaaatgcacggatcactccagcaaaaacggggttttgaagggcaaatttggagtggacaacaaaccgatcaaaatcacagatttggagaaggctcgcgcaaaaaaggaggaaagtgagcagaaacttatggagaaaaaggagcggagagaacgaaagaagcgacaaatggccgaattaagggaaagagcgcggattgaaagacggtgagcgaaaaggagggggaaaaggcgggcccaaagtggtaatttaaattagggatttaaatacattaaatgaatcacagacatattgcaaataggtcggaatttgaaaattttttcttagccgtaaaaactttgctggtgccgttgatttgctgctcacttattgtcgtctgatcacttctttcgccgttttggtcggcaacattcacaaaacgttcattccccgctatttggcccctccgctggagaatgtctacgacagtcccgaccttttgatgtttttcacgtaggcgaaaatcttggattattcggaatttaaaattttctttctaaagcataacacttctcatcgacgtcggctttttctggttgctcgtcttttggaggtgctaattacttttcaccctcttaattggtgtctctctctttttcagctattgtcagcagatggccctctgttgtcggctcggcttttgccgttttttgctttggtgcgttgctttggtttttgttggcggtggactgatgctttatccaatgcattttgttcatgaacaattgggtctgttgctcatcctttag

SEQ ID NO: 71249 - DNA, 215 bp, Heterodera glycines
tgagcacaaaacctgaaagaagggtttgccttgggctcttcctcagaggctgttttctggctgccgcttgagatggcgctgatcgcctcatccgagatcgatttataagattgcagggcattgggcggtcatttcggttaaaaaaagaatgccgtgtcaatgagggtcaaaattacattcttcccgcttgcattgggctctgttttgaatttttc

SEQ ID NO: 71250 - DNA, 374 bp, Heterodera glycines
atgaccggcctcataagagatcggtctcgttatttctcgtcactacctcctcgcgttgagagtgggtaatttgcgcgcctgctgccatccttagacgtagtggccatttctcaggccccttctccggagtcgaacccttatcctccgttacccgtcatcaccatggtagtcagatacactaccatcgaaagttgataaggcagacacttgaaagacacgtcgccggtacaagaccgtgcgatcagcttagttgttctgagtcaacactggacgcccggagggcgcttggttttgtggcgaacaaatgcgctccgctctggggagattggagctttggtgcatgtattagctctagaattaccacagttatccaa

SEQ ID NO: 71251 - DNA, 754 bp, Heterodera glycines
atgaaccgacggtaatgaattttttaaaagtcacatattcttgtttgcctaatttattttcattatttcagttggatttgcaatgacgtttggatggacattttcccatcctttgaccatgctcaactcggcctcaaattggcacttctttcgccacgtttcaatgcgttggtggacaaacatttcgatggcaaaagcgaattgacaatttggagacgaatcgaaattcgtcgcaaggacaaaggaccagaagcgaaactgtctgtacttatgggtgaatacaaatttgcggaatttcaattgcccgaccgtccgttgcccagcaaaatccgtttaaaatgccttatgattgagtaatttaaaatcagagagactcacaataaaagcattcattccattttcacagttacatcgatcactccgtcatcgcttttcttcgttcaaatcatcaaattttcgacaaaagaggcaccaagttgcgtctggggattcttccctcacagaccacggatgaccggcagccgatttgggatgtttttgttcgtgaaatatggccaatctttgcgtcaaacattcgccgtttgcgctttatcgatggtgatcatttggacaatttgcgtcgtcgcacttcgccaacaattctcaccgatctcgatcagttgattgcaatttattccattcacttgttgcctgatccaattggtgataattttgatgggccaaatgcaactgcgggccaagcattgtccaaatg

SEQ ID NO: 71252 - DNA, 65 bp, Heterodera glycines
atggctgtctcttttttctcctggggatttgaccgcaaacttggtaccaacatttgccttctcta

SEQ ID NO: 71253 - DNA, 59 bp, Heterodera glycines; identical to SEQ ID NO: 52421

SEQ ID NO: 71254 - DNA, 59 bp, Heterodera glycines; identical to SEQ ID NO: 52421

SEQ ID NO: 71255 - DNA, 59 bp, Heterodera glycines; identical to SEQ ID NO: 52421

SEQ ID NO: 71256 - DNA, 59 bp, Heterodera glycines; identical to SEQ ID NO: 52421

SEQ ID NO: 71257 - DNA, 59 bp, Heterodera glycines; identical to SEQ ID NO: 52421

SEQ ID NO: 71258 - DNA, 59 bp, Heterodera glycines
aacatttgccttctctaatctggctctaccaaacactcacacgatatttgaaatgctaa

SEQ ID NO: 71259 - DNA, 1138 bp, Heterodera glycines
atggcggcgcgattcaatgaagccatggtggctcgcttgatcgaacttgttcaatcgcgtcaagatgatttgaaccctccaactcgaactgcaaaagcaaacgaaaagcaaaaagaggcgtggaaatttgtcactgattctatgaatcgtgagtttcctcaggaagtgccccagggcggcttaacgattgcacaaatccaaacaaaattcaaaaatctaaaacaaagggccaaggacgaacgacaaaccgaaaaaagttaatcatatgtgcgcctgtgctgggtttcagcattttctttaggcatcagcgtgccacaggcggtggaaagaaattcgaaatgactgaagtttcgcgcaatgtttcccaattgtttgctgattcaccggcatttgagggtagatatgtgttcgagctaatgtgtaagtagatgtttgttaaaggagtgcccggcggcgtacagaccggtctcaacatcggcgacaccattttctttgaaggcaaagaacaagaggaaagtgccgaattttcctcacagcaagttgttgttgaagaaggaaagtcctatgccgttcttggcactgtgccacgcggagaggcggtgaaaactccaaaatttgaatcaagcacctctcgcgtgccattccgatctcgtgccggaactgcttcaactgttacagctgctgatgtaatggaactgcagcggagtgttctcgagatgcaattgaaagaaatgacaaaaaaacaagaaatttttaaaaaatttgaggatgttcttgacgatgctaagacattttttactgagggtcgcgaattttttcgtggaaagcattcgaatgagaaagaaatggccgattttcaaacatttcttgccaatggcctggttgcagccacgatgcctttgttctccgccagtcaaacgtatgggaagcatttgaaggtggccaaatccaaggaattattctgggtgatagtgcttatccaacacgtcgctggctaatgacaccttttgcaaaccccacaactgctgctcaacaacaatataattatgcacatgcaaaaacaagggttattgtcgagaatgcatttgggagatggaagcggcgattccatattttacattccgaagtacgaattaaa

SEQ ID NO: 71260 - DNA, 771 bp, Heterodera glycines
ttgcacaatccgttaatacaaactttgctgatcttgtcgattctaagcgaaaatctccatatatgcaaacgagttatcaacgtacaattctggatattttcaattattttaaaaaataatttttttaatattatagaaaaaagttgctcaaaaaacaagcataatgatggtagtgttcgtcatcgtaaaattaagccggtcaaactgttaatgaataatccatcagcggatgttgaagccgaagtcgtaaagaggccgtcttctttatctcgtccaattttgaacagtaagaaccattttttgattttattaattagtaattcttaattactgttaataaccaatcctttaattttgttaattagccaatgattttattaatttaattaagcaagcaattactttattactgttaattaaccaattattttattttttaatttgccaattatctattacttttaattaactaattatttaacacagcccgacgtttggaaaagggagaatcatcgatgagcaaatattttgacgattctcttaggcgatcaagatcaaagaattcatccttttcttcaacttcaagctcatcatcattagcaagtgaatttttggtttaaaattttgggaaatcaagcaaatagcttgctgaataaggtgtttttcattagttcgtcgacacttgcggaccaatatttccggatgaaaatgccaacaaaaaaatagaatttttaaaaaggtatttttaaaaatttctaaacaaaaattaaa

SEQ ID NO: 71261 - DNA, 1755 bp, Heterodera glycines
  unsure (1)..(1755): unsure at all n locations
atgcggaaagggcttttttcgtgcttatctgtgcgtattaagtgcgcaaaaattttaggcatttgcctaaaaatcgcatccctactcattaatatatgtctcccaattaataaaagatttaaaatatttaaggcacaagcgatggacaaattgtcaattcgttgacggaccaattggagaaagtgtttaagaaaagagagtatacggatgttgagtttttggttgggaaggacgacaaaaaggaggcgagtcaaaaaaaaatttgttttttttaattgacgacatttacaactatcgatgatgcaaaatcgttttttcgaactaaaaaaccgatagaatcaaatgaaaataaaaaaaaattgaaaaattttgaaagaccaaaaaatatccaattcaaatgaaaaatgccaaatttgcgatttttgagtctttttctaaaatttattaataaaagcaaattttgaatgatttattatcaatacataaaaactttcaaaaaatttcaaatagctagaaagattttttccggatttttcatctaatgaaaaacatttattgctatcaaatgattcaaatagagacgggcatttgaaaaatcaaccgaaataaaaattttattttatggaaaagctttttttatagatttactaagaagaagcagactggcgaggtaaaaagtggaaagctggatttataagaaccagaaaaataaaagttgattttgcctcagtagctcaatggttgaatatccacggattgggtgtaggcgcgggttcgattcccacccgagtcctaacatattctcattatttttttgtactaaaattataattctcaaaatttttaataatttggaatttttttagattatatcagctcatagagcgattctctccagtgcttccgatgtatttgaagcaatgttccgttacaatgaaggtcaaattgagatccccgacattgaaattggcgcgttcaaaacgatgctaagatttatttatacgaagagttttgatggattggatgccaataatttgttggaagttttaaaagctggtgaaaatttattaattgaattttaaataaattggaattttaattatagcacacaaatataacatcagtggcctggtaaaagaatgtgccaaattttcaattcaaaagttgccaaatgtttttgtggcttttgaacaggctttgttgctgaagatggaggtgaagaaagaattttaattattagtaacatataagcgcaaattaatgagactttgatgttttgctgagaaaaaaagacaatgtgattaataattagagcccgggtaggaaaggatcaagtactgagccaataacacaaataagcattataaaagtcataatcgtaaacacccaaaccaagcggaaagccctttgcttgtttatctgagcgtaataagtaagcagtaattttcggcacttgcctaaaaaaatgaatccctaaatgattatatttattttattttaggattttgctctccgctgtttgcgttacattgatcaaaatattagtgctttgatcaaatcaaaagcctttttgcaaattaatcaagatttgttatgtattattctcgaaagtgatcagctgaaaattagtgaaatcgaaatttggaatgcggtaaaataaatatttaaaattacaattaattaatttttttaatttaggcactccgttgngccgacgaacagtgccgtcaaaagggcatcgaatgttcccgctga

SEQ ID NO: 71262 - DNA, 352 bp, Heterodera glycines
atggctaattttaaatgccttttccaatgcgctttttgcttcttttttctccgattttccgtaatcgctgttgaacacaatgaaaaggatttatttgatgaaatttggaagaatttaaataataaaacgccaaaagtgaagggatttgagaaaataaaagttaaaatggaaccacaaatggacaatgaacaaatgataaatatggaaaaatatggccaaattgggaagacaaaagtgaaaaaagaaaaatgcgaaaatggccaaaccgaaaaagcaaattattcgacacgaaagcaaatcaaaaaggaacaccaaagtgaggaaggaacggagattaatcgacaaacaaaag

SEQ ID NO: 71263 - DNA, 362 bp, Heterodera glycines
atgatgatcagaagagcaagaaagacaatgctcgatgttcgttcaacccatccatcccctgtccgtacaagcaaaattcaaagaaaatacgtgtcgtgttcgggatttccggagtcgaaggattctcgcccacccacctcgtctgatgacctaattgtaagcccaaggacatcctatgggatatttggtattatttgttcaggcaaagaaaatatgtaatttgaaaaagaattcaattttcttagctctctctcacttgcttttcaaggcagcctctttctctccgtttgtttgagaatccaccaactccgaccccgttggaggagaaggttcatcccccattccaattccatcacaatgtc

SEQ ID NO: 71264 - DNA, 427 bp, Heterodera glycines
atggaccaattcccacgtggattctctcctgctgggtcagattcatctcgcccccaacactataagcgctcttggccaagttagttgcaattttgtagataatcacgattatattgctttttgttcaactcagtgaaaagcaagctaaatatagaatgtaatttggttaaatgtgccgcggcattctaatgcatatgcaaagttaccaaaattgttgggaatattcaatttcagctagagttgagcggggcagggaattttgggcaaaccgggacttttcgggttgaaaaaacgggaatttttggctgggaaaaccgggaaaaaaccgtgaatttcccggtcccggtcaaaactgatcaaaaccgggacttcagtactcagttgtccgtgttttggtcccggtcccgctcaactctaattgcagcca

SEQ ID NO: 71265 - DNA, 804 bp, Heterodera glycines
atgcgaagtcagtgccacaggcaaaagcgatgccaatcagaggacggggacccctccctcaaaggtatgagcacaacgacacgaatcttcgggaacacaccgcgacggcaactgtccgtaaaagagcgaagcgtcgcggaagaggccgactcggagttgggcgactcgtccgcaacggaggaaggcggcaccgagtcgatcaggtggacagcggcgggggatgtgccattgttgcaaaatgagagactgtcccgccaggagttcgttgccgttcttcgattcgcttcgctccgccactctctcgccccatccgtttataacaatcgcagcgagcggagacaaacagttccaatacgcggaacgagacgcagtcgcggaacccttgcgctaccgcacgcggccgcctcagacggaactgccgaaagggcgcgcgacttccgtgcggtcggcggccgagtcggaagggacgaaccgaaagacgagcaaaggggcactgggcgagaaaaggtcggcacccgtggagatggaggaggacaaagacagacgaaggctaacggaagtgacggcgatgatgcgacgcctcagagacagcatcgaagcacaattggacagactaactgaacagatgggcaggacggaggacgacgacgcagcgggggacagaccgaacagccgacggggggaggagggcgaacagcggggggacagctgcgcatcactctcgccatctcgcgtttcatttgcatcgaccaaatagaaacaaattgagcccctccacctcattctcagattaatccacaaaga

SEQ ID NO: 71266 - DNA, 69 bp, Heterodera glycines
aaaagtacccggccatcaaccatttgatgaacaaaattcggatgaagaagcgcaaggacacactcattc

SEQ ID NO: 71267 - DNA, 76 bp, Heterodera glycines; identical to SEQ ID NO: 51235

SEQ ID NO: 71268 - DNA, 503 bp, Heterodera glycines; identical to SEQ ID NO: 62004

SEQ ID NO: 71269 - DNA, 414 bp, Heterodera glycines
atgcgttttgttggtgagttcgacttggacctggatttttgtcccggaaatccaggcccaacatgagattaagtccaggcttttttcaaaatgtcgaacttatttaatttggttgagaaaaaatgatggtccaaaaactcgtctggcgacaatttcgacaacaatgctttgtcctgctttggagattataaaagcattatttaaaattacatatatcccctgcacaaaattttttttcattaaacatcaaaaaatttcagtgccgactgtgatttgggcaaatttggagtctgatggtgcaaacatgcgcccccgaggaaaattagaattttgaaaggattttgttaagaaaagttgggtcaatttcagaaaatgctcctattaaaacaatcgcgcagatacattttttaaaaa

SEQ ID NO: 71270 - DNA, 2151 bp, Heterodera glycines
atggacgtcgacaaagtgcagccaattacaaaccttccaatgcctcaaacgcgaaaggaattgcattctcttttgggctttttcacatactataggaagttcatctattcctttggtaccatcgcagcaccactttttaaactcctgcaggaaaacgtcaaattttccattggtgaagtggaaaaagaggcaataaaaagtctaaaagaaaaagtcctgaaagacgtagttttgtacttccccaacttcgaaaaagcgaaaaatgacccctcgcgttgctttatcatgatgaccgatgccagcaaagttggactttcggctgttttatgtcagcatgacgatgagatgaaactgagaccaatttatttcgcttctcgacaatgcagcaaatatgagagccgttatgccgcaactgaattagaagcgttagcagtgagattcggagcaaagaaatttgctcagtttataacaatgctgccgacgagagtcctcacggatcacaaatctcttgtgcccatgttcaaaagcaaggaggagactggaaatgcgcgagtcgacaaatggctcatggaattgaattcgagatttatcttgaaagtagaataccaaccaggaaaaatgaatgtgattgcagaccttttatcgcgatcatttcaactaaacaacgaaggaatcgccgaaccgctcctggaggaagataaagcattaattggaatgataaaaatactgacagcggaagaagttgaagcgtcaattgaggagaaaagagaaaagtggagtcgagcatccgaagaaagtgaaatgaagcacatatatgaatttttaaagaaaaaaatcttcccggacgatccaagacaggcgcaaaatttgaaggaaacgtgccacaaatacacgctgctcgacggactgctttatttatgtgaagataatggcaaactgcgacttttcgtcccatccgaatttcgtgaaaatttggtaaagcaacgacatgaaggaaaatgcgcagggcacatgagtgacaaaaaactctttcttcaattggcagaacagtatttctggccaaatatgctgaaagattgcatgaaaattcatcaacactgccgaatttgtgctcatacaaaggaggcgagagcaaatgaacctccactgaaagtcgttagaacgtcagaaccattcgaattgctatgcatcgacattttggacgttggccccagtcagtcagagttcaaatatatctgtgtgatggtcgaccatttttcgaaatatttaatcgcggagccgatacgaaataagtcagccgaagcagttgcgaaagtgttggttgagaaagctattttgatatacggcacaccgaaaaaaatccattctgacaaaggaaaggaatttgtcaattcaacgattgaagaaatcgtcaaaacttttggaattgaacgatctctcacagctgggtatgacccccaggcgaacgggcttgttgagagagtaaaccgaataataatcgctatgcttaaaaagtcgacggcaagctgctggacatgggatgaacgtttgccgtacattgtgttcgcttacaacattacgccgtctaaaacgacgaaattttcgccattttccatgatttttgggaaaatcgctcgatttacgatggatggggaagtgcccttacaagtcaacccagcatacacaattgacagcgacacatacctccaattatttcgtgaaaatgtgttgaatatgctgaacgaagcgaggaaaaattctgatgaagaaagaatgagaagtaaaatttggtacgattcccagccgaaagtgacggctaacaaatttgaagcggggcaacgcgtaatggttgcctttcccggactgaatcgccgatctcggcacaagaaatttttgtggtctcatttcgggccttatcttatcctagaaattaacgaatcgtcggcatttttagtcccaattgacaacagaaatgctgagcccataaaagttccgattgagcgtctaattcgaattcctccaggaatcccggacatttcaacacttccaaaggggaaaaacccatttaaaaatgcgttaaaatcattaattgtcagcattttatcgagttttgaagtctgtgaatcagatggacaaatggccccattatga

SEQ ID NO: 71271 - DNA, 906 bp, Heterodera glycines
atgacagccgcaagaagtttcgtcaaatcaataattgaaggagcgccaaaagaggaactccatctgttcgtgaccaaaaagggagactatgtggcgacaggacaatgtccaactgaagaagaccaaatgaaggcgctggagtgttggttcgaaaagtgctccgtggcaaagcatgctttggaagagagcggattcaaaaaaatcggcatgtacgaacccgtcggactcaatcatttagccgattctgagaagaagaaatgggaagaagcgatgggagagacaccgtgggtgctggagaaattgagggccaaaatcattcacaaggccacaaaactgatcgccttgccacgtgtcataatcggagattcgacagcccaccaattggccgaaatcttggaccaaacggcggtgatcgggccaaaaaatggaacattggcggagacagtgcgaagcctgaagcccgtggtgctctccagcaaagtgaaggccgcactgatcattgtcggacgagattcactcttgggcggagaaaccattgcagtgatgatggagcaatacgagatgattgccaatttgtgccgccgattcccgcaagtgaagttcttttggacatgcccaccgtacgtgcacgacaaacacgacgagtacgaagaactgatcgaaagcttggtgccgatgatgagccaaaaaccttttcttcctgtttgggtgacagaaagtgacaacggatggactgatgaaagaggccggtttgcgagcgctgaaggcatggctgttcacccaatccgacttcccgggcgatcagaagctgaaaattcggtcaattcgatcgaccgttcgtgccgttgctacgataggtctgggggaccatcgccaagcaagcacttcgtctttggccgtaaatga

SEQ ID NO: 71272 - DNA, 1333 bp, Heterodera glycines
atggtgctaggtctgtgcgaaacttggcttactaataatgaaacaataattttctcagaccaaacgttaaatgaaaattatgtaatcttttcggccataagaaataacagtaaaggtaaagggggtggaacctcacttttaattaataaagcaattgaaccatattttacccaaactttttcaaaatttgggtgcgaaatttctatcgttaaactaaaaaatacaaaaaatataactattatatgtctataccggccccctaacaccaaattgaaacctacaaaatctctttttttacttctagaaaaatatataacaaacaatacgattatcataggagactttaacattggcagcaaagatataacatgggttaacaatattcctgtacctcataccggtctaggaataacttttcttgacttttttaataaattttcacttaacactaatattataggcccaacaagaggaaattcaattcttgatctttgtctttttacaaaccctgatttagtctcttcaattgaactaaaggatagtattgttttttcagaccattcagcattgtactttaatattgatattcctttccaaagacaaaaacccccaaaaattacggtcagaaatttcacccagtctaaaattaaagcattcaattcttatttactctccaatttatcttcatctctaactaccacatatactttggagagtaaatataatgtttttgctaatacaattcaaaatgcccttgatctttttattccaaaaaatacatttgtcaaaaatagacctccaaattttccgttatcacttagatcatcaataaaagaaaaagcttgtatttggcgtaaaatgaaaaaagatcctgttaaatttaaaccaatctatgattccttagctctccatattaaaatccaagttaaaaaattttacgaaaacagacaaagaaaatttctttctgcaaatccgattaatctttataaaattattagaaaacacaacttttccagtacttctattccatctatagaaaccgaaagtggttttatttttgatgatttcgaaaaagcacaatattttgcgaaatatttttctcaaactttttcaaacgatataagctcctcttatcctctcccaggaggggatcaagctcaagtttatctctctgaaataatttttgatgtttcggatactattcaaaaacttaatcttctggatggaaaaaacaatacgtctcctgatctcattaacaatcaaatacttaaaaactcttttcttcctcttgctaggcctataactgatcttttaaaattatcttttaacaccg

SEQ ID NO: 71273 - DNA, 335 bp, Heterodera glycines
ctttggagcattcgacaattgaaagtgttggcaccgcttgcgttggttgccaacttggtctatttgggagcggtgctcatcattctcgaatatatgatcatcccatttgtacagcatcgacgaattgcccgccgtcggcaatttgtccgatttgcccctctgttttggtactgtcattttcgctatcgaaggcattgccgtcgtacgttttctctccgttccgattgagcaatgaagcgcaataattgccaagaggtactgccagttgaaaatcatatggaccgaccgcaacatttcatctctccgaacggagttctgaaaccttcgtgtctgct

SEQ ID NO: 71274 - DNA, 258 bp, Heterodera glycines
aaaattccctcaaaaataaaaggtctattgcgcaccgccctccctatcatgctcgagagcatttgtatgtgtataaaatttatcaaaaaaagagatagccatttttctgggataacctctaaatataaaaatcctctgtgaaataaaatggcgattgtgcacagccctccgtctcatacgcaagcgcttttgtgaggtataaaatttctcaaaaaaaaagatagacatttttctgggatagagtataaatttaaaaat

SEQ ID NO: 71275 - DNA, 304 bp, Heterodera glycines; identical to SEQ ID NO: 51570

SEQ ID NO: 71276 - DNA, 107 bp, Heterodera glycines
tataaaatttatcaaaaaaagagatagccatttttctgggatagagtataaatttaaaaattccctcaaaaataaaaggtatattgcgcaccgccctccctatcatg

SEQ ID NO: 71277 - DNA, 211 bp, Heterodera glycines
ccgacgcagcaagattatatcgagctgcacatcggcgcttcggagctgaatctgtatgccatggcggtgatggatcgcatcctgaaagagcaggcgatcaccgtcgacgtgccgcacggcgacgcctggctgcgggaagagggcagccgtccgctggtgctgatcgccggcggcaccggtttctcttacgcgcgttcaatcttgttgaccg

SEQ ID NO: 71278 - DNA, 61 bp, Heterodera glycines
tacaggctatagggaagctgttcctgaaggattcggtctccccataaatctgggcgcatcg

SEQ ID NO: 71279 - DNA, 164 bp, Heterodera glycines
aacgggcgcgaagcgcccgtctgaggccgcgaagcggccttaatagcccaacaaaatttagaaacgggcgcgaagcgcccgtctgaggtctcgaagctgccttaatagccaaacaaatttcagaaacagggcgcgaagcttccgtataagcttcaacaaaattt

SEQ ID NO: 71280 - DNA, 626 bp, Heterodera glycines
atgaacagtacgcagaagcaaatcttcatgggcacattggaattgattcaaaattcgatggaattcaaagagacacggaaggacaaggatttggtcggggaatatcaggtgaaagcaataaaaaaacaatgggaaataaaaagtattctaaataataaaagaaaatcggaaataaaatatagacttcagttattaggccgcactttaaaaacttttcctaaattactaccgaaaaataccttcaaatattaaataaatatttaagttaaataaaactttcacattttttaaataaaaattataatttaaaaaattaaagttaattaggtgtatgtaaatgcaaatttaaattcaataaataatattttatgataaaaagtcaagttgagctttggtatatttcaaaatgatgccaaaaaaaattaaaaattaattccatcaaaatggattttaaggacaaattgctggatgcaatgaacaaagttgcgtccgggttgcccgactcggccaagttgcaggcgatcatttcaggaggaagcccaatgccaattattatagcggaaaagccctttttcaacgcacccccaccaccaccagcagcaaatgaagatgatgatgcacaatga

SEQ ID NO: 71281 - DNA, 182 bp, Heterodera glycines
  unsure (1)..(182): unsure at all n locations
cttaagnttaaaaatttaggaaaaattatattctgaaagagaacaattaaagctattgaatgatattgaatgataccacgaaatattaatttggttgaatttgagccaagctattaatttaattattttacccattttttgttttcaaacccattggcagttttaagaaacgcactagcacc

SEQ ID NO: 71282 - DNA, 916 bp, Heterodera glycines
atgggtttcaacctgttcatacggcatgccgacctgcaccacgaggcggaaagcatgtgccaaatgtacaatcagctgacccccaaattcatggcatgcatggcacgcgcaaatgccgactctcgacgactgggcgccttcaacgcaatcaaaggtggatggagttgttttagcggcatttttctgatagggatgcttaagagtgggtgttttctgagaactcaagacagaaacaaagcccgagaatcgagaccaaaaaaaggttgagtaaatctgcggatcgactctcaagcagccgaccccgtaattttgagccgatccctgatttgttggcattccattactgaagagtctgaattgcgaacattgtttcgaaattggctaacattccacaattttgtccaagttgtgactcggatgaattgagctggtgattcgagactagattttaacacgagaatgaacaataagtcttcatttttgaatcccattgaaattccaaatttaatgccgtttaatatatgggccatcatttgccctccatattttttttcttcaaagtttgaaagtcaataataaacatttcagctgttggcttcaactcactgcagcttatccctaaaagcaacaacagtcagtggggtgccgaaatgcttaccaaattgattctgtcatttttggacgaattatttgaagtgccaggtaatttgattggtttgccaaaaaagcaataaaaaatatttatttttaaatttataatttttttttgaaatttaattaagaggataatggcgatgttgaagtgaatgaagaatatttctcaattgctgagcccatagattttggcgctttgtatgtggactttttgcgcgatttaatggaaagatcgcgggtgaaaaatggacaattgaagtaa

SEQ ID NO: 71283 - DNA, 743 bp, Heterodera glycines
atgggcgcctgctgctcccgtcagcggtggcgtaaagcggcatttccaccccgggatggcatcgcggacgcgatcagtggcacgagaaagaagcacaaggacggggaatggctgaagaaggacaaaaagctgcaaaaactgattgaatattcgggcgcacaccctgaagagctgagcggaattggtgcttatttaatccaacatttgaacaggtaatggaaatagattttgtcaaatttaatttataaatttttgctttttcagagaccttgacaagaaaaattacacacgagttgaggtgaattaataataattagaaattaacatgtaataatcaaatgtgagatgagtttattaatccgtctgcaaaatttgcattttgcattgtacatacttactgtatatataacgataccgtaattttcaaaagtaaggatttagcagggaatggaaaatgccaatttaacaaattgcacccataattgtactttctgaataagttgtttatgatgaaaagagtttagagcatgagaatgaacaatagggctacgtttttgaatctaatcaccaaaatgtcatttaataagtaacagatcaattttcaaacttatctttcaatcactcaaaaaacaggtggctgttaacattatggatttgttgttggagagttgtcgtcgtgcgcccagttggacagtgttggtggacaattgtctacagatggtcaaacatttggtgagaataaa

SEQ ID NO: 71284 - DNA, 130 bp, Heterodera glycines
atggaccttcaaaacagcatgagagccaggacaattaacactcataagacgcgcaaaatgatcaaaatgcgacttgaccggaataaacgaatttcaatgcgaaaagtggcactcgaaatcgggttgaacc
